United States Patent Application Publication US 2024/0409597 A1 - sequence listing, part 6

SEQ ID NO: 12097 - RNA, 2505 nt, synthetic construct
  misc_feature 1..2505: note = source = /note="Description of Artificial Sequence: Synthetic coding sequence"
  source 1..2505: mol_type = other RNA
atgaagcacaccttggctttgcttgcccctctgttgggactagggttaggcttggctctttctcagttggctgccggcgcgactgactgcaagtttctgggacccgccgagcacttaaccttcaccccagccgctagggctcggtggttagctccacgcgtcagggctcctggcttactcgacagcttgtacggcactgtccggcggttcttgtctgttgtacagcttaacccgtttcctagcgaacttgtcaaggccctgcttaatgagctggccagtgtgaaagttaatgaagtggtaaggtacgaggcaggctacgtcgtctgtgcagtgatagctggactgtacctgttattggtgccgactgcagggttatgtttttgctgctgccgctgtcatagacgctgtggggggcgggtaaagacggaacataaggcgctggcgtgtgaaagggccgcgctgatggtattcttgctcctcactacactccttttgcttattggagttgtgtgtgccttcgtcactaatcagcgaacccacgagcagatgggcccatctattgaggcaatgccggagacgctgctttcattgtggggcctggtatctgatgtccctcaggaacttcaggcagtcgctcagcagttcagcctgcctcaggagcaagtcagtgaagagctggatggggtcggcgtcagtatcgggagcgctattcatacgcagttaaggtcctccgtttaccccctattagctgctgtgggctccctgggacaggtattgcaagtcagcgtgcatcatctgcagactctgaacgccacagtggtagagctgcaagctggccaacaagacctcgagcccgccatccgtgaacacagagatagattgctggaactgctacaggaagcacgttgccaaggggattgcgccggggccctctcatgggcgagaactctggagcttggggccgacttcagtcaggtgccttcagttgaccatgtgctgcaccagctaaaaggcgtacccgaagccaacttttccagtatggttcaagaagagaattctaccttcaatgctcttcctgccctcgccgcaatgcaaacttcttccgtggtgcaggagttaaaaaaggccgtggcgcagcagcctgagggtgtgcgtaccctggccgagggatttcctgggctcgaggccgcttcccgctgggcccaggcgctgcaggaagtcgaagaaagctcccggccttacctccaggaggtccagcgatacgaaacttaccgttggattgtgggatgtgtcctctgctccgtggtactgttcgtcgtgttatgtaacctgctgggactaaatctgggcatttggggcttgtcagcccgggacgaccccagtcaccctgaggcaaaaggagaagctggggctaggtttttgatggccggcgttgggctttcttttttatttgccgctccactgattctcctcgtctttgccacctttcttgtcggagggaatgtacagactctggtatgccagtcctgggagaacggagagcttttcgaattcgccgatacaccagggaacctacccccctccatgaacttgtcacagctgttgggcctccgcaagaacattagtatccaccaggcctaccagcagtgtaaggagggtgctgccctatggactgtgctgcagctaaatgattcatacgacttagaggagcacctcgacataaaccagtacacgaataagctacgccaagagctccagtccctgaaggtggatacccagtctctggacctgctttccagcgccgcacggagagacttagaggccttgcagtccagtggtctccagcgtatccactatcccgattttctggtgcaaatccagagacctgtggtgaaaacatctatggagcagctggcgcaggaattgcaaggcttagcccaggctcaggataacagcgtcctcggacagcggctccaggaggaagctcaaggcctgcggaacctgcatcaggagaaggtagtacctcaacagtccctcgtcgcaaagctcaatttgagtgtgcgagccctagaatccagcgctccaaacttacaacttgaaactagtgatgtcctcgcaaacgtcacctatctaaagggcgagctccctgcctgggcagcccggattctgcgcaatgtgagcgagtgcttcctagctagagagatggggtatttctcccagtacgtggcatgggttcgcgaagaggttacacaaaggattgcgacttgtcagccactgagtggagcgctagataatagccgagtaatcctgtgcgatatgatggccgacccgtggaacgcattctggttctgcctcgcttggtgcacctttttccttattcccagtattattttcgctgtgaagacttccaagtatttcagacccatccgtaaaaggctgtcctccacatcttccgaggaaactcagctgtttcatataccccgtgtgacctcgctcaagctctag

SEQ ID NO: 12098 - RNA, 216 nt, synthetic construct
  misc_feature 1..216: note = source = /note="Description of Artificial Sequence: Synthetic coding sequence"
  source 1..216: mol_type = other RNA
atgacccagctcctgcttttccttgttgcgctgctagtgctcgggcacgtacctagtggacgctctgagttcaaaagatgttggaaggggcaaggcgcctgccagacttattgcacaagacaggagacctatatgcacttgtgccccgacgccagcctgtgctgccttagttacgcccttaaacccccgccagttccgaagcatgaatacgagtag

SEQ ID NO: 12099 - RNA, 1377 nt, synthetic construct
  misc_feature 1..1377: note = source = /note="Description of Artificial Sequence: Synthetic coding sequence"
  source 1..1377: mol_type = other RNA
atggaagcaacgggaactgatgaagttgacaaactcaagacaaagtttataagcgcttggaataatatgaaatattcatgggtcctgaagacgaaaacatacttctcccgcaattcacccgtgctgctactgggcaagtgttaccattttaagtatgaggacgaggataagactttacctgccgagtccgggtgtacaatcgaggaccacgtaatcgctgggaatgtggaggagttccggaaagatttcatctcccggatctggcttacttacagagaagagttcccccagatagagggtagtgccttaactacggattgtggctggggatgcacacttcgcaccggtcagatgctgctggcacagggcctcattcttcacttcctgggaagggcttggacatggcctgacgcacttaacatcgagaattccgactccgaatcctggacctcacatacggttaagaagttcacagctagcttcgaagccagtctgtccggggaaagagagttcaaaaccccaaccatttctttaaaagagaccatcggaaaatacagtgacgaccatgaaatgagaaacgaagtgtaccaccggaaaatcatcagctggtttggcgacagccctctcgcactctttgggctgcatcagttaattgaatatggtaagaagagcgggaaaaaggctggggattggtacggccccgccgtcgtggcacacatacttaggaaggccgtagaggaggcgcgccacccagatctccagggcataaccatctacgtggcccaggactgtaccgtctacaatagtgacgttatcgataagcaaagcgcttcaatgacaagtgacaacgccgatgacaaggctgttatcatactggtgcctgtgcgtcttgggggggagaggacaaacaccgattacctggaatttgtaaaagggattctgagcttagaatactgtgtgggaatcatcggcggcaaacctaaacagtcatattattttgccggcttccaagacgatagccttatttacatggacccccattattgccaatcctttgtggacgtctcaatcaaagactttcccctggagactttccactgtccctcccctaagaaaatgagctttcggaaaatggatccgtcctgcacaattggcttctactgtcggaacgtgcaagattttaaacgcgcatctgaagagatcaccaaaatgcttaagttctcttcgaaggaaaagtacccactcttcacatttgttaatggccattcaagggactatgatttcacatccaccaccactaatgaggaggatcttttttccgaggacgaaaagaagcaacttaaaagatttagcactgaggaattcgtgctgctgtag

SEQ ID NO: 12100 - RNA, 342 nt, synthetic construct
  misc_feature 1..342: note = source = /note="Description of Artificial Sequence: Synthetic coding sequence"
  source 1..342: mol_type = other RNA
atgcgtcaacgactcctccctagtgttacatctctgctactggtggcgttgctgtttccaggatcttcacaggcgagacacgtcaatcattctgcgactgaagctttgggagagctgcgggagagggcacctggccagggaaccaacggcttccagctgctgaggcacgccgtgaagcgcgatctgctgccaccacgaacaccgccttatcaggaacccgcatccgatctgaaagtagtagactgtcgccggtctgaaggattctgccaagagtactgcaactacatggaaactcaggtcggctactgttcaaaaaagaaagacgcttgctgcctacactag

SEQ ID NO: 12101 - RNA, 258 nt, synthetic construct
  misc_feature 1..258: note = source = /note="Description of Artificial Sequence: Synthetic coding sequence"
  source 1..258: mol_type = other RNA
atgaaaaaagttctgttgctgataactgccattctggccgttgctgttggattccccgttagtcaagaccaggagagagaaaagaggagtatttcagactccgatgaactggccagcgggttctttgtctttccctacccttacccctttagacctctccccccgattccttttccacgattcccatggttccggcggaattttcccatcccaatacccgagagtgctcccacaacaccactgccttcagagaagtag

SEQ ID NO: 12102 - RNA, 264 nt, synthetic construct
  misc_feature 1..264: note = source = /note="Description of Artificial Sequence: Synthetic coding sequence"
  source 1..264: mol_type = other RNA
atggcagtttcagtgctgaggctcacggtagtattgggtctcctcgtcctcttcctgacctgctacgcagatgacaagcccgataagcctgacgacaaacccgacgacagcggtaaagaccctaagcccgactttccaaaattcctctcactgcttggtacggaaatcatagaaaacgccgtggagttcattctgcgctcaatgtcacgatcaacaggattcatggaatttgacgacaatgaaggcaagcattccagtaaatag

SEQ ID NO: 12103 - RNA, 945 nt, synthetic construct
  misc_feature 1..945: note = source = /note="Description of Artificial Sequence: Synthetic coding sequence"
  source 1..945: mol_type = other RNA
atgtcctccgaagccgagacacagcaacctccagccgccccacctgccgcccctgccttgtcagcagccgataccaagccgggtacaacaggcgctcaaggggctgtggccagggcacacataggaggagcagggggagacaagaaggtaatcgctacaaaggtcctgggcacagttaagtggtttaacgtgcgtaatggttacggcttcataaatagaaatgatacaaaagaggacgttttcgttcaccaaacagcaattaaaaagaataatccgagaaaataccttagatcagtgggtgatggagaaactgtggagttcgacgtagtagagggtgagaagggggctgaggccgcaaatgtgacaggtccagggggcgtccccgtgcaagggagcaaatatgcagcagaccggaaccactatcgacgttatccgagaaggagaggcccgcctcgcaattatcagcagaactatcagaatagcgaatccggggaaaagaatgagggctccgaatctgcaccagagcgcccgaataatgccgggccgcaggctaaggtgccaaccctgttacacgccgagtatgggcggcgtccacagtactcgaatccaccagtgcagggtgaggttatggagggcgccgacaaccagggggccggagaacagggtagacctgtgagacagtgcatcggcgacatcgaccatgattctgctggggcactgcttgccaggcagcctcgcgaagacggaaatgaggaggacaaagagaaccaaggcgacgaaacacaggggcagcaaccaccccagcgaagataccgcagaaactttaactacaggagaagaagacctgaaaaccctaaaccgcaggacggtaaagagacaaaggcagcggatccaccagcagaaaattccagcgcgcccgaggccgagcaggggggggctgagtag

SEQ ID NO: 12104 - RNA, 636 nt, synthetic construct
  misc_feature 1..636: note = source = /note="Description of Artificial Sequence: Synthetic coding sequence"
  source 1..636: mol_type = other RNA
atggtattccttaaatttttttgcatgagtttcttctgccatttatgccagggatacttcgatggccctttgtaccccgaaatgtcgaacggaaccctacaccactactttgtgcccgacggcgactatgaagaaaatgatgaccctgaaaagtgtcagctgctcttccgggtctcagaccatagacggtgctcccagggcgagggtagccaagtaggttccttactgtcactcactttgcgggaggagttcactgtattgggtagacaagtggaggatgctgggcgagtgctggagggaatcagtaaaagtatctcctatgatctggacggagaggagtcctacggaaagtacctaaggagagagtcacatcagattggcgatgcgtactcaaacagcgacaaaagtctgactgagctggaatcaaaatttaaacaagggcaggagcaagacagtaggcaggaaagcaggttgaatgaggatttcctcggcatgctggtgcacacaagatccctcctcaaggaaacattagatattagtgtaggcctgagagacaagtatgagctcctcgctctgactataagatcacacggcactaggctcggtcgactgaagaatgactatctcaaagtgtag

SEQ ID NO: 12105 - RNA, 1566 nt, synthetic construct
  misc_feature 1..1566: note = source = /note="Description of Artificial Sequence: Synthetic coding sequence"
  source 1..1566: mol_type = other RNA
atgttgtgcgcgcttctgctgcttccgtcccttctaggggctacccgcgcctctcccacctcaggccctcaggagtgtgctaaaggttctacagtctggtgccaggatctgcagacggccgcaaggtgtggcgctgtaggatattgtcagggagccgtttggaataagcccaccgcgaaaagtctaccctgcgatgtttgtcaagacattgctgctgcagctggaaacggactgaatccagatgctacagaaagtgacattttagcattggtcatgaaaacctgcgagtggctcccctcacaagagtcttccgcggggtgtaaatggatggtcgatgcccacagctccgcaattctgagtatgctccggggagcgccagatagcgccccggctcaggtctgtaccgcgttatcactgtgtgaacccttgcagcggcatttagctaccctgagaccattgtccaaagaagatacatttgaggcagtggccccttttatggcgaacgggcctctgaccttccaccctagacaggcgcctgagggagccctctgtcaagattgtgtgcgccaggtgtcaaggctccaggaggccgtgcggtcaaatctgaccctggccgacctcaatatccaggaacagtgcgaatccctaggacccggtctcgcagtcctctgtaaaaattacttattccagttctttgtacccgctgaccaggctctaagactactgcctccgcaggaattatgtaggaaagggggtttctgcgaggaactcggagctccggctcggctcacacaagttgtagctatggacggggttccgtcactggaactaggccttccgcgaaaacagtcagagatgcagatgaaagccggagtgacttgtgaagtgtgtatgaatgtggtgcagaagttggaccactggttgatgagtaactcttccgagcttatgattacacacgcactggagagagtgtgttccgtaatgccagctagcattacgaaggaatgtattatacttgtggatacttatagcccgagtttagttcagctggtcgctaagatcactcccgagaaagtgtgtaagttcattagactgtgcggaaatcgcagaagagcccgtgctgtgcatgacgcatacgccatcgtgcccagcccggaatgggatgctgaaaaccagggatctttttgcaacggctgcaagagactgctgaccgtctcctcgcacaatttggaatcgaagtctacaaaaagagatatactcgttgccttcaagggaggttgcagcattctacccctcccatacatgatccagtgcaaacactttgtgacacagtatgagcccgtacttatagaatcccttaaggatatgatggaccccgtcgcggtgtgtaaaaaagtgggcgcctgtcacgggccaagaacacctctcctcggtaccgaccagtgcgcactcggcccatcattctggtgccgctctcaggaagccgccaaactctgtaacgccgtgcagcattgccagaaacacgtctggaaggaaatgcatcttcatgccggcgagcatgcctag

SEQ ID NO: 12106 - RNA, 2127 nt, synthetic construct
  misc_feature 1..2127: note = source = /note="Description of Artificial Sequence: Synthetic coding sequence"
  source 1..2127: mol_type = other RNA
atggcggcagcagccgtagcagctgccgccgcagccgccgcggcggcgtctctgcaggtgctggagatggagtcaatggaaactgcggccgcagggtccgctggcctagctgctgaagtgcgcggatctggaacggtcgactttgggccgggacctgggatttctgctatggaggcctcgggaggtgaccccggacccgaagccgaggatttcgagtgctctagtcactgctccgagctgagctggcggcagaatgaacaacgcaggcagggattgttctgtgatatcacgctgtgttttggaggagcaggggggcgcgaatttagggctcatagatctgtgctagctgcagccactgagtatttcactccactgttgtcagggcagttttccgagagcaggtctggccgtgtggagatgagaaaatggtcatctgagccaggtcccgagccagatacagtcgaggctgtgatcgaatacatgtataccggcaggatccgcgtgtctaccggctccgtgcacgaggttctggaactagctgaccggtttctactgattaggctgaaggagttctgtggggagtttctgaagaagaaactgcacctaagtaattgtgtagccattcatagcttggcccatatgtacactctgtcccagctggctcttaaagccgctgacatgattaggcgcaattttcataaagtcatccaggatgaagaattttacactctacctttccacttaatccgcgactggctctctgacctagagatcacagtggatagcgaagaggtgctgtttgagacagttctaaagtgggtgcaacggaacgccgaggaaagggaacgttatttcgaggagttatttaagctactgcgactgtcacagatgaagccaacatacctgacccgacatgttaagccagaaagactagtggctaataacgaggtatgcgtgaagctggtggcagacgcagttgagcgtcacgccttaagagctgaaaacatccagagcggcacctgccagcaccccacttcacatgtctcactgctccctcgatacggacagaatatggacgtgattatggtaattggtggtgtttccgagggcggggattatctctccgaatgcgtaggttattttgtagacgaagataggtgggtgaatctgccacacatccataatcacctggacggacatgctgtcgctgtcacggagtcttatgtgtatgtcgccggcagcatggaaccagggttcgcgaagacggttgagcgctacaacccaaatctcaacacgtgggaacatgtgtgttcgctcatgaccagaaagcactcttttggactcaccgaagtgaaaggaaagttgtattcaattggggggcacggaaatttctcaccaggatttaaagatgtcacagtctataaccccgagctcgataaatggcataacctagagagcgcaccaaagatattaagagacgtgaaggctctcgcgatcgaggacaggttcgtctatattgcagctaggaccccagtcgatagggataccgaggatggactgaaagcagtcattacttgttatgatacagaaactcgccaatggcaggacgtggaatcactgcccctcatcgacaactactgtttttttcagatgtcagttgtcaactctaacttttatcaaacagcatcatgttgcccgaagtcctattgcctagagaatgaagaggccgtgcgtaaaattgcttcgcaagtgtccgacgagatattggagagcctccctccagaagtgttaagtatagagggggccgccatttgctattacaaagacgacgtattcattattggcggatggaaaaatagtgatgatatcgacaagcagtacagaaaggaggcctatcgctactgcgctgagagaaagcgctggatgctgttacccccaatgcctcagccaagatgcagggctacagcttgccatgtgcgcataccttaccgttatctccatggcactcagagataccccatgccccaaaatctcatgtggcagaaagatcggattcgccagatgcaagagatacaccgtcacgcattgaatatgcggagagtaccctcctctcagattgagtgctag

SEQ ID NO: 12107 - RNA, 1578 nt, synthetic construct
  misc_feature 1..1578: note = source = /note="Description of Artificial Sequence: Synthetic coding sequence"
  source 1..1578: mol_type = other RNA
atgagcggcaactgggtccatccaggacagatcctgatctgggcgatttgggtcttagctgcccctaccaaaggcccatccgccgaaggacctcaaaggaatacccgactaggttggattcagggtaagcaggtgaccgtgttgggttcacccgtcccagtgaacgttttccttggggtcccgttcgccgctccgcccctggggtcactccgattcactaaccctcaaccggccagcccttgggacaacctgagagaggccacttcttaccccaatctctgtcttcaaaattccgagtggctgctcctggaccaacacatgctgaaagttcactatcctaaattcggagtctcggaggactgcctgtatcttaatatctatgcaccagcgcacgctgatacggggtccaagctgcccgttctcgtctggttccctggcggagccttcaaaacaggatcagcatcaattttcgatggctccgccctcgcagcttacgaagatgtgctcgttgtcgtggttcaatacagacttggtattttcgggttttttaccacctgggatcagcacgcacccggcaattgggcttttaaagaccaggttgccgccttgtcttgggtacaaaagaacattgaattctttggcggggacccatcttcggtgacaatctttggagaaagcgctggagccatcagcgtgtcctcattaattctcagccccatggccaaagggctcttccacaaggccatcatggagtccggagtggctatcataccatacctcgaagcacacgattacgagaagagtgaggacttgcaagttgtcgcccacttttgcgggaataacgcttctgatagtgaggccctgttgcgttgtctacggacgaaaccgagcaaggagctcctcactttgtcccaaaagactaagtcctttactcgagtcgtcgacggtgccttttttccaaatgagcccttagatctgctctcacagaaggccttcaaagcgatcccttcgatcataggcgtaaacaatcacgaatgcgggtttctgctgccaatgaaggaggctcccgaaattctctccggcagcaataagagtctcgcgctgcacctaattcagaacatcttgcacatccccccacaatacttgcacctggtggcaaacgagtatttccacgacaaacactcattgactgagataagagacagcttactggatttactgggagacgtttttttcgtcgtacctgctctgatcacggccagataccacagggagggcgctacagaagaagaaaaactccttagcagaaagatgatgaaatattgggctactttcgccaggaccgggaacccaaatggtaatgacctcagcctctggcccgcctataatctgacagagcaatatctgcagctggatctcaacatgtctctcgggcagcggttaaaggagcctcgcgtggacttctggaccagcacaatccctctcatactttctgcaagcgacatgctgcactcgccgttgtcgagcctaacatttctcagcttattgcaacccttcttctttttttgtgccccctag

SEQ ID NO: 12108 - RNA, 900 nt, synthetic construct
  misc_feature 1..900: note = source = /note="Description of Artificial Sequence: Synthetic coding sequence"
  source 1..900: mol_type = other RNA
atggtaagatgtctcggccctgcactgctgctactgctccttctagggtctgcctccagcgtgggcggaaatagatgtgtggatgccgcagaggcttgtacggcagatgccagatgccagcgtctgagatctgagtacgtagctcagtgtctggggcgagctgctcagggaggttgtcctagggctagatgccggcgcgccttgcggaggtttttcgcgcggggccctccagcactgacacacgcgctcctcttctgtccatgcgctggtcccgcgtgtgcagaacggcgaagacagacctttgtcccttcatgtgccttttcaggaccagggccggctccaccttcctgccttgaacccctgaatttctgcgaacgatcgagggtatgtagatgtgctcgcgcagctgctggaccctggcgagggtggggcaggggacttagtcctgctcaccgcccccccgccgcacaagcgagtcctccagggctttccggactggtccatccgtcagctcaacgcccaagacgccttccggcaggacccgggagaccccttcctgcacgactgcgtgggccacgaggcgtacccgcaggaaccgccgtcacaccaaattacgtcgataatgtgtctgcacgggtggcaccctggtgtgattgtggcgcttctggtaacagaagggaggactgcgaagcgttcaggggcctattcacgcggaacagatgcctggacggagcaatacaagcgtttgccagcgggtggccacctgtgttgttggatcagctcaacccccagggtgacccggaacattccctgcttcaggtatctagtaccggccgcgccctcgaacgccgctccttactctctattcttcctgtcttggcccttcctgctctgctttag

SEQ ID NO: 12109 - RNA, 270 nt, synthetic construct
  misc_feature 1..270: note = source = /note="Description of Artificial Sequence: Synthetic coding sequence"
  source 1..270: mol_type = other RNA
atgcaagcgtgtatggttccaggcctggctctctgcttattgcttggccccctggctggagcaaagcctgttcaggaagaaggagatccatacgcagagctccctgctatgccctactggccttttagcacatcagacttctggaactacgttcagcactttcaagcgcttggcgcctaccctcagatcgaagacatggctaggacctttttcgcgcattttccactggggagtacactgggttttcacgtgccataccaggaggactag

SEQ ID NO: 12110 - RNA, 663 nt, synthetic construct
  misc_feature 1..663: note = source = /note="Description of Artificial Sequence: Synthetic coding sequence"
  source 1..663: mol_type = other RNA
atggccagcgagcgactgcctaataggccagcttgccttttagttgcgtcgggcgccgcagagggagtttccgctcagtcctttctacactgtttcacaatggcatcaaccgcctttaacctgcaagtggctactcccggtggcaaagccatggaattcgtagacgtaaccgaaagtaatgcccgatgggttcaagatttccgcctcaaagcttacgcttctcccgcaaaactggagtcaatagacggggcaagatatcacgcgctcctgatccccagttgtcccggagccctgactgacttggcttccagcggctccttggctcgcatactgcagcacttccacagtgagagtaagccaatatgtgccgtcggtcacggtgtggcagccctgtgctgcgccactaacgaggacagatcgtgggttttcgactcttatagcctgaccggaccgagtgtttgtgagttagtaagggccccaggattcgcccgtctgcctctggtcgtggaggactttgtgaaagattcgggagcttgcttcagcgcttccgagccagatgccgtccatgtggtgttagacaggcatttagttacaggacaaaacgctagttcaacagtccctgcggttcagaacttgctctttctttgtggaagtagaaagtag

SEQ ID NO: 12111 - RNA, 1158 nt, synthetic construct
  misc_feature 1..1158: note = source = /note="Description of Artificial Sequence: Synthetic coding sequence"
  source 1..1158: mol_type = other RNA
atgtgggggttccgcttactgagatcccctcctctcctactactgttgcctcagttaggaattggcaatgcatcctcctgcagccaggcgcgtacaatgaatccaggcggaagtggaggagctcggtgttcgctttccgctgaagtacggcgcagacagtgcctgcagctatcgaccgtgcccggcgcagacccacagcgatcaaatgaactgctcctgctagctgctgctggcgaagggctagaaaggcaagatcttcctggtgatcctgcaaaggaagagccccaacctcctcctcagcatcatgtcctgtacttccccggagacgtccagaactaccacgagattatgactcgtcatcctgaaaactatcagtgggagaattggtccctggagaatgtggctacgatcttagcccatagattccccaacagttacatttgggttataaaatgttcgaggatgcatctgcataaattcagttgctacgataacttcgtcaaaagtaacatgttcggggctccagagcacaatacggactttggcgccttcaagcacctgtatatgctgttggtcaacgcatttaacctgagccaaaattccctttctaagaagagccttaatgtctggaataaggatagcatagccagcaactgtaggagctccccgtcccatacaaccaatggatgtcagggggagaaagtgaggacctgtgaaaagtctgacgaatctgccatgtccttttacccaccatcgttaaacgatgcatcctttacactgattgggttttccaaaggctgtgtagtgctgaaccagttgctttttgaattaaaggaagctaaaaaagacaagaatatagatgcgttcattaaatcaattcgtacaatgtactggcttgatgggggacacagtggggggagcaatacatgggtgacatatcctgaagtattgaaggagttcgctcagaccgggattatcgttcatacccacgtcacgccataccaagtccgggatccaatgcgttcttggatcggtaaggaacacaagaaattcgtgcaaattctgggtgacctcggtatgcaagtgacgtctcagatccacttcacaaaagaggcccctagcattgaaaatcatttcagggttcacgaggtgttttag

SEQ ID NO: 12112 - RNA, 936 nt, synthetic construct
  misc_feature 1..936: note = source = /note="Description of Artificial Sequence: Synthetic coding sequence"
  source 1..936: mol_type = other RNA
atgcggggagccgccagagccgcatggggtagggctggacagccgtggcccagaccacctgcccccggccctccccctccacctctccccctcttgttattactactcgcagggctgttgggtggagccggcgctcaatacagttcggataggtgcagctggaaaggcagtgggctgacgcacgaggctcacagaaaggaggtggagcaggtttatctccggtgcgccgccggagccgtggagtggatgtaccctaccggagccttgatcgtgaaccttcggcccaacacgttcagtcctgcgaggcatttgaccgtatgtatcaggtcatttacagacagttcaggggctaacatctatttagaaaagactggcgaactgagactccttgtgcccgacggcgacggacgcccaggacgcgttcagtgctttggtctagagcagggaggcttgtttgtggaggctaccccccagcaggatatcggaagaaggaccacagggttccagtatgaattggttagacggcaccgcgcatcagacctgcacgaactttccgctccatgtcggccatgttccgataccgaagtccttctggctgtgtgtacgtccgatttcgcagtcagaggatctatccagcaagtgacccacgaaccagagaggcaggattccgccatccatctgcgcgtctcacggctgtatcgtcaaaagtcgagggtcttcgaaccagttccagagggcgacggccattggcaggggcgggtaagaacattactggagtgcggcgtgagaccaggacacggcgatttcctcttcacaggccacatgcactttggcgaggcccgcctgggctgcgccccccggtttaaggattttcaaaggatgtatcgagatgcacaagaaagaggattgaacccgtgtgaagttggaacagattag

SEQ ID NO: 12113 - RNA, 1221 nt, synthetic construct
  misc_feature 1..1221: note = source = /note="Description of Artificial Sequence: Synthetic coding sequence"
  source 1..1221: mol_type = other RNA
atgggacctagcacaccactcctgatcttattcctcctgagttggtctggaccattgcagggccagcaacatcatctggtggagtacatggagaggaggctcgcggcactagaggaaaggcttgctcaatgtcaggatcaatccagtagacatgcagccgagttaagagattttaagaacaagatgcttccacttcttgaggtcgctgagaaagaaagggaggccctacgaaccgaggcggataccataagtgggcgggtggaccgactggagcgagaggtggattaccttgagacacagaatcccgctctgccctgcgtggagttcgatgagaaggtgacaggcggtccaggcaccaagggcaaaggaagaagaaacgagaagtacgacatggtgacagattgcggctatacgatttctcaggttcgatctatgaagattctcaaacgatttggagggcccgccggactgtggactaaggatcccctcggccaaactgagaagatttatgtgttagatggcactcaaaatgacaccgcatttgtgtttccgcggctgagagatttcacgctggctatggcagcccgtaaggcctccagggtgcgtgtgccattcccatgggtcggaaccgggcagctcgtgtatggggggtttctatatttcgccagacggccacccggtcgacctgggggaggcggggagatggagaacacgctgcagctcatcaagtttcatttggctaacagaactgttgttgactcatctgtgtttcccgccgagggcttaattcccccatacggtctgaccgccgacacatacattgacttagctgcagatgaggaaggactgtgggccgtgtatgctactcgggaggatgaccgccacctatgcttggccaaactcgacccccaaaccctggatacagaacagcaatgggatacgccgtgtccccgagaaaatgctgaagcagcgtttgtcatttgcggcaccctgtatgtcgtttacaatactcgacctgcttctcgggccagaatccagtgctcctttgacgcatccggcactctgactccggagagggctgccttgccatacttcccacgacgctatggtgcccacgccagcctgcggtataatcctcgcgaacgacaactctatgcttgggatgatggttaccagatcgtctacaagctagaaatgcgaaaaaaggaagaagaggtgtag

SEQ ID NO: 12114 - RNA, 900 nt, synthetic construct
  misc_feature 1..900: note = source = /note="Description of Artificial Sequence: Synthetic coding sequence"
  source 1..900: mol_type = other RNA
atgggtggaccaagggctctgttagccgcactgtgggctttggaagccgctggcacagccgccctgaggatcggcgcattcaatatccagtctttcggggactctaaggttagtgatccagcatgtggatccattatcgctaagatactcgccggctatgatctcgccctcgtgcaggaggtgcgcgatcctgacctctccgccgtttccgccctgatggaacagatcaatagcgtgagtgagcacgaatatagttttgtcagttcacaacccttaggccgggatcagtacaaggagatgtacctgtttgtttataggaaagatgctgtctccgtcgtggacacatacctttaccccgacccagaagacgtcttttcgcgggagccatttgtggttaagttctctgcccccggcacgggtgaacgagccccccctcttcctagccgtcgggcccttacaccacctcctttacccgccgccgctcagaatctggtgttgatccctctgcacgcggccccacaccaagcagtagccgagattgacgcactttacgacgtgtatcttgatgtgatcgacaagtgggggactgatgatatgttatttttaggcgatttcaatgctgactgctcatatgttagggctcaagactgggccgccatccgactccggtcttccgaggtgttcaaatggctaatccccgattcggcggacaccacagtgggcaacagtgactgtgcttacgacagaattgtagcttgcggggcccgcctcagacgcagccttaagccccagagcgcaactgtgcacgatttccaagaagagtttggacttgatcagactcaagccctggcaatttccgatcactttcccgtggaggtcactttgaagtttcacagatag

SEQ ID NO: 12115 - RNA, 1617 nt, synthetic construct
  misc_feature 1..1617: note = source = /note="Description of Artificial Sequence: Synthetic coding sequence"
  source 1..1617: mol_type = other RNA
atgggttgtttatggggtcttgccctgccattattcttcttctgttgggaagtgggcgtgagcgggtcttccgcgggcccaagcacacgtcgggccgataccgccatgacaactgatgacacagaagtgcctgccatgacactagcccctggccatgctgccctagaaacacaaaccctctctgctgaaacctcttctagagcttcaactcccgcaggccctataccagaggcggaaacacgcggtgccaagcggatctccccagcaagagaaacaaggtccttcaccaagacgtctcctaacttcatggttttgattgccacaagcgtggaaaccagcgccgcgtctggtagtcctgagggagccggcatgaccaccgtgcagaccattaccggaagcgatcccagagaggctattttcgataccctctgtaccgacgattcaagtgaagaagccaagactctgaccatggacattctgaccctcgcccacacctcgactgaggctaagggactgagttcggaatcaagcgcatcttccgactcaccccatcccgtgatcactcccagcagggcttctgagtctagcgcatcctccgacgggccgcacccagtgatcacaccctcccgtgcatccgagagctccgcatcatccgacgggccccatccggttatcaccccctcgtggtccccgggcagtgacgttacactcctcgcagaggccctcgttaccgtgacgaacatcgaggttatcaattgttcaattaccgaaatagaaacgaccaccagtagtattcccggcgcatcggataccgacctgattcctaccgagggcgtcaaagcaagtagcactagcgaccctcccgcattacctgactcaaccgaggcaaaaccacacattacagaagtgactgcatccgctgagacactgagcacggctgggacaacagaatcagcggccccagacgctactgtgggtacccccttgcctacaaactcagctaccgagagggaggtgactgcacctggtgccactacactcagcggagcccttgtgacagttagcagaaatccgcttgaagaaacgagtgcgctcagcgtggagacccccagttatgtcaaagtaagtggcgctgcccctgtttctatagaagctgggagcgccgtaggcaagacaactagtttcgccggaagcagcgcgtcttcatacagccccagtgaggcagctctcaagaactttacaccctcagagactcctactatggatattgcaacaaaaggcccatttcccacatctagggatcctttacccagcgtacctcccacaactacaaattcgtctaggggcacgaattccaccctcgctaagattaccaccagcgcaaagacaactatgaaaccgccaaccgccactccgactactgccagaaccaggcccactacagacgtgagcgccggggagaacggcggatttctgcttttgaggctgtccgttgctagccctgaggacctcaccgacccccgggttgccgaacgacttatgcagcaactgcatcgtgagctccatgcccatgccccacacttccaggtcagcctgctccgcgtgagacgcgggtag

SEQ ID NO: 12116 - RNA, 975 nt, synthetic construct
  misc_feature 1..975: note = source = /note="Description of Artificial Sequence: Synthetic coding sequence"
  source 1..975: mol_type = other RNA
atgagctcggaggcggagacacagcagccacctgcagcccccccagcagccccagcactgtcagccgcagataccaaacctggtacaaccggcagcggtgccgggagtggaggacccggaggtttgacaagtgctgccccagctggcggagataagaaggttatcgcaacaaaggttctgggtaccgtaaagtggtttaatgtgcgaaatggctatggatttattaaccgtaatgatactaaagaggatgtcttcgtccaccaaacagccatcaaaaagaataatccgaggaagtatctgcgcagcgtcggggacggagaaaccgtcgagttcgatgttgtcgagggcgagaaaggcgcagaagcggccaatgtgacgggtcccgggggagtcccagtacagggctcaaagtatgctgccgaccgcaatcactatcggaggtatccacggaggcggggacctccacgcaactatcaacagaattaccagaatagtgaaagcggcgaaaagaacgaaggcagtgagagtgcccccgaggggcaggctcagcagcggagaccctaccgcagaagaagatttccaccttactatatgcgccgaccctatggaagacgcccacagtactctaatcctcctgtgcagggcgaagtcatggaaggggccgataaccagggagcgggcgagcagggacgtcctgtgagacagaacatgtatcgtgggtatcgacccaggttccggagaggtccacctaggcagaggcagcctcgggaagacggcaatgaggaagacaaagagaatcaaggcgacgaaactcaagggcagcaacctccccagagacggtatagaaggaacttcaactacagacgaaggcggcctgagaaccctaaaccccaagatggcaaagaaacaaaagcggccgatcccccagcagagaactctagtgcgccagaggcagagcaaggaggagctgaatag

SEQ ID NO: 12117 - RNA, 210 nt, synthetic construct
  misc_feature 1..210: note = source = /note="Description of Artificial Sequence: Synthetic coding sequence"
  source 1..210: mol_type = other RNA
atgcgcatcttttactacctccatttcttatgttacgtgacttttatcctgcccgctacatgtactctagtgaacgctgatagatgtacaaagcgttatggccgctgcaagagagactgcctggaaagcgaaaaacagatcgatatctgctcactgcctcggaagatctgctgcacagagaaactgtacgaagaggacgatatgttctag

SEQ ID NO: 12118 - RNA, 342 nt, synthetic construct
  misc_feature 1..342: note = source = /note="Description of Artificial Sequence: Synthetic coding sequence"
  source 1..342: mol_type = other RNA
atgaagttgctaacaacaatatgtagactgaaacttgagaagatgtactctaagacaaacactagctcaacgatctttgaaaaggcacggcatggaaccgaaaaaattagcacagctagaagcgagggacaccatattaccttttcgcggtggaaatcctgtactgcaattggaggccgctgtaaaaaccaatgcgatgattctgaattccgcattagctattgcgcccggcctacaactcattgctgtgtaacggagtgtgatccaaccgaccctaacaactggatccccaaagacagtgttggaacgcaggagtggtatcccaaggactccagacattag

SEQ ID NO: 12119 - RNA, 3030 nt, synthetic construct
  misc_feature 1..3030: note = source = /note="Description of Artificial Sequence: Synthetic coding sequence"
  source 1..3030: mol_type = other RNA
atggatctaatccgaggtgtccttctgagacttttgctgctcgcaagctctttgggccccggcgctgtgtctctgcgggccgccattaggaagcccggaaaagtgggtcccccgctggatatcaaactgggggcactcaactgcacagctttctctatccagtggaaaatgccaagacaccctgggagtccaattttggggtacacggtgttctatagtgaagttggcgccgataagagcctccaggaacaactccacagcgtgccactctctagagacattccgactaccgaggaagttatcggggatctgaaaccgggaactgagtatcgcgtgtccattgccgcatattcccaggctggtaagggcaggctctcctccccgcgacatgtgacaactctgtctcaggatagttgcctgcctcccgccgcacctcagcagcctcacgttattgttgtgagtgactcagaggtggccctgtcctggaagcctggagccagcgagggaagcgcgcctatacaatattactccgttgaatttattagacccgatttcgataaaaagtggacatcaatccacgagagaatccagatggattccatggtaatcaaggggctagaccctgatacaaactaccaattcgcagtgagagctatgaatagtcatggacccagccctagaagctggccctccgatatcattcgaactctttgtcccgaggaggcaggcagcgggaggtacgggccaagatacatcacagacatgggtgcgggtgaagacgatgaaggctttgaagatgatctggacctcgatattagctttgaggaggtcaagccactgccggcgactaaaggagggaataagaagtttttagtagagtccaagaagatgagcatctctaacccaaaaaccataagccggcttattcctccgacctccgcatctttacctgtaactaccgtggcccctcaaccaatccccatccaacgtaagggcaaaaatggcgtggcaataatgtctcgccttttcgatatgccatgtgacgaaactctttgctccgccgatagcttttgcgttaatgattatacgtggggcggatctcgctgtcagtgcacactggggaaagggggtgaatcatgttcagaggacatcgtgatacagtatccacagtttttcggacactcctacgtcaccttcgaacctcttaagaatagttatcaggcgtttcaaatcacactggagttccgagccgaagcggaggacggcctactgttgtactgcggggagaatgaacatggtcggggcgacttcatgagcctggcgattatccgcagaagcctccagttccgtttcaactgtggcaccggcgtagcaataattgtgagtgaaaccaaaatcaagctcgggggttggcacactgtgatgttgtatcgagacggactgaatggactgctgcaactaaataacggtacaccagtaaccggccagtcacaaggacagtacagcaagattacttttcggactcccctctacctcggtggcgccccctcggcatactggttggtgcgcgcaacggggacaaataggggattccaggggtgtgtgcagtcgctggccgtcaacggccgcaggattgacatgagaccttggccgctcggcaaagctctgagtggggccgatgttggcgaatgttccagcggcatttgtgacgaagcatcatgtattcatggaggtacttgcacggcgattaaggcagacagctatatatgtctctgccccttgggtttcaaaggcaggcattgtgaagacgcattcacactgacgattccccagttccgagaatcgctccgttcttatgcggctacaccatggcccctggagccacaacattacctctccttcatggaatttgagattacattcagacccgactctggggatggggtactgctatacagctacgacaccggctcaaaggattttctgtctataaacctcgccgggggacacgtagaattccggttcgactgtggaagcgggactggggtgctgagatctgaagatccactgactctagggaactggcatgagctccgcgttagtcgtaccgctaagaacgggattcttcaggtggacaaacaaaaaatcgtggagggaatggccgagggaggctttacccagatcaagtgtaatacagacatcttcataggcggagtgcccaactacgacgatgttaaaaaaaactcaggagtactgaagccattctcaggcagcatccagaaaatcatcctcaatgatcgtacgatccacgtgaaacacgattttacatcaggcgtgaacgtagagaatgctgcacacccatgtgtgcgggctccctgcgcccacggcggcagctgccgtcctagaaaagaggggtacgattgcgactgtccactcggattcgagggtctgcactgccagaaggcaatcatagaagccatcgaaatcccgcagttcatcggcagatcttaccttacttatgataatcctgatatcctcaagcgggtcagtggttctaggagtaacgtctttatgcgcttcaaaacgaccgcaaaagacggactcctactatggcgaggagactccccgatgagaccaaattccgatttcatctctctcggattgcgggacggtgcactggttttcagctataacctagggtcgggcgttgcatctatcatggtgaacggatcctttaatgacggcaggtggcacagagtgaaggctgtgcgcgatggacagtccggcaagattaccgtcgatgactatggagccagaacgggaaaatcacctggaatgatgaggcagctcaatatcaatggcgcattgtacgtaggcggaatgaaggaaattgcactccatactaatcgccagtatatgcggggactggtgggttgcatctcccactttactctttcaacagattaccatatatcgcttgtggaggacgcggtggacggcaaaaatattaacacctgcggcgccaagtag

SEQ ID NO: 12120 - RNA, 1272 nt, synthetic construct
  misc_feature 1..1272: note = source = /note="Description of Artificial Sequence: Synthetic coding sequence"
  source 1..1272: mol_type = other RNA
atgtccgtgcgtggaatcctgcgcctaggaactcaggagtatccatcccctcttgaccctgaagtcggcccctactgcgacacccctactatgagaactctgtttaatctactgtggttggcgttagcctgcagcccagtacacaccaccctctctaaatctgatgctaagaaagccgcatctaaaacactgctggagaagagccaattctctgataaaccggtgcaggatcgagggctcgtggtgaccgacctgaaagctgagtctgtggtactcgagcatcgctcatattgcagcgccaaggctcgagatagacacttcgcgggcgacgttctcggatacgtgacaccatggaacagccatggttacgacgttacgaaggtcttcggttcgaaattcacacaaattagtcctgtctggctccaacttaaacggagagggcgcgagatgttcgaagtgactggattgcacgacgtggatcagggatggatgcgcgcagtaaggaagcacgccaagggcctgcatattgtgcctagattactgtttgaagactggacctatgatgacttccgcaacgtgcttgatagcgaagacgaaatcgaagaactgagcaagaccgtagtgcaggtcgcgaaaaaccaacattttgatggctttgtggtcgaggtctggaaccaattactctctcaaaaaagagtaggtctcatccacatgctgactcatcttgctgaagccctacatcaggcaaggctgctggccctgctagttatcccccctgcaatcactccggggactgatcagctggggatgtttactcataaagagttcgaacaattggctccagtgctggacggattctccttgatgacatatgattactccaccgcccaccaaccagggcccaacgctcccctgtcctgggtgcgcgcatgtgttcaggtgcttgatcctaaatcaaagtggcggtcaaagattttgcttggattaaacttttacgggatggattacgcaacttcaaaggatgcccgcgagccagtggtgggagccagatacatccagactctaaaagaccatcgtcctagaatggtttgggattcccaagcatcagagcactttttcgagtataaaaagtcaaggtcaggccggcacgtggtattctatcccacattgaagagcttacaagtccgcctggagctggcccgagagctcggcgtgggggtctcaatctgggagctcggccagggacttgattacttttacgatctgctttag

SEQ ID NO: 12121 - RNA, 1182 nt, synthetic construct
  misc_feature 1..1182: note = source = /note="Description of Artificial Sequence: Synthetic coding sequence"
  source 1..1182: mol_type = other RNA
atgcgaactctctttaatctgctttggctagcccttgcttgtagtcccgtgcacacaacgctgtccaaatctgatgcgaagaaagcggcatctaagaccctcttagaaaagagccagttctctgacaaaccagtgcaagatagaggactagtggtgaccgaccttaaggctgaatctgttgtcctggagcaccggtcatactgtagtgctaaggcacgagatagacactttgctggtgacgttctcggctatgtgaccccctggaactcacacggttacgatgtgaccaaagttttcgggtcaaagtttacgcaaatcagccccgtctggttacagctcaagcgaagaggcagggaaatgtttgaggttacgggactgcatgatgtggaccagggatggatgagagccgtgagaaaacacgcaaagggcctccatatcgtgccaaggctgctctttgaggactggacctacgacgacttccgcaatgtacttgactcagaggatgagattgaggaattaagcaaaactgtcgtgcaggttgcaaaaaaccagcatttcgacgggttcgtagtggaagtctggaatcagttactgtcccagaagagagtggggttaatccacatgctcacccatctcgctgaggcactccaccaagcccgcttgcttgctttgctagttataccccccgcaatcacccctggaaccgaccagctcggcatgttcacccacaaagaattcgagcagctggcacctgtcctggatggcttctctctgatgacttacgactactccaccgcccatcagcccggtcccaacgcacccctgtcctgggtaagagcgtgtgtccaggtgctggatcccaaatcaaaatggagatcaaaaatcttgttagggttaaacttctatgggatggattatgcaacctccaaggacgcccgcgagccagtcgtgggagcccgatacatccagaccttgaaggatcacagacctcgaatggtgtgggacagtcaggccagtgagcatttcttcgaatataagaaatctcgaagcggaagacatgtagtattttaccctaccctgaaaagtcttcaggtgcgcctggaacttgctagagagctgggcgtgggtgtgagcatctgggaactcggtcagggcctggactacttttatgatcttctgtag

SEQ ID NO: 12122 - RNA, 1959 nt, synthetic construct
  misc_feature 1..1959: note = source = /note="Description of Artificial Sequence: Synthetic coding sequence"
  source 1..1959: mol_type = other RNA
atggcttcagtggcgtgggccgtcctgaaagtgcttctgctgcttcctacacagacatggtcaccagttggcgccggtaaccctccagactgcgatgcccccctggcttcggctctaccaagaagctctttctcatcttcctctgaacttagtagctcacacggtcccgggttcagtaggttgaatcggagagatggggccggcggttggacccccctggtaagtaataaatatcagtggctgcagattgatctcggggagaggatggaagtgacagcagttgccacccagggagggtacgggtcatctgactgggtcacatcctatcttttaatgtttagcgatgggggcagaaactggaagcagtatagacgcgaggaatcgatatgggggtttccgggcaacaccaacgccgactccgtcgtccactatcggttacaacccccatttgaagcgcgattcctaaggtttctccccctggcatggaacccacgcgggagaattggaatgcggattgaggtatacggctgtgcatacaaaagtgaagtcgtttacttcgatggacagagcgccttactgtaccgattagataagaagcccctgaagcctattagggatgtgatcagtttaaaattcaaggctatgcagtccaacgggatcctgctgcatagggaaggacagcacggcaatcacattacattagagctaattaaaggtaagttggttttttttctgaactccggtaacgcaaaactgccctccacaatcgcaccagtgactctaaccttggggtccctgctggatgatcagcattggcatagcgttctgattgagttgctggatacacaagtgaactttaccgtggacaagcatacacaccatttccaggccaagggcgattccagctacctagacctgaatttcgagatcagtttcggaggaatacctaccccaggccggagccgcgcgtttcggagaaagtcattccacggctgcctggaaaatctctactacaacggcgtggacgtaaccgagctggctaaaaaacacaagccccagatcctcatgatgggtaacgtgtccttcagctgtcctcagccccaaactgtgccagtcaccttcctctccagtcgctcatatctcgcacttcctggcaattcaggagaagataaggtcagcgtcacgtttcagttccggacttggaaccgcgcgggccatttactattcggagagctgcggcgcggttctgggagcttcgttctgtttctcaaggatgggaaactgaagttgtccctgtttcagccaggacagagtccgaggaacgtaactgcaggagctgggctgaacgatgggcagtggcatagtgtgtcattctcggctaagtggtcccatatgaatgtggtcgtggatgatgacactgctgtgcagcccctggtggccgttctgatcgattcaggcgatacatactatttcggagctctgtacgaacaatcctgcgaggcccataagcaccgcggcaatcccagtggactgtactacatcgatgccgacggatccggcccgttaggaccttttctggtctactgtaacatgacagatgcagcctggacagtcgtccagcacggcggacctgacgccgtcacgctgcggggggcaccaagtggccatcctcgttcggccgtttctttcgcctacgccgccggcgctgggcagctgcgttcggcagtgaatctggcagaaagatgcgagcaacgcttagctttgaggtgcggcaccgcccgaaggcccgatagccgtgatggtactccgctcagttggtgggtaggccggactaatgagacacacacatcttggggaggcagcctgccagatgcccagaagtgtacttgtggccttgaaggtaactgtatcgactcacagtattactgtaattgtgatgccggccgtaatgagtggtag

SEQ ID NO: 12123 - RNA, 1455 nt, synthetic construct
  misc_feature 1..1455: note = source = /note="Description of Artificial Sequence: Synthetic coding sequence"
  source 1..1455: mol_type = other RNA
atgtggtatgtatccaccaggggtgtggcccctagagtcaatttcgagggcgccctcttctctggctacgctcctgacgggggtctctttatgcccgaagaactgccccaactggatcgcggcacgctttgccagtggtcaactctgtcatatcctgggctggttaaagaactgtgcgcgctgtttattgggtctgaactcctgcctaaagacgagctgaacgacttgatcgatagagccttcagtcggttccgacatagggaggtcgtccacctttccagattacgcaacggcctgaatgtgctagaactgtggcatggtgtaacctacgccttcaaggacttatctcttagctgcactacccaattcctccagtactttcttgaaaaacgggagaaacatgtcacagtcgttgtagggacatccggtgacaccgggagtgcagcgatagagtccgtccagggagcgaaaaacatggacataattgttctgctgcccaaaggtcattgcacaaaaatacaagaactgcagatgacgaccgttctaaagcagaatgtccacgttttcggggtggagggcaatagcgacgaattagacgagccgatcaaaacagtttttgcagacgttgcgttcgtgaagaaacataatctgatgtctcttaactccattaattggtctcgggtgttagtgcagatggctcaccacttctttgcttatttccaatgcactcctagtctcgacactcaccccttacccctggtagaggtggtagtgccaacaggcgcggcaggcaacctggcagctggttacatcgcgcagaaaattggccttccaattaggttagtcgttgccgtcaatcggaacgatataattcacagaacggttcagcagggtgactttagcctctcggaggcagttaagagcacccttgccagcgctatggatatacaggttccctataacatggagcgcgttttctggcttctaagtggatccgactctcaggtgacccgcgctctgatggagcaattcgagaggacacagtccgtaaaccttccaaaggagcttcactcaaagctctccgaggccgtaacctctgtatctgtttctgatgaagccattacccagacgatgggaagatgctgggacgagaatcaatatcttctctgtccccactcagccgtagcagtgaattatcattaccagcagatcgatagacagcagccatccacccctaggtgctgtttagctcctgcctctgcggctaaatttcccgaggctgtcctggctgcaggtttaacccctgaaactccagccgaaatagtggcgctggaacataaggagacacgatgtactctgatgaggagaggagataactggatgttgatgctccgggatactatagaggacttatctcggcagtggagaagtcacgcgttaaacacctcccagtag

SEQ ID NO: 12124 - RNA, 264 nt, synthetic construct
  misc_feature 1..264: note = source = /note="Description of Artificial Sequence: Synthetic coding sequence"
  source 1..264: mol_type = other RNA
atggtgagcctgatgaaactgtggatccccatgcttatgacttttttttgcacagtgctactgagcgtccttggggagatgagaaagaaacgatacgatagaaaggagctgttactagaagagtgctggggaaaaccaaacgtgaaggaatgcacaaacaagtgcagcaaggcttttaggtgcaaagataaaaactatacttgttgttggacatactgcggaaatatttgctggattaacgtggagacctccggggattattag

SEQ ID NO: 12125 - RNA, 453 nt, synthetic construct
  misc_feature 1..453: note = source = /note="Description of Artificial Sequence: Synthetic coding sequence"
  source 1..453: mol_type = other RNA
atgcgtttcatggcaggtcccgctggctctcagtctctgggacccctctgcttccacagctccccccaggcactttatacggtgttgctgatcgtgcttgtcatgatgagtctcgtgttcggaaagtttgtgccggtcaactgggagcctccacaaccattgccctttcctaagtatctaagatgctatcgctgtttgttggagactaaagaacttggctgtctattaggaagcgatatttgcctcaccccagctggctcatcatgtatcacactgcacaagaaaaactcttcaggttcggacgtgatggtctcagattgccgctccaaagagcagatgtccgattgttccaacacccgcacctctcccgtttctggattctggatctttagccagtactgtttcttggatttctgcaacgaccctcagaatcgggggctctacaccccttag

SEQ ID NO: 12126 - RNA, 873 nt, synthetic construct
  misc_feature 1..873: note = source = /note="Description of Artificial Sequence: Synthetic coding sequence"
  source 1..873: mol_type = other RNA
atgtcagtgagaaggggtcgccgtcccgcccgacctggaacaaggctctcctggctcctttgctgttcagccttgctttcaccagctgccgggtacgtaattgtgagttcagtgagctgggctgttaccaatgaagtggatgaagagctagacagcgcaagcacagaagaggccatgccagctctgctcgaggatagcggttcgatctggcagcagtcgtttccagccagcgcgcacaaggaagacgctcaccttagaccacgagcaggggccgctagggcacgtccacccccagcaccgcctggcatgttcagttaccgcagagagggaggccagaccgcatccgcccctcccggaccacgtttgcgggcagcaacagcccgcagtctggctcacgcgtctgtttggggatgcctagccaccgtgagtactcataaaaagatccaaggactaccctttggtaactgtctccccgtcagcgatgggccatttaacaatagtaccgggatcccctttttctatatgaccgctaaggacccagtcgtcgccgatctaatgaaaaacccaatggcctccttaatgctgcctgagagtgaaggagagttttgtagaaagaacattgtcgaccccgaagaccctcgttgtgtgcagctcaccctgacagggcaaatgattgccgtaagcccggaggaagtggagtttgccaagcaggcgatgtttagtcggcatcccggaatgcgcaagtggcctcgacagtacgagtggttttttatgaagatgaggatcgaacacatttggttgcagaaatggtatggaggcgcgagctccatcagtagagaagagtattttaaagcagtcccccggaaagcttag

SEQ ID NO: 12127 - RNA, 2742 nt, synthetic construct
  misc_feature 1..2742: note = source = /note="Description of Artificial Sequence: Synthetic coding sequence"
  source 1..2742: mol_type = other RNA
atgggtcctgaagccctatctagcttactcttactacttctggtggcctcaggagatgccgatatgaagggacactttgatccagccaaatgccgatatgctctgggtatgcaagatagaaccattcctgacagcgatatttcagcctcctcttcttggtcagacagcactgccgctaggcattccagactcgaaagcagtgatggcgatggcgcatggtgcccagcaggcagcgtgttccccaaagaggaagaatatctccaggttgaccttcagcgcctccatctggtagccctggtgggtacgcagggacggcacgcgggaggactcgggaaggagttttctcggtcttacaggttgcgttattcccgtgacggacgcagatggatgggctggaaagacagatggggacaggaagtcatcagtggtaatgaggacccagaaggtgtggtcctgaaggatctgggccctcctatggtggcgaggctcgtgcgcttctacccgagagccgaccgtgtgatgtctgtgtgtctgcgggtggagctgtacggctgcttgtggagagatggattactgtcatataccgccccagtggggcagaccatgtacctctccgaggccgtttatctgaatgacagcacctacgatggacatactgtcggaggactacagtacggtggtctgggccagctggcagacggcgtcgtcggattagacgattttaggaaaagccaggagttgcgagtgtggccaggctacgactacgttggctggtctaatcactctttttcaagtggatatgtggaaatggaattcgagtttgacagactgcgcgctttccaggctatgcaggtgcactgtaacaatatgcatacactcggtgcccgactgcccggaggggtagaatgccgctttagaaggggacctgccatggcatgggagggagagcccatgcgtcacaacctgggcggaaacctcggtgatccacgggcccgggccgtgtcagtgccacttggtggacgagttgcaaggttcctgcaatgtagatttctgtttgccgggccctggctcctttttagtgagatttccttcatatccgatgtggtgaataacagcagccctgccctgggcggaacattcccgcctgctccctggtggccccctggaccaccgcccaccaatttctctagtctggagctggagccacggggccagcaaccggtcgcaaaagccgagggcagtcctaccgccatcctcattgggtgcttggtggctatcatcctgcttctgttacttatcattgccctgatgctgtggcgactgcattggaggaggcttctctccaaagctgaacggcgcgtgctggaggaggagctcactgtgcatctgagcgtacctggagacaccatcctgataaacaaccgccctggccccagagaacccccgccttatcaagaaccccgcccaagaggcaacccaccacactcagctccttgcgtccccaatggcagcgccttgttgttatccaatcccgcttaccgtctcttgctggccacctatgcccggcccccccggggtcccggcccccccactcctgcgtgggcaaaacctactaacacgcaagcttactccggtgactacatggagcctgaaaaaccgggggcacccctgctacctccccctccccagaatagcgtgccacattacgccgaggcagatatcgtcacattgcagggcgtaaccggaggaaacacctatgcggtgcccgctctccctccgggtgccgtcggtgatggccctccccgggttgactttcctcggtcaaggctaagattcaaagagaaactcggcgagggccaatttggggaagtgcatctctgcgaagtcgactcaccacaggacctcgtttccctcgactttcccttgaatgttagaaagggacacccattgctggttgcagtcaagatcctacggcccgacgcgacaaagaatgcccgtaacgattttttgaaggaggttaaaattatgtcaagattaaaggatcctaacattatcaggctactgggtgtgtgcgttcaggacgatcccctatgcatgatcacagactacatggagaacggggatttgaatcagttcctgtcagcccatcagctggaggacaaggctgccgagggcgctcccggcgacgggcaagctgcccaaggccctaccattagttatcccatgttactgcatgtggctgcgcagatcgccagcgggatgaggtacctcgctaccctgaacttcgtccaccgggatctcgctacaagaaattgcctagtgggtgagaactttaccataaaaatcgcagacttcggcatgagccgcaatctctacgcaggcgactattatcgggtgcaaggaagggcagtgttacccattagatggatggcctgggagtgcatactgatggggaaatttactaccgcctccgacgtttgggccttcggtgtgacactttgggaagttttgatgttgtgccgggctcagccctttggccagctcacagatgagcaagtgattgaaaacgctggtgaattcttccgagaccaggggcgacaggtgtatctgtcccggccccctgcctgccctcagggtctgtatgagctcatgcttcgctgctggtccagagagtcagaacagaggcccccattcagccagctgcatcggttcctcgccgaggacgccctaaatactgtctag

SEQ ID NO: 12128 - RNA, 243 nt, synthetic construct
  misc_feature 1..243: note = source = /note="Description of Artificial Sequence: Synthetic coding sequence"
  source 1..243: mol_type = other RNA
atgaagctttcaggtatgttcttgttgctttcactggcccttttttgctttctgactggagtttttagccagggcggccaggttgattgcggagaatttcaagacccaaaggtctattgtacacgtgaatccaatcctcattgcgggtccgatggtcagacgtacggaaacaaatgtgccttttgtaaagccatagtgaagtctggaggaaagatttcactaaagcacccaggtaaatgttag

SEQ ID NO: 12129 - RNA, 270 nt, synthetic construct
  misc_feature 1..270: note = source = /note="Description of Artificial Sequence: Synthetic coding sequence"
  source 1..270: mol_type = other RNA
atgaaaccctggatcctgctcctggttatgtttatctccggtgtcgtgatgctcctgccagttctgggaagcttctggaacaaagatccatttctggacatgatacgcgaaacagagcagtgttgggtgcagcccccttacaagtattgtgaaaagagatgcactaagattatgacctgcgtacgccctaatcacacgtgctgttggacatattgtggcaatatttgtcttgataatgaagaacctctcaagtctatgcttaatccttag

SEQ ID NO: 12130 - RNA, 264 nt, synthetic construct
  misc_feature 1..264: note = source = /note="Description of Artificial Sequence: Synthetic coding sequence"
  source 1..264: mol_type = other RNA
atgctcccttgcctcgcactcctgctactcatggaattgtctgtttgtacggttgccggggatggcggagaggaacagactttgtcaaccgaagctgagacgtgggaaggtgcagggccttcaattcaactccagctgcaggaagtcaaaacaggaaaagctagccagtttttcgggttaatgggaaagcgggtaggcggcagaccactgatccaaccaagaagaaaaaaaggtcgagaggatgaggctcagggctccgagtag

SEQ ID NO: 12131 - RNA, 285 nt, synthetic construct
  misc_feature 1..285: note = source = /note="Description of Artificial Sequence: Synthetic coding sequence"
  source 1..285: mol_type = other RNA
atgcaacacagcctcgtgttcttctttgccgtaatactgcatctttctcacttgttacatctggatgcgagcattcatcccttccgcctccctttctcgagcaaaccattcttacttatccccatgtcaaataccacccttccgcacaccgcttggccgctgtcttttctacaccaaaccgtttcgaccctgaaagctgtcgctgtcacacatagcctgtggcatctccagatccctgtagactgccaggcttgcaacagaaaatcaaaaaagatctactgctag

SEQ ID NO: 12132 - RNA, 327 nt, synthetic construct
  misc_feature 1..327: note = source = /note="Description of Artificial Sequence: Synthetic coding sequence"
  source 1..327: mol_type = other RNA
atgcgccagcggctgctcccatccgtgacttccctgttgctggtggcactcctgtttcccggctcaagccaggctcgccatgtgaaccactccgccactgaagccttaggtgaactgcgtgagagggcccccggacaaggaacgaatggattccagctcttaagacatgccgttaaaagagatcttctgccaccccgtaccccgccctatcagggtgatgtgcccttgggtatccgaaatactatttgcagaatgcaacagggtatctgtagattatttttttgtcatagcggcactggacagcagcacaggcagagatgtggctag

SEQ ID NO: 12133 - RNA, 807 nt, synthetic construct
  misc_feature 1..807: note = source = /note="Description of Artificial Sequence: Synthetic coding sequence"
  source 1..807: mol_type = other RNA
atgctgctgctggctgcagcttttctagtggccttcgttcttctattgtacatggtatcaccactgatcagtccaaagccattggccctgcctggggcgcacgtcgtggtcacaggaggctccagcggcatcggcaaatgtattgcaattgaatgctataagcagggggcttttatcaccctggtagctaggaacgaggataaattgctgcaagccaaaaaggagatcgaaatgcattctattaacgataagcaggtagtactgtgcatttcagtagacgtctcacaggactataatcaggtggaaaacgtaataaagcaggctcaggaaaaattggggcctgtcgatatgttggttaattgcgccggtatggctgtctcgggaaagtttgaggatctagaggtcagcacattcgaagtgaagccttacaacgtgtatattaccgtggcctacccccccgacactgacactcctggttttgcagaagagaaccgcactaagccacttgaaacccggttgatcagcgaaacaacaagcgtttgcaagcctgaacaagtcgcgaagcagatcgtaaaagatgctatccaagggaacttcaactcgagcctggggtcggatggttacatgttaagcgcactgacttgtggtatggcaccagttacgtcaattaccgaaggcctccagcaggtcgtgactatggggctctttagaaccattgcattgttctatctaggatcgttcgatagcatagttagaaggtgtatgatgcaaagggagaaatccgaaaatgccgacaagacagcgtag

SEQ ID NO: 12134 - RNA, 1686 nt, synthetic construct
  misc_feature 1..1686: note = source = /note="Description of Artificial Sequence: Synthetic coding sequence"
  source 1..1686: mol_type = other RNA
atgaggtggatattatgctggagcctgacattgtgtcttatggcccagaccgcgttgggagccctgcacacaaaacggccacaagtggtgacaaaatacgggaccctgcaggggaaacaaatgcacgtggggaaaactcccatacaggttttcctcggagtgccttttagtcggccccctctgggaattctgcggttcgctccccccgagcctccggaaccctggaaaggcatcagagacgcaacaacctaccccccaggctgcctccaggagtcatggggccaactggccagtatgtacgtgagcactcgggaacgatataagtggttgagattttctgaggactgtctgtatctaaacgtgtacgcacctgcacgcgctcccggggaccctcagctaccagtgatggtgtggttccctgggggggcattcatcgttggagccgcaagttcttacgaaggcagtgatctggccgctcgagaaaaggtcgttcttgttttcctgcagcaccgcttaggaatattcgggtttctctcaacagatgactcccacgcgcgcggaaattggggcctgctcgatcaaatggctgccctgcgatgggttcaggagaatattgctgcatttggaggcgatcccggcaacgtaactttatttggacagtccgccggtgctatgagtattagcggcctgatgatgtccccgctcgcttcgggtctgtttcacagggcaattagccagtctggcactgccttatttcgtctgtttatcacttctaacccgctgaaagtggctaagaaagtggcccacctagctggttgcaatcacaacagcactcaaattcttgtgaactgtctacgggcgttatctggcaccaaggtgatgcgagtgtcaaacaaaatgcgattcctgcagctcaacttccagagagaccccgaagagatcatttggtcaatgtcccccgttgttgatggcgtagtgattcctgatgaccctcttgttctgcttactcagggaaaggttagtagcgtcccctatcttctcggcgttaacaacctggagttcaattggctgctgccctacatcatgaagttccctttgaatagacaggctatgcgtaaggagaccatcacgaagatgctttggagcactaggactctcctaaatatcacgaaggaacaggtgccactggtggttgaggagtacctggacaatgtgaatgagcacgattggaagatgctgcgtaacagaatgatggatatcgttcaggacgctaccttcgtctatgctaccctccagactgcacattatcatagggacgcagggttgccagtatacctttacgagttcgaacatcacgctagagggattatagttaaaccaaggacagacggcgcggatcacggcgatgagatgtacttcttgtttgggggaccctttgcgaccggactcagcatgggcaaggaaaaagccctgtctctccaaatgatgaaatactgggcaaattttgctcgcaccggcaatccaaacgacggcaatctcccttgttggcctcgctacaataaagatgagaaatacctacagttagacttcacaaccagagtcgggatgaagttaaaagagaagaagatggctttttggatgagtctgtaccagtcccagcggcctgagaaacaacgacagttctag

SEQ ID NO: 12135 - RNA, 444 nt, synthetic construct
  misc_feature 1..444: note = source = /note="Description of Artificial Sequence: Synthetic coding sequence"
  source 1..444: mol_type = other RNA
atggcttcatcactcaagatctgggggacactgctggcattgctctgcattctatgcactctcctggttcagagcaaggaagtctcatggcgtgaatttatgaaacagcactacttaagcccatcccgcgagttccgtgaatacaagtgtgacgtcctgatgagagagaatgaggcccttaaagataagtcctcccatatgttcatatatatttcgtggtataaaatcgaacacatctgtacctccgacaactggatggacagattcagaaacgcttacgtttgggtccagaacccgctcaaagtgctcaaatgccaccaagaaaatagcaagaactcctataccgaaagtcgcagttttaattatatagaatttcactgctccatggatggctatgtggattctattgaggatctgaagatggtcgaacctattggcaactag

SEQ ID NO: 12136 - RNA, 444 nt, synthetic construct
  misc_feature 1..444: note = source = /note="Description of Artificial Sequence: Synthetic coding sequence"
  source 1..444: mol_type = other RNA
atgacttcttctttaaaaatctggggaatccttctggcactcctctgcattttgtgcaggctctgcgtgtatagcaataacatttattggcgggagtttatcaagctgcactatcttagccctagccgagaatttaaagagtacaagtgtgacgtgctgatgcgagaaaaagaggctcttaagggcaaatcgttccacatgttcatttactccctctggttcaaaattcagcgagcttgcatcaacgaaaaaggcagcgatagatatcggaatgcgtacgtttgggcacctggtgcacttaaagtgctagaatgtcactgggaaaaatataacaacagatacaccgaatcaagaagcttcagctacatcgagttccactgtggggtggacggctacgttgataacattgaggacctgcggattattgagcccatctctaattag

SEQ ID NO: 12137 - RNA, 1248 nt, synthetic construct
  misc_feature 1..1248: note = source = /note="Description of Artificial Sequence: Synthetic coding sequence"
  source 1..1248: mol_type = other RNA
atgtcgccgtttctttatctagtgctgctagtactcggattacatgccacaatccactgcgcttcaccggaagggaaggttacagcttgccattcctcccagcctaatgcaactctgtacaagatgtcttctatcaatgccgatttcgcatttaatctgtatcggcgattcactgttgagacccctgataagaatattttcttttccccagtgagtatttccgctgccctggtaatgctatcctttggcgcgtgttgtagcacacagaccgaaatcgttgagaccctggggttcaatcttaccgacactcctatggtggagattcagcacgggtttcaacacttaatttgtagtctgaatttcccaaagaaggaactggagcttcaaatcggaaacgctctttttataggtaagcacctgaagccgttagccaagtttctcaacgatgttaaaacgttgtacgaaactgaggtattttccaccgatttctctaacatcagcgccgctaaacaggagatcaacagccatgtagagatgcagaccaagggaaaagtcgtcggtctgatccaagacctgaaaccaaataccatcatggtgctcgttaattatatccactttaaagctcaatgggccaacccgtttgatccttctaagaccgaggactcatctagctttctgatcgataagacaacaaccgtacaggtgcccatgatgcatcagatggaacagtactatcatctagtagacatggaattgaattgtaccgtcctgcagatggactactctaagaacgccctcgctctctttgtgctgcccaaggaaggacagatggaatcggtagaggcagctatgtcatccaagacactgaaaaaatggaatcggttgttgcaaaagggatgggttgatctttttgtgcccaaattttctataagcgctacctatgaccttggggcaacactgttaaagatgggtatccagcacgcttactccgagaatgcagacttcagcgggcttaccgaggacaacggcttgaaactgtctaacgcggctcataaagcagtcctccatataggggaaaagggaaccgaagcagcagcagttcctgaggtagagctttctgatcagcctgagaatacctttctgcacccaattatccagatcgataggtcttttatgctcttgatcctcgagaggtctacacgatccatcctcttcctgggcaaagtcgttaaccccaccgaagcctag

SEQ ID NO: 12138 - RNA, 285 nt, synthetic construct
  misc_feature 1..285: note = source = /note="Description of Artificial Sequence: Synthetic coding sequence"
  source 1..285: mol_type = other RNA
atgagaactctagccatacttgccgcgattttactggtcgctctgcaggctcaagccgaacctctgcaagcacgggccgatgaggttgccgcagcccctgaacagatagcagctgacatccccgaagtggtggtttctctggcttgggatgaatctcttgcccctaagcaccccgggagccgcaaaaatatggattgctattgtaggatcccagcttgcattgcaggtgaacggcgatatgggacatgtatctatcaaggtcgcctttgggctttctgctgttag

SEQ ID NO: 12139 - RNA, 1062 nt, synthetic construct
  misc_feature 1..1062: note = source = /note="Description of Artificial Sequence: Synthetic coding sequence"
  source 1..1062: mol_type = other RNA
atgcgcctgccaaggagggccgcattgggattactgccgttgctcctccttcttccgccagctcctgaggctgccaaaaagcccacaccttgtcaccggtgccggggactggtggacaagttcaaccaaggaatggtggacaccgcgaaaaagaatttcggagggggaaatacagcttgggaagaaaagacactctctaagtatgaaagtagcgagatccgcttgctagaaattctcgagggtctgtgcgagtcaagcgacttcgagtgcaaccagatgttagaagcccaggaagaacaccttgaagcgtggtggcttcagctgaagagcgagtatccagacctgttcgaatggttctgcgttaagaccctgaaggtttgctgctcacccggcacctacggtccagactgtttggcatgtcaaggagggagccagagaccctgctccggaaatggccactgttccggcgacgggagccgacagggtgacggcagttgccgatgtcacatgggctaccagggccctttatgcaccgattgtatggacggatactttagcagcttgcgaaacgagacgcattcaatctgcacagcttgtgacgaatcatgtaaaacctgttctgggctgacaaaccgggattgtggtgagtgtgaagttggttgggtgctggacgagggcgcgtgtgtggatgtggatgaatgtgccgcagagccacccccctgctccgccgctcagttctgtaagaatgcaaacggatcgtatacgtgcgaagagtgtgacagctcttgcgtgggttgcacaggtgaaggaccaggaaactgcaaggaatgcatatctggctacgctagggagcacggacagtgcgcagatgtggatgagtgttcacttgcagagaaaacctgcgtaaggaagaacgagaattgctataatacacctggatcttacgtttgcgtgtgccctgacgggttcgaggaaacagaggacgcatgtgtcccccccgctgaagccgaagctacagaaggagagtcacctactcagctgccttccagagaggacctctag

SEQ ID NO: 12140 - RNA, 651 nt, synthetic construct
  misc_feature 1..651: note = source = /note="Description of Artificial Sequence: Synthetic coding sequence"
  source 1..651: mol_type = other RNA
atgaaacttaatttagtccaaatcttctttatgctgctgatgctgctgctcgggctgggaatgggtcttgggcttggactgcatatggctacggcagttctggaagaatctgaccagcccctcaatgagttctggtcctcagactcccaagacaaggccgaggctaccgaggaaggcgacggaacccaaacgaccgagactttagtcctttctaataaggaagttgtccagcccggctggccagaggatccaattttaggcgaagacgaagtggggggaaacaagatgctgagggcgagcgcactgttccagagtaataaagactacctccggctcgaccaaaccgacagagagtgtaatgacatgatggctcacaagatgaaagaacccagccagtcgtgcatcgcacaatacgcctttatacatgaagacttaaacaccgtgaaagccgtatgtaattctccagtgattgcctgtgaactcaagggcggcaagtgtcacaaaagttccagaccatttgacttaacactgtgcgagctgtcccagccggaccaggtgacaccaaattgtaattatttaacatcagtgattaagaaacatattatcataacttgtaacgatatgaagcggcagctgcctacaggccaatag

SEQ ID NO: 12141 - RNA, 222 nt, synthetic construct
  misc_feature 1..222: note = source = /note="Description of Artificial Sequence: Synthetic coding sequence"
  source 1..222: mol_type = other RNA
atgcgaattgccgtgctactgtttgccatcttctttttcatgtcacaagtcctgcccgctcgcggaaaattcaaggagatttgtgaacgtcctaacgggtcatgtcgcgacttctgcctcgagaccgaaattcatgtgggacgctgcctcaactcacagccttgttgcctccctctaggccatcagcccaggatagagagtaccacacctaagaaagactag

SEQ ID NO: 12142 - RNA, 609 nt, synthetic construct
  misc_feature 1..609: note = source = /note="Description of Artificial Sequence: Synthetic coding sequence"
  source 1..609: mol_type = other RNA
atggagcgaggcgctggggctaagctgctgcctctcttgctccttctgcgggctactggtttcacttgtgcacaaaccgacggaagaaatggatatacggccgtgatcgaggtgacttctggggggccctggggtgattgggcatggccagagatgtgtcccgatggcttcttcgccagcggcttttccttaaaagtggaacctccgcaggggatccctggcgatgacacagcccttaacggaattcgactgcactgcgcgaggggtaacgtgctgggaaatactcatgttgtagaaagtcaaagtgggagttggggagagtggtccgagcccctttggtgccgcggtggcgcttacctggtcgcattctcacttagggtagaagcaccaaccaccttaggagacaataccgccgccaataacgtaaggtttagatgctccgatggggaggagttgcaaggtccaggtctcagctggggagattttggcgattggagtgaccattgtcctaaaggagcatgtggattacagacaaagatacaaggcccgcgaggactcggagacgacacggctttaaatgatgcgcggctgttttgttgccgtagttag

SEQ ID NO: 12143 - RNA, 759 nt, synthetic construct
  misc_feature 1..759: note = source = /note="Description of Artificial Sequence: Synthetic coding sequence"
  source 1..759: mol_type = other RNA
atgcagctcacccggtgctgctttgtgtttctggtgcagggcagcctctatctcgtgatttgcgggcaggacgacggcccccccggcagtgaagacccggagcgtgatgatcatgaagggcagcctagaccacgcgtccccaggaagcggggccacatatcacccaagtcgaggccaatggccaatagtaccctcttgggattgctcgctccgcctggcgaggcctgggggatccttgggcaaccacccaatagaccgaaccattccccccccccaagcgccaaagttaaaaaaattttcggttggggcgatttctactcaaatatcaaaactgtggcactgaatctccttgtgacagggaagatcgtggatcacggcaacggaacctttagtgtgcattttcaacacaatgccactggtcagggcaacatttcaatttctttagtacccccaagtaaggccgtggaatttcaccaagagcagcagatctttattgaggccaaagccagcaaaatttttaattgccgcatggagtgggaaaaagtagaaagaggacggagaacttctctgtgtactcatgatcctgccaaaatctgctctagagaccacgctcagtcctccgcaacttggtcctgttctcaaccttttaaggtggtatgtgtgtacatcgctttctacagtacagactatcgactcgttcagaaagtttgtcccgactataactaccactctgataccccatattacccctctgggtag

SEQ ID NO: 12144 - RNA, 555 nt, synthetic construct
  misc_feature 1..555: note = source = /note="Description of Artificial Sequence: Synthetic coding sequence"
  source 1..555: mol_type = other RNA
atgaaaatcttggtcgcatttctagtagttttaactatattcggcattcagtcccacggatatgaggtttttaatattatctccccaagcaacaacggaggcaatgtccaggagactgtcacgatagacaacgagaaaaatactgccattattaacattcatgctggctcctgctcctctactacaatcttcgattataagcacggatacatcgcatcccgcgttctctcccgcagagcctgctttatcttaaagatggaccatcaaaatattccgcctctgaacaacctccagtggtacatttacgaaaaacaggcactggataacatgtttagttccaagtacacctgggtgaagtataaccctctggaatcccttattaaggacgtcgattggtttcttctcggtagcccaattgagaaactctgtaaacacatccctttgtataaaggtgaggtggtggaaaatacccacaatgtgggggcgggagggtgtgccaaagcagggctgctcgggattttgggtataagcatttgtgctgacattcatgtgtag

SEQ ID NO: 12145 - RNA, 651 nt, synthetic construct
  misc_feature 1..651: note = source = /note="Description of Artificial Sequence: Synthetic coding sequence"
  source 1..651: mol_type = other RNA
atgggcgcagttatgggaaccttctcgagcctccaaacgaagcagagacgaccctcgaaagacaaaattgaagacgaactagagatgactatggtgtgccaccggccagagggactggaacagctggaagcccagaccaattttacaaagagggagttacaggttctgtaccgaggctttaaaaatgagtgtccatcaggggtggtcaatgaggatacctttaaacagatttatgctcagttctttcctcacggtgatgcgtccacctacgcccactatttgtttaacgctttcgacactacacagacgggcagtgtgaagttcgaggacttcgttacagcactctcaattctcttgcgagggaccgtgcacgaaaaacttaggtggacatttaatctgtacgacatcaacaaagacggatacataaataaagaggagatgatggacattgttaaagcaatttatgatatgatgggcaaatatacctacccggttcttaaggaggatacacctcgtcagcacgtcgacgttttcttccaaaaaatggacaaaaacaaggacggaatcgtgactctggatgagtttcttgaaagctgccaagaggatgataacatcatgcgttccctacaactatttcagaacgtgatgtag

SEQ ID NO: 12146 - RNA, 2736 nt, synthetic construct
  misc_feature 1..2736: note = source = /note="Description of Artificial Sequence: Synthetic coding sequence"
  source 1..2736: mol_type = other RNA
atggcacagctgttcctgccacttttggctgccctagttctcgcacaggcacctgcagctctggccgatgtgcttgagggagacagtagcgaggatcgcgcattccgtgtgcggattgccggcgatgccccattgcagggtgttctgggcggagctctaaccatcccatgccacgtacattatttgcgaccccccccctcccgccgcgccgtgctcggctccccaagggtgaagtggactttcttgagccggggtagagaggccgaggtgctggttgcccggggcgtaagggtcaaggtcaatgaagcctacaggttcagagtcgcactacccgcctaccccgcatccctcacagatgtttccttagccttgtcagaactgagacccaacgactcaggaatttatcggtgcgaggtgcagcatggcattgatgattcttctgatgccgtggaagtcaaagtgaaaggagttgtgtttctgtatagagaaggctcagctcggtacgcattctcttttagtggagcccaagaagcctgcgcccgaattggagcccatatcgccacacctgaacagttgtacgctgcttatctgggcgggtatgaacagtgtgatgccggctggctctctgaccagactgtgcgctatcccatccaaacgccaagagaggcctgctatggcgatatggacggctttccaggcgttagaaactatggggttgtcgaccccgacgatctatatgacgtgtattgctatgccgaggacctgaacggagagcttttcctgggagacccaccagaaaaactcaccctcgaggaagcccgcgcttattgccaggagagaggtgctgagatagccacaactggacagttatatgccgcctgggacggcgggctggatcattgttcacccggatggctggcagacggctcagtgcggtatccaattgtgacacccagtcagagatgcgggggcggcttacctggagtgaagaccctcttcttatttcctaaccagaccggctttccaaacaagcactcccgattcaacgtgtactgcttccgcgactccgcccagcctagcgctataccagaagcttccaaccccgcttcaaatccagcttcagacgggctggaggctattgtgacggttaccgagacgttagaggaactccagttgccacaagaggctacggaaagcgaaagtaggggcgcaatttactctatcccaataatggaagacgggggcggtgggagtagtacgcctgaagaccctgccgaggctccccgcactctgctcgaatttgagacccagtccatggtaccaccgactggattttccgaggaggaaggtaaagcactggaagaggaggaaaagtatgaagatgaagaggagaaagaagaagaagaggaagaggaagaagtggaagatgaagcgttgtgggcgtggccctctgagctgtcttcgcctggcccagaggcctcgctccctacagaaccggccgcccaggaggagtcactcagtcaggcaccagccagagctgtccttcagccgggtgcgtcgccattgcccgacggggagtctgaggcatctaggccacctcgtgtgcacggccctccaacggagacacttcccaccccccgggagcggaatcttgcttctccatctccatctacgctagtggaggcacgggaagtcggagaggccacaggaggccccgaactgtccggcgtacctagaggcgagagcgaggaaacaggttcatcagagggtgcaccaagtcttctgccagcgacccgtgctccagaggggacacgcgagctcgaagccccttctgaggataacagcggccgcaccgcaccagccgggaccagtgttcaggctcaacctgtcctgccaacagacagcgcgagtaggggcggcgtggctgtcgttcctgccagcggggattgcgtgcccagtccttgccataatggaggcacgtgtcttgaagaagaggaaggagttcgctgtctgtgcctcccgggatacgggggggatctctgcgacgtcggacttcgcttctgcaatccaggttgggacgcattccagggcgcgtgctataagcatttcagtaccagacgcagctgggaggaggccgaaacccagtgtaggatgtacggggcccatctggccagcattagcacgccagaggagcaggacttcatcaacaataggtaccgagaataccagtggatcggacttaatgatcgcacaatcgagggcgatttcctctggtccgacggcgtgcctcttctgtacgagaactggaacccaggccaaccagactcctattttctgtccggcgaaaattgtgttgtgatggtgtggcatgaccagggccagtggtccgacgtcccatgtaactaccacctgtcttacacgtgcaagatgggcttggttagttgtgggcctcctcccgaactccctttggctcaggtattcggccgtcctcgcttgcggtacgaggtggacactgttcttagatacagatgccgcgaggggctggctcagaggaatttgcctttgattcgctgccaggagaacggcagatgggaggctccacagattagctgtgttcctcgcaggcctgcacgcgcgctccatcccgaggaggatccagaaggtagacagggccggctcctcggtaggtggaaggcactgcttatccctccctcaagtcccatgccaggcccatag

SEQ ID NO: 12147 - RNA, 852 nt, synthetic construct
  misc_feature 1..852: note = source = /note="Description of Artificial Sequence: Synthetic coding sequence"
  source 1..852: mol_type = other RNA
atgggtctaggtcttcggggatggggcagaccactgctgactgtggccactgctctcatgctgcccgtcaaacctcccgctggtagttggggagctcagatcatagggggtcatgaggtaaccccccactctcgtccgtatatggcctccgtgcgattcgggggccagcatcactgcggcgggttcctgctgagagcccgatgggtcgtctccgctgcccactgtttctcccaccgcgatctacgcaccggcctcgtggtgctgggggcacatgtcctaagtacagcagaacccacgcagcaagtcttcggcatcgatgcactcaccacacatcccgattaccaccctatgacacatgctaacgatatatgtttgctgcgactcaacggctccgccgtgctaggcccagctgtgggcctcctgcgtcctcctggaagaagagcccgaccacctacagcaggtacaagatgtagggtcgctggttgggggtttgtgagcgattttgaggagttaccccccggcctaatggaggctaaggtaagggtgttagatcctgatgtctgcaattcttcttggaagggacatctgaccctgacaatgctctgtacccgcagcggtgattcacacagaagaggtttttgtagcgcagattctggaggcccactagtgtgccgcaatagagcccatggactggtgagcttctcgggactctggtgtggcgatcccaaaacccctgacgtgtacacccaggtctcagccttcgtcgcttggatctgggatgtggtacgccggtcctcaccacagcctggaccactccccggtactacaaggcctccaggtgaggccgcttag

SEQ ID NO: 12148 - RNA, 1209 nt, synthetic construct
  misc_feature 1..1209: note = source = /note="Description of Artificial Sequence: Synthetic coding sequence"
  source 1..1209: mol_type = other RNA
atgatggtggccctccgcggagcctctgcattactggtgctgtttttggccgccttcctgccacctccccagtgtacgcaagaccccgccatggtccactatatctaccaacgcttccgggtgctggaacagggtctggaaaaatgcacacaagccacacgagcatatatacaggagtttcaggaattctctaagaacattagcgttatgttgggacgctgtcagacatatacaagtgagtataaaagtgcagttggcaatttggcactgagagtcgaacgggcccaacgcgagattgattacatccagtatctgcgggaggccgacgagtgcatcgagtctgaggataagacactggccgaaatgctgctccaagaagccgaagaggaaaagaagatcaggactcttctgaatgcatcctgtgataatatgttgatgggcatcaaatcccttaaaatcgttaaaaaaatgatggacacgcatggaagttggatgaaggacgccgtctataacagcccaaaggtgtacctgctcatcggctcaagaaacaacaccgtctgggagttcgccaatatacgcgccttcatggaggacaacactaaacccgcgcctcggaagcagatccttacgctgagctggcaggggaccgggcaagtaatctacaagggtttcctgttctttcacaaccaggctacttcaaatgagatcatcaagtacaatctgcagaagcgtacagtcgaagacagaatgttgctgcccggcggggtgggtcgcgcactcgtctaccagcactctccaagcacttatatcgatctggcggtggacgagcacggcttgtgggccattcactcaggtcccggaacacattctcacctcgtcctgacaaaaatcgagccaggcactcttggagtggaacactcgtgggacactccatgccggagccaggacgccgaggcatcttttctgttatgtggggttctgtatgtggtgtactcgacaggcgggcaaggcccccaccgaataacatgtatttatgacccactaggaactatttctgaagaagatctgccaaatctttttttcccaaaacggccaaggagtcactccatgattcattacaaccccagagataaacagctctacgcatggaacgaggggaatcagatcatctataaactgcagacaaagcgcaaactgcccctgaagtag

SEQ ID NO: 12149 - RNA, 1221 nt, synthetic construct
  misc_feature 1..1221: note = source = /note="Description of Artificial Sequence: Synthetic coding sequence"
  source 1..1221: mol_type = other RNA
atgcagctttttctgctactttgcttggtactgctgagcccccagggcgcctccttgcacaggcaccacccacgcgagatgaagaagcgggtcgaagacctacacgtcggagccacagtcgccccatctagtaggcgcgactttacttttgacctgtatagagccctcgcctctgcagccccctcccagtcaatttttttctccccagtaagtatcagcatgtccctagctatgctctccctgggtgcgggttcatccactaaaatgcagatcctggaaggattaggcctgaatcttcaaaaatcgtctgagaaagagcttcaccggggttttcaacagctgctccaggagctcaatcagcctagagatgggtttcagctgagtctgggcaacgcactcttcactgaccttgtggtggacctacaagataccttcgtgagcgccatgaaaactctatatcttgctgatacatttcccaccaattttcgcgacagtgcaggcgcaatgaaacaaatcaatgattacgtggcaaagcagacgaaagggaaaattgtggatttgctgaagaatctggatagcaatgcagtcgtcattatggtgaactacatcttttttaaggcgaagtgggagacaagctttaaccataaaggaacccaggagcaggacttctatgtcacaagcgagaccgttgttagagtccccatgatgagtcgtgaagaccagtatcactatcttctggacagaaatctgtcctgcagagtggttggcgtgccataccagggtaacgcaacggcactttttatccttccgtctgaaggcaaaatgcagcaggtagagaacgggctgtcggagaaaacactgaggaaatggctcaaaatgttcaagaaacgccaactcgaactgtatttacctaagttctctattgaggggtcctaccagctggaaaaggtcctgccctccctaggaatttcaaatgtcttcacttcccatgccgacctgtctggcattagtaatcattctaacatccaagtctcagagatggttcataaagcagttgtggaggttgatgagagcggaacacgcgctgctgctgccaccgggactattttcactttcagatcagctcgcctgaatagccaacgtctcgtttttaacaggccctttttgatgttcatcgtcgataataatattctatttcttggaaaagttaacaggccctag

SEQ ID NO: 12150 - RNA, 1626 nt, synthetic construct
  misc_feature 1..1626: note = source = /note="Description of Artificial Sequence: Synthetic coding sequence"
  source 1..1626: mol_type = other RNA
atgaggctctctccattccacctgcagctggaattccatatgaaggagaaacgagaagacctgcagataagctggtccttcataagcgtccctgagatggctgtgaatattcaacctaaggcactgggtgaggatcaggtggcagagacctcggctatgagtgatgttctaaaagacatactcaaacacctagcaggctccgcaagccccagcgtcgtactgataactaaaccgacaactgtgaaagaggctcagaatctgcagtgcgcagcttctaccgctcaggagtcttgtcctcccaaaccgccccgagcccatgaactcaagttactcgttcgaaacatccatgtgcttttgctgtcggagccaggagcgtctggccatattaacgccgtgtgcgtcgttcagctcaacgatcctgtacagcgctttagcagtaccctcaccaaaaatacacccgacctgatgtgggaggaggagtttaccttcgaactcaatgcaaagtcaaaggaactgcacctgcagatttccgaagcaggtaggtcttctgaaggactcctcgcgactgctaccgtgcccctggatttgtttaagaaacagccttctggtccccagagttttaccctcactagcggaagtgcctgtggaagctcagttcttggctcagtcactgccgagttctcgtacatggaacccggtgagcttaagtcctggcctatcccccccccagtccccgcagccaagattgagaaagatcggactgtaatgccatgcggcaccgtcgtgaccaccgttaccgctgtaaagactaaaccacgcgtagacgttggccgcgcatctccattgtctagcgatagccccgtgaaaacacccattaaagtcaaagttattgagaaggatatcagcgtccaggccatcgcctgtcgaagcgctccagtctcaaaaacgctgagctcttcagataccgagcttcttgtattgaacggcagtgaccctgtcgccgaggttgctatccgccagttatccgaatccagcaagctaaagctcaagtcaccacgcaagaaatctaccatcatcatatccgggatctctaaaacctctcttagtcaggaccatgacgcagccctgatgcaggggtacacggcatctgttgactctactcaccaggaggatgctccaagtcatccagaacgagccgccgcaagcgcgccaccagaggaggccgaatcagcacaggctagtctggcccccaagccacaggaagacgaactagatagctgggacctggagaaggaaccacaggctgccgcctggagcagtcaggttctgcttgatcccgatggggacgagctctccgaatcctctatgtcggtccttgaaccgggaacagctaaaaagcataagggaggcatcttacgcaagggcgcaaagctgttcttccgaagaagacatcagcaaaaggatcccggcatgagtcagagtcacaacgaccttgtgttcttggagcagccggagggatcacggagaaaaggcataaccttaacgaggatcctcaacaagaaactgctcagccggcatcgcaataaaaataccatgaatggtgcccctgtagagccctgcacttag

SEQ ID NO: 12151 - RNA, 993 nt, synthetic construct
  misc_feature 1..993: note = source = /note="Description of Artificial Sequence: Synthetic coding sequence"
  source 1..993: mol_type = other RNA
atggccttcttaccatcttgggtatgcgtgttagttggcagctttagcgcctccttggccggaacgagtaatctcagcgagactgagccacccctctggaaggaatcacccggccagctgtcagactacagagtcgagaacagcatgtacattattaacccttgggtatatttagagagaatgggaatgtataaaatcattctgaatcagaccgcccggtacttcgccaaattcgcacccgacaatgagcagaacatcctgtggggcctccctttacaatacggatggcagtatcgcaccggcagactcgcggacccgacccgtcgcactaattgtggatacgaaagcggggatcacatgtgcatcagcgttgactcgtggtgggccgatctcaattatttcctcagtagccttccattcctggctgctgttgattctggggtgatgggtataagtagtgatcaggttcgtctccttccccctccgaaaaacgagcggaaattctgttatgacgtgtccagctgccggtcctcctttcccgaaacaatgaacaagtggaatacgttctaccaatacctccagagtccgttctcaaaattcgacgatctccttaaatacctctgggcagctcatacatccactctcgctgataatattaagagtttcgaagacaggtacgactattactctaaggccgaggctcactttgagcggtcgtgggtgctagccgttgaccatctggctgccgtactgtttcccactacgcttatacgctcctataagttccagaaagggatgcctccaagaatcttactcaacacagatgtcgccccttttatatccgacttcacagcatttcagaatgtcgtcctggtcctcctgaacatgctggataatgtggacaagtcaattggatatctttgcaccgaaaagtccaatgtttatcgagaccattcggagtcttcttcccggtcctacggaaacaacagttag

SEQ ID NO: 12152 - RNA, 813 nt, synthetic construct
  misc_feature 1..813: note = source = /note="Description of Artificial Sequence: Synthetic coding sequence"
  source 1..813: mol_type = other RNA
atggacagcctagaatggaactgggctctcgtatatgaactgtccggcgaacaccacgacgaggaatggagtgtcaagacatatcaggaagtggcacagaaatttgtggagacccaccctgaatttatcggcatcaaaatcatatactctgaccaccggtccaaggatgtcgccgttattgctgaatctatcagaatggctatggggcttagaataaagtttcccacagtggtcgccggcttcgacctggtcggacacgaggacacgggccattctctacacgactacaaggaagcgctaatgatcccagcaaaggatggagtgaaactgccatacttctttcatgccggcgagaccgactggcagggaacatcaattgacaggaacattttagacgctcttatgctgaataccactcggatcggccacggctttgccttatctaagcacccagctgtgcgaacttattcatggaagaaggacattcccattgaggtctgtccgatcagcaaccaggtactcaagcttgtctccgacctccgcaaccatcccgtagcaacattaatggccactggccaccctatggtgatcagcagcgacgatcccgccatgttcggggccaaaggactctcttacgacttctacgaagttttcatggggatcgggggcatgaaagctgatcttaggaccttgaaacagctcgcaatgaacagcatcaaatattctacgctgctggagagtgaaaagaatacgtttatggagatttggaagaagagatgggacaaattcatcgccgatgtggcaacaaagtag

SEQ ID NO: 12153 - RNA, 939 nt, synthetic construct
  misc_feature 1..939: note = source = /note="Description of Artificial Sequence: Synthetic coding sequence"
  source 1..939: mol_type = other RNA
atgggtgtaatggccatgctgatgcttccgctgctgctgctggggatttctggtctgctttttatctaccaggaagtgtccaggctgtggagtaagtctgccgtgcagaataaggttgtggtaattaccgacgccatcagcgggcttggcaaggagtgcgctcgtgtgttccataccgggggcgcacgcctggtgttgtgtgggaagaactgggagcggcttgagaacctctatgatgcacttatttctgtagcagacccttctaagcagactttcacgccaaagttagtacttctggacctgtccgacatcagctgtgtccccgacgtggctaaggaagtactcgactgctatggctgcgtggatattctgatcaacaatgcatctgtgaaagtgaaagggccagcccataagatttcgctagaactagacaagaagattatggatgccaattatttcggacccatcacactcaccaaagccttattgccgaatatgatttctagaagaaccggtcagatcgttctcgttaacaacatacagggtaagttcggaattccattcagaaccacttatgccgcaagcaagcacgctgcacttggctttttcgactgccttagggccgaggtcgaagagtacgatgtcgttatcagtactgtcagtcctactttcatacgctcctaccacgtttatcccgaacaaggaaattgggaagcctcaatctggaaatttttcttccgcaagctcacgtatggcgtccaccctgttgaagtggccgaggaagtgatgagaacagtgagacggaagaaacaagaggtcttcatggccaatccaattcccaaagctgccgtttatgtccggacttttttccccgaatttttctttgctgttgtagcttgtggcgttaaagaaaagttgaatgtgccagaggaggggtag

SEQ ID NO: 12154 - RNA, 909 nt, synthetic construct
  misc_feature 1..909: note = source = /note="Description of Artificial Sequence: Synthetic coding sequence"
  source 1..909: mol_type = other RNA
atgcgcaggtgggcttgggcagcagttgttgttctcttagggcctcagcttgtgctgctgggtggtgtcggtgctcgcagagaagcccaacgtacccagcaacccggccagcgggcagaccctcctaatgcaacagcgtcagcatcatctcgtgaaggactacccgaagcacccaagccgtcacaggccagtggaccagaattctccgatgcccacatgacctggcttaactttgttcggagacctgacgacggcgcgcttaggaaacgatgcggcagtcgtgacaagaaacctcgggaccttttcggcccacctggccctccgggagctgaggtaaccgccgaaaccctgttgcacgagttccaagaactcctgaaagaggccacagagagaaggttctccggtcttctggatccactgctgccacagggagcgggtttaaggctcgtaggggaagcctttcactgtcggctgcaaggtcccagacgcgtcgataagcggaccttggtcgagcttcacggcttccaggcaccagctgcccagggagcttttctccgtggatccggcctgtctttggccagtggtcgcttcacagcacctgtatccgggatattccaattcagcgcctctctgcacgttgatcacagcgagctccaaggaaaagccagactgcgcgcccgagatgtcgtgtgtgtcttaatctgtatcgagagcctttgtcagcggcacacatgcctcgaagccgtgagcgggctagagtcaaacagcagagtcttcacattacaggttcagggactgctccagcttcaggccggacagtacgcatctgtgttcgtggataatggttcgggtgcagtgctaactatacaagccggatctagtttctctggactcttgctaggtacctag

SEQ ID NO: 12155 - RNA, 1416 nt, synthetic construct
  misc_feature 1..1416: note = source = /note="Description of Artificial Sequence: Synthetic coding sequence"
  source 1..1416: mol_type = other RNA
atggatagcgctcctctgtttccccgaccccacctgtttcagaatctcttactgttcctctgggccttgctgaactgcggcctcggtgtgagcgcccagggcccaggggaatggacgccctgggttagttggactcgatgcagctcttcttgtggcaggggtgtgtcagtccgaagcaggcggtgtctgaggctgcccggagaggaaccttgctggggggacagccacgaatatcgtctgtgtcaactgcccgattgtccaccaggcgctgttcctttccgcgacctgcaatgcgctttgtacaatggccgtcccgttttggggactcaaaagacataccagtgggtgccttttcacggcgcaccaaatcagtgcgaccttaattgcctcgcagagggccacgctttttaccattccttcggaagagttctcgatggcaccgcttgttcacccggggctcagggcgtatgcgtcgctgggcgatgcctgtctgctggttgtgatggactattaggatctggagcactggaagacagatgtgggcgatgcggtggcgcaaacgactcctgtctgtttgttcagcgggttttcagagatgccggagctttcgcggggtactggaacgtgaccctgatccccgaaggtgcccgccacatcagggttgagcatcggagcaggaaccacctggcgctgatgggcggagacgggaggtatgttctgaacggccactgggtcgtcagccccccaggaacctacgaggctgctggaacgcacgttgtatatacacgtgatactggaccacaggaaacattgcaggctgccgggcccacctctcatgatcttctgctgcaggtgctattacaggaacctaatcccggcatcgagttcgaattttggttgcctcgcgaacgttacagcccttttcaagcacgtgtgcaggcattaggttggcctcttagacagccccagccacgcggtgtggagccccagccccccgcggcccccgccgtgacacccgcacagacaccaaccctcgccccagacccttgtcccccctgtccagatacacgggggcgagcccacagattattgcactactgcggctccgatttcgttttccaagccagggtcctaggacatcaccaccaggcacaggaaacccggtacgaagtgaggatccagctggtttataagaaccggtcaccactgcgagctcgtgagtatgtatgggctcctgggcattgtccttgtcccatgcttgccccccacagagactacctgatggcagtccagcggttagttagcccagacggaactcaggatcagctgctgctcccccacgctgggtacgccagaccttggtctccggcagaagactccagaatccgcttgaccgctaggagatgccccgggtag

SEQ ID NO: 12156 - RNA, 222 nt, synthetic construct
  misc_feature 1..222: note = source = /note="Description of Artificial Sequence: Synthetic coding sequence"
  source 1..222: mol_type = other RNA
atggcccctcagacattactgctggttttggtactgtgtgtgctcttattgcaagcccagggaggttatagagataagatgaggatgcagcgtattaaggtttgcgaaaaaagaccgtccattgatctatgtattcaccattgcagttactttcagaagtgtgaaaccaacaagatatgctgcagcgccttctgtggtaacatttgcatgtccattctgtag

SEQ ID NO: 12157 - RNA, 2349 nt, synthetic construct
  misc_feature 1..2349: note = source = /note="Description of Artificial Sequence: Synthetic coding sequence"
  source 1..2349: mol_type = other RNA
atggcacgggcccgggcaggcgcactgttagcattgtgggtgctgggcgctgccgctcacccccagtgtctcgacttccgaccaccattccgccccacacagccattgcggctgtgtgctcagtactccgactttggctgctgtgatgagggacgcgatgccgagttgactcggaggttctgggccctggcttcccgcgtagacgccgccgagtgggcagcctgtgccggctatgcccgtgacctgctctgtcaggagtgttctccatatgctgcccacctttacgatgcggaggaccccttcaccccactccgcacagtgccagggttatgtcaggattactgcctcgacatgtggcataaatgccgaggacttttccgccacctgtccaccgatcaggaattgtgggccctggaggggaacttggcgagattttgccgatatttgagtctggacgacactgactactgcttcccttatttgctagtgaataaaaatttgaattccaatctcgggcacgtagtggctgatgccaaaggttgccttcaactctgccttgaggaggtggcaaacggcctccggaaccccgtggcaatggttcatgcaagagacgggactcacaggttcttcgtggcagagcaagtgggccttgtgtgggcctacctccccgataggtccagactcggcaagccttttttgaacattagtagagtggtgctcactagcccctgggaaggtgatgaacggggcttcctgggcattgcttttcacccctcatttcagcacaaccgacgcctatacgtttactactcggtagggatcagatcaagcgaatggatcagaatatcagaatttcgagtgagcgaggatgatgaaaatgccgtcgatcactcttcagaacggataatactagaggtgaaagagcccgcgtctaaccacaacgggggacagctgttgtttggcgatgacggttacctgtacattttcactggagatgggggaatggctggggatcccttcgggactttcggcaatgcccagaataagtcagctctgctcggcaaggtgctcaggatcgatgtggacagaaaggagcgagggctcccatatggcattccacccgataacccgtttgtgggcgaccctgccgcacaacccgaagtgtatgctctgggcgtgcgcaatatgtggcggtgcagcttcgacagaggagatccatccagcggaacaggcaggggaagattgttctgtggggatgtgggccaaaacaaattcgaagaggtcgacgtggttgaacggggggggaattacggctggagagccagagaaggtttcgagtgttacgataggtcactgtgcgccaataccagtctaaacgatctgctccccattttcgcttatccacataccgtgggaaaatcagtcaccggagggtacgtttacagagggtgcgagtacccaaacctgaatggactttacatcttcggcgatttcatgtctggacgcttaatgtcactccaagaaaaccctggaactggccaatggcagtactccgaaatttgcatgggccacgggcagacctgcgagtttcctggtctgataaacaattactacccttacattatctccttcggtgaggatgaggccggcgagctgtattttatgtccactggggagccttccgccactgccccaagaggagttgtctacaaaataatcgacgcttccagacgcgctccgcccggtaaatgccagatccaaccagctcaggttaagatacgttcaagactgattccattcgtgccaaaggagaaatttatccccaaaacgaggtccaccccccgacccacggcccgcgcgcctactagagcaccgcggaggggcaggcctactgcagccccccctgctcctaccccaaggccagccagaccgacgcagcaacctggaagcaggcgaggcgggggccgacgcagaggccgattaaacagtgcgtctagggcttttcgcgacggtgaagttcgactggtgagaccagccggcctcagtagcggatccggccgagtcgaggtcttcgtgggtggtcggtgggggacggtctgtgatgattcatggaatatttccggggccgcagtggtttgtaggcaactgggtttcgcctatgcagtccgagcagtcaaacgcgccgagtttggacagggtgggagcctgccgatcctacttgatgatgtccgctgcgcaggatgggaaaggaatctcctggagtgtcagcataacggcgtgggtacccataattgtgagcacgatgaggatgcaggagtggtatgtagccatcagaaccccgacctttag

SEQ ID NO: 12158 - RNA, 1317 nt, synthetic construct
  misc_feature 1..1317: note = source = /note="Description of Artificial Sequence: Synthetic coding sequence"
  source 1..1317: mol_type = other RNA
atgcacccattgcccgggtactggtcttgttattgccttctgctattgttttccctgggggtccagggatctttaggtgccccctctgcggccccagagcaggtgcatctatcctaccccggtgagccagggtcaatgacagttacttggacaacatgggtccctaccagatccgaagttcaattcggattgcagccaagtgggcctctgcctctcagggctcagggaacattcgtccctttcgtggacggcggcatcttgaggcgaaagttgtacatccatagagtgactttacgcaagctattgcccggtgtacagtacgtctatcgctgtgggtccgcccagggttggtcacgccggttcagattccgtgccctaaagaatggagcccactggtccccgcgactggcagtgtttggagatttaggtgccgacaatcccaaggcagtacctagattaaggagggacacccagcaggggatgtacgatgctgtgctgcacgtgggagactttgcatataatctggatcaagataatgctcgtgttggcgataggtttatgcggcttatcgaacccgttgcagcttcattaccgtacatgacttgcccgggcaatcacgaggaaagatacaacttcagcaactacaaggcccgcttcagtatgccaggagacaacgagggcctgtggtacagctgggatttgggccccgcccatatcatctccttctccacagaggtttatttttttcttcattacggtaggcacttggtgcagaggcaattccggtggctcgaatcagatctgcagaaagccaataagaacagagctgcccggccttggataatcacaatggggcaccgcccaatgtattgtagtaatgctgatctggacgattgtacacggcatgagagcaaagtgagaaaggggcttcaaggaaagctctacggcttagaggacttgttttataagtacggcgtcgacctgcagctgtgggcgcatgaacactcttacgaacgcctgtggcccatctacaactatcaggtatttaacggatcacgggaaatgccctatactaaccccagaggaccagtgcacatcattaccggatccgctggctgcgaggaaagactgacgcctttcgcggtgttccctcgcccatggagcgccgtacgtgttaaggagtacggttatacccgtctgcacatcctgaacggtacccacattcacattcagcaggtttcggacgatcaggacggtaagatcgtggacgacgtctgggtggtgcgaccacttttcggccgacggatgtatttgtag

SEQ ID NO: 12159 - RNA, 411 nt, synthetic construct
  misc_feature 1..411: note = source = /note="Description of Artificial Sequence: Synthetic coding sequence"
  source 1..411: mol_type = other RNA
atggctcggacaaaacaaacagcgcgtaagtcaacaggcggaaaagctcctagaaagcagttggctacaaaagctgcccgaaagagcgctccagcaacggggggtgtgaagaaaccacatagatatagaccgggaacagtggccctgcgcgagattagacggtatcagaaaagtaccgagctattgataagaaagttgccatttcagagacttgtgcgagagattgctcaagatttcaaaaccgacctgcggttccaatctagcgcggtgatggccctccaggaagccagtgaagcatatcttgtgggcctgttcgaggatacaaatctctgcgctatccatgccaaaagagtcaccattatgccgaaggacattcagttggctcgcagaatcagaggggaacgggcatag

SEQ ID NO: 12160 - RNA, 1209 nt, synthetic construct
  misc_feature 1..1209: note = source = /note="Description of Artificial Sequence: Synthetic coding sequence"
  source 1..1209: mol_type = other RNA
atggctgccaggcccggccctctgtggcttctgggattgacactgtgcgctctgggaggaggcggcccagggctccgacccccaccaggatgtcctcagcgccgattgggggccagggaacggagagacgtgcagagggagatcctggccgtcctggggctccctggccgccccagaccgagggcccctcctgccgcctcacggttacctgcgagcgcacccttgttcatgctcgatctgtaccatgccatggccggcgacgatgatgaggatggagcccccgctgaacagagactgggccgagctgatctggtaatgtcctttgtgaacatggtagagagagacagggccctgggccaccaggaacctcactggaaggaatttcgcttcgatcttacgcagatacccgctggagaggccgtcaccgctgccgaattccggatttataaagtcccctctatccacctccttaatcggacactgcacgtgagtatgttccaggtggtgcaagaacagtcaaatagagagagcgacttgttcttcctcgacttacagacacttagagcaggcgacgaaggatggttagtgctcgatgtaacggccgcttccgattgctggctcctcaaaagacataaggacctcgggcttagattatacgttgaaaccgaagacggccacagcgtcgaccctggtctcgccggtctgctcggccagcgtgccccccgaagtcagcagccatttgtggtgacttttttccgagcttcccctagtcctatccggaccccaagagcagtgcggcccttgcgccgacgccaaccaaagaaatcaaatgaattgccccaggcaaacagacttccgggcatttttgatgatgtacggggttcccacggtcggcaggtgtgtcggaggcatgagctctacgtttctttccaggatctgggatggctggattgggtgatcgctccacaggggtattccgcctattattgtgaaggcgagtgcagttttccattggactcttgtatgaacgccaccaaccacgctatcttgcagtctttggtccatctcatgaaaccaaatgcagttcccaaagcctgctgcgcccccacaaaactgagcgccacatctgtgctatattatgactcttcaaataacgtgatccttaggaagcacaggaacatggtggtgaaagcctgcggctgtcactag

SEQ ID NO: 12161 - RNA, 957 nt, synthetic construct
  misc_feature 1..957: note = source = /note="Description of Artificial Sequence: Synthetic coding sequence"
  source 1..957: mol_type = other RNA
atggcggccgccgctttaccccctaggccccttctgctcctgcctctcgtccttttactctcaggacggccaaccagggcggatagcaaagtttttggagacctggaccaggtaagaatgacttccgaaggctctgactgtcgctgcaaatgtatcatgagacccctgtcaaaggatgcctgctcaagagtgcgatcaggacgagcaagagtggaagatttctatactgtggaaacggtgtcttcaggcacggactgccgatgcagctgcaccgctcctccatccagtcttaacccctgcgagaatgagtggaaaatggaaaagttaaaaaagcaggctcccgaactccttaagtctatcaaggccaacctgtcccgggagaatgaggtggtcaaagattccgtgagacacctttcagaacagctgcgacactatgaaaatcattccgccattatgctgggcataaaaaaggagctgagtagactcggccttcagctattacagaaggacgctgctgctgcccctgcaactccagccacagggacaggttctaaagctcaagatacagcacgtggcaaagggaaggatatatctaaatatggatcggtccagaagtcttttgctgatcgcggtttgccaaagccccccaaagagaaacttcttcaggtcgagaagctgcgcaaggagagcggaaaaggttcctttcttcagcctacagcaaaaccacgagcacttgcacagcagcaagctgtgatccgaggcttcacctactacaaggctggcaagcaagaggtgacagaggcagtcgcggacaataccctgcagggtacttcatggttagagcagctgccccctaaagtcgaggggcgatcaaatagcgcagagcctaacagtgcagagcaagacgaggccgagcccaggtcttcagagagggtcgatctcgcctccggaacttag

SEQ ID NO: 12162 - RNA, 402 nt, synthetic construct
  misc_feature 1..402: note = source = /note="Description of Artificial Sequence: Synthetic coding sequence"
  source 1..402: mol_type = other RNA
atggccctgggagtccctatctccgtgtatctcctgttcaacgcgatgactgcattaactgaggaagcagcggtcactgtcacgccacctatcactgctcaacaagccgataacatcgaagggcctatcgcactcaaattcagccacctgtgtctcgaggatcacaattcctactgcatcaacggggcttgcgccttccaccacgaactggaaaaggccatctgtagatgttttacaggctacaccggcgagcggtgtgaacacttgacactcacctcctacgccgttgatagctacgagaaatacattgcgatcggcattggtgttggtcttcttctgagtggctttctggttatcttctactgctacataagaaaacgatacgaaaaagataaaatctag

SEQ ID NO: 12163 - RNA, 651 nt, synthetic construct
  misc_feature 1..651: note = source = /note="Description of Artificial Sequence: Synthetic coding sequence"
  source 1..651: mol_type = other RNA
atgtcttcagaagccgagacgcagcaaccccccgcagcgcctccggctgcccccgcactttccgccgccgacacaaagccagggaccactgggagcggcgccgggtccggaggacctgggggattgacatccgcggccccagcagggggtgataaaaaagtcattgccaccaaggttctaggaacggttaagtggttcaacgtcaggaatggctatggctttatcaatcgaaatgatacaaaggaagacgtgtttgtacatcaaggcgctgaggccgcgaatgtgactgggccaggaggagtgccagtgcaaggcagcaaatacgcagcggacagaaatcattaccggagatatccacgtcgtagaggtcctcctagaaattatcagcagaactatcagaattccgagtccggggaaaagaacgaaggatctgaatctgcacctgagggacaggctcagcaaagaaggccctatagaagaagacggtttcctccctattacatgaggcgaccatacggaagaagacctcaatacagcaacccacccgttcaaggtgaggtgatggaaggagccgataatcagggcgcgggagaacaggggagacccgtcagacaaaacatgtaccgcggttacagaccacgattcagatag

SEQ ID NO: 12164 - RNA, 756 nt, synthetic construct
  misc_feature 1..756: note = source = /note="Description of Artificial Sequence: Synthetic coding sequence"
  source 1..756: mol_type = other RNA
aacgactggtcggcggatcaactttatctggagacgaccggaaagtcacgcacactgcagtcgggactagcactgctgtacggctttctgcccgatttcgattggaagaagatctatttcagacatcaaccatctgccttattttgttcaggcagttgctattgccccgttagaaatcagtatctcgaaaaggaacagcgtaggcagtatctgttgagactgaaaaattctcagctagaaaagacctacggcgaaatggcgaagattgtcgatgtccctaccaaacaattacgtgcagcgaatcctatagacagcatgctgtgtcatttctgtcacaatgtgagcttcccgtgtaccagaaacgggtgtgtagatatggaacacttcaaggtcatcaagactcaccagatagaagacgagagggaacgcagagagaaaaaactttattttggttacagtctgctgggcgcacaccccatactgaatcaaactataggccgcatgcagagagccactgaagggcgcaaggaagagctgtttgcactatatagcgcccacgacgtgacactgagccctgttctctccgctctcggcctctcagaggcccgctttcctcgctttgccgcaagagtaaatataccatccggctttttcaccatggctagcatgtcgcactctacccctctatcagctaaaacaactacaagtgttttgccttctccctgcgccagacttaagacttggtcagcattatag

SEQ ID NO: 12165 - RNA, 576 nt, synthetic construct
  misc_feature 1..576: note = source = /note="Description of Artificial Sequence: Synthetic coding sequence"
  source 1..576: mol_type = other RNA
atggccgccccaagaggtagagcggccccatggaccacagctctgctgctgttgctggcctcacaggtgctgagtccaggcagctgcgccgatgaggaggaggttccagaggaatgggtgctcttacatgtcgttcagggccagatcggagccggcaattattcctacctcaggttgaaccacgagggtaagatcgtactccggatgagatccctcaaaggagacgccgacctgtatgtaagcgcatcatcacttcatccctcgttcgacgactacgagctgcagtctgccacatgcggcccagacgccgtatctattcctgcgcattttcgccgaccagttggcatcggagtatacggacatcctagccatcttgaatccgagtttgaaatgaaagtttattacgacggcaccgtagaacaacacccattcggcgaggcagcctatccagccgacggcgccgatgcaggacaaaagcacgccggcgctccagaagacgcatcccaggaggaagagtctgtgctgtggacgatccttatcagtatcctgaaactggtgctggaaatcctcttttag

SEQ ID NO: 12166 - RNA, 2301 nt, synthetic construct
  misc_feature 1..2301: note = source = /note="Description of Artificial Sequence: Synthetic coding sequence"
  source 1..2301: mol_type = other RNA
atgggcaggagacggttgttagtatggttgtgcgccgtagccgccctccttagcggcgcccaagccaggggaacaccgttactggctagacctgccccccccggcgcctccagatacagcctctacacaaccggctggagacctaggctcagaccaggccctcataaggccctatgcgcttatgtggtgcatcggaatgtgacatgtattctccaggagggagccgagtcatatgtcaaagcagagtacagacaatgtagatggggcccgaagtgccctggaacagtgacttacaggaccgtcctgaggcctaagtataaggttggttataagacggtgacagacttggcttggcgctgctgccccggctttaccgggaagcgatgcccagaacacctgacagatcatggcgcagcaagtccacagttagaacctgaaccgcagatcccatcgggccaactcgatcccggacctagaccgcccagttactcccgagctgcaccctctccgcacggaagaaagggtcctggcctgtttggagagagacttgaaagactggaaggagacgtccagaggctggcgcaaacatatgggaccctctccgggctggtggcatcccacgaggaccctaaccggatgactggcggacctcgggctcccgccgtgcctgtcgggtttggtgtgattcctgaagggctcgtgggaccgggagatcgtgcaagaggtccgttaacaccacctctcgatgaaatactgtccaaggtgacagaggtttctaatactctgcagaccaaagtgcagctcctagataaggtacatggactggcgctaggccacgaagcacaccttcaaaggctccgcgaggcgccgccttccccccttacctcgctcgccctccttgaggaatacgtagatagacgacttcaccgcctgtggggcagcttgctggatggattcgaacaaaagctgcagggcgtccagagcgagtgtgacctgcgggttcaggaggtgcggagacagtgtgaggaagggcaagccgcttcacgacggctccatcaaagcctggacggcagagagctggctttacgccaggaactgtcccagctggggagccaactccagggtttaagtgtcagtggaaggggttcatgctgtggccagctggccctgattaacgctaggatggatggtctggagagagccctgcaagccgtgactgagacacagcgtggccccggcgcaccggccggcgacgagctcactcgcctctccgcggcaatgttggaaggcggtgtggatggtctcctcgagggcctggaaacgctgaatggaactgaagggggagccagaggttgttgtctgagactcgatatgggcggttggggggtcggcggttttggcaccatgctagaagaacgagtgcagtcactggaggagaggctagcaacactagccggcgagctgagccacgacagtgcctctccaggcagatccgcccggccacttgtccagacggagctagctgtcctggaacagcggctagtgagcctcgaaaccagctgtacacctagcacgacctctgcaatattagacagccttgtagctgaagttaaggcatggcagtctcggtcagaagcactcttaaggcaggtggcatcccacgctgcattactgcagcagctgaacggtactgtcgccgaagtgcagggtcagttagcggagggcactggaagttctttgcagggggaaatcacactactcaaagtgaatctgaatagcgtttcgaagagtctcacaggcctgagcgacagtgtgtcccaatatagcgacgccttccttgcagctaacacttctctggacgaacgcgagagaaaggtagaggcggaagtacaggcaatccaggagcaggtatcttcgcaaggctcacggttacaagccggtcatagacaggttctcaaccttaggggtgagctcgaacagctcaaagctggggtcgctaaggtggcctccggattgagccgttgtcaggacacagcacagaagctacagcacacggttgggcacttcgaccagagagtggcacaggtcgagggcgcctgtagacggctagggttgcttgcagcagggcttgattctttacccaccgaaccgctgcgaccgcgcgagggcttatggtcacatgtggaccagctcaataggaccctggcgcaacacacccaggatatcgctaggctgcgggacgatcttttagattgccaagcccagttggccgaacaggtgcgtcccggtcaggcaaactag

SEQ ID NO: 12167 - RNA, 1251 nt, synthetic construct
  misc_feature 1..1251: note = source = /note="Description of Artificial Sequence: Synthetic coding sequence"
  source 1..1251: mol_type = other RNA
atgtatagacatgggatctcttcacagcgctcctggcccttgtggaccacaatatttattttcttaggggtggcagctattctcggtgtgaccattggactcctcgttcatttccttgcagtggaaaagacatactattaccagggagactttcacatctccggagtgacctataacgataactgcgaaaacgctgctagccaggcctctacaaacctttcaaaagatatcgagactaaaatgctgaacgcattccagaattcaagtatatacaaagagtacgtgaagtcagaagtgatcaagctgctccccaatgccaacggttcaaacgtgcaacttcaactgaagttcaaattcccacctgccgaaggggtctccatgaggaccaaaattaaagcgaaactgcatcagatgttaaagaacaatatggcaagctggaacgccgtccctgcgtctatcaagcttatggaaattagcaaggccgcatctgagatgcttacaaataactgttgtggacggcaggtcgccaattctatcattaccggaaacaagatagtgaacggcaagagctccctcgagggggcctggccttggcaggcctcaatgcagtggaaaggcaggcattactgcggagcatctctcatttcatctagatggcttctctccgccgctcactgctttgccaagaagaacaacagcaaggattggaccgtcaatttcggtattgttgtcaataagccctacatgacacgtaaagtccaaaacatcatttttcacgaaaactattcttcaccgggcctccatgacgatatcgccctagttcagctagctgaagaggtttccttcaccgagtatatccgtaagatttgtctgcccgaagctaaaatgaagctcagcgaaaacgataacgttgtcgtcaccggctggggaaccctgtatatgaatggctcatttccagtaattctgcaggaggactttctgaaaatcatagacaacaagatttgcaatgcttcttacgcctactcaggattcgttacggacacaatgttgtgtgcaggcttcatgtccggggaggctgatgcctgccagaatgacagcggcggacctctggcgtaccctgactcccgcaacatctggcaccttgttggaattgtatcctggggtgacgggtgcggaaaaaagaataagcccggcgtttacacacgcgtgactagttatcgaaactggataacttccaagacaggactttag

SEQ ID NO: 12168 - RNA, 639 nt, synthetic construct
  misc_feature 1..639: note = source = /note="Description of Artificial Sequence: Synthetic coding sequence"
  source 1..639: mol_type = other RNA
atgctgtcatccgtcgtattctgggggctgatcgctttaatcgggaccagccgtggatcttaccctttttcacacagcatgaagcctcatcttcacccaaggttgtatcatggctgttatggagacattatgactatgaagacttctggtgccacctgcgatgctaacagcgtaatgaattgcggtattagaggctctgaaatgtttgccgaaatggacttgcgcgccatcaaaccgtatcagactctgatcaaagaggtaggccaacgtcactgtgtggacccggcagtgattgcagctattatttctagagagtcacatggtggcagcgtgctgcaggatggatgggaccaccgaggactgaagttcggcttgatgcagctcgataaacagacctaccaccctgtaggagcctgggacagcaaggaacacctctcgcaggccactggaattctgactgaaagaatcaaggccatccagaaaaaattccccacctggtctgtcgcccaacatctgaagggcggccttagcgccttcaagtctggaatcgaagccattgcaacaccatctgatatcgacaacgatttcgttaacgatatcatcgcccgagcaaagttttataagagacagagcttttag

SEQ ID NO: 12169 - RNA, 378 nt, synthetic construct
  misc_feature 1..378: note = source = /note="Description of Artificial Sequence: Synthetic coding sequence"
  source 1..378: mol_type = other RNA
atggcccgatcagctacactggccgcggcggccctagcgctttgtctgctcctggcacctcccggactggcatggtataaaccagccgcaggccacagttcctacagcgtaggtagagccgccggactgctgtctggacttcgtcgttccccatacgcccgcaggagtcaaccgtaccgcggagcagaaccacctgggggcgccggcgcttcccctgaattacagctgcacccacgattacgctctctcgctgtgtgcgttcaggacgtggcgcctaatcttcaaagatgcgagcgactgcccgatggccgtggtacttatcaatgcaaagccaacgttttcctgtcactgagagcagcagattgcctagccgcctag

SEQ ID NO: 12170 - RNA, 867 nt, synthetic construct
  misc_feature 1..867: note = source = /note="Description of Artificial Sequence: Synthetic coding sequence"
  source 1..867: mol_type = other RNA
atgaataatctgtcatttagtgaactttgctgcctgttttgttgtcccccttgccctggcaaaatcgctagcaagctcgcctttttacccccggatccaacctataccctgatgtgtgatgagtctggtagtagatggaccctccacctttctgaaagagcggactggcaatactcctctagagaaaaagatgccatagagtgctttatgacccgaacatctaaagggaatcggattgcctgcatgttcgttagatgtagtcccaacgccaaatacaccctactgttcagccacggcaacgcagtggatctgggccaaatgagcagcttttacatcggcctaggatcaagaatcaattgtaatattttctcctacgactattccggttacggcgcttccagcggaaaacctaccgaaaagaacctttacgccgacattgaggccgcttggctggcgctcagaacacgttacgggatcaggcccgagaacgtgatcatttatggacagtccatcggtacggtaccatccgtggatctagcagctaggtacgagtctgctgccgtgatcctacacagcccactcacctcaggcatgcgagtggccttccccgatactaagaagacatattgtttcgatgcatttccgaacattgacaaaatctctaagataactagccccgtcctgattattcacggcaccgaggatgaggtgattgattttagccacggtctggctctgttcgaaaggtgtcagcgtccagtggaacctttgtgggtggagggagctggacataacgacgtggaactgtacgggcaatatctggaaagactgaaacagttcgttagccaggagctcgtgaacctgtag

SEQ ID NO: 12171 - RNA, 417 nt, synthetic construct
  misc_feature 1..417: note = source = /note="Description of Artificial Sequence: Synthetic coding sequence"
  source 1..417: mol_type = other RNA
atggttgcacccgctgctagagtgtttctgagagcagttagagcagctttaacatctaccgtgccagatctgctctgtctactggctagaggctctcccaggggcttagcatcggggcggttaccgcttgcggtacactcggcacagcacggacccggatcaggtgccccttggcttagaattgcgaggagagcactgcgcttcgtactgtcgaaacactggggcgacgactgctaccttacgaatcgcctgtggcaggatttgaaacccccatctcacgtggagaatggtcaggagctgcggttggcccccccggtacagtgggctcttcaggtccagggcaaccagctgcaaacggctgtcctttgtctcagaatggcacctcccgaacccgctggctcaagacagagaatctag

SEQ ID NO: 12172 - RNA, 1332 nt, synthetic construct
  misc_feature 1..1332: note = source = /note="Description of Artificial Sequence: Synthetic coding sequence"
  source 1..1332: mol_type = other RNA
atgggaggcccaagggcttgggcactgttgtgcctgggtctcctactaccaggcggcggcgcagcatggtccattggagccgcaccattctcaggtcgaagaaactggtgctcatatgtcgtgacgaggaccatctcttgccatgtgcagaacggaacctacctccagagggttctgcagaattgtccctggcctatgtcatgcccggggtccagctacagaaccgtggttaggcccacttacaaagtgatgtacaaaattgttaccgccagagaatggcgatgttgtcccgggcacagcggggtgtcctgcgaagaagtggctgccagtagtgcttcccttgagcccatgtggtctggatcaacaatgcggcgaatggccctgcgcccaacagcattttcaggatgtctgaactgctcaaaggtgagcgagctgaccgaacggctcaaagtcctcgaagccaagatgactatgctaacagtcatcgagcagcccgtccctcccacacctgccactcccgaagaccccgcgccactatgggggccacctcccgcacaagggtcgccaggtgatggcgggctccaggaccaggtgggcgcatggggtctccccggaccaacgggccctaagggggacgctggtagtcgcggccctatgggcatgaggggcccacctggcccccagggaccccctgggagccctggaagggctggggctgtgggcaccccaggcgaaagaggtccacctggccccccaggtcctcctgggcccccagggccccccgcgccagtcgggcccccgcatgctcgtatctcccagcacggggatccattactgtcaaacaccttcactgaaaccaataatcactggccacagggtcctactggcccccccggtccgccaggacccatgggcccaccggggcctcccggcccgactggcgtgccaggatcaccaggccatatcggccccccaggacctactggacctaaagggatttccgggcatccaggagagaaaggagaaaggggcttgcggggggaacccggccctcagggcagtgcagggcagcgtggagagcccggaccaaaaggagatcccggtgaaaagtcccattggggcgagggactgcaccaactccgtgaagcactgaagattctagccgagcgggtcctgattctagagactatgattgggctgtatgagccagaactcggcagcggagccggtccagcagggacaggaaccccatcattgctgcgaggtaaaaggggcggacacgcgactaattacagaatcgtggcaccaaggtcgcgcgatgagagaggttag

SEQ ID NO: 12173 - RNA, 717 nt, synthetic construct
  misc_feature 1..717: note = source = /note="Description of Artificial Sequence: Synthetic coding sequence"
  source 1..717: mol_type = other RNA
atggtactactgctgctggtcgccattccgctgctggtgcatagttcacgcggacccgcccattacgagatgctcggtcggtgcaggatggtgtgtgacccgcacggacccaggggacctggtccagacggagcacctgcttccgtgcctccttttcctcctggcgccaagggcgaagtaggcaggagaggtaaagccggacttcgaggccctccaggacctccggggccacgaggacctccgggagagccaggaaggccggggccaccaggtccacccggtccaggcccaggaggagttgctccagcagcagggtatgttcccagaattgccttctacgccggcctaaggaggccacacgagggctacgaggttctcaggttcgatgacgtggtcactaacgttgggaacgcctacgaagccgctagcgggaaattcacatgccctatgcctggtgtatactttttcgcctaccacgtgttaatgaggggaggggatggaacatcaatgtgggcagatctgatgaagaatggacaggtgcgcgcttcagctattgcacaagacgccgatcagaactatgattacgccagcaactcagtaatcttgcatctggatgtaggggacgaagtgttcattaaactcgatggtggaaaggttcacggaggaaacacaaacaaatatagcacctttagtgggtttatcatctaccccgattag

SEQ ID NO: 12174 - RNA, 282 nt, synthetic construct
  misc_feature 1..282: note = source = /note="Description of Artificial Sequence: Synthetic coding sequence"
  source 1..282: mol_type = other RNA
atgaagctctttctagttttaataatcttgctgtttgaagtcttaactgatggagcacggctgaagaaatgttttaataaagtaaccggatactgcaggaaaaagtgtaaggtaggtgaacgctatgagattggatgcctcagcggaaagctgtgctgcgcaaatgacgaagaggaaaagaaacatgtttctttcaaaaaaccccatcaacatagcggcgaaaagttgagtgtacttcaggactatattatcctgccaacaatcacgatttttaccgtgtag

SEQ ID NO: 12175 - RNA, 609 nt, synthetic construct
  misc_feature 1..609: note = source = /note="Description of Artificial Sequence: Synthetic coding sequence"
  source 1..609: mol_type = other RNA
atggttaggatttggaccactatcatgattgtcctgattctcctgttaagaattggccctaataagccctccctcagtggaagacaagccccagctcaagcacagacatccgatcttgtaccttctctcttcccactcgggttatgggcacccgggttttgtacctggtctagcccggatgaggacaaagtgtggagaccggcttgggagcagggacctaaaggtgagccggacccaagaggactgcggcccagaaaacccgtccctggaacaggaaaccgcgacagcgggacccggcggcggctgcaggacgccacagagcaagacccacgccctggaaacgacgtcgcatctgctgaaaccgccgggcccccctccccctccggaattagagcacaggaccgcgcgccccggcaccgccgagcacccccagcccgaatgccagtggccccagcgccttcagccgatggtgagcccctccaggaacaaggcggcggactctttcacaggactcggtccgtctacaatggtttagagctgaacacttggatgaaggttgagcggttattcgtggagaagtttcaccaatcatttagccttgacaattag

SEQ ID NO: 12176 - RNA, 342 nt, synthetic construct
  misc_feature 1..342: note = source = /note="Description of Artificial Sequence: Synthetic coding sequence"
  source 1..342: mol_type = other RNA
atgctgccctgcttagctctactgctgctgatggaactgtctgtgtgcacagtggccggtgatgggggcgaagaacagactctgagcactgaggcagagacgtgggtgattgtggccctagaagaaggagcaggaccttcaattcagctccagctccaggaagtcaagacaggaaaagcatctcagttttttggactcatgggcaagagagtgggggggaggccactaattcagcctaggcgcaaaaaggcatatcagcttgaacatacttttcagggattgctgggcaaaagatccctgtttacggaagggagagaggatgaagcacagggatccgaatag

SEQ ID NO: 12177 - RNA, 1269 nt, synthetic construct
  misc_feature 1..1269: note = source = /note="Description of Artificial Sequence: Synthetic coding sequence"
  source 1..1269: mol_type = other RNA
atggggcccgcctggttgtggttactgggaactgggatccttgccagcgtacactgtcagccacttctggctcacggagataaatcattacaagggccacaaccccctaggcaccagctctctgaaccagcccccgcctaccataggataacacccacaattacaaattttgccttacgcctctataaagaactcgcagctgacgcacccggtaatatattcttcagccctgtaagtatctcaactactcttgcattgttaagtcttggggcccaggcgaatacctccgcgctcatcctggaaggactcggctttaaccttaccgaaacccccgaagcggatatccaccagggcttccgatctctgctacacactctcgcccttccttcccccaagcttgagttgaaagtgggtaacagcctgttcctagataagcgtctgaaaccacggcaacattacttggattcaatcaaagagctgtatggtgcctttgcattcagtgccaatttcacggattccgtcactacggggcgccagattaacgactacctgagacgccagacatatggccaggtagttgattgcttgcccgagttttcccaggacaccttcatggtgctggctaattacatcttcttcaaagcgaagtggaaacatcctttttctaggtatcaaacccaaaagcaggaaagcttctttgtggacgagcgcacatctctgcaggtgcctatgatgcatcaaaaggaaatgcacaggtttctgtacgaccaagacctagcctgtaccgtgctgcagatcgagtatagagggaacgccctggcactcctggtgctccctgaccccgggaaaatgaaacaggtggaagctgccctgcaacctcaaaccctcaggaaatggggacaactcttgctgccgtcactccttgatcttcacttacctcggttttcaatctcagggacctataacctggaggacattctgccacagatcgggctgactaatattctaaacctcgaagctgatttttctggagtcaccggccagctcaacaagaccattagcaaagtaagccacaaagccatggttgatatgagtgaaaagggcaccgaggcaggggctgcatccggattgctatcccaacctccaagcctgaataccatgagtgatccacacgctcacttcaacaggccttttctccttcttctctgggaggttaccacccaaagcctccttttcctgggcaaggttgtgaatccggtggctgggtag

SEQ ID NO: 12178 - RNA, 237 nt, synthetic construct
  misc_feature 1..237: note = source = /note="Description of Artificial Sequence: Synthetic coding sequence"
  source 1..237: mol_type = other RNA
atggccctgattaggaaaaccttttattttctttttgccatgtttttcatcctcgttcagctccccagcgggtgccaagcaggactggacttctcacaaccgtttccttcaggagaattcgccgtctgcgagtcttgcaaactcggtcgcgggaaatgcaggaaggagtgtttagaaaatgaaaaaccagatggaaactgcagactgaacttcctgtgctgtagacaacgaatttag

SEQ ID NO: 12179 - RNA, 2139 nt, synthetic construct
  misc_feature 1..2139: note = source = /note="Description of Artificial Sequence: Synthetic coding sequence"
  source 1..2139: mol_type = other RNA
atggctgccgctgggctcgtagctgtcgctgccgcagctgagtactccggcaccgtggctagcgggggcaatttgcctggcgtacactgcgggcctagtagcggcgctggtcccgggttcgggccaggctcttggtcccgctctctagatcgtgccttggaagaggcagctgtcactggggtgctaagcctttcgggccggaagctgcgggaattcccacgcggcgctgctaatcacgatcttacagacaccacacgcgctgacctgtctagaaaccgcctgtctgagatcccaatcgaggcctgtcactttgtcagcctagagaacctgaacctttatcaaaactgtatccgctacatcccggaggcgatcctgaatctccaggccctaacatttctcaatatcagtcggaatcagttatcaacactgcctgtccatctgtgcaacctgccacttaaggttttgatcgccagcaataacaagcttgttagcttgcccgaagagatcggacacttgcgtcaccttatggagttagacgttagctgtaacgaaatccagactattccttcccagatcggcaacctcgaagctcttagggacttgaacgtgcgtcgcaaccacctggttcacctccctgaggaactcgcagaactcccacttatccgattggacttcagttgcaacaaaattaccaccatccctgtatgttacaggaatctgaggcatctgcaaacgattacactggacaacaatccactccaatcccctcctgcacaaatttgtattaaaggcaaggttcacatttttaaatatcttaacatccaggcgtgtaaaatcgcgcccgacttgcccgactacgacagaaggcctttaggttttggatcttgtcacgaggaactctatagctcaaggccttacggcgctctggattccggctttaattctgtggattctggagataagcgttggagcggtaatgagccaaccgacgaattctcagatcttcccttacgggtggcggaaattactaaagaacagaggctacgtcgcgaatcacagtaccaagagaatagaggatcgctcgtggtcaccaatggcggcgttgagcatgatttagaccagattgattatattgattcttgtaccgccgaggaggaggaagccgaagtcagacagcccaaggggcccgatccagacagcctcagcagtcagttcatggcttatattgaacaaagacgtattagccacgaagggtccccagtgaaacccgtggcaatccgagagttccaaaagaccgaagatatgcggaggtatttacatcagaaccgcgtgcctgcagaaccaagcagccttttgtctctgtcagcatcacacaatcaattgagccacaccgacttggaactccaccaaaggagggagcaactggtggagcgtacccggcgcgaagcccagctggccgccctgcagtacgaagaggaaaagattaggaccaaacaaattcaacgggacgccgtcctggacttcgtaaaacagaaagctagtcagtctccccaaaagcagcatcccctgctagatggtgttgatggcgaatgccctttcccctctcgtcgatcccaacacaccgacgatagtgctttatgcatgtccctgagcggtctgaatcaggtggggtgtgctgccactctaccccatagctccgctttcacacctctgaagtctgatgatcggcctaatgccctgctgagcagcccggccaccgaaacagtccatcatagtccagcatattccttccctgccgcaatccagagaaaccagcctcagagaccggagtctttcctctttcgggcgggggttcgcgctgaaacaaacaaaggccacgcctcccctctcccaccctccgccgctcccaccaccgattccaccgattcaatcactggccaaaatagccggcagagagaggaagaactcgagcttattgaccaactgaggaagcatatcgagtatcgactgaaagtctccctcccttgcgatttaggcgctgcgttgacagacggagtggttctttgtcacctagccaaccacgtgcgaccaaggagcgttcctagtattcacgtgccttctcctgctgtggtgtcttag

SEQ ID NO: 12180 - RNA, 213 nt, synthetic construct
  misc_feature 1..213: note = source = /note="Description of Artificial Sequence: Synthetic coding sequence"
  source 1..213: mol_type = other RNA
atgcgcgtacttttttttgtgttcggtgttctgagcttaatgtttactgtgccacccgctcgctctttcatctctaacgacgaatgcccttctgaatattaccactgtcgtctcaagtgtaacgctgatgagcacgccatcagatattgtgctgactttagtatctgttgtaagcttaaaatcatcgagatagacggccagaaaaaatggtag

SEQ ID NO: 12181 - RNA, 789 nt, synthetic construct
  misc_feature 1..789: note = source = /note="Description of Artificial Sequence: Synthetic coding sequence"
  source 1..789: mol_type = other RNA
atggcagcagcatcagcaggggctacccggctgctactactccttctaatggcggttgccgctccaagtagagctcgaggaagcggatgccgagccgggaccggggcccggggcgcaggagccgaaggtcgtgagggcgaggcttgtgggacagtcgggttgctcctggaacatagttttgagatcgacgatagcgctaatttcaggaaaagagggtccctactgtggaatcagcaggatggtacgctgtccctcagccaaagacagctgtctgaagaggaacggggcaggctccgggacgtagctgccttgaatgggctatacagagttaggattccaaggcgacccggtgcactggacggtctagaggccggaggttatgtgagcagcttcgtccctgcttgctcgctggtggagtcgcacctctcggaccagcttacccttcatgtagacgtagctgggaatgtagtgggcgttagcgtggttacccaccccgggggttgccgagggcatgaagttgaggatgttgaccttgaactgtttaatacatcagtacaattgcaaccacccacgacagctcccggccccgaaactgccgcgtttatagaaagattggaaatggaacaggcacagaaggccaagaacccacaagaacagaagagcttttttgccaaatattggatgtacatcatccctgttgttctttttctgatgatgagtggagcgccagatacaggcgggcaaggcggcggcggcggtggcggcgggggtggggggtcagggcggtag

SEQ ID NO: 12182 - RNA, 150 nt, synthetic construct
  misc_feature 1..150: note = source = /note="Description of Artificial Sequence: Synthetic coding sequence"
  source 1..150: mol_type = other RNA
atggactcttctcgagaacctaccctggggcgcctggatgctgcgggtttttggcaagtgtggcaacggttcgacgcagacggccacgggcatgagagcaagttcgcccaaggagagaccgctgtatatgattatcccagatgcttgtag

SEQ ID NO: 12183 - RNA, 213 nt, synthetic construct
  misc_feature 1..213: note = source = /note="Description of Artificial Sequence: Synthetic coding sequence"
  source 1..213: mol_type = other RNA
atgcctggcgcgatgaaaatctttgtcttcatcctggctgccctcatcttgctcgcacaaattttccaggcccgcaccgctatacatagagccctcattagtaaaaggatggaaggccactgcgaagccgagtgtctcaccttcgaagtgaaaatcggcggatgtcgagcagaactcgccccattctgctgtaagaaccggaagaaacactag

SEQ ID NO: 12184 - RNA, 711 nt, synthetic construct
  misc_feature 1..711: note = source = /note="Description of Artificial Sequence: Synthetic coding sequence"
  source 1..711: mol_type = other RNA
atgatgccagccgaacgtaggctcccactctcttttgttcttgacgtcctggagggacgtgcccaacatcccggtgtgctttatgtacaaaaacagtgttctaatctgccctccgagcttccccagctcctaccggaccttgagtctcatgtcccatgggcctctgaggctctgggcaagatgcctgatgctgttaacttctggctgggcgaagccgccgctgtgacctcactgcacaaagatcattacgaaaacctctattgcgtcgtttcaggcgagaagcattttctcttccacccaccttcggaccgcccattcatcccatacggactgagggtcccaggatgcctgcaattccctcataccctgctgccctgggccccagaattgtacactcctgcaacttatcagctgaccgaagaagggacgttcaaagtggtcgatgaagaagcaatggaaaaagtaccatggatccctttggacccacttgcccccgatctagcccgctatccatcctattcacaagcacaagccttaagatgtaccgttagggccggcgagatgctgtacctaccagcactctggttccatcatgttcagcagtctcaaggctgcatcgccgtcaacttctggtatgacatggagtacgacctcaagtactcttactttcagttattggatagcttaaccaaagcctctgggttagactag

SEQ ID NO: 12185 - RNA, 1098 nt, synthetic construct
  misc_feature 1..1098: note = source = /note="Description of Artificial Sequence: Synthetic coding sequence"
  source 1..1098: mol_type = other RNA
atggcccctaaactgatcactgttctctgccttggcttttgtctcaatcagaagatttgccctcacgcaggagcccaagataagttttctcttagcgcttggccaagtcccgtggtcccactagggggtcgcgtgaccctctcatgtcattctcacttgaggttcgtcatttggaccatctttcaaactacaggaacccgtagtcatgaactgcataccggcctcagtaacaatatcactatctcaccagtgactcccgagcacgcaggaacatatcgttgcgtgggcatctataagcacgcaagcaagtggtcagccgagtctaatagcctgaagattatcgttacaggcctgttcacaaaaccttcaatctccgctcaccccagtagcctggtccacgcaggtgcaagggtctctctgcgctgtcattctgagttagccttcgacgagttcattttgtacaaagaagggcacatacaacactcacagcaattagaccagggaatggaagccgggatacattatgttgaagctgtattttccatgggacccgtcacacccgcccacgccggtgcctatcgctgttgcggctgcttttcacactccagatacgaatggagcgccccgagtgacccgctggatattgtgatcaccggcaagtataagaagcctagtctttcaacacaggtggatcccatgatgcggctgggagaaaaactgaccctcttttgctcttccgagatctcatttgatcagtaccacctgttcagacacggtgtggcgcatggccaatggctgagcggcggtcaaaggcacagagaagccttccaggcaaatttctctgtggggcgggctacaccagtcccaggaggaacatatagatgttacggatccttcaatgattccccttataagcccccagttacccggtgcaactttaccccccaggagactttgcgggtactcttatgtcacagccagaaccctcccctgaacctcaccccgccctggcagacccagagcccaagaaaggctaatgggcgcatgaagagatccctccagcaaaaacggcatagaagaagttacatgccctcatag

SEQ ID NO: 12186 - RNA, 198 nt, synthetic construct
  misc_feature 1..198: note = source = /note="Description of Artificial Sequence: Synthetic coding sequence"
  source 1..198: mol_type = other RNA
atgcgaactttcctgtttttatttgccgtgttattcttcctaacccctgctaaaaatgcctttttcgacgaaaaatgtaacaaactgaagggcacatgcaaaaacaattgtggcaaaaacgaagaactgatcgctctttgccagaaatccctgaaatgctgccgtacgatacaaccttgtgggtcaataatcgattag

SEQ ID NO: 12187 - RNA, 198 nt, synthetic construct
  misc_feature 1..198: note = source = /note="Description of Artificial Sequence: Synthetic coding sequence"
  source 1..198: mol_type = other RNA
atgagaacctttctcttcctattcgccgtcctcttctttctcacccccgcaaagaacgcttttttcgacgaaaagtgcaacaaactcaagggtacctgcaagaataactgtggaaaaaatgaagagctcattgctctgtgtcaaaaaagtttgaagtgttgtcgcacaattcaaccctgtgggtcaatcattgattag

SEQ ID NO: 12188 - RNA, 237 nt, synthetic construct
  misc_feature 1..237: note = source = /note="Description of Artificial Sequence: Synthetic coding sequence"
  source 1..237: mol_type = other RNA
atggctctgattcgcaaaaccttctacttcctgtttgccatgttttttattctggtacaattaccgagcggatgtcaagctggtctcgatttttcacagccgttcccatcaggagagttcgccgtgtgtgagagttgcaagctaggaaggggcaaatgtagaaaagaatgcttagagaacgaaaagcccgacggaaattgcaggctgaatttcctgtgttgtcgccagcgcatttag

SEQ ID NO: 12189 - RNA, 2868 nt, synthetic construct
  misc_feature 1..2868: note = source = /note="Description of Artificial Sequence: Synthetic coding sequence"
  source 1..2868: mol_type = other RNA
atgtgggccggtctcctcttaagagctgcgtgtgtcgccttattactgcctggagctcccgcacgaggttacacaggcaggaaacctcccgggcactttgctgccgagcgtagacggctcggacctcatgtgtgtctaagcggctttgggagtggctgctgtccaggatgggcccccagcatgggaggaggacactgtacactgcctttgtgctcattcggatgcggatctggcatatgcatcgctccaaacgtttgcagctgccaagatggggaacagggcgccacctgtcctgaaacccacggcccctgcggcgaatacgggtgcgatctaacttgtaatcacggcggctgtcaagaagtggctagggtgtgtcccgtgggcttttctatgacggaaactgcagttggcattagatgcaccgatatcgacgagtgtgtcaccagctcctgtgagggccattgtgtgaacacagagggaggcttcgtttgcgaatgcggtcccggaatgcaacttagcgccgatcgccactcctgtcaggatacagacgagtgtctggggactccgtgtcagcagcgctgtaagaatagtattggttcatacaagtgcagctgtagaactggcttccatctccatggaaatcgtcattcctgtgtcgatgtcaatgagtgtagacggcccctagagcgtagggtgtgccatcacagctgccataacactgtgggctccttcctgtgcacctgcagacctggattccgcctcagagccgatagagtgtcttgtgaagccttcccaaaagctgtactcgccccaagtgccatcctacagccacggcagcatcccagtaagatgctcctgcttctccccgaggccggccgacccgccctctcacccggccactcccccccaagtggggcgccggggcccccagccggtgtgcgaaccaccaggctgcccagcccaacaccacgcttgcccacatcctcacccagtgcccccgtgtggttgctttccacgctccttgccaccccagtcccaacagcgagcctgcttggcaatctcaggccgccttctctcctacagggcgaagttatgggtacacccagctctccccgtggtcccgagtcacctcgtcttgctgcgggcccgtccccttgttggcatcttggcgccatgcacgagtctcgctccaggtggacagagcctggctgttctcagtgttggtgtgaagacggaaaagtcacatgcgagaaagtcagatgcgaggctgcatgctcacaccccattccgagtcgggatggaggttgttgtccgtcttgtacgggctgtttccactccggtgttgtgcgcgccgagggcgatgtgttcagtcccccgaacgagaactgtaccgtatgcgtttgcctcgctggaaacgtgagctgtatcagcccggagtgtccttcagggccgtgtcagacaccaccccagacagactgttgtacgtgcgttcctgtgagatgttattttcacggaaggtggtatgcagatggagccgtttttagtgggggcggggatgaatgcaccacttgcgtctgccagaatggcgaagtcgaatgtagcttcatgccttgtcccgagctagcatgtccccgagaggaatggcggctggggccgggacaatgctgttttacatgccaggaaccaacaccttctacaggttgttcacttgacgacaatggtgttgagtttcccatcggccagatttggtccccaggcgatccttgtgagctttgtatatgtcaagcagatggttctgtcagctgtaagagaactgattgtgtggacagttgtccccatcccatcagaatccctggacagtgctgtccagattgctccgctggttgcacctacactggccgtatattctataacaacgagacctttcccagtgttctcgacccatgtctgagttgcatctgtcttttgggaagcgtggcctgtagccctgttgattgtcccattacgtgtacctatccattccatcccgacggtgagtgttgccccgtgtgccgcgattgcaactacgaaggtaggaaggtggccaatggacaagtatttaccctcgacgacgagccttgcacgcgatgcacctgtcagctgggagaggtctcttgcgagaaggtcccatgtcagagagcctgcgcggatccagcgttgctccccggtgattgctgcagcagttgtcctgacagcctctcccccctggaagagaaacaaggacttagcccgcacggaaatgtggcgttttcaaaagccggcagaagtctccatggggataccgaggcacccgtcaattgctcaagctgccccggcccacccaccgcttctccatcgaggccagttttgcaccttctgcaactccttctgcggaccaacctcatgaaaactcagactctccctacgtcccccgcaggggcccatggccctcactctctggcactcggacttacggctactttccccggggagccaggggcttcaccccggttatctcctggaccaagcacacctccaggcgcccctaccctgccactggccagtccaggagcacctcagcccccgcctgttacacctgaaaggtctttcagcgccagcggcgcacaaatcgtgtcacggtggcctcccctgccaggtacacttcttacagaggctagcgccctgagcatgatggacccctccccgtccaagactccaataaccctcttggggcctcgggtgttgagtccaaccactagtcggctttctacagccctggccgccacaacgcaccctggtccacaacagccaccagtgggcgccagtcgaggcgaggagtctaccatgtag

SEQ ID NO: 12190 - RNA, 270 nt, synthetic construct
  misc_feature 1..270: note = source = /note="Description of Artificial Sequence: Synthetic coding sequence"
  source 1..270: mol_type = other RNA
atggtgagctgtgagcgccgggcttcaaaatccgtgggtcagatcctcctctgggacttcggttacacttgtcgattgtctcatcgtaggcgtaattctaccgagattctctctcgtaatttgcccgctttgtacactggaattaaggtatgcgaaaaaagaccgtctatagacctatgtatccaccattgctcttatttccagaaatgtgaaacgaataaaatttgctgtagcgctttttgtggaaacatatgtatgtccatcctgtag

SEQ ID NO: 12191 - RNA, 600 nt, synthetic construct
  misc_feature 1..600: note = source = /note="Description of Artificial Sequence: Synthetic coding sequence"
  source 1..600: mol_type = other RNA
atggaaactttccctctcctcctactctccctgggcctggtattagcagaagcctctgaaagcacgatgaaaatcattaaggaagaatttactgacgaagagatgcaatatgacatggcaaaaagcggtcaagagaaacagactatcgagatactgatgaaccctatcttacttgttaagaatacaagcttaagcatgtccaaggatgatatgtctagtaccctgttgacttttaggagcctgcactacaatgatccaaaggggaattctagtggaaatgacaaggagtgttgtaatgatatgactgtgtggcgaaaggtctcagaagcgaatggctcttgtaaatggtccaataattttatccgcagttccaccgaggtgatgcgccgagtgcatcgcgctccttcttgcaaattcgtgcaaaatcctggcattagctgctgcgaaagtcttgagctagaaaatactgtctgccagttcacaaccggcaaacagttcccgcgctgccaataccattccgtgacctctctggaaaaaatccttaccgtcctcacaggacacagcctaatgtcttggctcgtgtgcggctccaagctgtag

SEQ ID NO: 12192 - RNA, 729 nt, synthetic construct
  misc_feature 1..729: note = source = /note="Description of Artificial Sequence: Synthetic coding sequence"
  source 1..729: mol_type = other RNA
atggctgccgccaccagggggtgtagaccttggggttccttgttaggactgttgggcctggtatccgccgcggccgccgcatgggacctcgcgtctctgagatgcacgttaggggcattttgtgaatgtgacttcagacccgatttaccaggcctcgagtgcgacctcgcgcagcacctggcgggacagcacttagccaaggctttggtcgttaaggcacttaaagcgtttgtccgcgacccagccccaaccaaaccattagtactaagcctgcacgggtggaccggcacagggaaatcatacgtatcctccttgctggcccactacctcttccagggtgggctgcgaagcccaagggttcatcacttcagtcccgtgctccactttccacaccctagccacatcgagcggtataaaaaggatttgaaaagttgggtacagggaaatctgaccgcctgtggccgctccctgtttctgtttgatgaaatggacaagatgccacctggactcatggaggtgctgcgacctttcctaggctccagttgggttgtctatggcactaactaccgcaaagcaatatttatttttatcaggtggcttctaaaacttggacaccacggacgggccccccccagacgcagtggtgcacttcctcctgcacctgcagcacctcgccccgcgttaagagcacaaagggctgggcccgcaggccctggcgcgaaaggctag

SEQ ID NO: 12193 - RNA, 627 nt, synthetic construct
  misc_feature 1..627: note = source = /note="Description of Artificial Sequence: Synthetic coding sequence"
  source 1..627: mol_type = other RNA
atgcttgggttgctggttgctctgctggcccttggcctggccgtgttcgccctcttagatgtgtggtatctggtgcgcctaccctgtgctgtcctgcgcgctcgccttctgcagccacgcgtaagagatcttcttgccgagcagagattccccggaagagttctgccttcagacctggatcttttactgcacatgaacaacgcaaggtatttacgggaagccgactttgcaagagtcgcccatctgacccgttgtggggtgctgggagccctcagggagttgcgcgcacacacagtcctcgccgcgagctgtgcacgccacaggcgctcactgcgccttctggagcccttcgaagtcaggactcggctattaggctgggacgatcgagccttctatctcgaggcaagatttgtaagtctgagggacggttttgtatgcgcactcttgcgttttcgccaacatctgctaggaaccagcccagagagagtagtgcagcatctgtgccaaagacgcgtcgaacctccagaactgcctgccgatttgcaacactggatcagttacaatgaggcatctagtcagcttttgcgcatggaatcagggctgtcagatgtcactaaggatcagtag

SEQ ID NO: 12194 - RNA, 423 nt, synthetic construct
  misc_feature 1..423: note = source = /note="Description of Artificial Sequence: Synthetic coding sequence"
  source 1..423: mol_type = other RNA
atgctagtcaaactcaattcacaggcaagacttagttccatggtcaagaaagtgcgactgccatctagatgcgagcccccaggtacgacatgcacggttagcggttgggggaccacaacgtcgccagatgtcacctttccttcagatttgatgtgcgtggacgtcaagttaattagtcctcaggattgcactaaagtttataaggatcttcttgagaactctatgttgtgtgcaggtatcccagatagcaagaagaatgcctgtaacggagatagcggcggacctctcgtatgtcgcgggacactgcaaggccttgtgtcctgggggacctttccctgtggacagcccaatgatcccggcgtctacacccaggtgtgcaagttcactaaatggataaacgatactatgaagaagcataggtag

SEQ ID NO: 12195 - RNA, 354 nt, synthetic construct
  misc_feature 1..354: note = source = /note="Description of Artificial Sequence: Synthetic coding sequence"
  source 1..354: mol_type = other RNA
atgctcagcaaagctcatggctgcaagaccgcgctttcattaggccgctgcccgaagatccgtgaggagtgcgagttccaggagagagatgtgtgcactaaagatcgtcagtgccaggataacaaaaagtgctgtgtcttctcatgtggaaaaaaatgcctcgacctaaaacaagatgtatgtgaaatgcccaaagagaccggcccctgcctcgcctatttcctacattggtggtacgataaaaaggacaatacatgtagcatgttcgtttacggaggatgtcaaggcaacaacaataactttcaatctaaggccaactgccttaatacctgtaagaataagagatttccatag

SEQ ID NO: 12196 - RNA, 2328 nt, synthetic construct
  misc_feature 1..2328: note = source = /note="Description of Artificial Sequence: Synthetic coding sequence"
  source 1..2328: mol_type = other RNA
atgcatcccgggcccgaagaagccggatcaggacgttatgggcccagatatatcactgacatgggtgctggggaggatgacgaagggttcgaagatgaccttgacttagatatttcatttgaggaagtgaagcctctgccagcaaccaaaggaggtaacaagaagttcttggtggagagcaaaaagatgagcatttctaatcccaaaacaattagtcggcttattcctcctacatccgcctctttgccggtgacgaccgttgcacctcaacctatacccattcagaggaagggcaaaaacggcgttgccataatgtcgaggctgtttgacatgccttgcgatgagaccctatgctcggccgacagcttctgtgtcaacgactatacttggggtggttctagatgtcagtgcactctggggaaaggaggcgagtcatgttccgaggacatagtcattcagtatcctcagtttttcgggcacagctatgtgacgtttgaacctctgaagaattcgtaccaggcatttcagatcacccttgagtttcgcgccgaagcggaagacggactcctgctctactgtggtgaaaatgagcatggccgaggcgacttcatgtcacttgccattatacgtcgttcgctacagttcagatttaattgtggcactggcgtagcgatcatcgtgtctgagacgaaaatcaaacttgggggctggcataccgtcatgctttatcgcgatggactcaacgggctattgcagctgaataacggcactcccgtcactggacagtcgcagggacagtactcaaagatcaccttccgtactcctctctatctgggtggagccccatccgcatattggttagtgcgagccacaggtacgaatagggggttccagggatgcgtgcaaagcctcgctgtaaatggcaggcgaatcgatatgcgcccctggcctttgggcaaagccctgtccggcgccgatgtcggcgaatgttcttcagggatatgcgacgaggcgtcttgtatccatggtggcacatgtactgctataaaggccgattcttacatatgcctctgtccactgggattcaaagggagacattgcgaggatgcattcacacttactatcccacagttccgtgaatccctgagatcatatgctgctacaccctggcctttagaacctcagcattatctctcgtttatggagttcgagattacatttaggcctgattccggagatggagtgctgctatacagctacgataccggttctaaagatttcctcagcatcaatctggccggcgggcatgtcgagttccgatttgattgtggatccggtactggtgttctgcggagtgaagaccccctgacactggggaactggcatgaattgagggttagtaggacagccaaaaacggcatactccaagtggacaaacaaaagattgttgagggtatggctgagggaggctttacccaaattaaatgtaataccgatattttcataggaggagtgcccaattacgacgacgttaagaagaactcaggtgtccttaagccctttagcggctcaatccagaagataatcctcaacgataggactatccatgtgaaacatgacttcacctctggggtgaacgtagagaatgccgcacacccctgtgtgagagctccctgcgcccatggcgggtcgtgcaggcctaggaaagagggatatgactgcgactgtccacttggattcgaggggctacactgtcagaaagccatcatagaagcaatcgaaattccacagttcatcggcagatcctaccttacgtacgacaatcccgacattctaaagcgagtgtctgggtctcgctctaacgtgttcatgaggttcaagacaaccgccaaagatggactattgttgtggcgaggggattctcctatgagacctaactcagatttcatttctctggggctgagagacggcgcactcgtcttctcctataatcttggctcgggcgtggcctccatcatggtgaacggatcgttcaacgacggtcggtggcacagggtcaaagcggttcgggacggacagtctggaaagattactgtggacgattacggagccaggacaggcaagtcaccagggatgatgcgccaactgaacataaacggggctttatatgtgggaggaatgaaagaaattgcgctgcacaccaatagacaatacatgcgagggcttgtgggttgcatttcccattttaccttaagcactgattatcatatctctttggtggaggacgctgtcgatggcaagaacatcaacacctgcggggcgaaatag

SEQ ID NO: 12197 - RNA, 1257 nt, synthetic construct
  misc_feature 1..1257: note = source = /note="Description of Artificial Sequence: Synthetic coding sequence"
  source 1..1257: mol_type = other RNA
atgcgcactctttttaatcttctgtggctggccctggcttgtagcccagtacacactacgctgtcaaagtcagacgctaaaaaggcagccagtaaaactttgcttgaaaaagtgaaattctgctcatgttgcccagggtggagcgcgatggccaggtcctggctcaccgccacgtctgctacccaatcccagttctctgataagcccgtgcaagaccgtggcctcgtggtgacagatttgaaggccgaatccgtcgtgctggaacaccgttcttattgttccgcaaaggcgagagatcgacatttcgccggagacgttcttggatacgtgacaccttggaattcccacggctatgatgttaccaaggtgtttggatctaagtttacgcaaatttctccagtctggctgcaactcaaaaggcggggccgggaaatgtttgaagtgacgggactgcatgatgtggatcaggggtggatgcgagcagtgaggaaacacgctaagggactccatatcgtgccgcgcctcctctttgaggattggacctatgatgatttccgaaacgtgctggactctgaggatgagattgaagagctctcaaagaccgtggttcaggtggctaaaaaccagcacttcgatggcttcgtcgtggaagtttggaaccagctcctgtctcaaaaaagggtgggtttgatccacatgctgacacatttggcagaagccttacaccaggccagactactcgctctgttggtcatcccaccagctatcacccctggcacagatcagctgggaatgttcacgcataaagagttcgagcaattggctcccgtgctcgatggtttctctttaatgacttacgattactctaccgctcatcagcccggacctaatgcccccctttcgtgggtcagagcctgtgttcaagtactcgaccctaagagcaaatggagatctaaaatacttctcggattgaacttctacggaatggattatgcaacctccaaagacgccagggaacctgtggtaggcgcaaggtatatccaaaccctgaaggatcaccgtccaagaatggtctgggactctcaggccagtgaacacttcttcgagtataagaaaagtagatcaggcagacatgtggtcttttaccccacactgaagagcctgcaggtccgactggagctggcaagagaactcggcgtcggggtatcaatttgggagctgggtcaggggctagattatttctacgatcttctatag

SEQ ID NO: 12198 - RNA, 813 nt, synthetic construct
  misc_feature 1..813: note = source = /note="Description of Artificial Sequence: Synthetic coding sequence"
  source 1..813: mol_type = other RNA
atgatgctccgactgttgtcgtctctgctcttggttgccgtggcgagtggttatggacccccaagtagcaggccctcctcccgagtggtgaacggtgaagacgcagtgccctattcgtggccctggcaagttagcctgcagtatgagaaatccggttcattctaccacacctgcggcggatccttgattgcaccagactgggttgtgactgctggtcattgtatttcatcatccaggacataccaggtggttctcggcgagtacgatcgcgctgttaaagagggaccagaacaggtgatccctatcaacagtggcgatctctttgtgcacccactgtggaaccggtcctgtgtggcatgtggcaatgacatcgctctgattaagctgagtcgcagtgcacagttaggcgatgccgtacaactcgctagtttgcctccagctggagatattctgcctaatgagaccccgtgttatataacaggttggggacgcctatacactaacgggccgctcccggacaaactgcaggaagctctgctcccagttgtcgattatgaacattgcagccgctggaactggtggggctcaagtgtcaaaaagaccatggtctgcgccggaggagacatcagaagtggatgcaatggggacagcggggggcctttgaactgccctacagaagacggagggtggcaggttcacggcgtgacttccttcgtgtctgcctttggttgtaatacccgaagaaaacccaccgtgtttactcgggttagcgcgtttattgactggatcgaagaaacaatagcaagccactag

SEQ ID NO: 12199 - RNA, 585 nt, synthetic construct
  misc_feature 1..585: note = source = /note="Description of Artificial Sequence: Synthetic coding sequence"
  source 1..585: mol_type = other RNA
atgaccatgagacataattggacacccgacctttctcccctatgggtgctattgctatgtgcccacgtagtgactctgttggtgagagcaactcctgtctcccagactaccactgcagctaccgctagcgtcagaagcactaaagatccatgccctagtcagcctcctgtttttccagccgccaagcagtgtcccgctctagaggttacttggccggaagtagaggtgcccctgaacggcacactgagccttagttgtgtagcttgtagcagatttccgaacttttcaattctgtactggctcgggaacggatccttcatagaacatttaccgggccggctgtgggagggctctaccagtagggaaaggggatctacaggaactcaattatgcaaagccttggtcttggagcagctcacacctgcactgcactcaaccaatttctcatgtgttctcgtagaccctgaacaggttgtgcagagacacgtcgtgttagctcagctgtgggctggacttcgcgcaacccttcctcctacacaagaggcactgcccagttctcatagttccccccagcagcaaggatag

SEQ ID NO: 12200 - RNA, 1308 nt, synthetic construct
  misc_feature 1..1308: note = source = /note="Description of Artificial Sequence: Synthetic coding sequence"
  source 1..1308: mol_type = other RNA
atgcagggtcaggggaggagaagaggtacatgcaaagatatcttctgctctaagatggcttcttacttgtatggagtcctgttcgctgtaggactctgcgcacctatctactgtgtcagccccgccaatgcccccagcgcttatccacggccctcttcaacaaaaagcacgccagctagccaagtctactctctgaacacagattttgcttttcgtctgtaccgtagactcgttctggaaactccctcacagaacattttcttttctccggtgtccgtgtcaacatctctggccatgctctccttgggagctcacagtgtaacgaaaacccaaattctacagggcctcggatttaacttaacccatacacccgaaagtgctattcaccagggatttcagcacctcgtccattcgctcacggttcctagcaaggatctgacattgaaaatgggtagcgccttgtttgtcaaaaaagaactccagctgcaggctaattttctaggcaacgtgaaacgactttatgaggcagaggtgttctctactgattttagcaaccctagtatcgcccaggcaaggattaactcacatgtcaagaagaaaacccagggaaaggtggtggatattattcaggggctggatctgctcactgccatggtgcttgtcaaccacatcttttttaaagcgaaatgggagaagccattccacccagaatacacaagaaagaacttcccctttctagttggagagcaggtgactgtccacgtgcctatgatgcatcagaaagagcaattcgccttcggggtggataccgaactgaattgtttcgtgctgcaaatggactacaaaggcgacgctgtcgctttttttgtgctgccaagtaaaggcaagatgaggcagcttgagcaggctctgagcgctcggaccctgagaaagtggagtcactcgctgcagaagcgatggatcgaagttttcatccccagattcagcattagtgccagttacaacttggaaacaatccttcccaaaatgggcattcagaatgtgttcgataaaaacgcagatttttccggcatcgcaaagagggactctctgcaggtgtccaaggccacacacaaagccgtactcgacgtgagtgaggagggaaccgaagccactgcagcaactaccaccaaatttattgtgcgatctaaagatggcccctcttatttcactgtgagctttaaccgcaccttcttaatgatgatcacgaacaaagcaacagatggcattctgttcctggggaaggttgaaaatcctactaagagctag

SEQ ID NO: 12201 - RNA, 393 nt, synthetic construct
  misc_feature 1..393: note = source = /note="Description of Artificial Sequence: Synthetic coding sequence"
  source 1..393: mol_type = other RNA
atggcttccgacttgatacgaactatcctcgccgtcgctttaatctcaaaactggggaccgccgttgatgcggagcttatgcctagtggagcgatcctgcagaacaaacgcgagaatcttcctagagtttgtcacgcactcgcctttcttggtatggcgcgttgtcaagacctgtttcttgtccgattgcagggatggaaattgggtaccaggttccaggatggccccagatcaactccacaggaggaggggggctctccacaaagaaagagagggatgcctgtgcagattcacttcctgttaaagagcttcctgagctccccgataacattcgcttttataagcttagctcgtacggttagtcttgctacagccatctgtaagatcgtctag

SEQ ID NO: 12202 - RNA, 837 nt, synthetic construct
  misc_feature 1..837: note = source = /note="Description of Artificial Sequence: Synthetic coding sequence"
  source 1..837: mol_type = other RNA
atgcagtggctgagggtgcgagaatctccaggcgaagccacggggcaccgcgttaccatgggcacagctgcgctagggcccgtgtgggccgccctgttgctatttctgctcatgtgtgagattcccatggtggagctaacattcgacagggctgttgcttctggctgtcagagatgctgtgatagtgaggatccactcgatcctgcgcacgtttcttctgctagctcttccggacggccacacgcactgcccgaaattagaccctatatcaatatcacaattcttaaaggggacaagggtgatccaggacctatgggccttccaggctatatgggaagagaaggtcctcaaggagaaccaggcccacagggctctaaaggggataaaggcgagatgggttctcctggtgctccctgccagaaaaggttttttgcctttagcgtgggacggaagaccgccctccactctggcgaggatttccagacattgctctttgagcgcgtgtttgtcaatttggatgggtgttttgatatggctaccggtcagtttgcagctcctctccgcggcatttacttctttagcctcaacgttcattcttggaattataaagagacgtatgtccatataatgcataatcaaaaggaggctgtgatcttgtatgcacaaccttcagagcggagcattatgcaatcacagtccgtcatgctggatctagcctacggtgatagagtgtgggtgcgtctcttcaagagacagagggaaaacgccatttactccaacgattttgacacatatatcactttttccggtcacctgatcaaagcagaggacgattag

SEQ ID NO: 12203 - RNA, 1635 nt, synthetic construct
  misc_feature 1..1635: note = source = /note="Description of Artificial Sequence: Synthetic coding sequence"
  source 1..1635: mol_type = other RNA
atgtgtacagtggttgatcccagaattgttagacgataccttctgagacggcaactgggtcagggagcctacggcatcgtctggaaggcagtcgaccgtcgaacaggggaagtcgttgcaattaaaaaaatatttgacgctttccgcgacaaaaccgatgcgcagcgtaccttccgcgagatcaccctcctgcaagaatttggcgatcacccaaatatcatttctctcctggacgtgattcgggccgaaaatgacagagacatctaccttgtgtttgaattcatggacactgatctgaatgcagtgatacgaaaaggcggcctcctccaggacgttcacgtgcggagtattttctaccagctgttacgggcgactcgctttctccatagcggccatgtggtccatcgcgatcagaagccttccaatgttctccttgatgcaaattgtacagtaaaactctgtgacttcggcttagccaggagccttggagatcttccagagggaccggaggaccaagccgtgacggagtatgtcgcaaccaggtggtatcgtgcccccgaagtgttactgtcttctcacagatacactctgggcgtcgacatgtggtcactgggctgcatactcggcgaaatgcttagaggtcgccctctgttccccggcacttccaccttgcaccagctagagctaatactcgaaacgatcccacccccttctgaagaggatttgcttgcccttgggtcgggatgccgagccagcgtgctgcatcagctgggctctcgtcctagacagacacttgacgcactcctgcctccagatacctcacccgaagcactggacctcttaaggagactcctggtattcgcccccgacaaaaggttatcggcgacacaggctctacagcacccatacgtgcagcgtttccactgtccttccgatgaatgggcccgcgaagctgacgtccggccccgtgcccacgagggggttcaattgtcagtgccagagtacagaagtcgggtgtatcaaatgatcctggaatgtggtggttcttcgggaacctccagagagaagggaccagaaggcgttagccctagccaagcccatctgcataagcctagggccgaccctcaactgccttcccgtacaccagtccaaggaccccgacctaggccacagtcaagtccaggacacgacccagctgaacacgagtcacccagggccgccaaaaacgtgccacgacagaatagcgctccattactccaaacagccctgctcggtaacggcgaacgtccacccggtgccaaggaggctcccccattaaccctgagcctcgtgaagcccagcggccgaggggccgcgccaagcttgacttctcaagccgcagcccaagtggctaatcaggcccttattagaggcgattggaatcgtggggggggggtaagagtggcctccgttcagcaggttcctccacgacttcctccagaagctaggccagggaggcgcatgttcagtaccagcgccctacagggagctcaggggggtgcacgcgctctgctagggggctattcacaggcatatggaaccgtgtgtcactcagctctcggccacctgcctctgctcgaaggacaccacgtctag

SEQ ID NO: 12204 - RNA, 399 nt, synthetic construct
  misc_feature 1..399: note = source = /note="Description of Artificial Sequence: Synthetic coding sequence"
  source 1..399: mol_type = other RNA
atgaaatcgagtggattattcccatttcttgtactcttggctctcgggacactggctccctgggctgtcgagggatccggaaagtcatttaaagccggagtctgcccccctaagaagtccgctcagtgtcttcgatataaaaagcctgagtgccagtcagattggcagtgtccagggaaaaagagatgctgtcccgatacttgtggcatcaagtgcctggacccagttgatactcctaaccctacgcgacgcaaacctggaaaatgtcccgttacttacggacagtgcctgatgttaaaccctccaaacttctgcgagatggatggccagtgcaagcgggacctgaaatgctgcatgggcatgtgtggcaaatcttgcgtgagcccagttaaggcttag

SEQ ID NO: 12205 - RNA, 1401 nt, synthetic construct
  misc_feature 1..1401: note = source = /note="Description of Artificial Sequence: Synthetic coding sequence"
  source 1..1401: mol_type = other RNA
atgaaacccccactgctggtctttattgtctgtctgctatggctaaaggatagtcattgtgcgcctacgtggaaagacaagacagcgatatcagaaaatctcaagagcttctccgaagtgggagagattgacgcagatgaggaagtcaaaaaagctcttaccggaattaaacagatgaagattatgatggaaagaaaagaaaaggagcataccaacttaatgagtacactgaagaaatgcagagaggagaaacaggaggcactgaaactgctcaacgaagtgcaggagcatctggaggaggaagagcggctctgtagagagtccctagccgattcctggggcgagtgccgctcttgtctggagaataactgcatgcgaatttatactacttgccagccaagttggtcgtctgtcaagaacaaaatcgaacgtttctttagaaaaatctatcagttcctttttccctttcacgaagacaacgagaaagaccttccgatcagcgagaagcttatcgaagaagacgcacagcttacccagatggaggacgtctttagccagttgactgtggacgtaaatagccttttcaatcggtcattcaacgtttttaggcaaatgcaacaggagttcgaccaaaccttccagagtcactttatcagcgatacggatctgactgagccatacttctttcccgctttctccaaggagcccatgactaaggcagatcttgaacagtgttgggatatccccaactttttccaactcttctgcaacttttcagtgagtatttacgagagtgtctctgaaaccatcactaagatgctgaaagcaattgaggacctccccaaacaagacaaagcccctgatcacgggggactgatcagtaaaatgctgccagggcaggatagaggtctttgcggagagctggaccaaaatctctcacggtgttttaagttccacgaaaaatgtcagaagtgccaggcccatctgtcagaggattgtccagatgttccagcactccacactgaacttgatgaagccatcagactggtaaacgtttcaaaccagcagtatggtcagatcttgcagatgactcgcaaacacctggaagacacggcttatctggtagagaagatgagagggcaatttgggtgggtgtccgaattggcaaatcaggctcccgagactgaaatcattttcaactctattcaagtagttccaagaattcacgaaggcaacatttctaagcaggacgaaacaatgatgaccgatctcagtatcttaccgagcagcaactttaccctgaaaatcccgctggaggagtcagccgagagcagtaatttcattggttatgtcgtggcgaaggctctgcaacatttcaaggaacacttcaaaacctggtag

SEQ ID NO: 12206 - RNA, 522 nt, synthetic construct
  misc_feature 1..522: note = source = /note="Description of Artificial Sequence: Synthetic coding sequence"
  source 1..522: mol_type = other RNA
atgcactggaagatgctccttcttctgcttctgtactataacgccgaagctagcatgtgccatcgttggagcagagccgtactcttccctgcagcgcatagacctaagcgctcatcatccttgccactgaatcccgtgcttcagacttctcttgaggaggtggaactcctatatgaattcctcctggctgagctcgagatctcccctgatctgcaaattagtatcaaagacgaggaactcgcttcacttagaaaagcatccgattttcgcaccgtttgcaataacgtgatcccgaaatccattcccgatataagacgcctaagcgcatcactgtcttctcaccctgggattctgaagaaggaggactttgaacggaccgtgcttacacttgcctacacagcctatcggacagcactctctcacggtcaccaaaaggacatctgggcacagtctttagtatctctgtttcaggccctacgacacgacctgatgcgctcctcacagccaggtgtcccgccatag

SEQ ID NO: 12207 - RNA, 1473 nt, synthetic construct
  misc_feature 1..1473: note = source = /note="Description of Artificial Sequence: Synthetic coding sequence"
  source 1..1473: mol_type = other RNA
atggaggattccgattctgctgcgaaacagctcgggttggccgaagcagcagcagttgctgcagccgctgccgtcgcagcagccgccgctgcagcggccggcggcgaagctgaagaacccgtcctctccagggacgaggacagcgaggaggacgctgacagtgaagccgagcgagaaaccccacgtgtgacagccgtagcagtgatggccgctgagcccggccacatggatatgggggcggaagccctgcccggacccgatgaggcagcagctgctgcagcctttgccgaagtgacaacagtgactgtggccaatgttggtgccgctgcagataacgtatttacaacttctgtcgccaacgcagcatctatctcaggacacgtgctgtctggtagaaccgcactgcagattggcgattcactgaataccgagaaggctactctgatcgttgtgcacacggacggatcaatcgtcgagactacaggcctgaaaggtccggcagcacctctcacacccggtcctcagtcaccccccaccccactggcgccaggacaggaaaagggtgggacaaagtacaactgggatccctcagtctacgacagcgagttgccagtgagatgtcgcaatatctccggtactctttacaagaacaggcttggttctggatgggacctgaaaccctcccgatgcctgctacatctctgctgcctcctgaggcgccatgatttgataaccgttacaccctccggccagatcaccactagtggcgcccttaccttcgacagggcctccacggttgaggctacagctgtcatatctgagtcacccgcccagggcgatgtttttgcaggtgccaccgttcaggaggcttccgtgcagccaccttgtcgcgcatctcaccccgaacctcactacccaggctatcaagatagctgtcagatagcaccctttccggaagccgccctcccgacctctcacccaaagatcgtcctcaccagcctcccggcgctcgccgtgccaccccccactccaactaaggccgctccccccgcactcgtgaacgggctagaactcagcgagcccaggtcatggctgtacctagaagaaatggtcaactccctgctcaataccgcccagcagcttaagaccctgttcgaacaggcgaaacacgcttccacctacagggaagccgccaccaatcaggctaaaatccacgctgacgccgagcgtaaagaggtcatccacccgcccaggctccctaaggtcttgggacttcagcagtcgtgcgtgaattgcggacgggaagccatgagcgaatgtacagggtgccacaaggtaaactactgctctacattctgtcaacgtaaagattggaaagatcaccagcatatatgcggccagtcagcagctgtgacagttcaagctgacgaggtccacgtagcagaatcagtaatggaaaaggtcactgtttag

SEQ ID NO: 12208 - RNA, 1476 nt, synthetic construct
  misc_feature 1..1476: note = source = /note="Description of Artificial Sequence: Synthetic coding sequence"
  source 1..1476: mol_type = other RNA
atgcctagtaccgtactcccttctacagtactgccctcgctgctgcccactgctggtgccggctggtccatgcgttggatcctttgttggagcctcaccttgtgtttaatggctcagacagccctcggtgccttgcacactaagaggcctcaagtcgtgacaaagtatgggacactgcagggtaaacagatgcatgtcgggaaaacaccaatccaggtgtttttgggtgtgccctttagtaggccacccctgggtatacttagattcgctcctccggagcctccagaaccatggaagggaattcgcgatgctactacttacccccccggatgtctgcaagagagctggggacagttggcctcaatgtacgttagcactcgagagagatacaagtggctaaggtttagcgaagactgcttatacttgaacgtgtatgcaccggcacgagccccaggtgacccacagttgcccgtaatggtgtggttccccggaggcgcttttattgtaggggctgcttccagctatgagggatccgacctggccgcacgagagaaggttgtgctagtgttcctacagcaccggctgggcatctttgggttcttgagtactgatgattcccatgcgagaggaaactggggacttctggatcagatggcagctctccgctgggtacaggagaatattgctgccttcggaggagatccaggcaacgtgactctattcggccaatcagcaggcgccatgtccatttccggcctgatgatgtcccctctggcgtcaggcctctttcacagagctatcagccagtccggcacagcacttttccgactgtttattacctccaaccctttgaaagtcgccaaaaaagttgcccatttggcaggctgtaatcacaattctacacagatcctggtcaactgtctgagggccctttccggcacgaaggttatgagagtatcaaataaaatgcggtttcttcagctcaatttccagcgggatccggaggagattatttggagcatgtctcccgtggtagacggcgtcgtgatccctgatgacccactcgtgctcttaacccaaggaaaggttagtagtgtgccctatctgctgggagtcaataaccttgagtttaattggttactaccttacattatgaaattccctctaaatcggcaggcgatgaggaaggaaactatcacaaaaatgctttggtccacacgaactcttcttaacatcacaaaagagcaagtgcctctcgttgtcgaagaatacttggacaatgttaatgaacacgattggaagatgctgcgcaaccgcatgatggacattgtccaggacgcaactttcgtgtacgctacactgcagactgcccactaccatcgagagacccccatgatgggcatctgtcccgcgggacatgcaacaactaggatgaagagcacatgctcatggatcctgccccaggaatgggcgtag

SEQ ID NO: 12209 - RNA, 753 nt, synthetic construct
  misc_feature 1..753: note = source = /note="Description of Artificial Sequence: Synthetic coding sequence"
  source 1..753: mol_type = other RNA
atgccagcttctagtcctttccttttggccccaaaaggccctcctggaaacatgggtggccctgtgcgtgaacccgctctgagcgtggcactctggctttcctggggcgctgcactaggagccgtcgcttgtgctatggcattgttgacacagcagactgaattgcagagtctcagaagggaagtctcccgactccaagggacaggaggtccatctcagaacggggagggttatccctggcagtctctgcctgagcagtccagcgacgcactcgaagcctgggaaaacggtgagcgctccagaaagcgaagagcggtacttacacaaaaacaaaagaagcagcatagcgtccttcatctagttccaattaacgcaacgtcaaaggacgatagcgatgttactgaggttatgtggcaacctgccctaagaaggggacgcggcctgcaggcacaggggtacggtgtgcggatccaggacgccggtgtttatctactatatagtcaggtcctgttccaggatgtaacattcactatgggccaggttgtaagtagggagggtcagggaagacaagaaacactgttcaggtgtatccgctcgatgccttctcacccagatcgcgcttacaacagctgttatagtgcgggagtgtttcacctgcaccagggcgatattctgtcggtgatcattcctcgggcgcgtgccaaactgaatctgtctcctcatggcacctttctaggttttgtgaaactctag

SEQ ID NO: 12210 - RNA, 1437 nt, synthetic construct
  misc_feature 1..1437: note = source = /note="Description of Artificial Sequence: Synthetic coding sequence"
  source 1..1437: mol_type = other RNA
atgtcaccacccctcctgaaattgggcgccgtgctctcgaccatggccatgatctccaattggatgtcccagactctgccatcactggtgggcctgaacactactcgtctgtcaacaccagatacgctgactcagatttccccaaaagagggctggcaggtttattcttccgcacaagacccagatgggcgatgcatttgcactgtggtggctcctgaacagaacctgtgttcccgggatgcaaagtcgcgtcagcttcgccagcttctggagaaagtgcaaaacatgtcccagagtattgaagttttaaacttgcggacacagagggacttccagtatgtcctaaaaatggaaacacagatgaaaggcctgaaagcgaaatttaggcaaatagaagatgaccgcaaaacactgatgaccaaacacttccaggaactgaaagaaaagatggacgaactgctgcccctgattcctgtcttagaacaatataaaacagatgccaagctgatcacccaattcaaagaggaaataagaaacctttccgctgtactcaccggaatccaagaagagattggggcttatgattacgaggaattgcaccaaagagtgttgagtttagagacccgtctgcgggattgtatgaagaaacttacctgcggcaagttaatgaagatcaccggccccgtgaccgtgaagacaagcggcacacggtttggagcatggatgactgatccccttgcttcagagaagaataatcgagtatggtacatggatagttacacaaacaacaagatagtgagagaatacaaaagcatcgccgattttgtgtcgggcgccgagagtaggacctataatctgccctttaaatgggcgggcactaatcatgtggtctacaatgggtcattgtatttcaataagtaccagtcaaacataataatcaagtactcttttgacatgggccgagtgctggcccagagatcattggagtacgctggtttccacaatgtgtatccatatacttggggcggcttttctgatatagacctgatggccgatgagattggactctgggcagtttacgcaacaaaccagaatgcaggaaatatagttatcagtcagctcaaccaggatactctcgaagtgatgaagtcatggagcacgggctacccaaaacgatctgccggagagtcttttatgatttgtggaacgttatatgtgaccaatagccatctcaccggggccaaggtttattacagctattctacaaagacctctacatatgaatacaccgacattcctttccacaaccagtatttccatattagcatgctcgactataatgcaagggatagagcactgtatgcctggaataatggccaccaagtcctgttcaacgttactctgttccatattatcaagactgaggatgacacttag

SEQ ID NO: 12211 - RNA, 1101 nt, synthetic construct
  misc_feature 1..1101: note = source = /note="Description of Artificial Sequence: Synthetic coding sequence"
  source 1..1101: mol_type = other RNA
atggcacgggaacggcctccaggaagaggctgtggcgtgctccgccgctgtctactcggagctgtgctgctcttcggcctcagattgtgcgctgaattgcggagggccggccctgggtctcctactaggtccgctccaccaggacctgcatggcgcccacccggaccccacttgcccccggcccccggacaacccagaggggctagcaggcgccaagtgacttacgtgaggtcgggacgccgagcaccaccagggggcggtggatccggcacacccgagcccggatgctgcgcccctcgtggcaggcctagacgaaaaggcccccggtggcacattgacctccaaccctgggcggggagcgctcaaagcctggacgaagaagcctggagatttctccggtacatcagcaccacacaaattgcttgcaatcatatgaacaccgactcattggccacagatagcagtcccacccacaaaccttggtcagtctgcttggatgatagattcaatctcgctcaccagatcagaaacaaacagtgtcgcctgtactcactggggcttggatctgacgacacacatttcgaagtaagcatggcaaacaatggttgcgaagtgcaccgattcgacccttcagtgaagtccgcacatatacttgaaagtcagcacctgtggtatcaccggctcagcattgattggcgtgacccgcatccagcggtggcagctcagaaaccccatagcaatacccgcaaattaggcagcatcctcaacgagtttgggcaccataagattgacgtattaaaggcagatttggagagcgccgaatggaaagttctggagaatctgatcctcgaagacgtactggagcagatcggacagctaatttttgagatacacctgcattggccggggttcgaagtatccgggtctgacagctctgttgtgagattctggtatagtctcctgaaggaactcgagcaaaaggactttcggctctttcacagctacaaagacctgagcaaaccccaactgtttcttaaaaaagacatcttcaatgccagctcttgttataccctttcttgggtcaacaccagatggaaatag

SEQ ID NO: 12212 - RNA, 300 nt, synthetic construct
  misc_feature 1..300: note = source = /note="Description of Artificial Sequence: Synthetic coding sequence"
  source 1..300: mol_type = other RNA
atgaaaatccccgtgctgcccgccgtggtactgctctcattgctcgtgctgcatagcgctcagggcgccacactgggaggacccgaggaggagtccacaatcgaaaactacgccagccgtccggaggccttcaatacaccgttccttaatatcgacaagttgagaagtgctttcaaagccgatgagttccttaactggcatgccctctttgaatccattaaaagaaaacttccgttcctgaactgggacgccttcccaaaactgaaagggcttagaagcgctacccctgacgctcaatag

SEQ ID NO: 12213 - RNA, 618 nt, synthetic construct
  misc_feature 1..618: note = source = /note="Description of Artificial Sequence: Synthetic coding sequence"
  source 1..618: mol_type = other RNA
atgatgcgaaccctgatcaccacacacccacttcctctccttctactcccacagcagctcctgcagcttgtgcagtttcaggaggtcgacaccgacttcgattttcctgaggaggataagaaagaagaattcgaggaatgcctggagaaattctttagcaccgggcccgctaggccacctactaaagagaaggtcaagaggagagttttgattgaacctggaatgccactgaaccacattgaatactgtaatcacgaaatcatgggtaagaatgtatattacaaacatcgttgggtggccgagcactatttcttactgatgcaatacgacgaacttcagaagatttgttataatagattcgtcccttgtaaaaatggcattagaaagtgcaaccgttctaaagggcttgtcgagggcgtgtattgcaatttaactgaagcattcgagattcctgcttgcaagtacgaaagcctctataggaaaggatatgtgctgattacttgcagttggcagaatgagatgcagaaacgaatccctcacacaatcaacgatcttgtcgagcctccagagcaccgatccttcttgagtgaggatggtgtatttgtcatctccccatag

SEQ ID NO: 12214 - RNA, 402 nt, synthetic construct
  misc_feature 1..402: note = source = /note="Description of Artificial Sequence: Synthetic coding sequence"
  source 1..402: mol_type = other RNA
atgctcgactggagactggcaagcgctcactttatactcgcagtaacacttaccctttggagcagtggaaaagttctatccgtcgatgttactacaactgaagcctttgattccggtgtaattgatgtgcagtctactcctacggtgagggaggaaaagagcgctaccgatctgaccgctaaacttcttctgctcgacgagctggtcagccttgaaaatgacgtgatcgaaacaaagaaaaagcgatctttcagtggctttggaagccccctcgataggctctcagccgggtccgtggatcataaagggaaacagcggaaagttgtggatcacccaaagcgacgattcgggatacccatggatagaatcggccgaaaccgcctgtccaacagcagggggtag

SEQ ID NO: 12215 - RNA, 846 nt, synthetic construct
  misc_feature 1..846: note = source = /note="Description of Artificial Sequence: Synthetic coding sequence"
  source 1..846: mol_type = other RNA
atggggtctagggggcaaggcctgctcctcgcctattgcctgctgctcgctttcgcttctggtttggttctgtcaagggttccccacgtgcagggcgagcagcaggaatgggaaggcacggaagagctgcccagtccaccagaccatgctgaacgagctgaagagcagcatgaaaaatatcgtccctcacaggaccagggcctccccgcgtcgagatgtctaagatgttgcgatcccggtacatccatgtatcctgccacagcagtaccccagattaatatcaccatccttaaaggcgagaagggagatagaggggacagaggactccagggcaagtacgggaagacaggctcagcaggcgccagaggtcacactggtccaaaaggacaaaaagggagcatgggtgcgcctggcgaacgctgcaagagccactacgccgcttttagcgtcggccgcaaaaaaccaatgcattctaatcattactaccaaacagttatttttgacaccgaattcgttaatttatatgatcacttcaatatgttcacaggtaagttttactgctatgtccccggtctatactttttcagtttaaatgtgcacacttggaaccagaaggaaacttatctccatatcatgaagaatgaagaagaggtagtgatcctgtttgcccaagtgggcgataggtctataatgcagtcccagtctctgatgttagagctccgcgagcaagatcaggtgtgggtccgattgtacaagggggaaagagagaacgctatattttctgaagaacttgacacgtacatcaccttttcgggctacctcgtcaaacatgctaccgaaccttag

SEQ ID NO: 12216 - RNA, 132 nt, synthetic construct
  misc_feature 1..132: note = source = /note="Description of Artificial Sequence: Synthetic coding sequence"
  source 1..132: mol_type = other RNA
atgaaactcctttacctgttcctagccatcttattagcaatcgaagaacctgttattagcgcactcgttcggaccgtcggctgctgcctggacacagctagacagactccccaccctagcatgcatggttag

SEQ ID NO: 12217 - RNA, 861 nt, synthetic construct
  misc_feature 1..861: note = source = /note="Description of Artificial Sequence: Synthetic coding sequence"
  source 1..861: mol_type = other RNA
atgaaagtattactacttaccgggctcggtgcattgtttttcgcttactactgggacgataattttgatccagcctcattgcagggagctagggtgctgttgacaggagctaatgcaggggtaggcgaagagttagcttatcactacgccaggcttggcagccacttagtactgaccgcccacacagaggctctgttacagaaagtagtgggtaactgccgaaaactgggcgcccctaaagttttttatattgcagcagatatggcttcacctgaggcaccagaaagcgttgtgcagtttgcattagacaaactcggcgggctggactaccttgtgttaaatcatataggtggcgcccctgcaggaacacgcgcccgtagcccccaggctacccgttggctcatgcaggtcaacttcgtatcatacgttcagttgactagccgtgcccttcccagccttaccgacagcaaaggatctctagtagtggtgtcctcactgctgggcagggtgcccacatcttttagtacaccatactccgcagcgaagtttgccttggacggttttttcggttctctgcgcagggagctggatgtgcaggacgtcaacgttgcaattactatgtgcgtcctgggtcttcgtgacagagctagtgcagctgaagcagttcgtggtgttacccgagtgaaggccgctcctggccctaaggccgccttagcagtcatacgcggcggcgccaccagagctgctggcgttttttatccttggcggttccgacttctttgtctcctgcgtagatggctgcctagaccgcgcgcttggttcattaggcaagaacttaacgtgactgcggctgccgcatag

SEQ ID NO: 12218 - RNA, 1326 nt, synthetic construct
  misc_feature 1..1326: note = source = /note="Description of Artificial Sequence: Synthetic coding sequence"
  source 1..1326: mol_type = other RNA
atgagagtcgtcactatagtaatcctgctgtgtttttgcaaagctgccgagctcagaaaggccagccccggcagcgtgcgaagccgagtgaatcacgggcgggcaggcgggggccgccgcggctcaaaccccgtgaagcgatacgccccaggactcccatgtgacgtgtacacttacctacacgaaaagtatttagattgccaggaacggaaactggtatatgtgctccctggatggccccaggatttactgcacatgctcctagctcggaacaaaatcaggactttaaagaacaacatgttttctaagtttaagaaacttaagtccctcgatctgcagcagaatgagatttccaagattgaatccgaggccttttttggattgaacaagctaaccacactccttttacagcataaccagataaaggtcctcaccgaggaggttttcatctatacgccgctcttgtcttatcttcgcctttacgataatccctggcactgtacctgtgaaatagaaaccctgatttctatgctgcagatccccagaaaccgaaatctcggcaattatgcaaaatgcgagtcaccacaagaacagaaaaacaagaagttgcgccaaattaaatctgaacagttatgtaacgaggaggaaaaagagcagctcgacccaaaaccccaagtgtccgggcgccctcctgtgatcaaacccgaggtggattcgaccttttgccacaactacgtgtttccgatccagactcttgattgtaagcggaaggaactgaagaaagttcccaacaatatacctcctgacattgtgaagctcgaccttagttataacaagatcaaccaacttcgtcctaaggaattcgaggatgtgcacgaactaaaaaagctcaatctgtcgtctaacggtattgagttcatcgacccagctgcctttctcggactgacccacctcgaagaactggacctcagcaataattcactacagaatttcgactacggagtgcttgaggatctctactttctgaagctcttatggctccgcgataatccatggaggtgtgattacaatatccattatctgtactattggcttaagcatcactataatgtgcactttaatgggctggaatgtaaaacgcccgaggagtacaaggggtggagtgtcggaaaatacatccgatcctattacgaggaatgtccaaaggacaagttgccggcctatcctgaatctttcgaccaagacaccgaggatgacgagtgggaaaaaaaacatagagatcataccgccaagaaacaatctgtgattattacaattgtaggctag

SEQ ID NO: 12219 - RNA, 1539 nt, synthetic construct
  misc_feature 1..1539: note = source = /note="Description of Artificial Sequence: Synthetic coding sequence"
  source 1..1539: mol_type = other RNA
atggcagaaagcggactcgcgatgtggcctagtctcttgctgctccttttgctccctggccctcccccagtggccggactcgaggatgccgccttcccacacctgggcgagtctctgcagcccttacctagggcttgtccactgcgctgttcatgccctcgggtggacaccgtggattgcgacggccttgaccttcgcgtatttcccgacaacattaccagagctgcgcagcacctgtctcttcagaataatcaattgcaggaactcccatataacgagctctcccgcctgagtggactgcggacccttaacttacacaacaacctgattagctccgaaggcctacccgacgaagcctttgaaagtcttacacagctgcaacatctatgtgtcgcgcataataaactctccgtggcgccacaatttttgccgaggtctctgcgcgtcgccgacttggcagccaatcaggttatggaaatcttcccattaacctttggtgaaaagcctgcacttagatctgtctatttgcataataatcagctttccaatgccggcctacctccagatgcgtttcgaggctctgaagccatcgctaccctgtcattgtcaaacaaccaactgtcatacctgccgccgagtctccccccatctctggagcgtttacatctacagaacaatttgatttctaaagtgccaagaggagcgctctcaagacagacgcaattgcgggagctctatctgcagcataaccagctcaccgacagcgggctagacgccaccacctttagtaagttgcactcccttgaatacctggatctttcacacaatcagctgactactgtgcctgccggtctgccacggacactcgccattctacacttaggccggaaccgaataaggcaggtggaagcagctcgcctgcacggagccagaggtttgcgctatctccttctccaacacaatcagctggggtcttccgggctaccggccggggccctgcgcccacttcggggactacacactctgcacctgtacggcaatggtctggaccgggtgccacctgccttgccccgtcgcctgagagctctggtattgccacacaatcatgttgccgcactgggcgcgagagatttggttgccacgcccggcctcaccgagctcaatctggcctataacagactggcatcggccagggtccatcacagagcgttccgtagactgcgagctttgcggagtctcgacctggccgggaatcagctcacacggctgcccatggggttaccgacagggctgcggactctccagctgcaaagaaatcagcttagaatgttggagccagaacctctggcgggtttggatcagctccgggagctctccttggctcacaacagacttcgcgtcggtgatattggcccaggcacgtggcacgagttgcaggctctccaggtccgtcacagactggtatcccataccgttccccgggcacccccgagcccttgtcttccttgtcacgtgcccaacatcctggtgtcatggtag

SEQ ID NO: 12220 - RNA, 2328 nt, synthetic construct
  misc_feature 1..2328: note = source = /note="Description of Artificial Sequence: Synthetic coding sequence"
  source 1..2328: mol_type = other RNA
atgaaggagggcccagaggaagccggatcaggacgctatggcccaagatatattactgacatgggagctggcgaagatgatgagggcttcgaagacgatctggacctggacatcagcttcgaggaagtcaaacccctaccagccactaaagggggaaacaagaagtttctcgtggagtcgaaaaagatgtccatctccaaccctaagactatcagcaggctaatcccccccacctcagcaagtctacccgtaaccaccgttgccccgcaacccatcccaatacagaggaaagggaaaaatggagtggcaataatgagtaggttgtttgacatgccttgcgatgagactctatgctcagcagattcgttctgcgttaatgattacacatggggtggcagtagatgtcagtgcactctcgggaaaggaggtgaaagctgttctgaggacatagtgatccagtacccacagttttttggtcattcctacgtcacatttgagcctctcaaaaactcctatcaggcctttcagatcacactggaatttagagctgaagccgaagacggcctgcttctgtattgtggagagaacgaacacggtaggggcgattttatgagtctggcaattattcgcaggtcactgcaatttcgtttcaactgcggcacaggggtggccattatagtaagcgaaaccaaaatcaaactcggtggttggcacacggtgatgctataccgggatggcttgaatggactgttacagctcaacaacggtaccccggtgactgggcagtcccagggacaatactctaagataacttttaggacccctctctacctgggcggagcacctagtgcctactggttggtccgggccacaggcacgaataggggctttcaggggtgcgtgcaaagcctggccgtgaatgggagaaggattgatatgcggccttggcccctcggtaaagcactctctggggcagacgtaggagaatgcagctccgggatctgcgacgaagcgagttgcatacatggaggaacatgtaccgccattaaagcggattcttacatctgtctgtgcccactgggtttcaaggggcgacattgcgaggatgccttcacactcactatcccccagtttcgggaatcccttagaagttacgctgctaccccctggcccctggaaccccagcactatctgtcttttatggaattcgaaatcactttcaggcccgattctggggacggcgtcctgctatattcatatgacacagggtccaaagacttcctgtccatcaatctggctggtggccacgtcgaatttcggttcgactgtggctccggaactggcgtcctccgatcggaggaccccctgacccttgggaactggcacgaactgcgcgtttcgaggacagcaaagaacggcatcctccaagtggataaacagaaaatcgtcgagggcatggcagagggcggttttactcagattaagtgcaacaccgacattttcatcggcggagtgcctaactacgatgatgtgaagaagaattccggggtgctcaagcctttcagcggctcaatccaaaaaataattctgaatgatagaacgatccatgtaaagcacgatttcaccagcggcgtgaacgtagaaaacgcagcccacccctgtgtgcgggccccttgcgcacatggagggtcttgtcgacctagaaaagaaggctatgactgtgattgccccctcggttttgaagggttgcactgccaaaaagccataattgaagctatagagatcccacagtttatcggccgctcttacctcacatacgataatcctgacattctgaagagagtatccgggagccgatccaatgtattcatgcgtttcaaaaccacagctaaggatggactgctactgtggcgaggcgattcccccatgcggccaaacagcgacttcatttctttggggttaagagacggagcccttgtcttctcctacaacttgggcagcggagtggctagcataatggtaaacggctcctttaacgacgggcgctggcaccgggtgaaggccgtccgtgacgggcaatccgggaagattaccgtagatgattacggggcccggactggaaaatcgccgggaatgatgaggcagctgaacattaacggtgccctgtatgtcggcggcatgaaggaaattgcgctgcatactaaccgacagtatatgcggggtttagttggttgcataagtcattttacactgtctaccgattatcacatttctcttgtggaggatgcagttgacggcaaaaatatcaacacttgcggcgccaaatag

SEQ ID NO: 12221 - RNA, 1431 nt, synthetic construct
  misc_feature 1..1431: note = source = /note="Description of Artificial Sequence: Synthetic coding sequence"
  source 1..1431: mol_type = other RNA
atgaaatttcaaggaccacttgcctgtcttctactggctttgtgccttggtagcggtgaggctggccccttgcagtctggggaagagtctaccggaactaatatcggggaagcactagggcatggactaggggatgccctcagcgaaggagttggcaaggccattggtaaggaggcaggcggtgccgccggcagcaaggtatccgaggctctgggccagggaacccgtgaggcggtaggcacgggcgtcaggcaggtaccggggttcggcgtggccgatgcgcttggcaaccgggtcggagaagccgcccacgctctgggaaataccggacatgagatcggtcggcaggctgaagatgtcattcgccacggggccgacgcagttaggggctcatggcagggggtgcctggtcataatggcgcctgggaaacatccggaggccacggaattttcgggtcccaaggcgggctcggaggacagggccaaggcaaccccggtgggctcgggacgccatgggtgcacggataccccggcaattctgccggctcttttggaatgaatccccagggggcgccctgggggcaggggggcaacggcggcccgcccaacttcggaacgaacactcaaggagcggtggcgcaacctggctatggttctgtccgcgctagtaatcagaacgagggatgcacaaacccacctcctagtggttccggaggcggctcatctaattccggcggtgggagcggctcccaaagcggttccagcgggtccgggagtaatggggacaataataatggctcgagctcaggtggaagcagctctggtagttcctcaggtggttcctctggcggctcaagtggaggctcaagtggaaatagcgggggatcaaggggagatagtggctccgaaagctcgtggggctcaagtacgggttccagtagcggtaaccatggcggctcaggcggcgggaacgggcacaaacccgggtgcgagaaaccgggcaatgaggccaggggtagcggcgaatccgggatccaaaattccgagacatcacccggcatgtttaacttcgatactttctggaagaatttcaagtcaaaacttggatttattaactgggacgctattaacaagaaccaggtccctcccccctctactcgcgccctcttgtatttcagtagactctgggaagatttcaaacaaaatactcccttcctgaattggaaagcaatcatcgaaggcgccgatgcatcctcgttgcaaaagagagcgggacgcgatgatcagaactacaactataaccaacatgcttaccccacggcttacggagggaaatactcagtgaaaacgccagcgaaggggggtgtttcccccagtagtagcgctagccgggtgcaaccaggattattacaatgggtaaaattttggtag

SEQ ID NO: 12222 - RNA, 1911 nt, synthetic construct
  misc_feature 1..1911: note = source = /note="Description of Artificial Sequence: Synthetic coding sequence"
  source 1..1911: mol_type = other RNA
atgacaacatggtccttaaggaggcgcccggctcgcacactcggactcctcttactcgtagtgctcggattcctagttctgcgcagactagattggagcactctagtgcccctgagattacgtcacagacagttaggcctccaggctaaagggtggaattttatgctggaggactctaccttctggatctttgggggaagcatccactatttcagagtaccgcgcgaatattggcgggatcgcttgctgaaaatgaaggcatgtggcctgaacacactcaccacctatgtgccatggaatttgcacgaaccagaacggggcaagttcgacttttctggcaacctggacctggaagccttcgtcctgatggctgccgaaatcggtttgtgggtaatccttcgacctgggccttacatctgcagcgaaatggatttaggtggtctgccatcatggctcctgcaagacccaggtatgcggctgcggacgacttacaagggctttacagaggcagttgatctatatttcgaccacttaatgagtagagttgtgcccctccagtacaaaagaggcggtcctataatcgcagtgcaggtggagaatgagtatggcagttacaacaaggatcccgcctacatgccatacgtgaaaaaggcactagaagatcgcggcatcgtagaacttctgcttacctctgacaataaagacgggttgagcaagggcatagtgcagggcgtgctggcaacgatcaacctgcaaagcacacatgagttgcagttgttgactacattcctgtttaacgttcagggaacccagcctaaaatggtcatggagtattggactgggtggtttgattcctggggcggtccgcataatatcctggacagctctgaagtcctgaagacagttagcgccatcgtcgacgcaggctcctccatcaacctatatatgtttcacggagggacaaactttggattcatgaatggagccatgcattttcacgattacaagtcagacgtgaccagctacgactacgatgctgtccttactgaggctggggactataccgctaaatacatgaagctacgggattttttcggctcaatctccgggatcccactgccccctccccctgatctcttacccaaaatgccatacgaacccctaactcctgtgctttacctttccctgtgggacgccctgaaatacctcggcgaacctatcaagtccgaaaaaccaatcaatatggagaatctgccagtcaacggcggaaatggacaaagcttcggttacatcttatatgagacttctatcacttcttctggaatcttgtccggtcacgttcatgatcgcggacaggtgttcgtgaataccgtcagcattggatttctggactataagaccacaaagattgccgtgcctctgattcagggatacactgtgttacgcatccttgtagaaaaccgggggcgcgtgaattacggcgagaatatcgacgatcaaaggaaaggcttgatagggaacctgtacctgaatgactctccactgaaaaacttccgcatctacagtctcgacatgaagaaatcattctttcaacgattcggcttggacaaatggagcagtttgccagagacacccaccctgcctgcgttttttttgggtagtctctctatctcgagcactccttgtgacactttcctaaagctcgagggatgggaaaagggagtagtgtttatcaacggacagaacttgggccgttactggaacatcggaccccagaagaccttgtacttgcccggaccctggctgagttctggcatcaaccaagtgatcgtgttcgaagagacaatggccggtccagccctccagtttaccgagactcctcatttagggaggaaccagtatatcaagtag

SEQ ID NO: 12223 - RNA, 672 nt, synthetic construct
  misc_feature 1..672: note = source = /note="Description of Artificial Sequence: Synthetic coding sequence"
  source 1..672: mol_type = other RNA
atgacacggtggagttcttatttactgggctggaccacttttttgttatacagttacgaaagttccggcggcatgcatgaggaatgtgttttccccttcacctataaggggtccgtctactttacttgcactcacattcatagtcttagtccttggtgcgcgacgagggccgtatacaatggtcaatggaagtactgccagtcagaggactacccaaggtgtattttcccattcatctaccgcggcaaggcctataatagttgtatctcacagggctcctttttgggcagtctctggtgctcagtaacatctgtgttcgacgaaaagcagcaatggaagttttgcgaaaccaacgagtacgggggaaactctttgagaaagccatgtatcttcccctcaatatataggaataatgtggtaagcgattgcatggaggacgaatctaacaagctctggtgccctacgactgagaatatggataaggatggcaaatggagcttctgtgccgatacccgcattagcgctttagtgcccgggttcccttgccacttccctttcaactataagaataaaaactactttaactgtacgaacgagggaagcaaagaaaatctggtgtggtgcgccacgtcttataattacgatcaagatcatacctgggtgtattgttag

SEQ ID NO: 12224 - RNA, 1368 nt, synthetic construct
  misc_feature 1..1368: note = source = /note="Description of Artificial Sequence: Synthetic coding sequence"
  source 1..1368: mol_type = other RNA
atgcttcaccccgagacttccccaggacgaggacatctgctcgccgtcttactggccctgttagggactacctgggctgaggtgtggcccccccagttacaggaacaggcccccatggccggcgccctaaaccggaaagaatctttcctgcttctcagcctccataacagattgagatcttgggtgcagcccccagctgccgacatgaggaggctggattggtctgactctctggctcagttggcccaggccagagccgctttgtgtgggatcccaacccccagtttagcttcagggctgtggcgcactctgcaggtggggtggaatatgcaattgctcccagccggattggcttcatttgttgaggtagtgtctctgtggttcgccgaggggcagaggtattcccacgccgctggagaatgcgctcggaacgctacctgtactcactacacacagctggtgtgggccaccagcagccagcttgggtgcggcagacacctgtgctctgccggccaaaccgccattgaagccttcgtgtgtgcctattcccccgggggaaattgggaagtgaacggtaagactataataccctacaagaagggagcatggtgcagtctgtgtacagcctccgtctcaggatgcttcaaagcctgggatcacgccggagggctgtgtgaggttccaaggaacccatgccgaatgtcttgtcagaaccatgggcggctcaatatttctacatgccattgccattgtcctcctgggtataccgggcgttactgccaagttaggtgttcgctacaatgtgttcacggccgatttagagaggaggaatgtagctgtgtgtgtgacataggttatggcggcgcacagtgcgctaccaaggttcactttccgtttcatacgtgcgacttgcgtatagacggtgactgtttcatggtgagttcagaagccgatacctattatcgcgccagaatgaagtgccagaggaagggcggggtccttgcacagatcaaatcccagaaagtgcaagatatccttgccttctacctgggtcgtcttgagaccacgaatgaggttatagactccgacttcgagacacgaaatttttggattggcctgacgtacaaaacggctaaggatagttttaggtgggcgaccggagagcaccaagccttcacttcattcgccttcggacaaccagataatcacggtctggtttggctgtctgcagcaatgggattcggaaactgcgttgaacttcaagcatccgccgcattcaattggaacgatcaacgctgtaagacccgaaacagatacatttgtcagtttgcccaggaacacatcagtagatggggccccggaagttag

SEQ ID NO: 12225 - RNA, 1425 nt, synthetic construct
  misc_feature 1..1425: note = source = /note="Description of Artificial Sequence: Synthetic coding sequence"
  source 1..1425: mol_type = other RNA
atggccgatatgcagaacctcgtggaacgacttgagagagccgtcgggagactagaagccgtcagccacacatcagatatgcatagaggttatgccgatagtcctagtaaaggggccgctccatacgtccaggcattcgactctttgctggccggccctgtggccgaataccttaagatctccaaagagattgggggggacgtacagaaacatgccgagatggtgcacaccgggctgaagctcgagcgggcgctcctggtaaccgcttctcagtgtcagcaacccgccgaaaacaaactaagtgacttgctggcccccatctccgaacaaattaaagaggttataacctttagagagaagaatagaggctcaaaactgttcaaccacctgtccgccgttagcgaatccattcaggccttaggatgggtggcaatggctcctaaaccaggcccatacgtgaaggaaatgaacgatgcagccatgttttacacaaacagggtcctgaaggaatacaaagacgtggacaaaaagcacgtagactgggtgaaggcctacctgagtatttggacagaactgcaggcgtatatcaaagaatttcatactacggggctggcgtggagcaagacaggccctgttgccaaagagctttccggcctcccgtctggcccatctgctggctcctgccccccaccaccaccgccatgtccaccgccaccgccagttagcactatttcgtgctcatacgagtccgcatcgcgctctagccttttcgcccaaattaatcagggtgaatccattactcacgcgctgaaacacgtctctgatgatatgaaaacccataagaatccagcacttaaggcacagtcaggccccgtacgctctggtccgaagccattctccgctccaaaaccgcagacatcaccctcgcctaagcgcgcaactaagaaagaacccgctgtactggaactggaaggcaagaagtggagggtcgaaaatcaagagaatgtgtcaaatttggtgatcgaggacaccgagctgaaacaagtagcttacatctacaaatgtgttaatacaacgctccagatcaagggcaagatcaatagcattactgtcgataattgcaaaaagctgggccttgtatttgacgatgtagtcggcattgtagaaatcatcaatagtaaagatgtgaaggttcaggtgatgggaaaagtgcccacaatctcaataaataagacggacgggtgccacgcctacctctcaaaaaactcgctggattgtgaaattgtgagcgcaaagtcttctgagatgaatgtactaatccccacagagggcggagattttaacgaattccccgtgcccgaacagtttaagactctctggaacggacagaaacttgtaactaccgtcacagagatcgcagggtag

SEQ ID NO: 12226 - RNA, 360 nt, synthetic construct
  misc_feature 1..360: note = source = /note="Description of Artificial Sequence: Synthetic coding sequence"
  source 1..360: mol_type = other RNA
atgaacaagattctttcttcaacggtctgctttggattacttacattgctgtccgtcctctcatttctgcagagcgtgcatggccgaccttatttgacccaaggtaatgagatcttcccagacaaaaaatacaccaatagagaggaattactcctcgccttgctgaacaagaatttcgactttcagcgcccgttcaacactgacctcgccctccctaacaagttagaggagctgaatcaattggagaagcttaaagaacagctggttgaagaaaaggactctgagacttcatatgctgtagacggactgtttagttctcaccccagcaagcgagcatgtttctggaagtactgtgtctag

SEQ ID NO: 12227 - RNA, 3756 nt, synthetic construct
  misc_feature 1..3756: note = source = /note="Description of Artificial Sequence: Synthetic coding sequence"
  source 1..3756: mol_type = other RNA
atgagactgctgttgctggtccctctcttgttagcacccgcccccggctccagcgctccaaaagtcagaagacagagcgacacttggggaccttggagccagtggagtccatgctcacgaacctgtggaggcggagtctctttccgtgagaggccttgttactctcagcgcagagatggagggtcaagttgtgtcggccctgctaggagccacagatcttgtcgcacggaatcatgccccgacggcgctagagattttagagcagaacagtgcgcagagttcgacggagccgagttccaaggacggcggtatagatggctgccttactactccgcgcccaacaaatgcgagctgaattgtattccaaagggagagaatttttactataagcacagagaagcagtcgtggacggcacaccttgtgaacccggcaagcgggatgtctgcgtggacggtagctgccgggtagtcgggtgtgatcacgagctcgattcctctaagcaagaagataagtgcctgcgatgcgggggtgatggtacgacatgctaccccgtcgccggcacctttgacgctaatgacttgtcacgtgccgtgaagaacgtaagaggcgagtattacctgaatggacactggacaatcgaagcagcaagagctctgcccgcagcttccacaattctgcactatgagcgcggcgcagagggtgatctggcgcccgagcgtctgcatgccagaggtcctacgagcgagcccctggtgatcgaactgatttctcaggagcccaacccgggcgtgcactacgagtaccacctgcccctgagacggccgagccccggattttcttggtcccacggaagctggtcagattgttcggcggaatgcggcgggggccaccaatcacgtctggtgttctgcacaattgatcacgaggcatatccagatcacatgtgtcagaggcaacctcgtcctgcggaccggaggtcctgcaacttacacccctgtccagaaaccaaaagatggaaggcgggcccttgggccccttgtagtgcctcctgtggcggagggagccagagtcggagcgtctactgcattagttcagatggagccgggatccaggaagccgtggaggaagcagagtgtgctggactgcccggcaaacctcccgccatccaagcgtgtaacttacagcgatgtgccgcttggtctcccgagccctggggagagtgttccgtttcatgtggggttggcgtgaggaaacgcagcgtgacctgtagaggggaaaggggctcccttctgcatactgcggcctgttctttagaagaccgtcctcctctaaccgaaccgtgcgtgcacgaagattgccccctgctgagtgaccaagcatggcatgtggggacctggggactttgtagcaaatcctgtagctcaggaacgagaaggagacaggtcatatgtgcaataggacctccttcccattgcgggagcctccaacactcgaagcccgtggatgtggaaccatgcaatacccagccttgtcacctgcctcaagaggttccctccatgcaagatgtgcatacaccagcaagcaatccttggatgccactgggaccacaggagtccccagcatcggatagtcgcggtcagtggtgggccgcccaggagcacccctcagcaaggggggaccaccggggggaaagaggcgaccctagaggggaccaaggcacccacctaagtgccctaggccctgctccttcactacagcaaccaccctaccagcaaccactgagaagcggtagcgggccgcacgattgtagacactccccacacggttgttgtcctgatggccataccgctagtctcggcccacagtggcagggatgcccgggagcaccttgtcaacaatcaaggtacggatgctgcccggatagagtcagcgttgcagaaggcccccaccacgctggctgcactaaaagctatggcggcgatagcacgggaggtatgccaaggtctcgggctgtcgcatcaactgtgcacaacactcaccagcctcaggcccagcagaatgagccatctgagtgccgcggcagccagttcggatgttgctatgacaatgttgctacggccgccggcccactgggggaggggtgtgtgggacaacccagccacgcatacccagttaggtgtttgttgcctagtgcccacgggtcctgtgctgattgggctgcaagatggtatttcgtggccagcgtggggcagtgcaataggttctggtatggagggtgtcatggaaacgctaacaatttcgccagtgagcaagagtgcatgagctcatgccaaggctctctgcacggcccgaggaggccgcagccaggcgccagtggacgatctactcacacagatggtggtgggagctcaccagctggcgagcaggaacctagtcagcatcggacgggagctgcggtccagcggaaaccctggccctccggtggattatggcgacaggaccagcagcctggacccggagaggctccgcatactcaggcctttggggaatggccctgggggcaggagctgggttccagagccccaggcctcggaggagacgccggcagcccagcgccaccttttcactctagttcttacaggatctccctggcaggcgtcgaaccatcattggtgcaggcggctcttggccagctggtacgcctcagttgcagtgacgacacggcacccgaatctcaggccgcgtggcagaaggacggtcagccaatcagttcggaccggcatagactgcagtttgatgggtctctgatcattcatcctctgcaagccgaagacgccgggacatactcttgcggatcaacacgccccggccgtgatagccaaaagattcagctgaggatcatcggcggtgatatggctgtgcttagcgaggccgagctttcacgcttccctcaaccccgcgatcccgcccaggactttggtcaagcaggtgctgccggaccactaggagccattccatcatcccaccctcagcctgccaacagacttaggttggaccagaaccagccacgagtggtggacgcgagccctggccagagaatccggatgacctgccgcgccgaaggctttcccccgccagccattgagtggcagcgagacggtcagcccgtatcttcacctaggcatcagctgcagccagacggatctttggtgatcagccgagtcgctgtcgaggatggcgggttttatacctgtgtggccttcaatggtcaggatcgcgatcagcggtgggtccagctgcgggtactgggggaactcaccattagcgggctgcccccaacagtgactgtacctgaaggggacacggcgcgtctgctttgcgtggtcgccggggagtcggtgaacatacgatggtcgaggaacggtctacctgtacaagcggatgggcatagagtccatcagtctcccgacgggaccttattgatttacaatctgagagcccgggatgaagggtcatacacctgctcagcatatcaaggctcccaggccgtgtctaggtcaactgaggtgaaggtggtgagtccagccccaaccgcccaaccacgggaccctggcagagattgcgtggaccagccagaacttgcaaactgcgacttgatcctacaggcccagttgtgcgggaacgaatactactcatccttttgctgcgcaagttgctcgaggtttcagccccacgcccaacccatttggcaatag

SEQ ID NO: 12228 - RNA, 1731 nt, synthetic construct
  misc_feature 1..1731: note = source = /note="Description of Artificial Sequence: Synthetic coding sequence"
  source 1..1731: mol_type = other RNA
atggctcagggcgtgttgtggattctgctgggactgttgttgtggtcagaccctggtacagctagtctacccctcctcatggatagcgttatacaagcacttgctgagctggaacagaaggtaccagctgctaaaacaagacatacagcctccgcttggcttatgagtgctcccaacagcggcccacacaatcgactttatcatttcttattgggggcttggtctctcaacgccactgaacttgatccatgccctctgtcacctgagctcctgggcctaactaaagaggtggcacgccatgacgttcgagaaggcaaggaatacggcgtggtgctggcccccgatggttcaacagtggccgtggagcctcttctggctgggttggaggctggcctccagggcaggcgagttattaatctgcctcttgatagtatggccgccccatgggaaactggggacacattcccggatgtggttgccattgcccccgacgtacgggccacctccagtcctggcctgcgcgatggttctcccgacgtcacaacagccgatatcggagcaaacactcctgatgccacaaaaggctgtccagatgttcaggcatccctgcccgacgccaaggcaaaatctccccctaccatggtggatagtcttctagcagtaactctagccggcaatttggggctgacttttcttcggggctctcagactcaaagtcacccagacttgggcactgaagggtgctgggaccagctctccgcgcccagaactttcacactgctagaccctaaagcatccctgttgacaatggctttcctcaacggggccctggatggcgtaattctgggcgattatctctcacgcactccagaaccccggcctagcctgagtcacctgctgagccagtattatggagcaggcgttgcacgggaccctggcttcagaagcaattttcgcagacagaacggagccgcccttacctcagccagcattctcgcacagcaagtttggggaaccctcgtcctgttgcagcgcctggaacccgttcacttacagttacaatgtatgtctcaggaacaactcgcccaggtggcggcaaacgcgacgaaagaatttaccgaggctttcctgggatgccctgccattcatccaagatgtcgctggggggccgccccttaccgtggccgcccgaagctgttacaactgccattaggatttctgtacgtgcatcatacctacgttccggcacccccatgcacagacttcactagatgtgcagccaatatgaggagcatgcagcggtaccatcaagacacccagggctggggcgatattgggtatagctttgtggtgggttcagacggctatgtctacgaaggccgaggctggcattgggtgggtgcccacactttgggtcacaacagtagagggtttggggtggctatagttggaaactacaccgcagctcttcctaccgaggcagcacttaggacagtgagggacaccctcccttcgtgcgccgtaagggccggcttgctgcgtccagattacgcactcctgggacatcgccagctcgtacggacggactgccccggggacgcgttgttcgacttattgaggacgtggcctcattttactgcaacagtaaagccgcgaccagcacgatcggtctctaagcgttccagacgtgagcctccaccaagaacactacccgcaaccgatctccaatag

SEQ ID NO: 12229 - RNA, 846 nt, synthetic construct
  misc_feature 1..846: note = source = /note="Description of Artificial Sequence: Synthetic coding sequence"
  source 1..846: mol_type = other RNA
atgttgcctaaatcacggcgtgccctgactattcaggagattgctgccctcgcgcgctcttctctccatggcatctcacaggtagtcaaagatcatgttacgaaacctactgcgatggcccaggggcgggtcgcacacctgattgagtggaaagggtggagcaaaccctcggattcccctgcagctctcgaatccgcttttagtagctatagcgatctcagcgagggggagcaggaggctagattcgccgcaggagtagctgaacagtttgctatcgccgaagccaaattacgtgcttggagctccgtggacggtgaagactctactgacgacagttacgacgaagatttcgctggcgggatggacactgatatggccgggcagctgcctctaggtccacatctccaggacctatttactggtcatcggtttagccggcccgtgaggcagggctctgttgaacctgagtcggattgcagccagactgtcagcccagacacactttgcagctccctctgtagcctcgaggatgggcttcttggatctcctgccagacttgcctcccaactgttaggcgatgagctcttattagccaagctgcctccaagtagggaatctgcattccgcagtctcggacccctggaggcacaagactctctgtacaacagcccactgaccgaaagctgcctctcccctgcagaagaggagccagccccgtgcaaagactgccagccactatgccctcctctgactggctcatgggaaaggcagcggcaggcctccgacctggcctcctctggcgtcgtgtctcttgatgaagacgaagccgaacctgaagaacagtag

SEQ ID NO: 12230 - RNA, 2619 nt, synthetic construct
  misc_feature 1..2619: note = source = /note="Description of Artificial Sequence: Synthetic coding sequence"
  source 1..2619: mol_type = other RNA
atgggtatcgtttggattctgatgtcagtattgccatggtggggtcggtgtgctgatctggcaattgcttctactcagctggtgccctcaaccgcatctgctcgtatggcactgtcttctcagctcatgggtcgcacagtctggacacctatgtccgcatccgcccttcaggaacccgcttatccagctttggctagaacctcaagggctccaagcgctgcatccgttcctctggccagccgctgcagggtcacaacagccctgatctctaccagtgcccagcgctcccccacatcagcttccctcgcacctgtacctactgccctaggcgcatcctccgcctcagcccatttggccttaagttcactcactatgggaacggtggcactgacccacgggagagtcagcgcatccccagtactacggttggggtccgcccggtgccccaagttaagcacacctcctaggcctgccgccgccgcagtgcgagggctgggccgagccggcgagacacctgccaactgcgtgccaagaagagctgtacccggccccgatgattcaagagaagacgtgaacgagtgtgcagagaaccctggggtgtgtacgaatggggtgtgtgtgaacaccgatggctccttccgctgtgaatgcccttttgggtattctctggacttcacagggatcaactgtgtcgataccgacgagtgttccgttggccacccttgtgggcaaggcacgtgtaccaatgttattgggggatttgagtgtgcgtgtgccgatggctttgaacccggcctgatgatgacatgcgaggatatcgatgagtgctccctgaaccctttgttatgcgctttccggtgccataataccgagggaagttatctctgtacgtgccccgcgggctacactctccgagaggacggcgcgatgtgccgagatgtggacgagtgcgccgacggtcagcaagactgccacgctcgcggaatggaatgtaagaaccttatcggaactttcgcctgtgtttgtcctccgggcatgaggccccttccaggcagtggtgaaggatgcaccgacgacaatgagtgccacgcccagcccgacctttgtgtgaacggccggtgcgtcaatacagctggctcctttagatgcgattgtgatgaaggcttccaaccttccccaaccttaaccgaatgccatgacatccggcagggaccttgttttgccgaggtgctgcagaccatgtgccgatctttgtcctcaagcagcgaggctgtcacaagagcagagtgctgctgcggtggggggcgaggctgggggccccggtgcgagttgtgcccactcccaggtacaagcgcgtatcgcaaactgtgccctcatggctctgggtatacagcggaagggcgcgacgtcgacgagtgcaggatgttagcccacctctgtgcccacggggagtgcatcaattcactgggtagttttaggtgtcattgccaggccggatacaccccagacgccactgcgaccacctgtctggacatggatgagtgtagccaggttcccaagccatgcacgttcctgtgcaaaaatactaaggggtctttcttgtgttcctgcccacggggctaccttttggaggaagacggccgtacttgcaaagacctggacgagtgtacctccaggcagcacaactgccagttcttatgcgtaaatacagtgggagcgttcacgtgtagatgccctccaggtttcacccagcatcatcaagcttgctttgatgtcaatgaatgtgacggccctcaccggtgccagcatggatgccagaaccagttgggaggatacagatgctcctgcccccaaggatttacacaacattcccagtgggctcagtgtgttgacgaaaacgaatgcgccttgtcgccgccaacctgtggctcagcttcatgtcgcaacactttaggcgggtttaggtgcgtatgtccatccggattcgacttcgaccaggcactgggaggatgccaggaagtcgacgaatgtgccggacggagaggcccctgttcgtatagctgcgctaatacgcctggtggatttttgtgtggttgccctcagggctacttcagagctggccaggggcactgcgtgagtggcctcggatttagtcccggcccacaggacaccccagataaagaggagctgctttcttccgaggcttgctacgagtgcaagataaatggtcttagcccccgggacagaccacgccgatcggcccacagagatcaccaagtcaacctggcaacactggacagtgaggccctcctgacgctgggtctcaacctctcgcacctcggcagggccgaacgtattctagaactgagacccgctctggaagggcttgaggggcgaattcgctatgtgatcgtgcgcggtaatgagcagggcttttttagaatgcaccacttgcgtggagtctcttctctgcaacttgggcgcagacggcctggaccagggacgtatcggctggaggtcgtttctcacatggccggcccgtggggagtacaaccagagggacagcccgggccgtggggtcaggccctgagactaaaagtccagcttcaactactctag

SEQ ID NO: 12231 - RNA, 1368 nt, synthetic construct
  misc_feature 1..1368: note = source = /note="Description of Artificial Sequence: Synthetic coding sequence"
  source 1..1368: mol_type = other RNA
atggctcgtaaggctctaaagttggcatcctggacttccatggccttggccgcaagcggcatatatttttacagtaacaagtacttagacccaaacgacttcggggcagtgagagtcggaagagccgtcgctacaactgcagtcataagttatgattacctgacatcccttaagtcagtgccatatggatctgaggagtacctccagctgcgctctaaaattcatgacctgtttcaaagtttcgacgataccccattaggcaccgcctctttggcccaggtccacaaggctgttctgcacgatgggcgtacagtggcagttaaggtgcaacacccaaaagtgagagcccaatcttctaaagatatcctgctgatggaagtgttagtactggcagtaaagcaattatttcctgagtttgaatttatgtggctagtagatgaggcaaaaaaaaatctgccattagaactggatttcctcaacgaaggacgtaacgccgagaaagtctcacaaatgctgcgacattttgacttccttaaggtacctcgcattcactgggatttgtctaccgaacgcgtattgctaatggagttcgtggacggcgggcaggtgaatgacagagattatatggagcgtaacaaaatcgacgtgaatgaaattagcagacacctcggtaagatgtacagcgagatgatatttgttaacgggtttgtgcattgcgatcctcacccgggcaacgtgctggtgcgcaagcaccctggaacgggaaaggccgagatcgttctgctggaccacggcctgtatcagatgctgacagaggaatttagactgaactattgtcatctgtggcagtctttgatctggacggatatgaaaagagttaaagagtactcgcagagactcggcgctggcgacctttaccctctcttcgcttgtatgctgaccgctaggagttgggacagtgtgaataggggcatctcccaagccccagtaaccgcaacagaagatctcgaaattcggaacaacgccgctaactacttaccccaaattagccaccttctcaaccatgtaccccggcaaatgctgctgatcttgaagactaatgatctgctcaggggcattgaagcagccctcgggactcgcgcatccgcctcttcttttctgaacatgtctcggtgctgcattcgcgccctggccgagcataagaagaagaacacttgctcgttcttcaggaggactcagatcagctttagtgaagcctttaacctttggcagattaacctgcacgaactaatcctacgggttaagggactaaagctggctgacagggtccttgccctaatttgctggctattcccggcgcccctctag

SEQ ID NO: 12232 - RNA, 1245 nt, synthetic construct
  misc_feature 1..1245: note = source = /note="Description of Artificial Sequence: Synthetic coding sequence"
  source 1..1245: mol_type = other RNA
atgaaccctacactcggattggctatcttcttggcagtcctcctaaccgtaaaggggctcctaaaacctagcttctctccacgaaactacaaagccttaagcgaagtgcaggggtggaaacagcgcatggcagcgaaagaattagcgagacagaacatggatttaggcttcaagttgcttaaaaagctcgccttctacaaccctggccgcaatatcttcctttctccactgtctatttcaacagctttcagcatgctgtgcttgggtgcacaggattctacactagacgaaatcaagcagggctttaacttccgaaagatgccggagaaggacctacacgaaggatttcactacataattcatgaactcacacagaagactcaggatctgaagctatctatcggcaatacactctttattgaccagagactgcaaccacagaggaagtttctggaggacgctaagaacttctacagcgcagaaacgatcttaacaaattttcagaatctagaaatggctcagaaacagatcaacgacttcatcagccagaagactcatggcaaaatcaacaacctcatagagaacatcgacccaggaaccgtgatgctcctggctaattacattttcttcagagcccggtggaaacatgaatttgaccctaatgtgaccaaggaggaagacttttttctcgaaaaaaactcgtccgtgaaggtgcccatgatgttccgctcaggtatctaccaggtaggatacgatgataaactgagctgcacaatcctggaaattccttatcagaagaatattacagccatcttcattctgccagatgagggaaagctcaaacaccttgagaaaggcctgcaggtcgacaccttctccaggtggaaaacactgctttcaagacgagtcgtcgacgtctcagtgccgagactgcatatgacgggcacttttgacttgaagaagacactctcctatatcggagtttcaaagatttttgaggagcacggagacctcacaaagatagcaccccaccgttctctgaaggtgggagaagccgtgcacaaagccgaattgaaaatggacgagcggggaactgagggagcagctgggacaggagcacagaccctgcccatggaaacccccctagtggtgaaaattgacaagccttacctcctcctgatatacagcgaaaaaataccctcagtgttatttctcggcaaaattgtcaatccaattggcaagtag

SEQ ID NO: 12233 - RNA, 942 nt, synthetic construct
  misc_feature 1..942: note = source = /note="Description of Artificial Sequence: Synthetic coding sequence"
  source 1..942: mol_type = other RNA
atgagcgatctcctgctgttagggctcattggcggtctgactcttctactattattgaccctcttggcctttgctgggtactcaggtttactcgctggagtggaggtctctgccggtagcccgccaattaggaacgtgacggtagcttacaaatttcacatgggcctgtatggagaaaccgggagattattcacagagtcatgttctatatcgccaaaattaagatcaatcgccgtctactacgacaatccacacatggtccccccggataaatgcagatgtgcagtgggatccatcctgtctgagggtgaggagtcccctagccccgagctgatcgacctttatcagaagttcggttttaaagtcttttcctttcctgctccctcacacgtagtgactgcaacatttccttacacgactatcttgagcatttggcttgccaccaggcgcgtccatcctgcattagatacatacataaaggagcggaaactttgcgcctatccccggttggagatatatcaggaggatcagattcactttatgtgtcctctggccagacagggagatttctacgtccctgagatgaaggaaaccgaatggaaatggagaggcttagtggaagccattgacacgcaggtggatggaaccggagcagacactatgtcagacacgtcttctgtttctctggaggttagccctggctcacgcgagacatcagccgccaccctgagccccggagctagctcacgcggatgggatgacggcgatacgaggagcgagcactcgtattcagaatccggagcgtctggatcctcattcgaagaactcgacctagagggcgaggggcctcttggagaatctaggcttgatccgggcacggagccccttggtaccacgaagtggttatgggagcccacagctccagagaaaggcaaagaatag

SEQ ID NO: 12234 - RNA, 603 nt, synthetic construct
  misc_feature 1..603: note = source = /note="Description of Artificial Sequence: Synthetic coding sequence"
  source 1..603: mol_type = other RNA
atggcctggggaggagtgcatacctgctgtttccacctttgctgctgctgcagttggcctcaaggcgccgttccagaggagctacacaagcatcccgggcaaactcttcttctccaatgccaatactctcccaaaagagggccctaccagcctaaaagttggtgtcagcagacatctccctctcgatgcacattgttggtaactagttcgaaaccatggaccgccgttcaaaaatcccactacacgatctgggataaacctaacgctggcttctttaatatcacaatgatccagcttacgcaaaatgactcaggtttttactggtgcgggatctacaatgcctctgagaacatcatcactgtcctacgaaacatatccttagtcgtgtctccagcacccactacttcccctatgtggaccttaccatggcttccaactagcaccgtgcttattactagtccagaaggcacctccggccatccttccatcaatgggagcgagactcgcaaatctagggcccccgcttgtctgggaagtggcggaccacgttttctggtgttggtgctgtgtggactgctgctggctaagggtcttatgctctag

SEQ ID NO: 12235 - RNA, 1035 nt, synthetic construct
  misc_feature 1..1035: note = source = /note="Description of Artificial Sequence: Synthetic coding sequence"
  source 1..1035: mol_type = other RNA
acaacaccctctcgagcactgcctggctggagcaattgtcgacctcgctggcgtgctggcccaacacctcagtcacccactcctcagtccagaatgcgcttgagtccaggtcccccctctgagtggacctggctcctgccccacttcaacccctgtcatcaccatcaccgccaccatcacccaaatcctaccaccagtcttttgcctacagaaccgccatccggacccgaagtatcaagccaagggcgggaagcaagttgtgagggcacactgagagctgtagaccctcctgtcagacatcacagctacggaagacatgaaggcgcctggatgaaggatcccgctgctcgggacgacagaatatacgttaccaattattactatggcaactcgctcgtggagtttcggaacctggagaatttcaagcagggaaggtggtcgaacatgtataagctgccatataactggatcggcaccggacacgtagtttaccagggtgcattttactacaaccgagccttcacgaaaaacatcattaagtacgatctgcggcagaggtttgtggcttcttgggccttattgccggacgttgtctacgaagatacgacaccttggaaatggcgcggacatagtgacattgactttgccgtagatgagtctggcttgtgggtaatctatccagcggtggacgacagagacgaagcccagcctgaagtgattgtcctgtctaggctggaccccggagacctctcagttcatagagaaaccacctggaagacaaggttgcgccgaaactcctatgggaattgcttcttggtctgtggcattttatatgccgtcgatacttataatcagcaggagggccaggtcgcctacgccttcgacacccacacagggaccgatgcccgacctcagctgccttttttgaacgaacatgcttataccactcagatcgactacaacccaaaagaaagagtactgtacgcctgggacaacggccaccagctgacatacacactgcatttcgtcgtgtag

SEQ ID NO: 12236 - RNA, 2682 nt, synthetic construct
  misc_feature 1..2682: note = source = /note="Description of Artificial Sequence: Synthetic coding sequence"
  source 1..2682: mol_type = other RNA
atggccgaggccgccctcgaagctgtccggagtgagctgagggaatttcctgctgccgctcgcgagctgtgtgttcctcttgcagtgccttacttggataagcctccaactcctctccacttctaccgggactgggtttgtcccaataggccttgcataattcgcaatgcattacagcactggcctgccctgcagaagtggagtctcccctatttccgagcaactgttggttcaacggaagtgagcgtggcagtcacacctgatggatacgcggacgctgtgcgaggagacagattcatgatgcccgctgagaggcggttgcccctctcctttgttttagatgtgctagaaggtcgggcccagcaccccggagtgctctacgtccaaaagcagtgcagcaacctcccaagtgagttgcctcagttacttccagatttggagagtcatgtgccctgggcgtctgaggctctcggaaagatgcctgacgccgttaatttttggctcggagaggccgcagctgtgactagtttgcataaggatcattacgaaaatttgtattgtgtggtttccggggaaaagcactttttatttcacccgccaagcgataggcctttcatcccctacgagctctacacacccgccacgtatcagctcaccgaggaaggcaccttcaaagttgtcgacgaggaagctatggaaaaggctgaagtgtcaagaacttgcttgttaaccgtaagggtgcttcaagcccacagactccctagcaaggacctagtgaccccgtccgattgttatgtaacactctggcttcctacggcctgcagtcaccgccttcagacgcgcacagtgaaaaactcatcctcccccgtgtggaaccagtcgtttcacttcagaatccacagacagctgaaaaatgtgatggagctgaaagtctttgaccaggacctcgtgactggcgacgatcctgtcttgtctgtacttttcgatgcaggcactcttcgggcaggcgaattccgtagggaatccttctccttgtccccccaaggcgagggaaggctggaagtggaattcagactgcagagtttggcagatcggggcgagtggttggtttccaatggggtattggtggcaagggagctttcatgcctacacgtgcagttagaagaaaccggggatcagaagtctagcgagcaccgggtacagctggtcgtcccaggcagctgtgaaggaccccaagaagccagtgtaggtaccggcacttttcgcttccattgccccgcttgctgggagcaggagttatccataaggctacaagacgctccagaggaacagctcaaagctccactgagtgctctgcctagcggtcaggttgtccgcctggtgttcccaacatctcaggagcctctcatgcgggttgaacttaaaaaagaagccggtctccgagagctggcggtccgcctgggttttggcccatgcgccgaggaacaggcttttctatctagacggaaacaggtcgtggccgctgcgctcagacaggctttgcaactagacggcgatttgcaggaagacgagatccccgtcgtggccattatggcaacaggaggtggaattcgcgccatgaccagtctctacgggcagctggccggcctgaaggaactgggattattggactgcgtgtcgtacattactggcgctagtggatccacttgggctttagccaatctgtacgaggatcccgagtggtctcagaaagacttggccgggccaacagaattgctcaaaacacaagtaacaaaaaataaactcggtgtgctggctccttcacagcttcagcgctaccgacaagaactcgccgagcgcgcacggctaggatatccctcctgcttcaccaatctgtgggcactgataaacgaagctcttctacatgacgaaccacatgatcacaaactgagtgaccagcgtgaagcactgagccacggccagaatcctctccccatctattgcgctctcaacaccaaaggacagagcttaacaacctttgaatttggcgagtggtgtgaatttagcccttacgaggtggggttccctaagtatggtgcttttatcccaagcgaactttttggctcagagttctttatgggccagctgatgaagaggttaccagagtctagaatctgctttctggaggggatttggtccaacctttatgctgctaatctccaggattcactgtactgggcctctgagccgagccaattctgggaccgatgggtgagaaaccaggctaatctggacaaagaacaggtgccgctgcttaagatagaggagcctccctccaccgccggtcggattgcagagttctttaccgatcttcttacatggagaccactcgcccaggccactcataatttcttacgagggctgcacttccataaagactatttccagcacccccactttagcacttggaaagccacaactcttgatggcctacccaatcaactgaccccatctgaaccccacctgtgcttgttggatgtgggatacctcatcaacaccagttgtcttcctctactgcaaccaacaagagatgtggacctaattctctctttggactataatttgcacggcgctttccaaggctctggtggacacccaagacggcgtcaactggggagatag

SEQ ID NO: 12237 - RNA, 354 nt, synthetic construct
  misc_feature 1..354: note = source = /note="Description of Artificial Sequence: Synthetic coding sequence"
  source 1..354: mol_type = other RNA
atgattatagacagcagtcggatcccatcattcacccaactccatagcactatgactagggcgcccctgcttttgttgtgtgtagcactggtcctgcttggacacgtcaatggcgcaactgtcagaaatgaagataaatggaaacctctgaacaacccacgaaatcgagatttattcttcagacgcctgcaagcctatttcaagggacgcggactcgatcttggcacctttcccaatccctttcctacaaacgagaatccgaggcccttgtccttccagagcgaattgacagctagcgcttccgccgactatgaggaacaaaagaactcatttcacaactatttaaaaggctag

SEQ ID NO: 12238 - RNA, 4143 nt, synthetic construct
  misc_feature 1..4143: note = source = /note="Description of Artificial Sequence: Synthetic coding sequence"
  source 1..4143: mol_type = other RNA
atgcgtcatggtgtggcatgggctctcctggttgccgctgccctcgggctcggtgcgaggggcgtgcgcggcgctgtcgctttggccgatttctacccttttggcgccgagagaggcgacgctgtcacaccaaagcaagacgacggtgggtcaggcctgcgaccgctgtcggtgccattccctttttttggcgctgagcactcgggattatacgtgaataacaatggcatcatatctttcctgaaagaggtgagccagtttacccccgtggccttccctattgcgaaggataggtgcgtcgtcgctgcattttgggctgatgtggacaataggcgtgccggagatgtttactatcgtgaagcaacggacccggctatgctccggagggccacggaggacgtgcggcactacttccccgagctgctcgacttcaacgcaacctgggtgttcgttgccacctggtacagggtcactttttttggagggagctcctcctccccggtgaacacattccaaacagtactaattactgatgggaaactgtctttcaccattttcaactatgaatctattgtgtggaccacagggacacacgctagctctgggggaaacgctactgggttaggtggcattgctgcacaggccggcttcaacgctggggatgggcagcgatacttctctattcctggcagccggaccgcggacatggcggaagtcgagaccaccacgaatgtcggtgtgccaggacgttgggcttttcgaattgatgacgcgcaagtacgcgtaggaggctgcggacataccactagtgtttgcctcgccctcagaccatgcctgaatggtggtaagtgcattgacgattgtgtgaccggaaacccaagctatacatgctcctgtctatctggctttactggaaggagatgccacctcgacgtgaacgaatgtgcaagtcagccttgtcaaaatggcggtacttgtacacacggaatcaatagtttcagatgccagtgtcccgctggttttgggggacccacatgcgaaacggctcagagtccctgtgacactaaggaatgtcagcatggagggcagtgccaggtggagaatggctccgctgtctgtgtttgccaggctggctacaccggagctgcttgcgagatggacgtcgacgattgctccccggacccatgcctgaatggggggtcttgcgtggaccttgtgggcaattatacttgtctttgtgcagaacctttcaaaggtctacgctgcgaaactggtgatcatcccgttcccgacgcatgcttgtccgccccttgtcacaatggcggaacctgtgtggacgcagaccagggctatgtctgcgaatgtccggaaggctttatgggattagactgccgagagagagtgccagatgattgcgagtgtcgcaatggcggccgatgtctgggcgccaatactactttgtgccagtgtcctctcggcttcttcggtctgctgtgcgagttcgaaataacagcaatgccctgtaatatgaacactcagtgtcccgacgggggatactgtatggagcacggcggcagctacttgtgtgtctgccacacagatcataatgcctcgcactcactcccaagcccatgcgactctgatccatgtttcaatggcggcagttgcgatgcacatgatgactcctacacgtgtgagtgcccaagaggattccacggaaaacactgcgagaaggcacgtccccacctctgtagcagcggaccctgtcggaacggaggcacttgcaaggaagccggaggtgagtatcactgttcatgtccgtatagatttactggtcgacattgtgagattggaaagcctgactcctgcgcctccggaccctgtcacaacggcggcacctgctttcactatataggcaagtacaaatgcgattgccctcccggattcagcgggcgccattgtgaaatcgcgccgagcccttgttttaggtcgccatgcgttaatggaggcacgtgcgaggatagggataccgacttcttttgccactgccaggccggctacatggggcggaggtgccaggccgaagtcgactgcggtccccccgaggaggtcaagcatgccacactgcgctttaatggtactagactgggtgccgtcgcactgtacgcatgcgaccgtggttactctttgagcgccccgtcacggatacgggtgtgtcagccccacggcgtgtggtcagaaccacctcagtgcctcgagatcgacgaatgccgcagccaaccttgcctgcatggcggttcctgccaagatcgcgtggccggctatctgtgtctttgctccaccggttacgagggagcgcattgcgagcttgaacgagacgagtgtagggcccatccttgccgcaacggtggttcttgccggaatctccccggggcctacgtatgcagatgtcctgcaggttttgtcggtgtccattgcgaaaccgaggtggacgcttgtgacagttcaccatgccagcacggcgggcgatgcgaatcaggaggtggcgcctacctttgcgtgtgtccagaatcattcttcggctaccattgtgaaacagtttccgatccctgtttctcctccccttgtggaggccgcggctattgcctggcatcgaacgggtcgcactcatgcacatgtaaggtaggctataccggcgaagattgtgccaaggagttattccctcctacagccctaaagatggaacgggtcgaggagtcgggggtgtcgatttcctggaatccccccaatggaccagctgcccgccaaatgctcgacggatatgcagtcacctatgtgtcttcagacggttcctatcgcagaaccgactttgtcgaccgtaccagaagttctcaccagcttcaggcccttgccgctggtcgtgcatataacatttcagttttctctgttaagcgaaacagtaacaataagaacgacatctcgcggccagctgtgcttctagcacgaacaaggccaagacctgtcgaaggatttgaggtaacgaacgtgaccgccagtacaattagtgttcagtgggccctccacaggattcgacacgccacagtgtctggggtccgcgtgtccattcggcacccggaagcccttagagatcaagccacagatgttgacagaagcgtggacagatttacattccgcgcccttttgcctggaaagcggtatactatccagctcactaccctctctgggctccggggcgaagagcacccaacggaaagcctggccacggcacccacgcatgtgtggactcgcccactgcctcccgccaatctgactgccgctcgggtcaccgccacctccgcacacgtcgtatgggatgcaccaactcccggttcattgctggaggcttacgtcatcaacgtgacaactagtcagtctacaaaatccagatacgtgccaaatggaaagctggccagctacactgtccgcgacctgctccccggccggaggtatcagttgtcggtgattgcagttcagtctaccgagcttgggccacaacactccgagccggcacatttgtatatcatcacctcccctcgcgacggcgcagaccgaagatggcatcagggcggacaccaccctcgcgtgctcaagaaccgaccaccacctgctagattacctgagctacgactgctgaatgaccacagcgcccccgaaacgcctacacagcctccaaggttcagtgaacttgtcgacgggaggggccgggtgtctgctagattcggtggcagcccatctaaggcagctacagtgcggtctcacgttcccggcaattgttccgagaacccttgccaaaacggcggtacttgtgtgcccggggccgatgctcattcttgcgattgtggaccagggttcaaggggagacggtgtgagcttgcctgtattaaggtcagtcgaccttgtacgcgtctgtttagcgagaccaaggcctttccagtctgggaagggggagtctgtcatcacgtctataaacgagtgtaccgagttcatcaggatatatgcttcaaagaatcatgcgaaagtaccagcttaaaaaagaccccaaacagaaagcagtctaaaagccagacccttgagaaaagctag

SEQ ID NO: 12239 - RNA, 474 nt, synthetic construct
  misc_feature 1..474: note = source = /note="Description of Artificial Sequence: Synthetic coding sequence"
  source 1..474: mol_type = other RNA
atggaggccctccggagagcacatgaagtggccttacgcctcctcctgtgcagaccatgggctagcagagccgctgccaggcctaaacccagtgcatctgaagttttaacaagacatcttctacagcgtcggctaccacattggaccagtttttgcgtcccatattctgccgtccgaaatgatcagttcggcctttcccattttaattggcccgtgcaaggtgccaactatcacgttctgcggacaggatgtttccctttcattaagtaccactgctctaaggctccgtggcaggaccttgccagacagaatcgcttcttcacggcactgaaggttgtcaatctaggtattcctaccttgctgtacggattagggtcatggctcttcgcccgggtgactgagacagtccacacttcatacgggcccatcactgtatattttctgaacaaagaggacgagggcgcgatgtattag

SEQ ID NO: 12240 - RNA, 288 nt, synthetic construct
  misc_feature 1..288: note = source = /note="Description of Artificial Sequence: Synthetic coding sequence"
  source 1..288: mol_type = other RNA
atgaaaggatctcgtgcattgttattggtggcccttactttattttgcatttgcagaatggcaaccggagaggataacgatgaattcttcatggactttctgcaaactctgcttgtggggacccctgaagagctgtacgaaggaaccctgggcaaatacaacgtgaatgaagacgccaaagccgcaatgaccgagcttaaaagttgcatagacggcctgcaacccatgcacaaagccgaattagtcaagcttctggttcaggtgctgggatcacaggacggcgcttag

SEQ ID NO: 12241 - RNA, 1053 nt, synthetic construct
  misc_feature 1..1053: note = source = /note="Description of Artificial Sequence: Synthetic coding sequence"
  source 1..1053: mol_type = other RNA
atgaaatgttctttgagagtatggtttctgagtgtggcttttctcctggtgtttatcatgagccttctctttacttacagccaccacagcatggccaccctcccttacctggacagcggtgccctcgatgggacacatagggtgaaactcgttcctggctatgcaggcctccaacggctgagtaaagagagattaagcggaaaaagttgtgcctgcagaagatgcatgggcgatgcaggagccagcgattggttcgacagtcatttcgatggcaacattagtcccgtctggacccgagaaaacatggatctacccccagatgttcagcgatggtggatgatgctccagccacaatttaagtcccacaacacgaacgaggttttagagaagctgtttcagatagtgcccggcgagaacccctatcgctttagagatccacaccagtgtcgacgatgtgcagtggtcggaaactccggaaaccttagggggtctggatatggacaggacgtcgacggccataatttcatcatgaggatgaatcaagctcctaccgtgggctttgagcaggacgtcgggagcagaacaactcaccacttcatgtaccctgagtccgccaaaaacctgcctgccaacgtatcttttgtgctggtgccatttaaagtactggaccttctgtggatcgcatcagccctctccactggacagatacggttcacctatgcaccagtcaagtccttcttgagagttgataaggagaaagttcagatatataatccggcctttttcaaatacattcatgatcgatggactgaacaccatggacgatacccttctacaggtatgttagttctcttcttcgctctacacgtttgcgatgaagtaaatgtctacggattcggggctgactcccgaggcaactggcaccactattgggagaacaacagatatgccggtgaatttcgtaagacaggcgtacacgacgcagactttgaggctcacataattgacatgctggcaaaggcaagtaagattgaggtatatcgcgggaactag

SEQ ID NO: 12242 - RNA, 600 nt, synthetic construct
  misc_feature 1..600: note = source = /note="Description of Artificial Sequence: Synthetic coding sequence"
  source 1..600: mol_type = other RNA
atggcctctcccgaggcccccgaaagtgttgtgcaattcgcactggataagctgggtggactcgattacttagtactgaaccatatcgggggtgccccggccggaacacgcgcgaggtcccctcaggcaacaagatggctaatgcaagtcaacttcgtgtcatacgttcagctgacttctagggcgcttccctccttgaccgattcaaagggatctttggtcgttgtgtcttccctgctgggcagggtgcccacgagtttctctaccccatattcagcagccaaatttgccctcgacggatttttcggatctctcaggcgagaactggacgtgcaggatgtcaacgtggccatcacaatgtgcgtactgggccttcgtgacagggcatcagccgccgaggcagtgcgcggggttactcgagtgaaggccgccccgggcccaaaggcagccctggcggtgattcgtggaggggcaacaagagccgccggcgttttttacccttggagatttaggctgctgtgcctgttaaggaggtggttgccaagacccagagcatggtttatccggcaggagttgaatgttaccgctgctgcagcgtag

SEQ ID NO: 12243 - RNA, 411 nt, synthetic construct
  misc_feature 1..411: note = source = /note="Description of Artificial Sequence: Synthetic coding sequence"
  source 1..411: mol_type = other RNA
atggtgcggccataccctctgatctattttctgttcctacccctcggggcctgtttccccttgttggatagaagagagcctaccgatgcgatgggcggtctgggagcaggcgaaagatgggcggacctggccatgggcccgcgacctcactcagtctgggggagctccagatggttgagggcctcccaaccccaggctttattggtgatagctagaggactgcaaacttccggtagggaacatgctggctgtagattcaggtttggtagacaggatgagggatccgaggctactggttttctaccagccgctggggagaagacctccggacctctgggcaacctggccgaagaacttaacggttactcccgcaagaagggtggatttagcttcaggtttgggagaagatag

SEQ ID NO: 12244 - RNA, 663 nt, synthetic construct
  misc_feature 1..663: note = source = /note="Description of Artificial Sequence: Synthetic coding sequence"
  source 1..663: mol_type = other RNA
atgcgaggccagggcagaaaagaatctctgtcagattctagggacttggacgggtcctatgatcaactcaccgattcagtcgacgatgagtttgagctgtcaaccgtttgccacaggccagaaggacttgaacagttacaggaacagacaaaatttacccggaaggagctgcaggttctctacagaggtttcaaaaatgagtgcccttctggcattgtgaatgaggaaaattttaagcagatctacagtcagttctttccacagggagattctagcacctatgcaacctttcttttcaacgcattcgataccaaccacgatgggtctgtgagcttcgaagactttgtcgccggcttgtctgtgatactgagggggacggtggacgatagactcaactgggcctttaacctctatgatctaaataaagacggatgcatcactaaagaggagatgcttgatattatgaaatctatctacgacatgatgggcaaatatacgtatcccgcattgagggaggaagctccaagggaacatgtggagagtttctttcaaaagatggacaggaataaagacggtgtggtaacaattgaagaatttatcgagtcttgtcagaaggacgagaacattatgcggagcatgcaactctttgataacgttatatag

SEQ ID NO: 12245 - RNA, 2175 nt, synthetic construct
  misc_feature 1..2175: note = source = /note="Description of Artificial Sequence: Synthetic coding sequence"
  source 1..2175: mol_type = other RNA
atgctcagaacaagcacccccaatctctgcgggggattgcactgtcgcgccccttggctttctagcggcatcctgtgcctgtgcctgatcttcctcctgggccaagtggggcttcttcaaggccatcctcagtgccttgattacggaccgccctttcagccccctctgcacctcgaattctgttctgactatgaaagttttggatgttgcgaccagcataaggatcgacggattgcagctcgctactgggatattatggaatatttcgacctgaagcgacatgagctgtgcggggactacatcaaagatatcttgtgtcaggaatgtagcccgtacgccgctcacctctacgatgccgaaaatacccagactcccctgagaaacttgcctgggctgtgcagcgactattgtagcgcatttcatagcaattgccacagcgccattagtctgctgaccaacgacagaggacttcaggaatcacacggccgcgacggtacccgcttctgtcacttactcgatctgcccgataaagattattgttttcctaacgtgctcagaaacgattatctgaatcgccaccttggtatggttgcacaggatcctcaagggtgccttcaattgtgtctttctgaggtcgccaacgggctgagaaacccagtatccatggtgcatgcaggcgacggcacccacagatttttcgtggctgagcaggtgggcgtggtgtgggtttacttgcccgatggttctcgtctggagcagccattcctggacctcaagaacatagtcctcactactccctggatcggcgacgaaagaggttttctgggactggcttttcatcctaaatttaggcacaacaggaaattttatatatattactcatgccttgacaagaaaaaagttgaaaaaattcgaatatcagaaatgaaagtctctcgtgctgaccctaacaaagctgacctaaagagtgaacgagtgatcctcgaaatcgaagagcctgcatccaaccacaatggggggcagctgttattcggacttgacgggtatatgtatatattcacgggcgatggtgggcaggctggggatcctttcggactgtttggtaacgcgcaaaataagagcagtctactcggcaaagtattacgtatcgacgtgaaccgcgctggctcccacggaaagaggtatagggtgccctccgataacccctttgtctcagaaccaggagcacatcctgcgatatacgcgtatggcatacggaacatgtggaggtgcgccgtggataggggtgatccaataactaggcagggtcgcggtagaattttttgcggcgacgtgggtcagaatcgcttcgaggaagtggatctcattctgaaagggggaaactacggatggagggccaaagagggatttgcatgctatgataagaagctttgccacaacgcgtcactcgatgacgttctccctatttatgcttacggacacgctgtagggaaaagcgtgacaggcggctacgtataccgcggctgcgaaagccctaatcttaacggtctgtacatctttggagactttatgtccggacgcctgatggctctccaggaggatcgtaaaaataaaaaatggaagaaacaggatttgtgcctcggcagcaccacatcttgcgctttccctggtctcattagcacccattcgaaattcatcatctcctttgctgaagacgaggcaggagaactatactttttggccacctcctatccctccgcctacgccccacgaggctctatctataagtttgtggacccatcaagacgggcacctccaggtaaatgcaagtataaaccagtccccgtgcggactaaatcgaagagaatcccgttccgcccacttgccaaaacagtattggacctgctcaaggaacaaagcgagaaagcagcccgcaagtcttctagcgcaaccctcgcctctgggcccgcccaggggctgtcggagaagggcagctcaaaaaaactggcctccccaacctcctcaaaaaatacgttgcgggggcctgggacaaagaaaaaggcaagggtcggcccacacgtacggcagggcaaaaggcggaaatcgcttaagtcccactctggtaggatgcggccttcggctgagcaaaagcgtgctggccgcagcttgccctag

SEQ ID NO: 12246 - RNA, 1218 nt, synthetic construct
  misc_feature 1..1218: note = source = /note="Description of Artificial Sequence: Synthetic coding sequence"
  source 1..1218: mol_type = other RNA
atgtggtatgtgagcacacgaggggtcgcaccaagggtgaattttgagggagcacttttttctggttatgcacccgatggcggtctatttatgcctgaagaactgcctcagttagacagggggaccctgtgtcaatggtcaacactcagttatcccggacttgtgaaggagctctgtgccctgttcataggttcagagttgctgcctaaagatgaacttaacgacctgatcgatcgggcattttccaggttcagacacagagaggtcgtgcaccttagtcggctacgtaatggactcaacgtgctcgagctgtggcacggtgtcacctacgcgttcaaagatcttagtctgtcctgtacaacacaattcttacagtacttcctggagaaacgcgaaaaacatgtaactgtggttgttggcacatccggagacactggcagtgccgcaattgaaagcgtacagggcgcgaaaaatatggatattatagttctgctccctaagggacactgtacaaaaatacaggagctgcagatgactaccgtccttaagcagaatgtacacgtgtttggagtggaaggcaattccgacgaattggacgagcctattaaaaccgtgtttgcagatgtagcatttgttaaaaagcacaatttgatgtccctcaacagcatcaactggtcaagggtgctagtccagatggcccatcatttcttcgcatatttccagtgtactcctagtctcgacacacaccccctacccctcgtggaggtcgtcgtgcccactggagctgcaggaaacttggccgccggatacattgctcagaagatcggcctccctatccgtttagtcgtagcagtaaaccgtaatgacatcatacaccgcacagtgcagcagggagactttagcttgtcagaagcagttaagagcaccttagctagtgctatggacattcaagttccctacaatatggagcgtgtcttttggcttctgagtggatccgacagccaagtgacacgggccctaatggaacagtttgaacggacgcaaagtgttaatcttcccaaggagctccactcgaagtgggagagacaggactatgaaaaaatggcagtcatggaatgtgacggttgttgcgtagagctgtgcttgggcaactgtggtccccgacggggatccgtgaccgacatccctgggacagctatggtcaggggcggcgggtag

SEQ ID NO: 12247 - RNA, 492 nt, synthetic construct
  misc_feature 1..492: note = source = /note="Description of Artificial Sequence: Synthetic coding sequence"
  source 1..492: mol_type = other RNA
atgactatgcgacataactggacccctgacctatcccccctctgggtcttacttttgtgcgcccatgtggtgaccttgctggtaagggccaccccagtttctcagacgacgaccgctgctacggcctcagtgcgctcaacaaaggatccatgcccatcccaaccccctgtcttccctgctgccaagcaatgtcccgccttggaggtgacgtggccagaagtggaagtacctcttaacggaactctgtccctctcgtgcgtggcgtgttctcggtttccaaattttagcattctgtattggctaggaaatggaagttttatcgagcatctgcccgggaggctctgggaagggagtacatcacgagagagaggatccacaggctgggccgaaggcaacctggcaccccacccccggtcaccagccctacagcctcagcagtctaccgcggcaggactgcgtctgtctacaggccccgctgcagctcagccctag

SEQ ID NO: 12248 - RNA, 1590 nt, synthetic construct
  misc_feature 1..1590: note = source = /note="Description of Artificial Sequence: Synthetic coding sequence"
  source 1..1590: mol_type = other RNA
atggcaccagcaagaactatggctcgggcccgactggctcccgccggcattcctgcggtggcattgtggcttctttgtaccctgggacttcaaggcacccaagcaggccctcctcctgctccgccaggcttaccagcaggcgctgattgtctcaattcttttacagcaggagtccctggattcgtgctggatacaaacgcttctgtctcaaatggagctacctttctcgaatctcccactgttagacgtggctgggactgcgtccgggcatgctgtaccacacagaattgcaacctggcacttgtggagttgcagccagaccgtggggaggatgcaatcgccgcctgtttccttattaactgcctctatgagcagaacttcgtttgcaagttcgcccctagagaaggttttattaattacctgacgagggaagtctacagatcttatcgtcagctgagaactcagggttttggagggagcggaatacccaaggcgtgggccggtatcgatctgaaagtgcagccccaagaacctctggtgctgaaggacgtggagaacactgactggagactgctgagaggtgacacggatgtgcgcgtggaacggaaagatcccaaccaagttgagctctggggcctgaaggagggtacttacctgttccagttaacagttacttcatccgatcatccagaggacaccgcaaatgtgaccgtcaccgtgctgtctacaaagcagacagaagactattgtcttgcctccaataaagtcggccgctgccggggcagcttccctagatggtattatgatcctacagaacagatttgcaagtcattcgtatatggcggctgcctcggaaataaaaacaactatctgagagaagaagaatgtatcctggcctgtagaggtgtgcaaggcggacccctgagaggtagttcgggggctcaggctacttttccccaaggcccatccatggaacggcggcatccagtttgctccgggacgtgtcagcctacccaattccgctgttccaacgggtgttgcatagattcatttcttgagtgcgatgatacgcccaattgccctgatgccagcgatgaggctgcctgtgaaaagtatacatcagggtttgacgagttgcagagaatccatttccccagcgacaaaggacactgcgttgacctgcccgacaccggactttgtaaggagtcgattccgagatggtactacaaccccttcagcgaacattgcgcccggtttacttacggggggtgctacgggaataagaacaactttgaagaggagcaacagtgcctggaatcctgccgagggatctctaaaaaggacgttttcggacttcgacgagagatccccatcccttccactggctccgtcgagatggccgtcgctgtgtttctcgtgatatgcattgtagtggtagtggccattctgggctactgtttctttaagaatcagcgaaaggattttcatgggcatcatcatcatcccccgccgacccctgcttccagcacagtgtcaaccacggaggacacagaacacttagtgtacaaccacacaacgcggccactctag

SEQ ID NO: 12249 - RNA, 1803 nt, synthetic construct
  misc_feature 1..1803: note = source = /note="Description of Artificial Sequence: Synthetic coding sequence"
  source 1..1803: mol_type = other RNA
atgcaggggcccctgcttctgccaggtctttgtttcctcttgtcgctcttcggcgcagtcacgcaaaagactaaaacctcgtgcgctaaatgccctccaaacgcctcctgcgtaaataatacacactgcacctgcaatcacggctataccagtggcagtggacaaaaactgttcacattccctctggagacatgcaacgataccacatcctcaaagaccaccgaaggtagaaaggagttacagaaaatcgtagataagttcgaatcactgctgacgaaccaaacgctatggagaaccgaaggcagacaggaaatctcgtccacagccacaacgatcttgagagacgtggaatcaaaagtcctggaaactgcattgaaggatcctgagcagaaagttctgaaaattcagaacgactcagtagccattgagacacaggctatcacagacaactgtagtgaagaaaggaagacatttaacctcaacgtgcagatgaactcgatggacattagatgcagcgacattattcaaggggatacccaaggacccagcgccattgctttcattagctacagcagcctcggaaatatcatcaatgcaacttttttcgaggagatggacaaaaaagatcaggtataccttaactcccaggtagtctccgccgctattggcccgaaaagaaatgtcagtctgtcgaagtccgttactctgacctttcagcacgtgaaaatgaccccatcgacaaaaaaagtattttgcgtttattggaaatcaaccggtcaaggctcacaatggtcaagggacgggtgctttctgatccacgtgaataaaagccacacaatgtgtaactgcagtcatttgagcagctttgctgtgctgatggccctgacatcacaagaggaagatcctgtgctgacagttatcacctatgtgggactgtctgtttcccttctttgcctgcttctggccgctctgacctttctgctttgtaaagctatccgtaacacctcaaccagtctccacctacaattgtccctgtgcctgtttttagcacaccttctttttctggtaggcattgatcggacagaaccgaaggtgctgtgcagtatcattgccggggccctgcattacctgtacctcgccgcgtttacttggatgctcctcgagggtgtgcatctgtttctgaccgcacgaaacctcacagtggtgaactacagctctatcaatcgtcttatgaagtggatcatgtttcctgtggggtacggcgtgcccgccgtgacggttgccatctccgcagcttcttggccacacctctacggcaccgccgacaggtgctggctgcatctcgatcaaggcttcatgtggtcctttctgggcccagtttgtgccatatttagcgcgaatctcgtcctgtttattctcgtgttttggattttaaaacgcaagttatcctcattgaacagtgaggttagcacaatacaaaatacgcgaatgttggccttcaaggcaaccgctcagcttttcatccttggttgtacctggtgcctcggcttactacaggttggacccgccgcccaggttatggcttatctgttcaccattattaacagtctccaggggttcttcatttttctggtctattgcttgctgtctcaacaggttcaaaaacaatatcaaaagtggtttcgagagatcgtcaaatctaaatccgagtcagaaacatacactttatcttcgaagatgggccctgatagcaagccgagtgagggggacgtctttccaggacaggttaaacgcaagtactag

SEQ ID NO: 12250 - RNA, 660 nt, synthetic construct
  misc_feature 1..660: note = source = /note="Description of Artificial Sequence: Synthetic coding sequence"
  source 1..660: mol_type = other RNA
atgaaactcctgctctgggcctgtattgtttgtgtggcatttgccagaaaacgccgtttcccttttattggcgaggacgataatgacgacgggcatccactccatccatctctgaatatcccctacggcattcgcaatctgcctcccccactgtattatcgaccagtgaacactgttcctagttaccccgggaatacttatactgacacaggccttccttcctatccctggatcctaacaagccctgggtttccgtacgtttatcacatcagggggtttccccttgccactcaactcaatgtccctcccctgccaccacgtgggtttcccttcgtcccccccagccggtttttttcagctgctgcagctccagccgcccctcctattgcagcagaaccagcagccgcagctcccctgacagccactcccgtcgccgccgaaccagccgccggagctcccgtggcagctgaaccagctgctgaagctcctgttggagcggaaccagctgcggaagccccagtcgccgccgaaccagccgcagaggccccagtgggagttgaacctgctgccgaggagccatcaccagcagagccagccaccgcaaaacctgccgcccctgagccccatccttccccaagccttgaacaagctaaccagtag

SEQ ID NO: 12251 - RNA, 1743 nt, synthetic construct
  misc_feature 1..1743: note = source = /note="Description of Artificial Sequence: Synthetic coding sequence"
  source 1..1743: mol_type = other RNA
atgcatctcagtgcagtgttcaacgcactgctcgttagcgtacttgcagccgtgctgtggaagcatgtgaggctgcgggagcacgcggccacactagaggaggaactcgcactgtcaaggcaggccacggagcctgcaccggccttgagaatcgattatcctaaagcccttcaaattctaatggaagggggcacacatatggtttgtacagggcggacccataccgacaggatctgtcgattcaagtggctgtgctattcaaatgaagcagaggaattcatctttttccacggaaatacttctgtcatgctgcccaacttgggatcccgaagattccagccagctcttctggacctgtcaacagtcgaggatcataatacacaatactttaattttgttgaactgcctgctgctgcacttcgcttcatgcccaaaccggtgttcgtacccgacgtcgccctaattgcaaatcggttcaatccagataacctcatgcatgtttttcatgacgatttattaccgctcttttacacgctgagacaatttccaggtctggcccatgaggccagattgtttttcatggagggttggggcgagggtgcccatttcgacctgtataagcttcttagccccaaacaaccgctgctcagagcccagttaaagacactcggtagacttctatgctttagtcatgcttttgtgggccttagcaagataactacctggtaccaatacggcttcgtgcagccccaggggcctaaggccaacattctagtttctggaaatgagataaggcagttcgcacggtttatgaccgaaaagctgaacgtctcccacactggggtgccattgggggaggaatatattttggttttcagccggacacagaacagactgatactcaatgaagcagagctactgcttgcacttgcacaggaatttcagatgaaaacagtaactgtctcacttgaagaccacactttcgccgatgtcgttaggctggtatctaatgcatcaatgttagttagcatgcatggcgcacagctcgtgactacgctcttcctgcccaggggggcaacagttgttgaactctttccttacgcagtcaaccccgaccactatacaccgtataagaccttagctatgttacccggtatggatctccagtacgtagcttggagaaacatgatgccagagaatactgtaacacatcctgaacggccgtgggaccagggcgggattactcatctcgatagggccgaacaagcaaggatactccagtcacgagaagtgcccaggcatttgtgctgccgcaaccccgagtggctgtttcgcatataccaagatacaaaagttgatataccttctctgattcagacgatccgaagagtggtcaagggcagaccgggccctaggaagcagaaatggactgttggtctgtatcccgggaaagtgagagaggccagatgtcaggcatccgtgcatggcgccagtgaagcgcggctgacagtaagttggcagattccatggaacctcaaatacttgaaggtcagagaggtgaaatatgaggtctggctgcaagagcagggggagaacacctatgtcccatatatcttggcacttcagaaccacactttcacagagaacattaagccgttcaccacctacctcgtctgggttcgctgtatcttcaacaagatcttacttggaccatttgcagacgtcctagtgtgcaatacatag

SEQ ID NO: 12252 - RNA, 5130 nt, synthetic construct
  misc_feature 1..5130: note = source = /note="Description of Artificial Sequence: Synthetic coding sequence"
  source 1..5130: mol_type = other RNA
atgggtttcttgccgaagctattgctgctggccagctttttccccgctggccaagccagctggggcgtctcttcaccgcaggacgtgcaaggcgtcaaaggatcttgtctccttatcccctgtattttttcattccccgccgatgtggaggttcccgacggaataactgcaatctggtactacgattattccgggcagcggcaggtggtctcccactccgccgaccccaaactcgtggaggccagattccggggcaggaccgagttcatgggcaacccggagcatagggtgtgcaacttacttctaaaagacctccagcccgaagacagcggttcttataactttagattcgaaatatccgaagtgaacaggtggtctgatgtgaaggggactctggtcacagtgacagaagagccccgtgtccctacaattgccagtcctgtggagcttcttgagggtaccgaagtcgactttaattgctcaactccctacgtctgcctgcaagaacaggtgcggctgcagtggcagggacaggacccggcaagaagcgtgactttcaatagccagaaattcgaacctacaggtgtcggtcatttggagactttgcacatggctatgtcgtggcaggatcatggccgcatcctgaggtgccagctgagcgtcgctaaccatcgtgcccaatccgagatacacctccaggtcaaatatgcacccaagggagtcaaaatcctgctctccccatccggacgtaatatcctgcctggcgaattagttacactgacgtgccaggtgaacagttcctaccctgccgtgagcagtatcaaatggctgaaagatggcgtaaggctgcagactaagacaggggtattgcacctccctcaggctgcctggtcagatgccggagtctatacgtgtcaggctgaaaacggcgttggatctctcgtctcccctcccatcagcctgcatatcttcatggccgaagtgcaggtgtccccagcgggtcctattttggagaatcaaacggtgacactggtctgcaatacaccgaacgaagcacctagcgatcttaggtactcttggtacaaaaatcacgtgctgctggaagacgcacattcacatacacttaggctgcacctcgccacgcgggccgacactggcttttatttttgcgaggtgcagaacgtgcacgggtcggagcggtccgggccagtttccgttgtagtgaatcaccctcctctcacccctgtcctgactgccttcttagagacacaagctggcctggtcggcatacttcattgctcagtggtctctgaacctctagcaacactggtcctatcacatggagggcacatcctggcaagcacaagtggcgatagcgatcactccccccgattctcaggaacctctggaccaaattcattaaggctggaaattcgcgacctcgaagaaaccgatagcggcgaatataagtgctctgccacaaactcattggggaacgccacctctacgttagacttccatgccaacgcggctagacttcttataagcccagcagcagaagtggtggaagggcaggcagtgacgttgtcttgtcggtcaggattaagccctacaccagacgcacggtttagttggtatctgaacggtgccttgttgcatgagggtcccggctccagtcttctacttcccgccgcctcctccactgatgctggcagttatcactgtagggcccgggacggacacagtgccagcggcccttcctcaccagcagtgctgactgtgctgtatccaccaaggcaacctaccttcaccaccagacttgacctcgacgctgccggcgctggggccggtcggcgcggcttgctactttgccgggtggactctgatccacctgctagactgcagctcctgcacaaggacagagtcgttgccacaagccttccaagcggaggcgggtgttcaacttgcggagggtgctcccctagaatgaaggttacaaaagctcctaatctcctgagagtcgaaattcataatccgctactggaggaagagggactatacctctgtgaagcctcaaacgctctcggaaacgcctcaacctcggcaacttttaacgggcaggctacggtactggcaattgccccatctcataccttgcaagaggggaccgaggccaacctgacttgtaacgtctcacgggaagctgcgggatcgcccgcaaatttctcatggttcagaaatggtgtgctgtgggcccagggaccgttggagactgttactctgctgcccgtggcacggactgatgcagctctttacgcttgtagaattctgacagaagcgggggctcagctctccacgccagtgttgctctctgtgctgtacccccccgatcgaccaaagctaagtgctttactagatatggggcagggtcatatggcactattcatttgtactgtggatagtagacccctggcgctcctcgccctcttccacggtgaacacttgctggctacctcacttggaccgcaggtgccgtctcacgggcgatttcaggccaaggctgaggcaaattctctgaagctggaggtgcgggaactcggcctgggagattcaggatcctacagatgcgaagccactaatgtcctgggttcaagtaatacatctctgtttttccaggtgagaggcgcttgggtccaggtctctccgtctccagagctgcaagagggacaagctgtggtgctgtcctgtcaagtgcataccggtgtacctgagggaacaagctaccgttggtatagggacggtcaaccacttcaggaatccacatctgccaccttgcggttcgctgcaatcaccttaacccaagccggtgcttaccactgccaggcacaggcgccaggcagcgctaccacatctcttgccgctccaattagtttgcacgtctcctatgcccctagacatgtgaccctgacaactctgatggacaccggaccagggaggctgggcctgttgttgtgccgggtagactctgaccccccggctcagctaagactgctgcacggcgatcgcctagtggcgagcacactccagggcgtgggaggccctgagggctccagcccacgtctgcatgtcgctgtggcgcccaacaccctcaggttggagattcacggagcgatgttagaggacgagggcgtttatatatgcgaggcttccaacacgttggggcaagcttcagcctcagcggatttcgacgcacaggcagtgaacgtgcaagtctggccaggcgccaccgtgagagaaggacagttggtaaacctgacgtgcttagtgtggactacacaccccgcccaactcacctacacatggtatcaggatgggcaacagcgccttgacgcccactccatacctttgccaaatgtgactgtacgcgacgcgacctcctataggtgtggtgttggtccccccgggagggctccaagattgtctcggcctatcacactagacgtgctttacgcaccacgcaacctgcgtttaacatacctcctggagagtcacggaggtcagctagcactggtcttgtgtaccgtggactctcggccccctgctcagctggccctcagccacgcaggtagactcctggcatcttctaccgcagcctcggtgccaaacacattgagactggagctaagagggccccagcctcgggacgagggcttttactcatgcagcgcacgttctccactgggtcaggcaaacaccagtttagaattaagactggagggggtgcgagtgattttagctcccgaggcggccgtcccagaaggggcccctatcaccgttacttgtgcagatcctgccgcacatgcgccgacgctgtacacctggtatcacaacgggagatggctccaggaaggccccgccgcttcgttgagcttcctggttgccaccagagcacacgcaggagcctacagctgccaggcacaagatgcgcagggtaccaggtccagtcgccccgcagcattacaggtgctctacgcgccccaggatgccgtactgtcctctttccgagactctagagctagaagtatggctgttatccagtgtaccgtggattccgaaccacccgccgagttggcactttctcatgatggcaaagtgttggctacgtcaagcggggttcatagcctcgcttcggggaccggacacgtccaggtggcccgcaacgctcttagactgcaagtccaggacgtccctgcgggcgacgatacatatgtgtgcacagctcagaatctgctgggcagcattagcaccataggtcgcttgcaggtggagggcgccagagtagttgccgaaccaggcctcgatgtgcctgaaggggccgctcttaaccttagttgccgactccttgggggccccggccctgtagggaattccacatttgcatggttttggaatgatcgcagattacacgccgaacctgtgcccactttggcttttacgcatgtagcccgcgctcaggctggtatgtaccactgtctcgctgaacttccaacaggggcagcagccagtgcgcctgtgatgctgagggttctttatccccctaaaacccctacaatgatggtgttcgtcgaaccagaagggggactccgaggcatcctggactgccgcgttgattccgaaccgctggcaagtttgacactccacttaggtagtaggctcgtcgctagttcacagccccagggcgctcccgctgaaccgcatattcatgttcttgctagtcccaatgcacttagagtcgatatcgaggctcttaggccctccgatcagggagagtacatctgtagcgcaagcaatgttcttggaagtgcctctacctctacgtatttcggagtgcgagccctgcatcgcttacaccagtttcaacagctcctatgggtgctgggactgctggtcggcctcttgctactcctgctggggttaggcgcctgttacacatggagaagacgtagagtctgtaaacagtctatgggggagaatagcgtggagatggcctttcagaaggaaaccacgcagctcattgaccctgatgctgctacttgcgagacatcgacttgtgctccgccgctggggtag

SEQ ID NO: 12253 - RNA, 693 nt, synthetic construct
  misc_feature 1..693: note = source = /note="Description of Artificial Sequence: Synthetic coding sequence"
  source 1..693: mol_type = other RNA
atgtgcgtgacttatcataacggcactggatactgtaaatgccccgaaggattcctcggggaatactgtcaacaccgcgatccctgcgagaagaataggtgccagaacggagggacttgtgttgcccaggcaatgcttggtaaggctacatgccggtgcgcctcggggttcacgggagaggattgccaatattccaccagccacccatgtttcgtgtccaggccttgcttaaatggtgggacgtgccacatgctgtctcgggatacctatgaatgcacttgtcaggtggggtttaccggcaaagaatgtcaatggacagacgcgtgtctatctcatccctgcgccaacggctcaacctgtacaactgtagcaaatcagttcagctgcaaatgcctgaccggcttcactggacagaaatgtgagaccgatgttaacgagtgcgatatcccagggcactgtcaacacggagggacttgtcttaatttgccaggctcttaccaatgtcagtgtctgcagggctttacgggccaatactgcgattctctgtacgttccctgtgcccccagcccatgcgtgaacggagggacatgcaggcagactggcgattttacttttgaatgcaattgccttccagccacatggcccattttccctaaacttctgagtctgcaggaaaaggagtcttactgttag

SEQ ID NO: 12254 - RNA, 660 nt, synthetic construct
  misc_feature 1..660: note = source = /note="Description of Artificial Sequence: Synthetic coding sequence"
  source 1..660: mol_type = other RNA
atgttcgtaagctacctcattctcactctcctccacgttcaaacagcagtgctggcgaggccaggcggagaatctatcggctgtgacgattacctcggaagtgacaaggtggtggataaatgcggcgtgtgtggaggcgataatacaggctgccaagtcgtgtccggggtgtttaagcacgccttaacaagcttggggtatcaccgtgtcgtcgaaataccagagggagcgaccaagattaatatcaccgagatgtataagagcaacaagaagaagtcccatctcaaaccagctacaaggggatcacaattcagctctgtgaaggtttgctcagtgcctgccgcgtgcaaactccttggaaccccaggtagagccagacagccagttccagcccccagagaacttgagcatgacaagaactccccccattgtgcctatttgtcactgtacctcacatcactcgcacagtcatcttggcgcgtgttctccttgttctcctatgtgctgatctatttattcagcaagtacctggcctttaatactctgtttgcattgaagcggatggccctgcagagagaccgtaaagagaagacacgcgcatggtgtatttttattaagctgtgtggaagggagatccagatcctaccagggcccgtctag

SEQ ID NO: 12255 - RNA, 363 nt, synthetic construct
  misc_feature 1..363: note = source = /note="Description of Artificial Sequence: Synthetic coding sequence"
  source 1..363: mol_type = other RNA
atggataacgtacagcctaagatcaaacatcgcccattttgtttttctgtgaagggccacgtgaaaatgcttaggcttgccctgacagtaacgagcatgaccttttttataatcgcccaggccccagaaccctacattgtaatcaccggcttcgaggtaactgtcatcctcttttttattttactatacgttttaagactcgatagactcatgaaatggcttttctggcctctattagtctttgcactcgttactgctgtttgctgccttgccgatggagcattgatttaccgtaaattactcttcaatccgtccggaccttaccagaaaaaaccggtccatgagaagaaggaggtcctctag

SEQ ID NO: 12256 - RNA, 864 nt, synthetic construct
  misc_feature 1..864: note = source = /note="Description of Artificial Sequence: Synthetic coding sequence"
  source 1..864: mol_type = other RNA
atggcaccctggtcccacccttccgctcagttacaaccagtgggaggcgatgcagttagccccgccctgatggtgttactgtgcctaggaaacctgtcgaaagctactctgtgggccgaaccaggctcagtgatttcacggggaaactccgtcactatccgatgccaaggcaccctcgaagcccaggaatacagattagtcaaggaggggtccccagaaccatgggacacccaaaatcctctggaaccaaaaaacaaagcacggtttagcattcctagcatgactgagcaccatgcaggccgctataggtgttattattattcccccgccggctggagcgaaccaagtgatcctttagagctcgtggtgacgggattttacaacaaacctacacttagcgcgctcccatcaccggtagtgacttcaggagagaacgtaaccctccaatgcggatcgcgcctgagattcgatcggttcatcctgacagaggaaggtgaccacaagctttcgtggacattggattcgcaacttacaccctctggacaattccaggcacttttccctgtcggtcccgtcacacccagtcatcggtggatgctaaggtgctacggctcccggagacatatcttgcaagtttggtcagagccttcggacctgctcgaaataccagttagtggagcagccgacaatctgtccccaagccagaacaaaagtgactccgggactgccagtcaccttcaagactatgccgtggaaaatctgattagaatgggtatggccggacttattctggtagttctgggtattttgatcttccaggactggcatagccagcgctcaccacaggctgctgccggcagatag

SEQ ID NO: 12257 - RNA, 438 nt, synthetic construct
  misc_feature 1..438: note = source = /note="Description of Artificial Sequence: Synthetic coding sequence"
  source 1..438: mol_type = other RNA
atgggaatcggttgttggcgcaatcctttacttttacttatcgcactcgtcctgtcagccaagttaggccacttccaaaggtgggagggcttccagcagaagttaatgagcaaaaagaatatgaattcaacccttaactttttcatacaatcgtataacaatgcctccaatgacacttacttgtacagagtgcagagactgattcgatcccagatgcaactcacaaccggcgtagaatacatagttacggtgaaaatcgggtggacaaaatgtaaacggaatgatacctcgaattcatcctgccctctgcaatctaagaaactcaggaagagccttatctgcgaatcgctgatctacactatgccttggattaactactttcagctctggaacaactcctgcctggaggctgagcacgtgggaaggaacctgagatag

SEQ ID NO: 12258 - RNA, 1776 nt, synthetic construct
  misc_feature 1..1776: note = source = /note="Description of Artificial Sequence: Synthetic coding sequence"
  source 1..1776: mol_type = other RNA
atgcaacaagatggactgggagtgggtaccagaaacggaagcggaaaaggtagaagtgtccacccatcttggccatggtgtgccccccgccccctcaggtattttggtagggatgcacgggccagaagggcccagacggctgctatggctctggctatccaagtcacagtgagtaatccataccacgtcgtgattctcttccaacctgtcaccctgccatgcacttatcagatgacaagcacccctacccaacccatcgtcatctggaaatataagtctttttgcagggatagaattgccgacgcgttctcaccagcaagtgtcgacaaccagttaaatgctcagctcgccgccgggaaccctggctacaacccctacgtcgagtgccaggattcagtgcggactgtgagagtcgtagccacaaaacaggggaatgccgtcacactcggcgattactaccaaggaaggcggattacaatcactggaaacgccgatctgacattcgaccagaccgcatggggagactcaggcgtatactattgcagtgtagtttcagcccaggacttgcagggaaacaatgaggcatacgccgagcttatcgttctcggcagaacatctggagtggcggaactgctgcctggctttcaggccggccctatcgaagattggcttttcgtagtggttgtgtgtctggccgctttcttaatctttcttctgctggggatatgctggtgccagtgttgtccacacacatgttgctgctacgtgagatgtccctgctgtccagacaagtgttgttgccccgaggccctttatgctgcaggaaaggcagccacatccggggttccttccatctacgccccttcgacctacgctcacttgtctcccgccaagactcctcccccccccgctatgattcccatgggtcctgcctacaacgggtaccccggcggctaccctggagatgtagacagatccagctctgtgagaagcggttatagaatccaggcctctcagcaagacgatagcatgcgggtgctctactacatggaaaaagagttggctaattttgacccgtcgcggcccggaccacctagcggcagagttgaacgcgccatgtccgaagtgacaagcctgcacgaagatgattggagatcaagaccctcaagagggcccgccctgactcccattagggacgaggaatggggggggcacagcccgcgttccccccgcgggtgggatcaggagcctgcaagggagcaagccggcggcgggtggagagccagacggcccagggctcgaagtgtcgatgccctagatgacttgactcctccttccacagccgagtctggctcaagatctcctacttcaaatggaggacgatcacgagcttacatgccacctcgctctaggtcccgcgacgatctgtatgatcaggacgacagtagagatttccctcgatctcgcgatccccactacgatgactttcgaagccgagagcggccacctgccgacccccgatcacaccaccataggaccagagatccccgcgacaacgggtctcgaagcggagacttaccgtacgacgggcgcctcctcgaggaagcggtgcgcaaaaaagggagtgaagaacgccgtcgacctcacaaggaggaggaagaagaagcatactatcctcccgctccacccccatactccgagaccgactctcaggcgagtcgggaacgtcggttaaaaaagaatttggccctcagccgggaaagcctggtggtttag

SEQ ID NO: 12259 - RNA, 678 nt, synthetic construct
  misc_feature 1..678: note = source = /note="Description of Artificial Sequence: Synthetic coding sequence"
  source 1..678: mol_type = other RNA
atgaatagatgtccccggcgatgccgatctccccttgggcaagccgccaggagtctctatcaacttgtgacaggtagtttgtcccccgattccgtggatgatgagtttgagctgtcaacagtttgccacagaccagaaggactcgagcaactgcaggagcagactaaattcactaggaaagagcttcaggtgctataccgcggttttaagaacgagtgtccctccggaatagtaaacgaggaaaattttaaacagatttactctcagtttttccctcagggcgattcgtctacctatgcaacattcctgtttaacgcattcgataccaatcacgacgggtcagtcagttttgaggactttgtggctggcctttctgtgatccttagaggaacagtcgatgaccgtctgaattgggccttcaatctctacgaccttaacaaagatggatgtatcaccaaggaggaaatgctggatatcatgaagtcaatttatgacatgatgggaaagtacacttatccggcgttgagagaagaggcacctcgcgagcatgtggagagcttctttcagaaaatggacagaaataaagacggcgttgtaactattgaggaattcattgagtcttgccaaaaagatgagaatatcatgcgatccatgcaactattcgacaatgtgatctag

SEQ ID NO: 12260 - RNA, 705 nt, synthetic construct
  misc_feature 1..705: note = source = /note="Description of Artificial Sequence: Synthetic coding sequence"
  source 1..705: mol_type = other RNA
atgcctgctagctcaccatttctactcgcacccaaggggccacccggtaatatggggggacctgtgagggaacccgccctcagcgtcgccctgtggctctcttggggggctgcattaggagcagtggcttgtgctatggccctgttaacacagcagaccgaactgcaatccctcaggcgagaagtctctagactacaaggaaccggcggacctagccaaaacggcgaaggctacccctggcaatccctgcccgaacagtcgagcgatgccttagaggcatgggagaacggcgaacggagtaggaagaggagggcagttttgactcaaaagcagaaaaatgactccgacgtaaccgaagtgatgtggcagcccgctctcagaagaggtcggggcctgcaagcccaaggatacggcgtgcgaatccaggacgcgggggtttatttgctgtattctcaggtgctctttcaggatgtaacattcacgatggggcaggttgtcagccgggaaggtcagggcaggcaagagactctctttcggtgtatcagatctatgccctctcatccagatcgagcatataactcctgttacagtgcaggcgtgttccacctgcaccaaggcgatatcctatctgtgattatcccccgcgcacgcgcaaagctgaatttgagcccacatggtacattcctcgggtttgtaaaactttag

SEQ ID NO: 12261 - RNA, 2400 nt, synthetic construct
  misc_feature 1..2400: note = source = /note="Description of Artificial Sequence: Synthetic coding sequence"
  source 1..2400: mol_type = other RNA
atgaagcctatgctgaaagatttctccaacctgttgctggttgtgctgtgcgactatgttctgggagaagcagaatatctgctcttgagagaacctggacatgtggctctgtctaacgatactgtatacgtggatttccagtactttgatggtgccaacggcacactgaggaacgtgagtgttttgctgctagaagccaatacaaaccagaccgtcaccacaaaatacctactaaccaatcaaagccagggcacactgaagtttgagtgcttctactttaaagaagccggagattactggtttacgatgaccccagaggccaccgacaatagtacaccatttccctggtgggagaaatcagcctttttgaaggtcgaatggcctgtctttcacgtagaccttaacagatccgctaaggcagcagagggtacgttccaggttgggttgttcaccagccaaccgctctgccctttcccagtggacaaaccaaatatagtggtggatgtgatctttacaaactctttaccagaggcacgcaggaactcacggcagcccctggagataaggacatctaagcgcactgaattagcccaagggcaatgggtggagtttggatgcgcccctttggggccagaggcgtatgttactgtggtattaaagttgctgggacgggacagcgtgattacaagtaccggacctattgacctcgcccagaaattcggctataagctcgtcatggtgccagagctcacatgtgaatcaggtgtggaagtgaccgtcctcccacccccatgcactttcgttcagggggtcgtgacagtgttcaaagaggctcccaggtaccccggcaaacgaactattcatttagccgagaattcattgcccctgggagagcgccgcacaattttcaactgcactctgtttgatatgggaaagaataagtactgcttcgatttcggtatcagttctcggtctcacttctctgctaaggaggaatgcatgctcatccagcgtaacaccgccttccagccgtcatccccaagccctcttcagccacaaggaccagtgaaatctaacaacatcgtgaccgtcactgggatctctctttgtctgtttatcattatcgcaacagtgctaatcacgttgtggcgcagattcggaaggccagctaagtgctccaccccagctagacacaattcaatacattccccaagttttcgcaaaaacagcgacgaggagaacatatgtgagctttccgaacagagggggtctttctctgatggcggagatgggccaaccggctcccccggagacaccggaatccctctcacctatcgcaggtctggtcctgtaccgcctgaggacgatgcatccggcagtgaaagctttcaaagcaacgcacagaagatcattccccctctgtttagctatcggcttgcacagcaacaactgaaagagatgaagaagaagggcttaaccgaaactaccaaagtctatcatgtgtcacagtcccctctgacagatacggccatcgatgcggctcccagcgcaccattagacctggagtcccccgaagaagcagctgccaataagtttcgcatcaaaagcccatttcctgaacaacctgctgttagcgccggcgagcgccctccctcccgacttgatctcaatgtgacccaggccagctgcgccatctccccctctcagaccctgatacggaagagccaggccagacacgtcggaagcaggggtggccctagcgagcgcagccacgcccgtaacgcccatttcaggcgaaccgcctcctttcacgaggccaggcaggcccggcctttcagagaacggtccatgtctacactaacaccccgccaggctcccgcctactcatccaggacccggacttgcgagcaggctgaggaccgattcaggcctcagagtcgaggagcacacctttttcccgaaaagctcgaacacttccaggaagccagcggtacgcgcggccctctgaatcccttacctaagagttataccctgggacaacctttacggaagcccgatctgggcgatcaccaggccggactggtcgccggtattgagaggacagaaccccaccgtgcacggagaggcccatcgccttctcataagagcgtctctcgcaagcagagctcaccaatttcccctaaagacaattaccaacgcgtctcgtccttgagcccctcccagtgccggaaagacaagtgtcaatcatttccaactcacccggaatttgcattttacgataatacttctttcggtctgaccgaggccgagcaaagaatgctggatctacccgggtacttcggaagcaacgaggaggatgaaactacaagtaccttgtctgtcgagaagctggttatctag

SEQ ID NO: 12262 - RNA, 927 nt, synthetic construct
  misc_feature 1..927: note = source = /note="Description of Artificial Sequence: Synthetic coding sequence"
  source 1..927: mol_type = other RNA
atgagactgctccccgagtggtttctgctgctcttcggcccgtggttgttgcgaaaagccgtgagcgctcaaattcccgaaagtggccgcccccaatatctggggctgcgcccagcagccgccggagccggcgctcctggacagcagctgcccgaacctagatcatctgatggacttggcgtcggacgcgcctggtcatgggcctggcccactaaccatacaggggcactagccagagctggggcagcaggcgctcttccagcccaaagaacaaaacggaaaccatctatcaaagcagctcgagctaagaagatcttcggctggggcgatttctacttccgcgttcacacactgaagttcagcttgctggtgacgggtaaaatagtcgatcacgttaatggcacattcagtgtctatttccgccacaactcctccagcctgggaaatttgtcagtctctatcgtccccccttctaagagggttgagtttggcggtgtctggcttcccggacccgtgccccatccattgcagtcaacactggctcttgagggcgtgctgccaggtcttggacccccattgggaatggcagcagctgccgcaggacccgggctgggcggaagtttgggtggcgcgctggctggcccactgggaggcgccctgggggtccccggagctaaggaaagtagggcttttaactgtcacgtggagtatgagaaaacaaatcgagcccgcaagcaccggccatgcctctatgatccttcccaggtatgctttacagagcacactcagtcacaggccgcctggctatgcgcaaagcccttcaaggtgatttgtatcttcgtttcatttctttcgtttgattacaagctggttcaaaaggtgtgtcctgactacaacttccagtcggaacacccctatttcggatag

SEQ ID NO: 12263 - RNA, 795 nt, synthetic construct
  misc_feature 1..795: note = source = /note="Description of Artificial Sequence: Synthetic coding sequence"
  source 1..795: mol_type = other RNA
atgaaactaggttgcgttcttatggcctgggccctctacttatcccttggtgtactgtgggtggctcagatgttgctggccgcgagtttcgaaacgctgcagtgcgaaggccctgtctgtacagaagaaagctcatgtcacaccgaagacgatcttacggacgctagggaggccgggttccaggtgaaggcatataccttcagtgaaccttttcacttaatcgtctcttacgactggttgatcctgcagggccccgcgaaaccagttttcgagggcgatcttctagtgttgagatgtcaggcttggcaagactggcctctcacccaggtcaccttttatcgagatggaagcgcactaggtcctcctgggcccaaccgcgaattttcgatcactgtggttcagaaagcagacagtggtcactatcactgcagtggcatttttcaaagccctggacccggcatccctgagacagcctcagtggtagcaatcacagtgcagggagcctcatcttccgccgccccccctaccctcaatccagccccccagaagtcagcagctcccggcacagccccagaggaggcccctggaccattgccacctccgcccaccccttcctccgaggaccccggcttctcctctccgctaggcatgccagatcctcatctttaccatcaaatgggcctattgcttaaacatatgcaggatgtccgagtcctacttggccacttactcatggagctaagggaactgtctggtcaccgcaagccgggaacaacaaaagccactgctgaatag

SEQ ID NO: 12264 - RNA, 1362 nt, synthetic construct
  misc_feature 1..1362: note = source = /note="Description of Artificial Sequence: Synthetic coding sequence"
  source 1..1362: mol_type = other RNA
atgctgcggattctgtgcctcgctctctgctccctactgaccggaactagagccgacccaggggcactgttgaggctggggatggatataatgaaccaggtgcaatctgccatggatgagagtcacattttggagaagatggccgctgaagccgggaaaaaacagcctggtatgaagccgattaaaggaattactaatctcaaggttaaggatgtacagctcccagttataacattgaatttcgtgcctggtgtgggtatctttcagtgtgtttccacaggaatgacagtgaccggtaagtctttcatgggcgggaatatggaaataatagtcgctcttaacatcaccgccaccaatcgtctactgcgggatgaggagacgggcctgccggtctttaagagtgagggatgcgaggtgattctggtcaacgtaaaaacaaatctgccgtcaaatatgctcccaaagatggtcaacaagttcctggattcaaccctgcacaaggttctccccggcttgatgtgtcctgctatcgatgctgtcctcgtctacgtgaataggaagtggacaaacctgtcggatcccatgcctgtcggacagatggggaccgttaagtacgttttgatgtccgcccccgccacaaccgcaagctatatacagttagatttcagcccagtcgtgcaacagcaaaagggaaagaccattaaactggcagatgcaggcgaagctctcaccttccccgagggttatgccaaaggctcctctcagctcctgctgcccgccacattcctctcagccgaactcgcccttctgcagaaaagctttcatgtcaatatacaggataccatgattggagagttgcccccacagacaaccaaaacgctggctagatttatccctgaagtcgcggtggcatacccaaaaagtaaaccactgactacccagatcaaaataaagaagccccctaaagtgacaatgaagaccggtaaatccctgctgcatctgcactccaccctggagatgttcgcagcccgttggcgctccaaagctcctatgtccctttttctgctggaagtccactttaacctgaaggtacagtacagcgttcatgaaaaccagttgcagatggccacctccctagatcgactactaagcctgtctcggaagtcatcttccataggtaattttaatgagcgcgaattgacaggcttcatcactagctaccttgaggaggcctacatccctgtggttaatgatgtgttgcaggtggggcttccccttcccgactttctcgcaatgaattataacctcgctgaacttgacatcgtggagaatgccctaatgctggatctgaaactgggatag

SEQ ID NO: 12265 - RNA, 1323 nt, synthetic construct
  misc_feature 1..1323: note = source = /note="Description of Artificial Sequence: Synthetic coding sequence"
  source 1..1323: mol_type = other RNA
atgtccgctcgcggcagatgggaaggaggtggccggagagcatgccgaggttcgctggggttagcccgtgcacagggagcagaacgtgtgacaagtagtgaacagcgccccgcaatggcttctcttggactgctcttgctgctgctgctaactgccttgcccccactgtggagctcatccctgcccggcctcgacacagcagagagcaaagccactattgctgacctgatactgtctgcactggagcgagccacagtgttcctcgagcagcgacttccagagatcaacctggacggaatggtcggcgtgcgcgtcctagaggaacaactcaagtctgtaagggagaaatgggcgcaggaacccctattacagccgttatctttacgcgtgggaatgctgggtgagaagctggaggccgccattcagagaagcctgcattaccttaaactcagtgacccaaagtacctgcgggagtttcaactgacactccagccaggtttctggaaattgccgcacgcttggatccacaccgatgcatctctggtatatcctacttttggtccacaagactcttttagcgaggaaagatccgatgtgtgcctcgtgcagttactcggaaccggcacagactcaagcgaaccctgcggtcttagcgatctgtgtcgatctctgatgaccaagcccggttgtagcggatattgtttgtcacatcagcttctattctttctgtgggccagaatgagaggatgcactcaaggccccttacagcagtctcaggattacattaatcttttttgcgccaatatgatggacctgaatcggcgtgccgaggcaattggctatgcctaccccaccagagacatcttcatggagaatatcatgttttgcggtatgggcggcttttcagacttctacaaactgcgatggctggaagctattctgtcttggcagaagcagcaagagggctgttttggcgagccagacgccgaggacgaagaactcagcaaagcaatacagtatcagcagcactttagtcgaagggtgaagcgacgcgaaaaacagttccccgattctcgctctgttgcccaggctggagttcagtggaggaacctgggaagcctgcagcccttgcctcctggatttaaacagttctcatgcctcattctgcctagtagttgggattacaggagtgtgcccccatatcttgccaatttctatatttttctcgtcgagaccggattccaccacgtggcacacgccggcctggagctcttgatttcccgggaccctccaacatccgggtctcaaagtgtgggcttgtag

SEQ ID NO: 12266 - RNA, 708 nt, synthetic construct
  misc_feature 1..708: note = source = /note="Description of Artificial Sequence: Synthetic coding sequence"
  source 1..708: mol_type = other RNA
atgaaatatgtgttctatcttggagtgctggctgggactttttttttcgctgatagcagtgtccagaaggaggatcccgcaccctacctcgtgtacctgaaaagccactttaatccatgtgtcggcgtcctgattaaaccctcatgggtacttgctccggctcactgctatctaccgaatcttaaagtgatgctaggcaactttaaatccagggtacgggatggcactgaacagaccattaaccctatccagattgttaggtactggaattactctcatagtgcacctcaggatgatttaatgctgatcaagctcgccaagcccgctatgctgaaccccaaggtgcagccactgacattagccacaacgaatgttagaccaggaactgtgtgtttattaagtggtttggactggtcacaggagaattcgggcaggcacccagatctgcgccaaaacctagaagcacctgtgatgtccgatagggagtgccagaaaacagaacagggcaagagtcacagaaatagcctgtgcgtgaaattcgtcaaagtgttcagtagaattttcggagaggtcgccgttgctacagtgatttgcaaggacaaactgcagggaatcgaggtcggccactttatgggaggtgacgtgggaatctataccaacgtatacaaatacgtatcttggatcgagaacacagccaaggacaagtag

SEQ ID NO: 12267 - RNA, 426 nt, synthetic construct
  misc_feature 1..426: note = source = /note="Description of Artificial Sequence: Synthetic coding sequence"
  source 1..426: mol_type = other RNA
atgctgaaaaaaatttctgttggggtagccggtgacttaaacactgtcaccatgaagcttggctgcgtgctcatggcctgggctctgtatctttccctaggtgtcttatgggtcgctcaaatgttgctcggcgcctcatccagtgctgctcctcccactctaaatccagccccccaaaaatccgcagcacctggcacggctccagaggaagcacctggcccactgccacccccgcctacaccttcttcagaagaccccgggtttagttcaccacttgggatgccagaccctcatctctaccatcagatgggcctgctactcaagcacatgcaagacgtgcgtgtgttattaggccacttgctaatggaattacgggaactgtcaggacatcgcaaacctggtactacgaaggccacagctgagtag

SEQ ID NO: 12268 - RNA, 2886 nt, synthetic construct
  misc_feature 1..2886: note = source = /note="Description of Artificial Sequence: Synthetic coding sequence"
  source 1..2886: mol_type = other RNA
atgcttgctccccgaggggctgccgtacttttacttcacctggtcctgcaaagatggctggccgctggtgcgcaggccaccccccaggtattcgacttgttaccctcatcctctcagcgactgaaccccggagcccttctgcccgtccttactgatcctgcactcaatgatctgtacgtcatctctaccttcaaactgcagaccaaaagcagcgcaaccatttttggcttatacagcagcactgataactcgaagtactttgagtttactgtgatgggcagacttaataaagcgatcctgcgctatctcaaaaatgacggtaaagtccaccttgtcgtcttcaataacctgcagcttgccgatgggcgcaggcaccgcattctcctgcgtctcagcaacctacaacgaggggctggatccctggaactctacttggattgcattcaggtggactcggttcacaacttacctagagcattcgccgggcccagccagaagcccgagactatcgaactacggacatttcaacgtaaaccacaggatttcctggaggagctgaaactggtggtccgaggctccctgttccaagtcgctagtctacaagattgttttcttcagcagtctgaaccactcgctgcaaccgggacaggtgatttcaaccgccaattcctcggtcagatgactcagttaaaccaactacttggcgaagtcaaggacttattgcgtcaacaggtaaaggagacttctttcctgagaaacaccattgccgagtgccaggcttgcggcccacttaaattccaaagccccaccccaagcactgtggtcccgccggcgcctcccgcaccccccaccaggcctccgcgtcgctgcgactctaatccgtgtttccgcggagttcaatgcaccgattccagagatgggttccaatgtggcccatgtcctgagggctacaccggaaatggcattacttgtatcgatgtcgacgagtgcaagtatcatccgtgttatcccggggttcattgtattaatcttagccccgggtttcgttgtgacgcatgcccagtgggtttcacgggccccatggtccaaggcgttggtatctccttcgccaaatccaataaacaggtttgcacagacatagatgaatgcagaaatggagcttgcgtgcctaacagtatctgcgtcaacacactggggagttaccgctgtgggccttgtaagcctggatatacaggggaccagattcgagggtgcaaagctgaacgaaactgtcgcaatcctgagctgaatccctgctcggtgaatgcacagtgcattgaagagcggcagggagatgtcacctgcgtttgcggcgtgggatgggcaggagacggctacatctgcgggaaggatgtcgacattgactcttatccagacgaagagttgccatgctcagcccgcaattgcaaaaaagataattgtaagtatgtgcctaattccggacaggaagacgctgatcgagatggaatcggggacgcctgcgacgaagacgctgatggtgacggcatactcaacgagcaggacaattgcgtgcttattcataatgtggatcagcggaactcagataaagacattttcggagacgcttgcgataactgcctgtctgtgctcaataatgatcagaaggacaccgacggagatggccgcggcgatgcttgtgacgacgatatggatggcgatggcatcaagaatattctagacaattgtccaaagttccctaacagagatcagagagacaaagatggagatggggttggcgacgcatgcgactcttgccccgatgtgtcaaatccaaaccagtccgacgtagacaacgacttagtgggcgatagttgcgacaccaatcaggatagtgatggcgatggccaccaggactcaaccgacaattgtcccacagtgattaactccgctcaactagacaccgacaaggatgggatcggggacgaatgtgacgatgatgatgataacgacggcattcctgatcttgttcctccaggcccagacaattgcagactggtgcctaatcctgcacaagaggacagcaatagcgatggggtgggggacatttgtgagagtgacttcgatcaggatcaggttattgacaggatagacgtgtgtcccgagaatgcagaagtgaccctcactgactttagggcttatcaaaccgttgtcctagatcctgaaggggatgcacagatagatcctaactgggtggtgctcaaccagggtatggagattgtgcaaactatgaattcagatcccggcctcgccgtcggatacacggctttcaacggggtggactttgaaggaacatttcatgtcaatacgcaaacagacgacgactacgcaggctttatatttggttatcaggattccagctccttttacgtagttatgtggaagcagactgagcagacctactggcaggcgaccccttttagagccgtggcagagcccggcatccaactcaaagctgtaaaatccaagacaggacctggggaacatttacggaactcattgtggcacacaggcgatacctccgatcaagtcaggctactgtggaaggatagtcgtaatgtcggctggaaagataaggtctcataccgatggttcctccaacacaggccacaggtcggttacattcgagtaagattctatgagggctccgaactagtggctgactctggtgttacaatcgatacaacaatgcggggcggaagactcggggtgttttgtttctcccaggaaaacataatttggtccaacctgaagtatcggtgcaatgataccatacctgaagattttcaggaatttcagacacagaatttcgatagattcgataactag

SEQ ID NO: 12269 - RNA, 300 nt, synthetic construct
  misc_feature 1..300: note = source = /note="Description of Artificial Sequence: Synthetic coding sequence"
  source 1..300: mol_type = other RNA
atggataacgttcagccaaaaataaaacatcgtcctttctgtttttcagtcaagggacacgtgaaaatgctgagactggatattattaactcacttgttacaacggtttttatgctgatcgtgagtgtgctggctttaatccccgaaacgaccaccttaacagttggaggcggtgtttttgcgcttgtcacagccgtttgttgtctagctgacggggcactgatctaccgaaaattattatttaacccttcaggcccgtaccaaaagaagcctgtgcacgaaaagaaggaagtgttatag

SEQ ID NO: 12270 - RNA, 408 nt, synthetic construct
  misc_feature 1..408: note = source = /note="Description of Artificial Sequence: Synthetic coding sequence"
  source 1..408: mol_type = other RNA
atgtctccacaccttactgcactcctgggccttgtgctctgtctcgcccaaacaatacatacacaagagggggccttacctcgtccgtctatatcagctgagccaggaacagtgatcagtccaggaagccacgtgaccttcatgtgcaggggccctgtgggggtccagacatttcgactggaacgagaagaccgggcgaaatacaaggatagctacaatgtgtttcggttgggtccaagcgagagcgaagcacgttttcacattgactccgtcagcgaaggcaacgccggcctctacagatgtctttattataagcctccaggctggtctgaacatagcgattttctggaattgctcgtgaaggggaccgttccaggtacagaagcatctggctttgatgctccctag

SEQ ID NO: 12271 - RNA, 231 nt, synthetic construct
  misc_feature 1..231: note = source = /note="Description of Artificial Sequence: Synthetic coding sequence"
  source 1..231: mol_type = other RNA
atgcttccttgccttgccttgcttttacttatggaattgtctgtctgcacagttgccggtgatggaggggaagaacagactctgagcacggaggccgagacgtgggagggggcaggtcccagcatacagctacagctccaagaagtcaaaaccggcaaagcatcccagttttttggacttatgggaaaacgggtgggagggagagaggacgaagcccaggggtctgaatag

SEQ ID NO: 12272 - RNA, 684 nt, synthetic construct
  misc_feature 1..684: note = source = /note="Description of Artificial Sequence: Synthetic coding sequence"
  source 1..684: mol_type = other RNA
atgagaggccagggaagaaaagagagcctgagtgacagtcgtgatctggacggatcctacgaccagctaaccgatagtgtggatgacgagttcgaactgagcacggtttgccacaggcccgaaggactggaacaactccaagagcagacaaaatttacaagaaaggaattacaagtgctgtatcgcggatttaaaaacccaggtgcgcttagtttccaggaatgcccaagcggtatcgtgaacgaggaaaacttcaaacagatctatagccagttctttccacagggggacagtagcacatacgccacctttctctttaatgcttttgacacaaaccacgatggctctgtgtcctttgaagatttcgttgctggtttgagcgtgatactccggggcactgtcgatgaccgcctcaattgggccttcaacctttacgatctgaacaaagacggctgcatcacaaaggaggagatgctggacatcatgaaaagcatttacgacatgatggggaagtatacctacccagcgctgagggaggaggcacctagagagcatgtggaatctttttttcagaaaatggacagaaacaaggatggggtggtgaccattgaagagtttattgaatcatgtcagaaggatgaaaatattatgagaagcatgcagctttttgacaacgtgatctag

SEQ ID NO: 12273 - RNA, 876 nt, synthetic construct
  misc_feature 1..876: note = source = /note="Description of Artificial Sequence: Synthetic coding sequence"
  source 1..876: mol_type = other RNA
atgatgtcagccactgggccgggaagaaagatgggatccagaggccaagggcttcttctggcttattgcctccttttagcctttgccagtggcctcgtgctgagccgtgtcccgcacgtgcaaggtgagcagcaagagtgggaagggacagaggaattaccatcgcctcctgaccacgccgagagggcagaagaacagcatgagaaataccgaccatcacaggaccagggattgccagctagccgttgtttaagatgctgtgatccgggcacgtcaatgtacccagccaccgccgtcccccaaatcaatatcaccatactcaagggcgagaagggagatcgaggcgacaggggcctacagggcaagtacggcaagaccggatccgccggggccagaggccacactggacccaagggtcagaaaggaagcatgggcgcacctggcgaaaggtgcaagtcccactatgcagccttctcagtcggacggaaaaagccaatgcattccaaccattactatcagacggtcatcttcgataccgaattcgtcaatctatatgaccatttcaacatgtttactggaaaattctattgctatgtacctgggctgtatttcttttcattgaacgttcacacatggaaccagaaggagacgtatctccatatcatgaaaaacgaagaggaggtcgtaatattgtttgcacaggtgggagacaggagtataatgcagtctcagtccctgatgttggagctaagagagcaggaccaggtgtgggttcgattatacaagggggagagagagaatgccatcttcagtgaagaactggatacgtatatcacttttagcgggtatctcgtcaagcacgcaaccgaaccttag

SEQ ID NO: 12274 - RNA, 213 nt, synthetic construct
  misc_feature 1..213: note = source = /note="Description of Artificial Sequence: Synthetic coding sequence"
  source 1..213: mol_type = other RNA
atggaacggggtgcgggagccaaactgctgcctttgttactcctgctgcgagctacaggttttacatgcgcgcagaccgatggacggaatggatataccgcagtcatcgaagttacatccggtggaccttggggggactgggcgtggcccgaaatgtgtccggacgggtttttcgccagcgggtttagcttaaagctggggaggatggaatag

SEQ ID NO: 12275 - RNA, 402 nt, synthetic construct
  misc_feature 1..402: note = source = /note="Description of Artificial Sequence: Synthetic coding sequence"
  source 1..402: mol_type = other RNA
atgggctcatcaggcctgctgagtctgctggtcctgtttgtgctgctggccaacgtgcagggaccaggactgactgactggctcttccctcgtagatgccctaagatccgcgaggaatgtgagttccaggaacgcgacgtttgcaccaaagacagacagtgccaagacaataagaaatgctgtgtcttcagttgtgggaagaaatgcttagacttgaaacaggatgtatgcgagatgcccaaagaaaccggaccatgtctggcctatttcctccactggtggtacgataaaaaggataacacttgctcaatgttcgtctacgggggatgtcaaggtaacaacaacaacttccaatctaaagccaactgcctcaacacatgcaaaaataaaaggttcccctag

SEQ ID NO: 12276 - RNA, 771 nt, synthetic construct
  misc_feature 1..771: note = source = /note="Description of Artificial Sequence: Synthetic coding sequence"
  source 1..771: mol_type = other RNA
atgttccagactggagggctcattgttttttatggactgcttgcccagaccatggcccaattcggagggctccctgtgcccctggatcagaccctcccgctgaacgtgaatcccgctttgcctctctccccaactggattagccgggagtctaactaacgcactttccaatgggctcctgtctggaggtcttttaggaatcctcgagaaccttccactattagacatacttaaacccggcggcgggactagcggaggcttgctgggcggtctactaggtaaagtaaccagcgtgatacccggcttaaacaatattatcgatataaaagtcaccgacccacagttgttagaactcggcctcgtccaaagtcccgatgggcatcgactgtacgtgacaattcctctaggaataaaactgcaggtgaatacccccctggttggagcatctctactgcgcttagcagtaaaactggatatcaccgcggagattttagccgtccgggacaagcaggagaggattcacctggttctgggtgactgtacgcattctcccgggtcccttcaaatcagccttctagatggactgggtcccctccctatccagggcctacttgacagcttaactggaatcctcaacaaggtgttacctgaactcgtgcagggcaacgtgtgcccacttgtgaacgaagtcctgcgaggactcgatatcaccctcgttcatgacatcgtgaacatgttgatccacggattgcagtttgtgataaaggtgtag

SEQ ID NO: 12277 - RNA, 1386 nt, synthetic construct
  misc_feature 1..1386: note = source = /note="Description of Artificial Sequence: Synthetic coding sequence"
  source 1..1386: mol_type = other RNA
atgtccttggacattcagagtcttgacatccagtgcgaagagttatccgatgccagatgggcagagttacttccacttctgcagcaatgtcaggtggttaggctggacgattgtgggttgactgaggctcgatgcaaagacatctctagcgctctgcgagttaatcccgcgctagccgaactgaatttaaggtcaaatgaactgggcgatgtgggtgtgcactgtgtgcttcaagggctgcagactcccagctgcaaaattcagaagttatccctgcagaattgttgtctcacaggggctggctgtggcgttttgagctccactctgagaactcttccgactctgcaggaactccacctgtctgacaatctgctcggcgacgccggcctacagctcctgtgcgaaggcctgttagacccccagtgcagactggaaaaattgcagctcgaatactgctccttaagtgctgcttcttgtgagccactcgcttctgtgctgcgtgccaaaccggacttcaaggagttgaccgtgtcaaacaacgatattaacgaagccggagtgagggtgctctgtcagggcctcaaagactctccttgtcagctagaagccttaaagctggagtcatgcggcgtcaccagcgataattgtcgtgacctatgcggaatcgtggcatccaaagcaagtctacgcgagctggctctgggctcgaataaactcggcgatgttggaatggctgagctctgccctggactacttcatccaagctctcggctgcggaccctgtggatctgggagtgcggtataaccgcgaaagggtgcggtgacttatgccgggttttaagagctaaggagtccctaaaggagttaagtctcgctggcaacgagctgggtgatgaaggtgcccgtcttttgtgcgaaacgttgctcgagcctgggtgtcaacttgagagcctgtgggtcaagtcttgctcattcacagccgcctgctgttctcactttagcagcgttctcgcacagaaccggtttctgctagaactgcaaatcagcaataacaggctggaggacgccggggtgcgggaactttgtcaagggctggggcagcctggttccgtactcagagttctttggttggcggattgtgacgtgtctgattcaagctgctcttccttggcagcaactctgctggcaaaccactccctgcgtgaactcgatttatccaacaattgcttgggcgatgctggcattcttcagttggtcgagtcagtgcgccaacccggatgtttactggagcaacttgttctttatgacatttattggtcagaagaaatggaggatcggcttcaggccctggaaaaagacaaaccatcactgcgagttatcagctag

SEQ ID NO: 12278 - RNA, 534 nt, synthetic construct
  misc_feature 1..534: note = source = /note="Description of Artificial Sequence: Synthetic coding sequence"
  source 1..534: mol_type = other RNA
atgaggctgttgatactcacctgtttggttgctgtcgcactagccaggcctaaactccccctgcggtatcctgaacgcctccagaacccgtcagagtcttcagaacccatcccattggaatctcgcgaggaatatatgaacggcatgaatcgccagagaaacatacttcgagagaaacagactgatgaaatcaagaattgtgtcgttgccgaacctgagaagatggaatcttcaatctcctcatcctccgaagagatgtcgttgtctaagtgtgctgagcagttttgcagattgaacgagtacaatcagttacagctccaaaagatgtcaaagcaggagcagattcgccgtatgaatgaaaacagccatgtgcaggttccctttcagcagttgaatcagttggccgcctatccatatgccgtctggtattacccacagattatgcagtatgttcccttcccacccttcagcgacatatcgaatcctaccgcccacgagaattatgagaaaaacaatgtaatgctccagtggtag

SEQ ID NO: 12279 - RNA, 3054 nt, synthetic construct
  misc_feature 1..3054: note = source = /note="Description of Artificial Sequence: Synthetic coding sequence"
  source 1..3054: mol_type = other RNA
atggatctgatccgcggggtgctgctaaggctgctgctcctagctagcagcttgggtcccggtgctgtttctctgagggccgcaataaggaagcctggtaaggttggcccacccctggatatcaaactcggagctttgaactgcaccgcattttcaatccagtggaagatgccaagacaccctggatccccgatcctgggttacacagtgttttacagcgaggttggagccgacaagagcctacaggaacagctgcactcagtgccactgtcaagggatatcccaacaaccgaggaagtaataggagatttgaaaccgggcaccgagtatcgggtgagcattgctgcctattcccaggctggaaaggggaggctgtcttctccacgacatgttacgaccctttcccaggatagttgtttacctccagctgcgccccaacagccccatgtcattgtcgtctccgattctgaggtcgccctgagttggaagccaggggcctcagagggtagtgcccctatccagtattatagcgtggaattcattcgaccggatttcgataagaagtggaccagcatacatgagagaattcaaatggactctatggtaattaagggcttagatcccgataccaattatcagtttgccgtcagggcaatgaactcacatggcccatcgccgcgctcatggccaagcgacattattcgtacactttgccccgaggaagccggatcggggaggtatggacctagatacatcacagatatgggggccggagaggacgacgagggatttgaagatgatctggatctcgatatttctttcgaggaggttaagcctttgccagccacgaagggtggcaacaaaaaatttctggtagaatctaagaagatgagtatttcaaacccaaaaaccatctcacgtttgattccaccgacatctgcctctctccccgtgaccacagtggcaccgcagccgatccccatccagcgtaagggaaagaatggagtcgcaatcatgagccgcctctttgacatgccttgcgacgaaaccctgtgttcagccgacagcttctgtgttaatgattatacatggggtggctccagatgccagtgcacacttggaaaaggcggtgaaagctgctcagaagatatcgtgatacagtatccccagttcttcggccactcttatgtaacatttgaaccccttaagaattcctaccaggctttccagatcacactggaattccgcgcggaagctgaggatgggctgctattgtactgcggcgaaaatgaacacggtcggggagactttatgagtctcgctatcatccggagatcactgcagtttagatttaattgtgggaccggagtcgctatcatcgtgtcagaaacaaagatcaagttgggtggatggcacaccgtgatgctctacagagatggactgaacggacttctgcaattaaacaacggaacccccgtgaccggacaaagccagggccaatattccaagattacctttcgcaccccactgtatttgggcggggctccgagcgcctattggctagttcgggcgaccggtacgaaccgtggatttcaaggttgtgtccagagcctcgccgtgaacggaaggcggattgacatgcgaccctggccccttggaaaagctttgtccggggcagacgtaggcgagtgctcgtcaggaatctgcgacgaggccagttgtattcacggaggaacgtgcacggctattaaagccgactcttatatttgtttgtgcccgctgggattcaaaggccgccactgcgaggacgccttcacactaacgattccccaatttcgggagtcgctgaggtcatacgcggctaccccctggccgttggagccccagcactacctcagctttatggagtttgagatcacctttagacccgattcaggagatggtgtgttgctctattcttatgatactggatcaaaagactttctttcgataaatctcgccgggggacacgtggagtttcgttttgactgcggatcaggaacaggcgtacttaggtcagaggacccgttgacactcggaaactggcacgaattgagggtgagtagaacagcaaagaacggaatcctgcaagtggataagcaaaagatcgtggagggcatggctgaaggcgggtttactcaaatcaaatgcaataccgatatatttattggcggagtacctaactatgatgacgttaaaaaaaactctggtgtgttgaagcctttttccggctcgatacagaaaattatactgaacgataggaccatacacgtgaaacacgacttcacgagcggcgtcaacgtggagaatgccgcacacccctgcgtgcgcgccccctgcgctcacggcggctcttgccgccccaggaaagagggatatgactgcgactgtccactaggatttgaagggcttcattgccaaaaagaatgcggaaattactgtctgaacactatcatcgaggccattgaaatccctcagttcatcggccggtcttatcttacttacgacaaccccgatattttgaagagggtgtccgggtcaaggtccaatgtcttcatgcggtttaaaacaacagcaaaagatggcctactgttgtggcgtggagacagccctatgagaccaaattccgattttattagccttggcttgagggatggagctctggtcttctcttataatttggggagcggtgtcgccagtattatggttaatggttccttcaatgatgggcgctggcacagggttaaagctgtaagagatggacaaagcggaaagattacagtggacgactatggggcaagaactggcaagtcgcctggaatgatgcggcaattgaatatcaatggtgccctctacgtgggaggcatgaaggaaatcgctttacacactaatcgccagtatatgcggggtctggtgggatgcatcagccattttaccctgtcaacggattatcacatcagtttagtagaggatgccgtcgatggaaagaacatcaatacttgcggcgccaagtag

SEQ ID NO: 12280 - RNA, 1893 nt, synthetic construct
  misc_feature 1..1893: note = source = /note="Description of Artificial Sequence: Synthetic coding sequence"
  source 1..1893: mol_type = other RNA
atgcagcaagacgggctgggggttgggaccagaaacggatccggcaaaggcagatctgtgcacccatcatggccctggtgcgccccacgaccactaagatactttggcagagacgcacgggctcgacgcgcccagactgctgccatggctcttcttgccgggggcctatcccgtggattggggagccaccctgctgcggccggacgcgacgccgtggtatttgtgtggctgctgctatcaacttggtgtacggcacctgccagggccatccaggtgacagtatctaacccataccacgtggtgatcctgttccagccagtcaccctcccatgcacatatcagatgacgtccactcccacccagccaatcgtaatttggaagtataagtcgttttgtcgcgacagaatcgctgacgcctttagtccagcttccgtggataaccagcttaacgcacaattggcggccggaaatcctggatacaacccatacgttgagtgccaggactccgtacgcaccgttcgcgtggttgcaactaagcagggaaatgctgtgacgctcggggactactatcaagggcgtcgcatcacaatcaccggtaatgccgaccttacttttgaccagaccgcctggggagactccggtgtgtactactgcagtgttgtctcggcccaggatttacagggaaataatgaggcctacgccgagctgatcgtgctggattggcttttcgttgtcgtggtctgccttgccgcttttttgattttcttgctgctcggaatttgttggtgtcagtgttgtccacatacttgttgttgctatgtgcgctgcccatgttgtcccgacaaatgttgttgtcctgaggctttgtacgctgccgggaaagctgcgacatccggggtcccttccatctatgcaccaagcacttatgcccatctctcccctgccaagacaccaccgcctcctgcaatgattccaatggggcctgcatataatggatatcccggtgggtacccgggagacgttgaccggtctagcagtgccggagggcaaggctcatatgtgcctctcctccgggatacggactcatctgtggcctccgaggtgcgtagtggataccgcattcaggcgtcacagcaggacgattcaatgcgagttctctattacatggaaaaggagctggccaattttgaccctagcaggccaggaccacctagcggaagagtggaacgagctatgtcagaggttacgtcactgcatgaagacgactggcgttctaggccaagccgtggtcctgcacttacgccaataagagatgaagaatgggggggacattctccacgtagccctcggggatgggaccaggagcccgccagggaacaggctggcggaggctggcgtgcaaggcgtccccgcgctaggagtgtggatgccctggacgatcttacccctccttctaccgccgaatccggatctcgatctcccacatccaacgggggcaggtctagggcttatatgcccccaaggagccggagtagagatgacctctacgaccaagatgatagtagagacttcccacgaagccgcgacccacattacgacgattttcgtagccgcgaacgccctcccgctgatccacggtcgcaccatcatcgaaccagggaccccagggacaatggatcgcggagcggggaccttccttacgatggtagattactcgaggaggccgtacgcaaaaagggtagtgaagagcgcagacgaccacataaagaagaagaggaagaagcctactacccacctgcaccaccaccttatagcgaaacagattcgcaggcttcccgtgagagacggctgaaaaagaatttagcgctgtctagagagtcactggtagtctag

SEQ ID NO: 12281 - RNA, 750 nt, synthetic construct
  misc_feature 1..750: note = source = /note="Description of Artificial Sequence: Synthetic coding sequence"
  source 1..750: mol_type = other RNA
atgctccagctctggaagctagtattactgtgtggagtgctgaccggcacgtccgaatcccttctcgataacctgggaaacgacctgagtaacgtggtcgacaagttagaacccgtcctccatgaaggcttggagactgtggacaacaccctgaaaggcatacttgagaagctcaaggtggacctaggagtactgcaaaaatcttcagcatggcagctcgctaaacaaaaggcacaggaagccgagaagttactgaataatgtcatctctaagctgttaccaaccaacaccgacatttttggactgaagataagtaattccctgatcctagatgtcaaagccgaacctatcgacgacggcaaaggactgaatctgagttttcctgtaaccgccaacgttaccgttgcagggcctatcattggacaaatcattaatcttaaagcctctcttgatttgttgacggctgtcacaatagagaccgaccctcaaactcatcaaccagtcgctgtgctgggagagtgcgcttcagacccgacaagtatctctctctctttgttggacaagcacagtcaaatcattaacaagtttgtcaacagcgtaataaacactcttaagtctactgtctcctccctgctgcaaaaggaaatatgtcctttgatccgcatcttcattcactctctagacgtcaatgtgattcagcaggttgtcgataatccacagcataagacacaacttcaaaccctcatctag

SEQ ID NO: 12282 - RNA, 3057 nt, synthetic construct
  misc_feature 1..3057: note = source = /note="Description of Artificial Sequence: Synthetic coding sequence"
  source 1..3057: mol_type = other RNA
atggtgtctcatttcatggggagtctcagtgtactttgtttcctgctgctgctcggattccagttcgtgtgcccacagccttcgacgcaacataggaaggtcccacagcgaatggctgctgaaggagctccagaagacgacggtgggggaggggcccccggtgtttggggggcctggggcccgtggtccgcctgctcacggtcctgcagcggaggggtgatggaacaaacgagaccgtgtttgcctcgctcttaccgtctaagagggggacagcggcccggcgcacccgccagagcatttgctgaccatgtcgtctctgcagtcaggacttcagtacctctccataggtcccgggatgagacccccgccctcgcgggcaccgacgcttcaaggcaaggcccgacagtactgaggggatcccggcacccacaacctcaggggctggaagtgaccggtgacagaagaagccggactcgtgggactatcggacctggaaaatacggatatggcaaagctccctacatactacctctgcagacggataccgcccacacacctcaaagacttagacgacagaagctatccagcaggcattctcgctctcagggggccagttccgctcggcatggttattcttccccggcccatcaggtcccacagcacggccccctgtatcaatcagattcaggtcctaggtctggcctgcaggccgccgaggctcccatatatcagctccccctaacccacgatcagggctacccagcggcatcaagcctcttccattcacccgagaccagcaataatcacggcgtcggcactcacggcgctacacaatcgttttcccagccagcccggtccactgcgatcagctgcatcggcgcctaccgtcagtataagctatgcaacaccaatgtgtgtccagagagcagccgttctatccgggaagttcaatgtgccagttataataacaagcctttcatgggtcgcttctacgagtgggagcccttcgccgaggtgaaagggaacaggaagtgtgaactgaactgtcaggccatggggtatcggttttacgtgcgccaggcggaaaaggtcattgacggaaccccttgcgatcagaacggcaccgccatctgcgtgagcgggcaatgtaagagcattggctgcgacgattatttagggtctgataaagtggtagacaagtgcggtgtatgcgggggagacaatactggctgtcaagttgttagcggagtgttcaaacatgctcttactagtctcggctatcaccgcgttgtcgaaatcccagagggagccaccaaaataaacatcacagaaatgtacaagtctaataactacttggccctccggtctcgcagtggccgcagcatcatcaacggaaactgggcaatcgatcggcctggaaagtacgaaggcggaggcaccatgttcacctataaaagacctaacgaaatatctagtaccgccggcgaatccttcctcgctgaggggcctaccaacgaaattcttgacgtctatatgatacaccagcaacctaatccaggagttcattacgagtacgtgatcatggggactaacgctatttcacctcaagtccccccccatcgaaggcctggcgagccgtttaatggtcagatggtaactgagggacgctcccaagaggagggcgagcaaaagggacgtaacgaagaaaaggaggacttacgcggcgaagcgcctgaaatgttcacaagcgagagcgctcaaacctttccagtcaggcatcccgatcgtttcagccctcaccggcccgacaacctcgtaccccccgcacctcagcccccacgcagatcccgtgaccataactggaagcagctgggcaccactgagtgctcaacgacttgtggtaaggggtcccagtacccaatattccgctgtgttcaccggtccactcacgaggaggccccagagagctattgtgatagttccatgaagccaaccccagaggaggaaccatgcaacatatttccttgccccgccttttgggacatcggagagtggagcgagtgcagcaagacctgcggcctcggcatgcagcatagacaggtgctttgtagacaggtgtatgccaatagatcactgacggtgcaaccctacaggtgccagcacctggagaagccagagaccacttccacatgccaactgaagatttgtagcgaatggcagatcagaacagattggacctcctgctccgttccttgtggtgtgggccagcgcactcgcgatgtgaagtgtgtttctaacatcggagacgtggtggacgatgaggaatgcaacatgaagttaaggcccaatgatattgagaactgtgacatgggcccatgcgctaaatcctggtttttaacagaatggtctgagcggtgctctgccgaatgcggagccggggtgcggacacgatccgtcgtttgcatgaccaatcacgtcagtagcctgccccttgaaggatgcggcaacaaccggcctgctgaagccaccccatgcgacaacgggccttgcacaggcaaagtggaatggtttgctggctcctggagtcaatgttcgatcgagtgtggctcagggactcagcagagggaggtgatctgtgtgagaaaaaatgctgacaccttcgaagttttagacccctcagagtgcagtttcttggagaaacctcccagccagcagtcttgtcatcttaaaccgtgcggtgctaaatggttctcaacggaatggtcaatgtgcagcaaaagctgtcagggcggatttcgtgtcagggaagtccgctgcttgtctgatgacatgaccctgtctaacctatgtgatccccagctcaagccagaagaacgtgagtcctgtaaccctcaggattgcgtgccggaggtggacgagaactgtaaagacaagtactacaattgtaatgtcgttgtgcaggccagactatgtgtttataattactacaagactgcgtgctgtgcatcctgcacaagggtagccaatcgtcaaaccggctttcttggcagtcgatag

SEQ ID NO: 12283 - RNA, 1311 nt, synthetic construct
  misc_feature 1..1311: note = source = /note="Description of Artificial Sequence: Synthetic coding sequence"
  source 1..1311: mol_type = other RNA
atgcagggaactcctggtggagggaccagaccaggcccttctcctgtcgatcgaagaacgctccttgtcttcagtttcattcttgcggctgctctggggcagatgaattttaccggtgaccaggtgctgagagtgcttgccaaagatgagaagcagctaagcctcctcggcgacttggaggggttaaagccccaaaaggtagacttttggcgagggcccgcccgtccctctttaccagtggacatgcgggtgccgttttccgaacttaaggatattaaagcctacctcgaatcacatggattagcttacagtattatgatcaaagacatacaggtgcttttagatgaggaaagacaggcaatggccaagtcccgaaggctggaacggagcacgaactcctttagttattcctcttaccatacattagaagaaatttattcatggatcgacaattttgtgatggaacattctgatatcgtgtccaagattcagattgggaatagcttcgaaaatcaaagtatcctggttttgaaattttcgaccggagggtctcgccatccggctatctggattgacacaggaattcatagcagagaatggatcacccacgccacaggcatctggaccgcaaacaaaatcgtgagtgattatggaaaggatagagttctgactgacatcctaaatgcaatggacatcttcattgagctcgtaactaaccctgacgggttcgctttcacgcacagcatgaaccgactgtggagaaaaaataagtctattaggccagggatcttctgtatcggagtggacctgaaccgcaactggaagagcggctttggcgggaatggatctaactctaacccctgcagcgagacctatcatggtccatccccccaatctgagcccgaagtggcggccattgtgaatttcataacggctcacggaaatttcaaggccctgattagcattcatagttacagccagatgttgatgtatccatacggacgattgctggaacccgtcagtaaccaacgggaattgtacgatctcgcgaaagatgcagtggaggccctatataaggttcatggcattgagtatatattcgggtcgattagtactacattgtacgttgcaagtggaattacagtcgattgggcctacgattcaggcatcaaatatgcattttcctttgaattacgcgacacaggacaatacggctttctattgcccgccacccaaatcattcccaccgcccaggagacctggatggccctgagaactataatggagcatactctcaaccacccctactag

SEQ ID NO: 12284 - RNA, 492 nt, synthetic construct
  misc_feature 1..492: note = source = /note="Description of Artificial Sequence: Synthetic coding sequence"
  source 1..492: mol_type = other RNA
atgttccaaggccttctcctgttactcctgctctcaatgggcggcacgtgggcaagcaaggaacctcttaggcctagatgtaggcctatcaacgcgactcttgctgtcgaaaaggaaggctgccctgtttgcatcactgtgaacaccaccatttgtgcaggctactgcccgaccatgacacgggtacttcaaggggtgttacctgctcttccacaggttgtatgtaactaccgggacgtccgcttcgagagtatcaggctacccggatgtcctaggggcgtgaacccagttgtcagctatgctgtggcacttagctgccagtgtgcactgtgccgaaggtcaactacagactgcggcggacctaaagaccacccactaacatgtgatgatccaaggttccaggattcttcgagctctaaagcccctcctccatctctaccgagcccttcccgcctgccaggtccgagcgatacacccattctgccccagtag

SEQ ID NO: 12285 - RNA, 213 nt, synthetic construct
  misc_feature 1..213: note = source = /note="Description of Artificial Sequence: Synthetic coding sequence"
  source 1..213: mol_type = other RNA
atgccaggggctatgaagatatttgtgtttatcctcgctgcattaatactactggcccagatatttcaagctaggacagccatacatcgggccctgatatcgaaaagaatggaaggacactgtgaggcagaatgtctaactttcgaagtgaagattggaggttgtagagcagaactcgcacctttctgttgcaagaaccgcaaaaaacactag

SEQ ID NO: 12286 - RNA, 1098 nt, synthetic construct
  misc_feature 1..1098: note = source = /note="Description of Artificial Sequence: Synthetic coding sequence"
  source 1..1098: mol_type = other RNA
atgtggttgctactgactatggcatccctcatctctgttctcggtacaactcacgggttatttggaaagttacatcccggcagccccgaagtgaccatgaacatctcacagatgatcacctactgggggtacccaaatgaagagtatgaagtcgtgacagaagatggatatattctggaggtcaatagaattccatacggcaaaaagaattcaggcaataccgatgccggttatgacgtctggctgggcaactccagaggtaatacctgggcacggcggaatctgtattatagtccagatagcgtcgagttttgggcttttagtttcgatgagatggcaaagtacgatttgcccgcaactattgattttatagtcaagaagacgggccagaagcagttacattatgtaggccattcacaggggactacaattggattcatcgctttcagcactaacccaagccttgccaaacggatcaagactttctatgccctcgctccagtggctactgtaaaatacacaaaatccttaataaacaaactgcgctttgtaccccaatctttatttaagtttatatttggagacaaaatattctatcctcacaatttctttgatcaattcttggcaacagaagtctgctctcgtgagatgctcaatctgctctgtagtaacgccctgttcatcatatgtggctttgattctaagaattttaatacctctaggttagatgtttacctgtctcacaatccagcagggacatctgttcagaatatgtttcattggacacaggctgttaagtcaggaaaatttcaagcctatgattggggaagccccgtgcagaacagaatgcactacgatcaatcacagccaccttattacaatgttaccgccatgaacgttccgatcgcggtgtggaatggggggaaggacctactggccgatcctcaggatgttggactgctgctgcccaaactcccaaacctgatctaccataaggaaatacctttttataatcatctggattttatctgggcaatggacgctcctcaggaggtttacaatgatattgtgagtatgataagtgaagacaagaaatag

SEQ ID NO: 12287 - RNA, 2535 nt, synthetic construct
  misc_feature 1..2535: note = source = /note="Description of Artificial Sequence: Synthetic coding sequence"
  source 1..2535: mol_type = other RNA
atgggccctggcgctccctttgccagagtcggctggcctcttccgctcttggtagttatggccgctggcgttgctccagtctgggcatcccatagcccacacttgccaaggccccatagcagggtccctccgcacccttcttccgagagacgtgcagtctatataggggccctgttcccaatgtccggaggctggcccggcggacaggcttgtcaacccgccgttgagatggccctagaagacgtgaacagcaggagagacattctgccagattacgagctgaaattgattcaccatgatagcaagtgcgaccctggccaagctacgaagtacctgtacgaactcctctataacgacccgatcaaaatcatcctcatgcctggctgttccagtgtctccactctggtggctgaggctgccagaatgtggaatctaatcgttctgagctacggctcctcctccccagccctgagtaatcgccaacgttttcccactttcttcagaacacatccctccgcaactctgcataaccctactcgggtgaagctatttgagaaatggggttggaagaagatcgcaaccatacagcaaacaactgaagtctttacaagcaccttggacgacctggaagagcgcgtgaaggaggccggcatagagatcacattcaggcagagcttcttctctgacccagcagtccccgtgaaaaacctgaagcgccaggacgcacgaatcattgtcggcttgttctatgagaccgaagcacgcaaagtgttctgcgaagtttataaagagagactgttcggcaagaagtacgtttggttcctgattggctggtacgccgacaactggtttaagatttatgacccctcaattaattgcacagtagacgagatgaccgaggccgtagagggacacataactacagagattgtaatgttgaatccggcaaatacaagaagtataagtaatatgacctcacaagaatttgtcgaaaaacttacaaaaagactgaaaagacacccagaggaaaccgggggctttcaggaggcaccactcgcttacgacgccatctgggccctcgctctcgccttgaataagaccagtggcggcggcggacgttcaggtgtgaggcttgaggattttaattataacaaccaaacgattacagaccaaatctatcgggcaatgaatagctcatcctttgaaggtgttagcgggcacgtggtcttcgacgctagtgggtctcgcatggcctggacactcatagaacagttacagggtgggagctacaaaaagatcggatactacgattcgactaaagacgacctatcgtggtcaaaaaccgacaaatggattggtgggtcccccccagcagaccagaccctggttatcaagacctttaggttcctcagtcagaagctcttcatctcagtcagcgttttgtccagtctcggaatcgtcctggccgtggtttgtttgagctttaatatctataacagccatgtccgatatattcagaactctcaacctaacctaaataaccttacagctgtcgggtgtagcctggcactggctgcggtgttcccactgggactcgatggctaccatatcggacgcaatcagttccctttcgtttgccaagctcgcctctggttactcggattgggcttctccctgggttatggttccatgttcaccaaaatttggtgggtacacaccgtattcacgaaaaaagaggagaagaaagaatggaggaaaacattagaaccctggaaactttacgctacggtaggactgctcgtgggaatggatgtgctcacactggcgatctggcagatcgtggaccccctgcaccggaccatcgagactttcgccaaagaagaacctaaggaggacatcgatgtatcaatcctccctcagttagagcactgttcttctcgcaaaatgaacacctggttaggcatcttttacggatacaaaggtctcctgctgcttctgggcatcttcttggcttacgagactaagagcgtttcaactgagaagatcaatgaccatcgtgccgtcgggatggctatctacaacgtcgcagtcctttgcttaattaccgctcccgttactatgatcttgagtagccagcaagatgctgctttcgccttcgcctctctggctattgttttctcttcctatataacccttgtcgtactgtttgtccccaagatgcgacgcctcattaccagaggagaatggcaatccgaagctcaggataccatgaaaacaggttcatctactaacaacaacgaagaggaaaagtctcgcctgctcgagaaggagaaccgcgaattggagaagatcatcgcagagaaagaggaacgggtcagtgagctgaggcaccagctgcaatctcggcaacagctgcgctcgcgcaggcatccaccaacccccccagaaccatctggtggcttgcccaggggcccccccgagcccccagatcgcctctcgtgcgacggcagccgtgttcacttgctgtataagtag

SEQ ID NO: 12288 - RNA, 1020 nt, synthetic construct
  misc_feature 1..1020: note = source = /note="Description of Artificial Sequence: Synthetic coding sequence"
  source 1..1020: mol_type = other RNA
atggtatcaaaatccagatggaaattgctagccatgctcgcgcttgttctggtggtaatggtgtggtactcaatcagtcgagaggatcggtatatcgagctgttctacttccccattcccgagaaaaaggagccctgtctacaaggcgaggccgaatccaaggccagcaaactgtttggcaaactgtcaccactatgtagttactcacgggatcagcctatctttctgagattggaagattacttttgggtcaaaaccccctctgcctacgagctcccgtacggcaccaaaggctctgaagacttgctgcttcgagttctggccattacatcctccagcatccccaagaacatccagtcactgcgctgcagacggtgtgttgtggtgggtaacggacacaggttgcgtaacagcagcctgggcgacgccatcaacaaatacgacgtcgtcattcgactgaacaatgcccccgtggccgggtatgaaggtgatgtgggatcaaaaacaaccatgcgtctgttttacccggaaagtgcacatttcgatcctaaggtggaaaacaatcccgacaccctattggttctggtcgcgtttaaagctatggactttcactggatagagacgatactatccgataaaaagcgcgtgagaaaaggtttctggaagcaacctcctctcatctgggacgtcaacccaaagcagatacgcatcctgaaccccttttttatggaaatagccgccgacaagcttctatcgctccctatgcagcaaccccggaagattaaacagaaacctaccactgggttacttgccatcacgctcgctcttcacttgtgtgatctggtccacatagctggtttcggctaccctgacgcatataataaaaaacagaccattcattactatgagcagattacactaaaatccatggccggctccggacacaacgttagtcaagaggcgttggcgatcaagcgtatgctggagatgggcgccatcaagaatctgacttctttctag

SEQ ID NO: 12289 - RNA, 1386 nt, synthetic construct
  misc_feature 1..1386: note = source = /note="Description of Artificial Sequence: Synthetic coding sequence"
  source 1..1386: mol_type = other RNA
atgagtctggatatacagtcactggacattcaatgtgaagaactctccgatgcacggtgggccgagcttctgcctttactccaacagtgtcaagtggttagattggacgactgtggtctgactgaggccagatgcaaggacataagttctgccctgagagtgaatcccgccctagccgaactgaacctccggtctaacgaattgggagatgtgggcgtccattgcgtgctgcagggtttgcaaacaccaagctgtaagattcagaagctgtcactgcaaaactgttgcttgacaggggccggctgcggcgtgctcagctctaccctacgtaccctgccaacccttcaggaattgcacctatccgataacttactcggagatgcaggattgcaactgctgtgcgagggtctcctcgacccccaatgtagattggagaaactacagttggaatattgtagcctgtccgcggcatcatgtgagcctctcgcttctgttctgagggcaaagccagattttaaggagctgactgtgtccaacaacgacatcaacgaagccggggtccgcgtcctgtgccagggactgaaggactctccctgccagctggaggcccttaaactcgaatcatgcggcgtaacatcagacaactgtcgggacctgtgcggcattgtcgcttctaaggcgtctctcagagagttggcactgggtagcaataagctgggcgatgtgggaatggctgagctttgtccgggacttctgcatccctccagccgactacgtaccctgtggatttgggagtgcggtatcactgctaagggctgtggcgacttatgccgggtacttcgcgctaaagagtccctaaaagagctgtctctggctggcaacgagctaggggatgaaggcgcccgcctactgtgtgaaaccctgctggagccaggctgccagctcgaatccctatgggtgaagtcgtgttctttcaccgccgcatgctgttcacacttctcatctgtgcttgctcaaaatcgatttctgctggagctacagatttccaataatagacttgaggatgccggagtcagagagctctgccagggactcgggcaacctggcagcgtgctacgggtgctgtggctggcagactgtgatgtctccgactcgagctgctctagtctcgctgccaccctccttgcgaaccactccttacgtgagttggacctcagcaataactgcctcggggatgccggcatactgcagctggttgagagcgtccgacagccgggatgcctcctggaacagcttgtgctgtatgatatctactggagcgaagaaatggaagatagactgcaggctctcgagaaggataaaccatccctccgagtgataagttag

SEQ ID NO: 12290 - RNA, 1695 nt, synthetic construct
  misc_feature 1..1695: note = source = /note="Description of Artificial Sequence: Synthetic coding sequence"
  source 1..1695: mol_type = other RNA
atggctcccaagaagctgtcctgtctgaggtctttgctcctgcctctatcactaaccttgctcctgcctcaggctgatacgcgctcgttcgtcgttgatagaggacacgacaggttcctactagacggagctccattcagatacgtctctgggtccttgcactactttagggtcccccgtgttttgtgggctgatcgtctcctgaaaatgagatggtccggcctaaacgctattcagttctatgtgccgtggaactaccatgagccacaacctggggtgtacaattttaacgggtcccgcgatctgattgccttcctcaacgaggccgctctagctaatctgttggtaatattacggcctggtccttatatctgtgcagaatgggagatgggcgggctacctagctggctactacgtaaaccagagatccatcttaggacaagcgaccctgcagacaatatgacaaaaatatttacactactccgcaaatatgaaccacacggacctctagtaaattcagaatactatacaggctggctcgattactggggtcagaatcattcgacgagatctgtatcggcagtcacaaaggggctggagaacatgctgaagttgggagcctcagtgaatatgtacatgttccatggcggcacaaacttcggatactggaacggcgcggacaagaaaggaaggttcctcccaatcactacttcatacgattacgatgcaccaatatccgaggccggagaccctacccctaagctgtttgctctgcgggatgtaataagcaaatttcaggaggtgcctctaggtcctctgccacctccttctcccaaaatgatgcttggccctgtaactctgcacctggtaggccatctgctcgcttttcttgacctgctttgtcctagaggcccgattcacagtatactgccaatgacttttgaggccgttaaacaagatcatgggttcatgttataccgaacatacatgacccatactatcttcgagcctactccattctgggtgccaaataatggcgtccatgacagagcctacgtcatggttgacggagtctttcagggcgtggtcgaaaggaacatgagggataaactatttttgacaggaaaactagggtcaaagctggacatacttgtggaaaacatggggaggctgtcttttggcagcaactcatcggacttcaagggactgttaaagcccccgatattaggccaaacaatattaactcaatggatgatgttcccactgaaaatcgataacctcgttaagtggtggtttcctctccagctccctaagtggccctaccctcaggccccctctgggcctacgttttatagtaagactttccctatattaggaagcgtgggagatacctttctgtatttaccagggtggaccaaaggtcaggtttggattaatggatttaatttaggtcgctattggaccaaacagggacctcagcagaccctgtacgtgccaagattcctgttgttcccccggggcgcgttaaataagattacactgctggagttggaagacgtccccctgcaacctcaagttcaatttctggataagcccatcctcaattctacgtctaccctgcaccgcacccacatcaattccctctcagccgacactctttcagctagcgagcccatggagctctcaggccactag

SEQ ID NO: 12291 - RNA, 1317 nt, synthetic construct
  misc_feature 1..1317: note = source = /note="Description of Artificial Sequence: Synthetic coding sequence"
  source 1..1317: mol_type = other RNA
atgatgtatgctcccgtggaattctcagaagcagagtttagtagggcagagtaccaacgaaagcaacaattctgggactccgtcaggctggcactgtttacgctcgcaatcgtggccataatagggatcgccattggtattgttactcacttcgtcgtggaggacgataagagcttctactaccttgctagctttaaagtgacgaacattaagtataaagagaactacggcataaggtcctctcgggaatttatcgagcgctctcatcagattgagagaatgatgtctaggattttccgtcattcctccgtgggcgggcggtttatcaagtctcatgttataaagctgtcaccagacgaacagggtgtcgacattctgattgtactcatctttcgctatccttccactgactctgccgagcaaattaaaaaaaaaatcgaaaaagctttataccagtctctgaagaccaagcaactgtccctaaccataaacaaaccctctttccgccttactcctattgactctaaaaaaatgcgaaacctgctgaattccagatgcggaattcgaatgacctcatcaaacatgccactcccagcatcttcgagtactcagcgcatagtgcagggccgggaaacggcgatggaaggcgaatggccttggcaagcatctcttcagctgattgggtccggtcatcagtgtggagcttcattgatttcaaacacatggttattaacagccgctcattgcttttggaagaataaggaccccacccagtggattgcaaccttcggggcaacaattactccgcctgcggtgaagagaaacgtcaggaaaattatacttcacgaaaactaccatagagagaccaatgagaacgatattgctctggtgcagctcagtacaggagttgaattctctaatatcgtacagcgagtttgccttcccgactccagtataaagctccctccaaaaacttccgtcttcgtgaccggtttcggatctattgtggacgatggtcctattcagaacactctgcggcaagccagggttgaaaccataagcacagacgtttgcaacaggaaggacgtgtatgacggactgatcactcctggtatgctgtgtgcgggcttcatggagggaaagatagatgcatgtaagggagactccggcggaccacttgtgtatgacaatcatgacatctggtatattgtgggtattgtgtcctggggtcagagctgcgctctcccaaaaaagcccggcgtatacacccgggtcaccaaatatcgcgattggatcgcgagcaaaactggaatgtag

SEQ ID NO: 12292 - RNA, 4392 nt, synthetic construct
  misc_feature 1..4392: note = source = /note="Description of Artificial Sequence: Synthetic coding sequence"
  source 1..4392: mol_type = other RNA
atggaacccagactgttttgttggaccaccctcttcctcctggccggatggtgtctccctgggctgccatgtccctcccggtgtctgtgctttaaaagcaccgtccgatgcatgcacctgatgctggaccatatacctcaggtcccccaacaaactacagtgctcgaccttcgattcaatagaatcagagaaatccctggctccgcctttaagaagttaaagaaccttaatacccttttgttaaacaacaatcatatccgcaaaatctctaggaacgcattcgaaggcctcgaaaatctcctgtatctatatctgtacaagaacgaaattcacgcccttgacaagcaaacctttaaaggcctaatcagtctggaacacctatacattcacttcaaccagctggaaatgctacagcccgagacctttggtgacctgctccgcctcgaacgtctcttcctccataataataagctctccaagattccagcaggctcattttctaatcttgactcactgaaacggctgcgccttgattctaatgctctggtctgtgactgcgatctgatgtggctgggagaattgctgcagggctttgcccagcacggacatactcaggccgcggctacctgtgagtatccacggcgcctgcatggacgtgcagtagcttccgtgacagtagaagagtttaactgtcaaagcccgaggattacctttgaaccacaggatgtcgaagtacccagtggaaacaccgtctacttcacctgccgggccgagggcaatcctaagcctgagatcatctggattcacaataatcattccctggatctcgaggacgacacaaggctgaacgtattcgatgatgggactttaatgatccgaaacacacgagagagtgatcagggtgtctatcaatgcatggctagaaattcagccggagaagcaaaaacccagtcagcaatgctccgctattcatcactgcccgccaaaccttcttttgttatccaaccccaggacacagaggttctgattgggacaagcactacactggaatgcatggcaactggacacccccacccattgatcacatggactagggataacggtctggagttagatgggagtcggcacgtggcaacgagttctggcctgtacctgcagaatattacacaaagggaccatggacggtttacgtgtcatgcaaacaatagtcatggcacagtacaagccgccgctaacataattgtgcaggcccccccccagtttacagtgactcccaaagaccaggtagtcctggaggagcatgcagtggagtggctgtgtgaggcagatggcaatccaccacctgtgatcgtgtggactaaaacggggggccagctgcctgttgagggacagcacaccgtgctctcctctggaaccctcaggattgatcgcgccgcacaacatgaccagggtcagtacgaatgtcaggccgtgtctagtctgggcgtgaaaaaagtgagcgtgcagctgactgtaaagccgaaggctcttgccgtctttacacaactaccgcaggacacctccgtggaggttggcaaaaacatcaacatctcatgccacgcccagggtgaaccccaaccaattatcacatggaacaaggaaggcgtgcaaattactgaatccgggaagttccatgtggatgatgaaggaactctgaccatctatgatgccgggtttccggatcaaggccgttacgagtgtgtcgcaagaaactctttcggtctcgctgtaaccaatatgtttctcactgtaactgccatccaagggcgacaggccggggacgattttgtggaaagttccatcttggacgctgtccagcgagtggactccgctatcaattcaactaggagacatctgttcagccagaaaccacatacttctagcgacctgctcgcccaatttcattacccccgagacccccttatcgtggagatggctcgggcaggcgagatcttcgaacatacgcttcagctgataagagagagggtaaagcagggcctgaccgtggacttagagggaaaggaattcaggtacaacgatctcgtctcacccagatctttatctctcatcgctaatctgtcaggttgtactgcaagacggcccctgccgaattgttctaatcggtgttttcacgccaagtaccgcgctcacgatggtacgtgtaataatttgcagcagccgacttggggcgcagccttaacagccttcgccagattactgcagccagcctaccgagacggaattagagccccccgggggcttggactccccgttggaagcagacagcctctcccgcccccccggctggtagccacagtctgggctagagcagcagcagttacccccgaccactcctacacacgaatgcttatgcactggggctggtttctggagcacgacctcgaccatacagtccccgcccttagcaccgcccgcttttcagatggaagaccgtgcagctctgtgtgtaccaatgatcccccatgcttcccaatgaatacgaggcacgccgacccccggggaacgcacgctccgtgcatgttattcgctaggtctagtcctgcctgtgcctctgggcggcccagcgcaaccgtcgactcggtctatgcaagagagcagataaaccagcaaaccgcttatattgacggctccaacgtttacggttcatccgagagggagtctcaggcactgcgagaccctagcgtccctaggggactgctgaagacaggattcccatggcctccatctggtaagcctctcttgccgttcagtacaggaccccctacagagtgcgcccgacaggaacaggagtcaccctgcttcttagccggtgaccatcgcgccaacgagcaccttgcgttggcagctatgcacacactgtggttcagagagcacaacaggatggccaccgaactatccgcccttaatccacactgggagggaaacacagtttaccaagaggcgaggaagattgtaggggccgagctgcagcacatcacatactcacactggctccccaaggtactaggcgatcccggtaccagaatgctccgggggtacagggggtataacccaaacgtgaatgctggaatcattaacagcttcgccaccgcagcctttaggtttggtcacaccctaatcaatcctatactctacaggctcaacgcaacattgggggaaatcagcgagggacaccttcctttccacaaggccttgttctccccatcgcggatcatcaaggagggcggcattgatcctgtccttaggggcctgttcggtgtggccgccaagtggcgtgctcccagctatctgctgagcccagagcttacccaaaggctattttctgccgcttactctgctgccgtcgacagcgcagcaaccataatccagaggggccgagaccacggaatccccccttatgttgacttccgcgtgttttgcaacctcacttccgtgaagaactttgaggacttacagaacgagattaaggactctgaaataagacagaaactgaggaaactatacggctctcctggagatatagatctatggcctgctttgatggtggaggacttaatccccggcactagagtaggcccaacgcttatgtgtctgtttgtcacgcagttccaaaggctcagagacggagaccggttctggtacgagaatccaggggtcttcactcccgcccaattgacgcaactcaaacaggcttcattgagtagggttttgtgtgataacggggacagtatccagcaagtccaggccgatgtgttcgtaaaggccgaatatccacaagattatttgaactgttccgagattcctaaagtggacttgcgtgtgtggcaggattgctgtgccgattgtcgcagcagggggcaattccgagctgtcacgcaagagagccaaaagaagcggagcgcccagtatagttatcccgtggacaaagatatggaattgagccacctgagatcccggcagcaggataagatttacgtgggagaagatgcaaggaacgtaaccgtgctagccaagacaaagtttagccaggacttttctacattcgcagccgaaattcaagaaacaatcaccgctctccgggaacagatcaataagttagaggctaggctacgacaagccgggtgcacagacgtccgaggagtcccccgcaaagccgaggaacgatggatgaaagaggactgtacacattgcatatgtgagtcgggccaagttacctgtgtggtcgaaatttgtccccctgcaccctgtccttctcctgaactcgtcaagggaacatgttgtcctgtttgtagagacaggggaatgccctcagactccccggagaagcgctag

SEQ ID NO: 12293 - RNA, 1206 nt, synthetic construct
  misc_feature 1..1206: note = source = /note="Description of Artificial Sequence: Synthetic coding sequence"
  source 1..1206: mol_type = other RNA
atgggactcaaagcactttgcttgggcttactatgcgtcctcttcgtctcccacttctacacgccgatgcctgataatatcgaggagagttggaaaatcatggcactcgatgccattgccaaaacatgcacgtttactgcaatgtgttttgaaaacatgagaattatgcgctacgaagaattcatctctatgatttttagactcgattacactcagcccctttccgatgaatatattacggtgactgacacaaccttcgtcgatatccctgtgcgattataccttcccaagcgcaaatcagagacaaggcggcgggccgtgatctacttccatggcggtggcttctgcttcgggagcagtaagcagagggcgttcgatttcctgaataggtggactgccaacactcttgatgctgttgtggtgggcgtagactacaggttagccccgcaacatcacttccctgcacagttcgaggacggtcttgcggccgtgaaatttttcctcctggaaaagatcctgacgaagtacggggtcgatcctacccgcatctgtatcgccggcgactcttcaggtggcaatctggcaaccgccgttacccaacaggtgcaaaatgacgcggaaatcaaacataagatcaaaatgcaggtgctcctgtaccccggcctccagattaccgattcttaccttcccagtcatcgggaaaatgagcacgggatcgttttgacacgcgatgtggccattaagcttgtgtcactgtattttacgaaagatgaagccctgccctgggctatgaggaggaaccagcacatgcctctagagtctagacacctttttaagttcgttaactggtcaatccttctgccagaaaaatatagaaaagactatgtgtacactgaaccaatactaggtggactcagctacagcctccctggactgacagatagtagagcactcccccttttggccaatgattcccaactgcaaaatctgccactgacttatatccttacttgccagcacgacttgttaagagatgatggcttgatgtatgtgactcgcctgcggaacgttggcgtacaggtggttcatgagcatatcgaagacggaatccacggcgctctcagctttatgacttcccctttctatcttcgcctgggcctgaggatacgtgatatgtatgtgtcttggctggataaaaacctgtag

SEQ ID NO: 12294 - RNA, 264 nt, synthetic construct
  misc_feature 1..264: note = source = /note="Description of Artificial Sequence: Synthetic coding sequence"
  source 1..264: mol_type = other RNA
atggtgagcttgatgaagttgtggattcccatgctgatgacttttttctgcaccgtcctcctctccgtgctaggcgaaatgagaaaaaagaggtacgaccgcaaagaacttttattggaggaatgctgggggaagcctaacgtgaaagagtgtaccaataaatgtagcaaagcgtttagatgcaaagataagaattacacatgttgttggacctattgcgggaatatatgttggatcaatgtcgaaacctccggggactattag

SEQ ID NO: 12295 - RNA, 813 nt, synthetic construct
  misc_feature 1..813: note = source = /note="Description of Artificial Sequence: Synthetic coding sequence"
  source 1..813: mol_type = other RNA
atgaggggtcaagggcgaaaagagtctctctctgactccagagatcttgatggctcctacgatcagctgaccggccatcccccaggccccacaaaaaaagctctgaagcaacggtttcttaaacttcttccgtgctgcggacctcaggccctgccttcagtaagcgagaccctggccgctccggcctcactaagaccacaccgcccccggttactcgacccagactctgtagatgacgagtttgaactgtctactgtgtgtcacagaccggaaggactcgaacagcttcaggaacagacaaagtttactagaaaagaattacaggtcctgtaccggggtttcaaaaacgagtgcccctccgggattgtcaacgaggagaatttcaagcagatttactcacagtttttcccgcaaggcgatagctcaacgtatgcaacattcctgttcaatgcttttgatacaaaccacgacggttctgtgtccttcgaggacttcgtggcaggcctttccgtgatcctgcgcggtacagtcgatgataggctcaattgggcatttaatctctacgacctcaacaaagacgggtgcatcacgaaggaggagatgcttgacatcatgaaaagcatatatgatatgatgggaaagtacacttacccagcactgcgcgaagaagccccacgagagcatgtggaatctttttttcagaagatggacagaaacaaggatggggtagtgacgatcgaagaattcatagagtcatgtcagaaagacgagaacatcatgcgttctatgcaactattcgacaacgtgatttag

SEQ ID NO: 12296 - RNA, 819 nt, synthetic construct
  misc_feature 1..819: note = source = /note="Description of Artificial Sequence: Synthetic coding sequence"
  source 1..819: mol_type = other RNA
atgcatctgcggctcatctcctggctttttatcatcttgaacttcatggaatacatcggaagccaaaacgcttcaaggggacgtagacagagacggatgcacccaaatgttagccagggatgtcaggggggttgcgctacatgttcggactacaacggttgcctatcttgcaagccacgactgttcttcgcgttggagcgcattggcatgaagcaaattggagtttgcctcagcagctgtccaagcggatactatggcacccgctaccctgacatcaataagtgcacgaaatgcaaagcagactgcgatacctgtttcaataagaatttttgtaccaaatgtaaatccggcttctacttacatctcgggaagtgcctggataattgccctgaaggcctggaagcaaataatcatactatggaatgtgtgtctatcgtccactgcgaggttagtgaatggaacccctggtcaccctgtactaagaaagggaagacctgtggctttaaaaggggtaccgagactcgcgttcgcgaaataattcagcatccatcagctaaagggaacctgtgcccccctactaatgaaacccgcaagtgcaccgtgcagcgtaaaaaatgccagaaaggagaaagggggaaaaaaggacgtgaaaggaagaggaaaaagcccaataagggtgagtctaaggaggcaataccagactcaaagtcactggagtcctccaaagagattccagagcaacgggagaacaagcaacaacagaaaaaacgcaaagttcaggacaagcagaagagcgtgagtgtgtccaccgtgcactag

SEQ ID NO: 12297 - RNA, 294 nt, synthetic construct
  misc_feature 1..294: note = source = /note="Description of Artificial Sequence: Synthetic coding sequence"
  source 1..294: mol_type = other RNA
atggctaaaagtttcccagtatttagtctcctttcttttatccttattcatttagttctcagcagtgtttcaggccctcgacattggtggcccccccgaggaatcatcaaagttaagtgtccatatgaaaaagtcaatctcagctggtataacggcacagtgaacccttgcccaggcttgtatcagcccatctgcggcactaactttatcacatatgataatccatgtatcctatgtgttgagtcattgaagtctcacggtcgcataagattttaccacgatggaaagtgctag

SEQ ID NO: 12298 - RNA, 726 nt, synthetic construct
  misc_feature 1..726: note = source = /note="Description of Artificial Sequence: Synthetic coding sequence"
  source 1..726: mol_type = other RNA
atgtggactgttagaacagaggggggtcacttcccactccatagccctaccttcagctggagaaacgttgcgttcttgctgctgttgtccttggcccttgagtggactagcgccatgttgacaaagaaaatcaagcacaaacccgggctctgtcctaaggaacggctcacctgtacaacggaacttcctgattcttgtaatactgactttgactgtaaagagtaccagaagtgctgtttctttgcttgccagaagaaatgcatggaccctttccaggagccatgtatgctccctgttagacacggtaactgcaatcacgaagcacagcgctggcacttcgactttaaaaactacagatgcaccccattcaagtaccgcggctgtgaaggcaacgccaataactttctcaacgaggatgcctgcagaacggcgtgtatgttgattgtgaaagacggccagtgccctctgttccccttcacagaaaggaaagaatgcccgccgtcctgccactctgatatcgactgcccccaaacagacaagtgctgtgaatcccgctgcggcttcgtgtgtgcacgtgcatggactgtcaaaaaggggttttgtccacggaagcctttgctgtgtacaaagatcgataaacccaagtgccttcaagacgaagaatgtcccttggtagaaaagtgttgttctcattgcggtcttaaatgtatggacccaagacgctag

SEQ ID NO: 12299 - RNA, 1827 nt, synthetic construct
  misc_feature 1..1827: note = source = /note="Description of Artificial Sequence: Synthetic coding sequence"
  source 1..1827: mol_type = other RNA
atggcccgggctcgggccggggctctacttgcactctgggtcttgggcgccgccgctcatcctcagtgcctggattttcgcccaccttttcgtccaacgcagccattgagactgtgcgctcagtattctgattttggatgctgcgacgagggccgcgacgctgagctaacgcgcagattctgggccttggcttcacgcgttgatgcagctgaatgggctgcgtgcgcaggctatgcgcgagacctactgtgtcaggaatgttcaccctacgccgctcatctttacgatgccgaagacccattcactccactccgcactgtaccaggcctgtgccaggattattgtctcgatatgtggcacaagtgccgcgggcttttccggcatctgtctactgatcaggaactttgggcccttgaaggcaacttagctcgattctgtaggtatctaagccttgatgatactgactattgtttcccctatctgctggtaaacaaaaatctgaatagtaacctcgggcacgtcgtcgcggacgccaagggctgtctacagttgtgcttggaagaagtagccaacggccttagaaaccccgtcgccatggttcacgcgcgggatggaacccatcgattctttgtggctgagcaggtgggcctggtgtgggcctatttacccgaccggagccgcctcgggaagccattccttaacatttcccgcgttgtcttgacgagcccctgggagggcgacgaacgcggcttcctcggaatcgcctttcatcccagtttccagcataataggcgcctgtacgtgtactactccgtcggcatacgctccagtgaatggatccggatctccgaattccgcgtgagcgaagacgacgagaacgctgtggatcattcttccgaacgcattatcctggaggtgaaggagcctgcttcgaaccataatggcggacagcttctcttcggcgacgacgggtatttatatatcttcactggagacggcgggatggcaggagacccattcggtaccttcggcaatgctcagaataaatctgctctcctgggaaaggtgttacgcattgatgttgatcgaaaagagcgaggactgccctacggaattcccccagataatcctttcgtgggcgaccctgccgctcagccagaggtgtacgccttaggagtacgcaacatgtggagatgctccttcgaccggggtgatcctagttcaggaactgggagaggccgacttttttgtggggacgtgggccagaacaagttcgaagaagtcgacgtagttgagaggggcggaaattatggatggcgggcaagagaaggcttcgagtgctatgaccgatctctatgcgccaacacatccttaaatgacctcctgcctatcttcgcttatcctcataccgtaggaaagtccgttaccgggggttatgtatacagaggttgtgagtatccaaacttgaacggtctgtatattttcggtgatttcatgtctggacggttaatgtctctgcaagagaacccgggcacaggacagtggcagtacagcgagatttgtatgggccacggacagacttgcgagttccctggtctgatcaataattattacccttacatcatctcttttggagaggatgaggccggggagctctacttcatgtcgactggcgaaccatctgcaaccgcaccacggggcgtggtttataaaataattgatgcctcttcctgcaaggctcgatccgcaatgccaggatatgtgccagcccctagcgtctgctcctccctcacctcccagccttttattctccagtggtggaagtag

SEQ ID NO: 12300 - RNA, 351 nt, synthetic construct
  misc_feature 1..351: note = source = /note="Description of Artificial Sequence: Synthetic coding sequence"
  source 1..351: mol_type = other RNA
atggcccctcctagtgtgccacttgtgctcctgcttgtcctgctgctcagtctggccgaaactccagccagcgcacccgcccaccgaggccgcggcggttggacgctcaattctgcgggctatttactaggcccagtactacacctgccgcagatgggtgatcaagacgggaaaagagagaccgcacttgaaattctggacctctggaaggcaattgacggtctgccatactcgcacccaccccaacccagtaagagaaacgtgatggagacatttgctaagcctgagatcggagatcttgggatgctgtccatgaagataccaaaggaggaagacgtattaaaatcctag

SEQ ID NO: 12301 - RNA, 3618 nt, synthetic construct
  misc_feature 1..3618: note = source = /note="Description of Artificial Sequence: Synthetic coding sequence"
  source 1..3618: mol_type = other RNA
atgcgcaagccacgcaggaaatcgcgtcaaaacgcagagggacggagaagtccttccccatattctctcaaatgttcccccacaagagaaacactgacgtacgctcaagcacagagaattgtggaagttgacatcgatgggcggctgcacagaatttctatctatgaccccttaaagatcattacggaggatgagctgaccgcccaggatatcaccgaatgcaacagtaataaagagaacagtgaacaaccccagttcccagggaaatctaaaaaaccttccagcaagggcaaaaaaaaggaatcttgttccaagcatgcctctggaactagctttcacctccctcaaccatcattccgcatggttgattccggcattcagcctgaggcacccccattgccggctgcttattaccgatatatagagaaacctcctgaagatctggacgcagaagtggagtatgacatggacgaggaggacctggcgtggcttgatatggtgaacgagaaaaggagagtggatggccactcactggtttctgccgatactttcgagctgctggttgatcgtctggaaaaggagtcttaccttgaaagtcgttccagtggcgcgcaacagtcactcattgacgaagatgctttttgctgtgtatgtctagacgacgagtgtcataacagtaatgtaatccttttctgcgatatctgcaacctcgccgttcatcaggaatgttatggagtcccctacatcccagaaggacagtggctatgtcggtgttgtctccagtctccctcgcggcccgtggactgcatcctgtgccctaataaaggtggagcctttaagcagacttctgacggccattgggctcatgtggtatgcgctatctggatacctgaggtatgctttgcaaataccgtgtttctcgagcccatcgaaggcatcgataacatacctccggcgcgctggaaactgacatgttacatatgtaagcagaagggactgggcgcagctatacagtgtcacaaggttaactgctataccgcatttcatgtgacctgcgctcagcgcgctgggctgttcatgaaaatcgagccaatgagagaaacctcgctgaatggcacgatcttcaccgttcgaaaaacagcatattgtgaggcacacagcccacctggagctgcgacagcacgaaggaaaggcgactccccaaggtccatcagcgagaccggtgacgaagaaggactcaaagaaggcgacggagaggaggaggaggaggaggaagttgaggaggaggagcaggaggcccaaggaggggttagcggctctttgaaaggtgtccctaaaaagtccaagatgtccctgaaacaaaagattaagaaagaacccgaggaagctggtcaggatacaccttctactctgcctatgctcgctgtgccccagatcccgtcttaccgcctgaacaagatctgtagcggtctttcttttcagaggaaaaatcagtttatgcagaggttgcacaattattggctgttaaagcggcaggcccgtaacggagtgccccttatacggaggcttcattcccacttgcagagtcagcggaatgccgaacaacgagaacaggatgaaaagacgtctgccgtgaaggaggaattaaaatactggcagaagctgaggcatgacctggagagggcccggttgctaatcgaactgattcgtaagagagagaaattgaagagagagcaggtaaaggtacagcaagctgccatggaattagaactgatgcctttcaatgtgcttctccggaccaccctcgatcttctgcaggagaaagacccagcccacattttcgctgaacccgtaaacctgagcgaggtgcctgactatctggaatttatatcgaagcctatggacttcagcactatgaggaggaaactggaatcacacctctaccgtacattggaggagtttgaggaagatttcaacctcatcgtcactaattgcatgaaatacaatgcaaaggatacaatttttcaccgggccgcggtcaggctgcgcgatctgggtggtgccatactcagacacgctcgtcgccaggccgagaacattgggtacgaccccgaaagaggcacccacctacccgagtcccccaagctggaggatttctaccgattctcatgggaagatgttgacaacattctaattcctgagaacagagcccacctgtctccggaagttcaactgaaagagctgctggagaagcttgatctggtgagcgctatgaggagttcaggcgccaggactcgccgtgtgaggctgttacgacgcgaaattaacgctctccggcagaagctcgctcagcctcctcctccccagccaccgagccttaataagactgttagtaacggagaactgcctgcgggccctcagggagatgctgccgtactcgagcaagccctgcaggaggaaccagaagacgatggtgatagagatgattccaagctaccacctcctcccacgctcgaaccaacgggacccgcaccatccttgagcgaacaggaatctcctcctgagccgcccacactgaaaccgatcaacgacagcaagccccctagccgctttctgaaaccacggaaggtagaggaagacgagttgctggaaaagagccctctgcaactgggtaacgagcccctccagcgcctgctctccgacaacggcatcaacaggctttccctgatggctcctgacacccccgctggcactcctttgtccggagtgggacggcgaactagtgttctctttaagaaagcaaagaacggcgttaaacttcagaggagcccagatcgtgtcctcgaaaacggagaagatcacggggtggcaggatctcccgctagcccagcgtccatagaggaggagcgccattctagaaaacggcctagatctagaagttgttccgaatctgagggcgaacggagcccacagcaagaggaagagacgggcatgacgaatggctttggaaagcataccgagtctgggtcggattccgagtgttctttgggtctctcggggggactcgcgtttgaagcttgcagcggcctcacccctcccaagcggtcccggggtaagccagccctgagcagagttccctttttagaaggagtgaatggcgacagtgactacaatggatctggccgaagtctgctgcttcccttcgaggatagaggggacctggaaccactggaattggtttgggccaaatgccgcggatacccctcttatccagctctgattatagatccaaaaatgcctagggaagggctccttcacaacggggtgcccatccccgtgccacctctggatgtccttaagttgggggaacagaaacaggcagaggctggtgagaagctcttcctcgtgctcttcttcgacaacaaaagaacttggcagtggctgccccgggataaggtgctgcccctaggagttgaagacactgtcgataaactcaagatgcttgaaggccgtaagacatcgattagaaagtctgttcaggtcgcctacgacagggcaatgatccacctgtcacgcgtgaggggaccacattctttcgttacctccagttacctttag

SEQ ID NO: 12302 - RNA, 1977 nt, synthetic construct
  misc_feature 1..1977: note = source = /note="Description of Artificial Sequence: Synthetic coding sequence"
  source 1..1977: mol_type = other RNA
atgttcgtgtcttacctgatacttaccctacttcatgtgcagacagccgtcctcgcccgtcccggcggagaaagcatcggttgtgatgattatctagggtcagacaaggtcgtggataagtgtggggtgtgcggaggggataataccggctgccaggtggtgtctggagtcttcaagcacgcacttacctcactggggtaccacagggtcgtggaaatccccgagggagccaccaaaatcaacataaccgagatgtacaagagtaacaactatctcgctctccgatctcgttcaggcagatcaattatcaacgggaattgggcaattgatcggcccggaaaatatgagggaggcggcacaatgttcacttataaacgacctaacgagatatcttccacagctggagagagttttttagcagaggggcccaccaatgagatactagacgtgtatatgatccaccagcagcccaaccccggcgtccactacgaatatgttatcatgggaacaaacgcaatatcgccccaggtgccaccccacagacgtcctggcgaaccatttaacggacagatggtgaccgaaggtaggtcacaagaagagggcgagcaaaaaggacgtaatgaggaaaaagaggaccttcggggggaggcccctgagatgttcacatctgaatccgctcagacatttcccgtccgacaccctgataggttttcaccacatagaccagataatctggtgccacctgcaccccagccaccccgccggtcacgggatcacaattggaaacagctgggcaccacagagtgttctacaacatgcggaaaaggaagtcagtatcctatctttcggtgtgtacaccgatcgacacatgaagaagcaccggagagctactgtgattcatccatgaaacccacacccgaagaagagccatgtaatatttttccttgcccggcattctgggatattggcgagtggtccgaatgctctaagacttgtggcctagggatgcagcatcgccaggtcttgtgccgccaggtctacgctaaccgttcactgactgtgcagccgtacagatgccaacatttagagaaaccggaaaccaccagcacttgccagctgaagatttgctctgagtggcagattaggacagattggacctcctgttcagtgccctgtggagttgggcaaagaacccgggacgtcaaatgtgtgtccaatattggtgacgtggtcgacgatgaggagtgcaatatgaagctgaggccaaacgacattgagaactgtgatatgggtccttgcgccaagagctggttcctaaccgaatggtcagagcggtgttctgccgaatgtggtgctggggtgcggaccagatccgtggtttgtatgacgaaccacgtgtcctctctcccactggaaggctgtggcaacaaccgccccgcagaggccacaccctgtgacaacggcccatgcacaggaaaggtggaatggtttgctgggtcctggtcacagtgctcaattgaatgcggcagtggtacacagcagagggaagttatctgcgtgagaaagaacgccgataccttcgaagttctggaccccagtgaatgtagcttcctggaaaaaccaccatcccagcaatcttgccatttgaaaccttgtggggctaaatggttctctacagaatggtccatgtgtagcaagtcctgccagggcgggttcagggtacgcgaagtgcgctgtcttagcgatgacatgaccctgtcaaacctctgcgacccacaactaaagcccgaagaacgggagtcctgtaatccccaagattgtgttccggaagtagatgaaaactgtaaagataagtactataactgcaatgtagttgtccaagcacgtttatgtgtgtacaattactacaaaacagcatgttgtgcctcttgcacgcgtgtggctaacaggcaaaccgggttcctaggaagccgttag

SEQ ID NO: 12303 - RNA, 708 nt, synthetic construct
  misc_feature 1..708: note = source = /note="Description of Artificial Sequence: Synthetic coding sequence"
  source 1..708: mol_type = other RNA
atgcgacctttagccgggggtttacttaaagtggtgttcgtagttttcgcgtctctatgtgcctggtatagcggttatctcctcgccgaacttattccagacgcccctcttagctctgcagcatattcaattaggtcaatcggagagcgtccagtactgaaagctccagtccctaagcggcagaagtgtgaccattggaccccttgtccctctgacacttacgcctaccggctgctctccggcggcggacgctctaagtatgcgaaaatttgttttgaggataatctgctgatgggcgagcaactcgggaacgtggcccggggaattaacattgctattgtgaactatgtgactggcaatgtcacggccactcggtgttttgacatgtatgagggagacaactctggacccatgacgaagtttatccagtccgctgcacctaaaagcttgctgtttatggttacatatgacgacggctccacacgattgaacaatgatgccaaaaacgccattgaagccctgggaagtaaggaaattaggaatatgaaatttaggtcatcatgggtttttattgcggcaaagggccttgaactaccatcagaaattcagcgcgagaagatcaaccactctgatgccaagaataatagatactctggttggccagctgaaatccagatcgaggggtgcattccgaaggaacggagttag

SEQ ID NO: 12304 - RNA, 759 nt, synthetic construct
  misc_feature 1..759: note = source = /note="Description of Artificial Sequence: Synthetic coding sequence"
  source 1..759: mol_type = other RNA
atgcgtggacagggcaggaaagaaagcctgtctgattcccgtgaccttgacggttcctacgatcagctcaccggccaccctccaggccctaccaagaaggccttgaaacagcgcttccttaaactgctcccatgttgcggaccacaggccctgccgtccgtctccgagaattccgtggatgatgaatttgaactctcaactgtatgtcatcgacctgaggggctggaacagctccaagagcaaacaaagtttacgcgcaaagagctgcaggtcctgtacaggggtttcaaaaacgaatgtccgagcggcatagtgaacgaggaaaatttcaagcaaatctacagtcagttctttccccagggtgactcgtccacctacgcaaccttcctgtttaacgcattcgacaccaaccatgatggctctgtctccttcgaagacttcgtcgccggactcagcgtgattttaaggggaaccgttgacgatcggctgaactgggcctttaatctctacgacttgaataaagatggctgcataaccaaggaggagatgctggatatcatgaagtctatctacgacatgatggggaaatacacataccctgccctcagagaggaagcacctcgagaacacgtggagtcctttttccagaagatggataggaataaggatggagtcgtaactattgaggaattcatcgaatcatgccagaaagatgaaaacataatgaggtcaatgcaactgttcgacaatgtgatttag

SEQ ID NO: 12305 - RNA, 312 nt, synthetic construct
  misc_feature 1..312: note = source = /note="Description of Artificial Sequence: Synthetic coding sequence"
  source 1..312: mol_type = other RNA
atgtccggaagagggaagggcggcaagggcttaggtaagggcggagccaaaaggcatagaaaggttcttagagacaatattcaaggaattacaaaacctgctattagacggcttgcccgaagagggggggtgaagcggatcagcggattgatatatgaggagaccagaggggtgttgaaagtgtttttagagaacgttatcagagatgctgtgacgtacacggagcatgccaagcgcaagactgtgacggcaatggacgtggtgtacgccctgaaaagacaagggagaaccctgtatggatttggcgggtag

SEQ ID NO: 12306 - RNA, 3120 nt, synthetic construct
  misc_feature 1..3120: note = source = /note="Description of Artificial Sequence: Synthetic coding sequence"
  source 1..3120: mol_type = other RNA
atggaagtgactgcagtggctacacaaggcggctatggatctagtgactgggtcacttcgtatctgctcatgttctcagacggtggtagaaattggaagcagtataggcgtgaagagtcaatttggggcttcccaggcaatacaaacgccgactcagtggtgcactatcgcctgcagccgccgttcgaagcccgatttctgaggttcctgccactggcctggaatcccagggggcgtatcggcatgcgtatcgaggtttacgggtgtgcatacaagtccgaagtcgtctatttcgatgggcagtcagcactgctgtatagactggataagaaaccgttaaagcccattcgcgacgttatatctctgaaattcaaggcaatgcagagcaacgggatccttctgcatcgcgaggggcagcatggaaatcacatcacactcgaacttataaaaggcaagctcgtattctttctcaattccggaaatgccaagctgccatccacgattgcacccgtcacacttacactggggtctttgctcgacgaccaacactggcattctgtccttatcgaacttctggatacacaggtgaacttcacagtggacaagcatactcatcactttcaggctaagggtgattcctcttaccttgacttgaacttcgaaatttcgtttggcggtataccaaccccagggaggtctcgggcgttcagaaggaaaagctttcatggctgcctcgaaaatttatactacaatggagttgacgtcaccgagctggcaaaaaagcataaaccacagatcctcatgatgggaaatgtttctttttcttgcccgcagcctcagacagttcccgtgacctttctctccagccgcagctatcttgctctccccgggaatagtggagaggacaaggtttctgttacattccaatttagaacctggaatcgagcaggacatcttctcttcggcgagctgaggagaggctccggatcattcgtcttgtttttgaaagatggaaaactcaaattgagcttgttccagccaggccagagtcctcgcaacgtcaccgccggcgcggggctcaatgacgggcagtggcattcagtctccttttccgctaagtggtcgcacatgaacgtagttgttgacgacgacacagctgtacagccactggtagcagtcctgatcgacagtggagatacttattacttcggcggctgcctcgacaattccagcggatctggctgtaaaagtcctctcggagggttccagggatgtcttcgactgattacaatcggggataaagctgtagatcccattctggtgcaacaaggggcactgggaagctttcgcgaccttcaaatcgatagctgcggcattactgacaggtgtttacctagctactgtgagcacggaggtgagtgtagtcagagctgggacaccttctcctgtgactgtctcggcacgggatataccggggagacttgccactcttccctttacgaacagtcctgtgaggcccacaaacatagaggcaaccctagtggactctattatattgacgcagatggcagcggccccctaggaccattcctcgtttattgcaatatgactgcagacgcagcctggacagtggttcaacatgggggacccgatgcggtgacactgagaggggcacccagtggacaccctcggagtgccgtaagtttcgcatacgcggccggcgctggtcaactccgctcggcagttaatttggctgaaaggtgcgagcagaggcttgccttacgttgtggcacggcgcgtcgaccagatagcagggacggcacccctctgtcgtggtgggttgggagaacaaacgaaacacacacctcatgggggggttctctcccagacgctcagaagtgcacatgtgggcttgaggggaattgcattgatagccagtattattgtaattgtgacgccggaaggaatgagtggacttccgatactattgtcctctcccagaaggagcatctgccggtcacacagatcgttatgacggatgctggccggccacactccgaagcagcctacaccctaggtccactactgtgtcgaggagaccagtcattttggaactcagcctcattcaacacagaaacctcctacctgcactttcctgcgttccacggcgaattaacagctgacgtgtgttttttctttaaaactacagtctccagcggggtattcatggaaaacttgggaatcaccgactttatccggatcgaactgcgtgcaccaactgaagtaaccttcagctttgacgtggggaatggtccatgtgaggtgaccgtgcagtccccaacaccctttaacgataaccagtggcatcatgtgcgtgcagaacggaacgtgaaaggagcctcactccaggttgaccagcttccacagaagatgcagcctgcaccagcagatggacacgttagattgcagctgaactctcagctcttcatcggcggtactgccacacgacagaggggctttctgggctgcatccgctctctgcagctcaacggagtggccctggacctggaggagcgggcaacagtgaccccgggcgtggaacccggctgcgcaggacactgttccacctatgggcatctgtgtagaaacggaggtcgatgtagagaaaaacgcagaggcgtgacttgtgactgtgccttctccgcttatgacgggccattttgttccaacgagatctctgcatatttcgctactggaagttcgatgacttaccatttccaggagcactacaccttgagtgaaaattcaagcagcctggtctcttccctccaccgcgacgtgacactgactcgagaaatgattactctttcttttcggaccacccgaaccccgtccctactgctgtatgttagttcgttttatgaggaatatctcagcgtcattctggcaaataacggatctctgcagattcgttacaagttggacaggcaccagaaccccgatgcatttacgtttgacttcaaaaatatggccgacggccagctgcatcaggtgaaaattaatcgggaggaagctgtagtcatggtggaggtaatcccccagatgcaaaaatctaattag

SEQ ID NO: 12307 - RNA, 1257 nt, synthetic construct
  misc_feature 1..1257: note = source = /note="Description of Artificial Sequence: Synthetic coding sequence"
  source 1..1257: mol_type = other RNA
atgagaagcctcctgctactctcagctttttgcttgctggaggcagcactggccgcagaagtaaagaaaccagcggctgccgcagcgcccggcacagccgagaagctgagccccaaagcggctacattggcagagagatcggctggactagccttcagcctctatcaggctatggcaaaggaccaagcagtcgagaatatactggtttctcccgtcgtagtggcatccagtctcggactggttagtttaggaggtaaagcaaccacagcaagccaagcaaaggcggttttatcagcagagcaactacgggatgaagaggtgcacgcaggactgggggagctgttgcgttcattatctaactccacagccaggaatgtgacatggaagctaggctcaagactttatggaccttcctcggtctcctttgccgacgatttcgtccggtcaagcaagcagcactacaattgtgaacactcaaagatcaactttagggataagaggtcagcactgcagagcatcaacgagtgggccgcccagacaaccgacggcaaactcccagaagtcactaaagacgtggaaagaacagacggcgctttactggtgaatgccatgtttttcaagccccattgggacgagaagtttcaccataagatggtggacaaccgaggtttcatggtgaccagatcctacactgttggcgttatgatgatgcacagaactggtttgtacaactattatgatgatgaaaaggaaaaacttcagatcgttgagatgccgctcgctcacaagctctcatcactgatcattttaatgccccatcacgtggaacctctggagcggttagagaagttgctgactaaggagcagcttaagatttggatgggtaagatgcagaagaaagccgtggctattagcctacctaaaggggtcgtcgaagtcacgcacgacctgcagaagcatctggccggactgggcttgacggaagcaatcgataagaataaagctgatctaagccgcatgtctggaaaaaaggacttgtaccttgcgagcgtcttccatgcaaccgccttcgaactcgatactgatggaaatccatttgatcaggacatttacggaagggaggaattgcgaagccctaagctattctacgctgatcacccatttatttttctagtgcgggacactcaaagtgggtccctgttgttcatcggacggttagtgagaccaaaaggagacaagatgcgcgatgaattgtag

SEQ ID NO: 12308 - RNA, 378 nt, synthetic construct
  misc_feature 1..378: note = source = /note="Description of Artificial Sequence: Synthetic coding sequence"
  source 1..378: mol_type = other RNA
atgcagctgttgaaagcgctgtgggcacttgccggcgccgccctgtgctgtttcctagtattagtaatccacgctcagtttctgaaagaaggccagcttgcggctggcacttgtgaaattgtgaccctggaccgagatagttcccagcctaggaggacgatcgcaagacaaactgcacgctgcgcctgccggaaaggccagattgccggcactactagagctagacccgcatgtgtcgatgcgagaataatcaaaacaaaacagtggtgtgacatgctgccgtgtcttgagggagagggctgtgacctgcttataaacaggtcagggtggacatgcactcagccagggggaagaataaaaacaactaccgtgtcatag

SEQ ID NO: 12309 - RNA, 5859 nt, synthetic construct
  misc_feature 1..5859: note = source = /note="Description of Artificial Sequence: Synthetic coding sequence"
  source 1..5859: mol_type = other RNA
atgcctgccctgggccccgcgttgttgcaggccctgtgggccgggtgggtgctgacactgcagccactgcctccgaccgctttcacacctaatggcacatacctacagcaccttgctcgggatccgacgagcgggaccctttacctgggagccacaaacttcttgtttcaattgtcccctggactgcagttggaagcgacagtttccaccggtcccgttttggatagtagagactgtttgcctccggtgatgcccgatgagtgtccccaggcccagcctaccaataacccaaaccagttgttgctggttagcccgggggccctcgttgtctgtgggagcgttcaccagggtgtatgcgagcagagacgtctgggacagctggaacagctcctcctccggcctgaaagacccggagatacacagtacgtggcagctaacgatcccgccgtctcgacagtcggattagttgcccaagggctggcaggcgagccactgctttttgtcggaagggggtatacgtcacgaggggtcggtggaggcataccaccaatcaccacaagagctttgtggccacccgaccctcaagctgcattttcatatgaggaaacagcgaagctggctgtggggagactgtcggagtatagccatcatttcgtgtcagccttcgcgagaggcgcctctgcttatttcctgtttctccgccgggatctccaggcccagtcccgcgcctttcgtgcatatgtgtctagggtttgtttaagagaccaacactactacagctacgtagaacttcccctggcctgtgaaggcgggcgatatggattaatccaggccgccgctgtggccacctcacgggaggttgcccatggggaggtgcttttcgctgctttcagctcagcagccccccctactgttgggaggcccccgtctgctgccgccggcgcatccggagccagtgccctgtgtgcattcccactggacgaagttgaccgcctagcaaacagaactcgcgacgcatgctacactcgagaaggcagggccgaggacgggacagaggtggcgtacatcgaatatgacgtgaattcagactgtgctcagttaccagtagacactctggacgcatacccctgcggatctgatcacacaccatccccgatggcttcacgggtgccacttgaggccactccaattcttgaatggcctggcatacagcttaccgccgtggccgtcaccatggaagatggtcacactatcgctttcctcggcgatagccaggggcagctccatagagtctatttagggccagggagtgatggtcacccttatagcacacaatcaattcaacagggctctgccgtttcgcgggatctgacttttgacggtactttcgaacacctgtatgtgatgactcagtctaccctgctgaaagttccagtggcctcctgcgcccagcacctcgactgtgcaagttgtttggctcatcgtgatccctactgtggatggtgcgtgctcttaggtcgatgtagccgacggtcggaatgtagtcgcggacaggggcctgaacagtggttgtggtccttccaacccgaactggggtgtctgcaggtcgccgctatgtcccccgcaaatatatcccgggaggaaacacgagaggtgtttctgtctgtcccagatctccctcccctctggccgggagagtcttactcatgccactttggggagcatcaaagccccgccctgctgactggtagtggggtcatgtgcccaagcccagatccctctgaggcacccgtgctgcctcgcggagcagattacgtaagcgtgtccgtcgaactccggttcggggccgtcgtgatcgccaagacaagtctaagcttctatgattgcgttgcggtaacagagctgcgaccgtctgcacagtgccaggcttgtgtgtcttcccgatggggctgtaattggtgtgtgtggcagcacttatgcacccataaggcgtcctgtgatgctggtcccatggtggcatctcatcagtctcctctggtgtctcccgatccacccgcacgaggagatggagactccgctgagcttgaaggccccccagcacccttgattctcccttcctcactggactatcaatatgacaccccaggcttatgggagctcgaagaggccacccttggcgccagttcatgcccttgcgtggaaagtgttcagggatccaccctcatgcctgtgcacgtcgagcgtgagatacgccttctcgggcgcaatctgcatctcttccaagacggccccggggacaacgagtgcgtgatggagctggagggactggaagtggtggtggaagcacgggtggagtgcgaaccaccccctgatacccaatgtcacgtgacttgccagcagcaccagctgagttacgaggccctgcagccagagctacgcgtgggtcttttccttcgccgagctggccgattgcgggtggatagcgctgagggattacacgtggtactctatgactgctccgtgggacacggcgattgctcgagatgccagacggccatgccacaatacggctgtgtgtggtgtgaaggagagagacccagatgcgtgacccgcgaggcgtgcggagaagccgaggccgtggccacccagtgtccagccccgctgatccactccgtcgagcctttaacaggtcccgtggatgggggtacccgagttaccatacgcggcagcaacctaggccaacatgttcaggatgtgctcgggatggtcaccgtcgcaggagtgccgtgtgccgtagacgctcaggaatatgaagtctcctcctcccttgtttgcattaccggagcgagtggcgaagaagtcgctggggccactgcagtggaggtgcctggcagagggaggggagtgagcgagcacgacttcgcatatcaggaccccaaggtgcattccatctttccagcgagaggtccccgagctggtggaaccagactaacccttaatggatctaagctgctcaccgggcgcctggaggacattagggtcgtagtcggcgaccagccttgtcatttacttccagagcagcaatcggagcagctgcggtgtgagacatctcccagaccaacacccgccacgctgccagtcgccgtgtggttcggagctacagagagaaggttacagcgcggacagtttaagtatacgctcgacccaaacatcacatccgctggcccaactaagagctttctgagcggggggagggagatatgtgtcagaggtcagaatctggacgtagtgcagacacctaggatcagagtgactgtcgtttcaaggatgctccagccatcgcagggcttgggtcgcagaaggcgagtcgttccagaaacagcctgttcccttggcccttcctgttcctcacagcagtttgaagagccctgccacgtaaactccagccagctgattacctgtcgtactcctgccctgcctggattgcctgaggatccatgggtgagggtagagttcattcttgacaatctggtctttgattttgccaccctaaacccgacacctttttcctacgaagcagaccccaccctccagcctctaaaccctgaagatcccaccatgcctttcagacacaagcctggctcagtgttttctgttgagggcgagaaccttgatctggcaatgtctaaagaggaagttgttgccatgatcggagacggaccatgcgtcgtaaagaccctgacccggcatcatttatattgtgaaccacctgtggaacaacccttgccacgacaccacgccctgagagaggctcctgatagccttcccgaatttaccgtgcaaatgggcaacttgagattttcattaggacatgtacagtatgacggagaatctccaggggcgttccctgtggcagctcaggtgggcctgggtgttggaacatcccttttggctctgggtgtaattatcatcgtgttgatgtaccgaagaaagtcaaagcaggccctgcgtgattataagaaagtacagatccagttggagaacctggagtcctcagtgcgcgacaggtgtaaaaaggagttcactgacctaatgaccgaaatgacggatctaacctccgacctgctgggttcaggaatcccctttttggactacaaggtgtatgctgaaaggatcttttttccgggacacagggaaagccctttacatagagatctaggtgttcctgaatcacgacgcccaactgtggagcagggcctggggcagctatccaacctcctcaatagcaaactattcctgaccaagttcattcataccctagaatcgcagcgcacatttagtgccagggatagggcatatgtggcttctctcctgacggtggctctccacggcaaactggagtatttcacggacatcctgagaaccctgctatccgacctcgtggcgcaatatgttgcaaagaacccaaagctcatgctccgccggactgagaccgtggtggagaagctgctgactaattggatgagcatttgtctgtatacatttgttcgcgactcagtgggtgagccactgtatatgttattccggggtatcaaacaccaggtggacaaagggcctgtcgatagcgtgactggcaaggccaagtacactctcaatgataacagactcctgagagaggatgtggagtacagaccgcttactctaaatgctctgctcgctgtgggaccaggcgccggcgaggcccagggagtgccggtgaaggtgctggattgtgacactatctcacaggctaaggagaaaatgctagaccagctatataaaggcgtcccactcacgcagaggccagacccccggacattggacgtggagtggcggtcaggcgtggccggacaccttatcctgagcgacgaggacgtgaccagcgaggtgcaggggctgtggagaagactgaacaccctccagcattacaaggtgcctgatggtgctactgtggctctcgtcccctgtctgaccaagcacgtattacgagagaaccaggattacgtgcccggcgagcggacccccatgctggaggacgtggatgagggcgggattaggccatggcatctggtcaaaccttcggatgagccggagccaccacgaccacgccgtggcagcctcagaggaggcgaacgcgagagggccaaggccatacccgagatatatctgactagactgctgagtatgaaagggacactgcaaaagtttgtagatgatttattccaggtgatcctgtctacaagccgccctgttcccttagcagtgaaatatttttttgacctgttagatgagcaagcccagcaacacgggatatcagaccaggacaccattcatatatggaaaaccaattcccttccgctcaggttttggatcaacataatcaagaatccgcagttcgtgttcgacgtccagacaagtgataatatggacgcagtcctgctggtcatagcacagaccttcatggatgcctgtactctggctgatcacaaactaggcagagactctccgatcaacaagctgctctatgcacgagacataccgaggtataagagaatggtggaaaggtactacgccgacatcagacagacagtcccagctagtgaccaggagatgaactcggtcttggcggaattatcctggaattactccggagatctcggcgcccgagtcgcattgcatgaattgtataaatacataaacaagtattacgatcaaattataaccgccttagaggaggacggaaccgcccagaagatgcaactggggtaccgtttacagcagatcgcagctgcagttgagaataaagtaactgatctgtag

SEQ ID NO: 12310 - RNA, 342 nt, synthetic construct
  misc_feature 1..342: note = source = /note="Description of Artificial Sequence: Synthetic coding sequence"
  source 1..342: mol_type = other RNA
atgttggtacttttcctcttaggaacggttttcttactgtgtccctactggggggaactgcacgatcctattaaagccactgaaattatgtgttatgagtgtaagaaataccatctcgggttatgctatggcgtcatgacttcttgttctctgaaacacaagcagagctgcgctgttgagaacttctacattctaacaaggaaaggacagtctatgtaccactactccaagctttcttgtatgaccagttgcgaagacattaacttcctgggattcactaagcgagtggagctgatctgttgtgaccatagcaactactgtaacttacctgaaggggtttag

SEQ ID NO: 12311 - RNA, 6408 nt, synthetic construct
  misc_feature 1..6408: note = source = /note="Description of Artificial Sequence: Synthetic coding sequence"
  source 1..6408: mol_type = other RNA
atgccggccttagggcctgctctacttcaggccctatgggcaggctgggtccttacgctgcagccactgccccctaccgcctttacccctaacggcacctatctccaacacctggctagagaccctacgagcggcaccctctatctgggcgcaaccaattttttgtttcaattaagtcctgggcttcagctggaagcaaccgtaagcactggcccggtgcttgactccagagattgtttgcccccggtcatgccagacgaatgcccacaggcgcaacctaccaataatccaaaccagctgctgcttgtcagccctggtgccctggtagtttgcggcagcgttcatcagggtgtgtgtgaacagcgacgcctcggacagctcgagcaattactactgcgtcccgagcgcccaggtgacactcagtatgttgctgctaacgaccctgcagtgtctacagtgggcctggtcgctcagggcctggccggggagcctttattgtttgttggacggggttacactagtaggggcgtaggtggtggaatcccaccgattactactagagctctatggccccctgacccacaagcagcatttagctatgaggaaactgcgaaactagccgtcggtagactctctgagtactcccatcacttcgtgtctgcttttgctaggggtgcatcagcctatttcctgtttctgcggcgggacttacaggctcagtcccgggccttccgcgcctacgtgtcgcgagtgtgtctgagggaccagcactactacagctacgtggaactgccattggcgtgcgagggcggaagatacgggctgattcaggcggccgctgtggccacaagccgggaggtggcccatggcgaggttttattcgccgcattcagctccgcggcacctcccacagtgggccgacctccctccgctgcagctggggcatcaggtgcatcagctctctgcgcttttcccctcgacgaagtagatcgcctggctaacagaacacgcgatgcgtgttatacccgagaaggaagagcggaggatggaacagaagtagcctacatcgagtacgacgtcaacagtgactgcgcacagctgcccgtggacacgctggatgcctacccttgtggcagcgatcacactcccagtcccatggcaagtcgcgtgccgctagaggcaacaccaattctagagtggcctggaatccaacttaccgcagtcgccgtgacaatggaagacggtcacacaatcgcctttctgggagacagccaaggacagcttcatagggtgtacctgggaccagggtccgatggacatccttactcgactcagtctattcagcagggtagcgctgtctcaagagacttgacctttgatggcacttttgagcacctatacgtgatgacacagtctaccctgcttaaggtgccggtcgcttcctgcgcccagcatttggattgcgcaagctgcctggcacacagggatccatattgcgggtggtgcgtgctgttgggtaggtgctccagacgctctgaatgttctcgcggccagggtcctgaacagtggctgtggagttttcagcccgaactagggtgtcttcaggtggctgctatgtcccctgctaatataagtcgcgaagaaacaagagaggtctttcttagcgtacccgaccttccacctctgtggcccggggagtcctacagttgccattttggagaacatcaaagcccagcactccttaccggatcaggcgtcatgtgtccatctccagacccttccgaagccccagtgctgcctaggggggccgactacgtaagtgtcagcgtggaattaaggttcggtgccgtagtgattgcgaaaacaagcctgagtttctacgattgcgttgctgttaccgagttacgccctagcgctcagtgccaagcttgtgttagttctcgatggggatgtaactggtgcgtttggcagcatttatgtactcataaggcctcttgcgacgccggccccatggtggcttcccatcagagtcctttggtgagccctgacccccctgcacggggcggaccgagcccaagcccccccaccgccccaaaggccttagctaccccggctcccgacaccctgccagtggagccaggggccccctctaccgcaaccgcgtcagacataagtccgggggcttctccatcacttttgtctccctggggaccatgggcagggagtgggtccatttcctcccccggctccactggtagtcccctgcatgaagaaccgtctcctccaagccctcagaatgggccgggaacagccgtgcccgcaccaactgatttccggccctccgccactccagaagacctcctggcatcacctctctctcccagcgaggtcgccgccgtaccaccagctgatcccggcccagaagcgttgcaccctacagtgcccttagatcttcctcccgctacagtccccgctacaactttcccaggagcaatgggctccgtcaagccagcgctggattggctgacccgggaaggaggcgaactccctgaagcagatgagtggacaggcggggacgctcccgcatttagcacaagtactctcctatccggcgatggagattccgctgagctggaaggcccgccagcacccctgattctgcctagtagcctggattatcagtatgacacccccggactctgggaattggaggaggccaccctgggcgcttccagttgcccctgcgttgagtccgtgcagggatctactctcatgcctgtccacgtggaacgggaaatacgcctcctcgggaggaaccttcatctcttccaggacggcccaggtgataatgaatgtgttatggagttggaggggctggaagtcgtggtcgaggctagagtggagtgtgagcctcccccagacacgcagtgccacgttacctgccagcagcatcaactgagctatgaagccctgcagcccgaactgagggtcgggctgttccttagaagagcaggcaggttgcgggtggattcagctgaggggctccacgtggtgttatacgactgtagtgtaggacatggtgactgctctcgttgtcaaacggcaatgccacagtatggttgcgtgtggtgtgaaggcgagaggccccgctgtgtcaccagagaggcgtgcggcgaggccgaagctgtggccacccaatgccccgcaccactgattcacagcgtggaacctctgactggacccgtggacggcggaacacgagtgacaatccgtggcagtaacctcggacagcatgtacaggacgtgctggggatggtcacagtggccggagtgccgtgtgccgttgatgcgcaggagtacgaggtctcgtctagtcttgtgtgtatcacgggcgcctctggagaggaggttgctggtgcaaccgcagtggaagtgcccgggcgcggaagaggcgtcagtgaacatgacttcgcttaccaggaccccaaagtgcactctattttcccggcgaggggaccccgcgccggaggaactaggcttacattaaacggaagtaaacttttgactggccgactggaagacattcgagtggtcgtgggggatcagccctgtcatctgctgcctgaacagcagtctgaacagctgcgatgtgagaccagcccacgcccgacgcctgccacactgcctgtggcagtgtggtttggagccaccgaacggaggctccagaggggccaattcaaatataccctagaccctaacattacctcagccgggcccacaaagagttttttgtccggcggtcgggagatttgcgtgaggggccagaatctcgatgtggtgcagacacccagaattagggtgacagtcgtaagccgaatgttgcagccgtctcaaggcctgggaaggcgtcggagagtggttcctgagacagcatgttctctcgggccttcttgcagtagtcagcagtttgaagaaccctgtcacgttaactcgagccaactgatcacatgccgcacgccagcactgcctggcctcccagaggacccctgggtacgagtagagtttattttagacaatctggttttcgactttgctaccctaaaccctacacccttttcgtatgaagctgatccaacactacagcccctaaaccccgaagaccctaccatgccgtttcgacataagcccggctctgtttttagtgtggagggagagaaccttgacttggctatgtcgaaggaggaggtcgtggccatgataggagatggaccttgcgtcgtgaaaactctgactaggcaccatctctactgcgaacctccagtggagcagcccttgcctcgacaccatgcactccgcgaagctccggacagcctgcctgagttcacagtgcagatggggaacttaagattttccctcggccacgtgcagtacgatggcgaatctccaggcgcattcccagtcgccgcccaggtcggactgggagtcggcaccagcctgttggcccttggcgttataattatcgtgcttatgtatcgtagaaaaagcaaacaggctctcagagattacaaaaaggtgcagattcagctggagaacttggaatcttctgtgagagatcggtgcaagaaggaattcacagatttaatgaccgaaatgactgacctcacatccgacctgctggggtccggaattccttttctggattataaggtgtacgccgaacgcatattttttccggggcacagagagagcccattgcatcgcgacctgggtgtgcctgaaagcaggcgaccaacggtggagcagggactcggccagctctcaaatctgttgaacagcaagctcttccttacaaaatttatccacactctggaatcccagcggacctttagcgccagagaccgcgcttacgttgcatcactgctgactgtagccctgcacgggaagctggaatattttacagacatcctccggactctcctgagcgatctcgtggcccagtacgtcgcgaagaaccccaaacttatgctgaggcgtaccgagaccgtggtggagaagctgctgacgaattggatgtcgatttgtttatatacgttcgtcagagactcagtcggtgagccactgtacatgctgtttcgcggcataaagcatcaggtcgacaaaggaccagtggattcagtaaccgggaaggccaaatatactctcaacgacaacaggcttcttcgggaggacgtcgagtacaggccgctcacactgaacgctctcctagcagttgggcctggcgctggcgaagcacaaggagtgcctgtaaaggttctggactgcgacaccatttcccaagctaaagaaaaaatgctcgaccagctgtacaagggcgtcccactgacccagaggcccgaccctcgcaccttggatgtagagtggagatcaggcgtggccgggcaccttatcctgagcgacgaggatgtgaccagtgaggtgcagggcctatggaggagactcaacacacttcagcactacaaggttccagatggcgccacagttgcccttgtaccatgtttgacaaagcatgtacttcgagagaaccaagattacgtccccggtgaacggactcccatgctcgaagacgtcgatgaaggcggcatcagaccatggcacctcgtcaagcccagcgatgaaccagagccccccaggcctcgaaggggatccctgagagggggcgagcgcgaaagagcaaaggctattccagaaatttatcttacccgcctattgtctatgaagggaactctgcagaagttcgtcgatgatttattccaggtaatcttgtctaccagtaggcccgtgcccctcgccgtgaagtacttctttgatctcttagacgaacaggcgcaacagcacggcatctccgaccaagacaccattcacatttggaagactaacagccttcctctccgattttggatcaacatcattaagaatccacaatttgtcttcgatgtgcagacttccgataacatggacgcagtgcttctcgtgatcgcgcagaccttcatggatgcctgtactctcgcggaccacaagctcgggagagattcacccatcaacaagttgttgtacgccagggatatccccagatataaaagaatggtcgagaggtattatgcagacatcaggcagactgtgccagcttccgaccaagagatgaacagtgtactggcagagctgagctggaattactctggtgaccttggcgcccgcgtggcacttcatgagctgtataaatacataaataaatactacgatcagattatcactgccctggaagaagacggtaccgctcagaagatgcaactggggtacagactgcagcaaattgcagctgctgtcgagaataaagttacagacctgtag

SEQ ID NO: 12312 - RNA, 390 nt, synthetic construct
  misc_feature 1..390: note = source = /note="Description of Artificial Sequence: Synthetic coding sequence"
  source 1..390: mol_type = other RNA
atgagacctctgaaacctggagctcctttgcctgcacttttcctgctcgcactggccctgtcaccccacggtgcgcatggaaggccccggggtcgcagaggcgcgagagtcacagataaagagcccaagcctctgctcttccttccagccgcaggcgccgggcgcacaccatccggatcccgctccgcagaaatattcccacgagactcgaatctgaaagataaattcattaagcacttcaccgggcccgtcaccttttctcccgaatgttctaagcactttcatcgtttgtattataatactcgagagtgtagcacacctgcctactacaagcgttgcgctcggctcttaacaaggctagccgtgagccctctgtgttctcagacctag

SEQ ID NO: 12313 - RNA, 252 nt, synthetic construct
  misc_feature 1..252: note = source = /note="Description of Artificial Sequence: Synthetic coding sequence"
  source 1..252: mol_type = other RNA
atgcggctgtccgtctgtctgctcatggtgtccttggccctgtgttgctaccaagcccatgcgcttgtgtgccctgctgtcgccagcgagatcactgtttttctgtttctttccgacgcagccgtgaatctgcaagtggcaaaacttaacccccctcctgaagccttggcagccaagctggaagtaaaacactgtaccgatcaaataagcttcaaaaaacgcctgagccttaagaagtcatggtggaagtag

SEQ ID NO: 12314 - RNA, 1455 nt, synthetic construct
  misc_feature 1..1455: note = source = /note="Description of Artificial Sequence: Synthetic coding sequence"
  source 1..1455: mol_type = other RNA
atgtggtacgtttcaactcgcggagtcgcgccccgcgtgaattttgagggcgccttgttttccggatacgcccccgacggaggcctttttatgcccgaagaactcccccagctggataggggaacgctttgtcaatggtcaactttatcttaccccggcctggttaaggaactttgcgccctgtttatcggaagtgaattattgcctaaggatgagctgaacgacctgatcgaccgagctttctcacgtttccgtcacagggaagtcgtgcacctctcaagactccggaacggattgaatgtgctggagctgtggcacggcgtgacatacgccttcaaagacctatccctctcctgtactactcagttcctccaatactttttagagaaaagagaaaaacacgtcacagtagtcgtgggaacctctggggacacagggtcagctgccatagaatctgtccagggagctaagaacatggacatcatagttctgctgcccaagggccactgtacaaagatccaagagctgcaaatgaccacagtcctaaagcagaacgtccacgtcttcggggtcgagggaaattctgatgaactggatgagcctatcaaaacagtctttgcggatgtggccttcgtgaagaaacacaacctcatgtccctgaatagtataaactggagtcgggtgctggtgcagatggcccaccacttttttgcttacttccagtgcactcccagtctcgacactcaccctctgcctctggtggaggtggtagtacctaccggcgcagctggcaatctggccgcaggctatatcgctcaaaaaattgggctacccatcaggctcgtggtggccgtgaaccgtaatgacatcatccatcgcaccgtccagcaaggagacttttcactctcagaagcagtgaagtctactctcgctagtgctatggatatccaggtgccatacaacatggaaagagtcttttggttgctgtcgggatccgatagccaagtgacccgggccctcatggaacagtttgaacgcactcagtcagtgaacctgcccaaagaacttcacagtaaactgagtgaagccgtgaccagcgtttccgtctccgacgaagctataacccagactatgggacggtgctgggacgagaatcagtacttgctgtgtccacattccgcagtcgccgtcaactatcattatcagcagatcgaccgccagcaaccaagtacacctcggtgttgtctggctccagcttccgccgctaaattcccagaggcagtcctggccgccggactgaccccggagactcccgctgagatcgtggctctagaacacaaagagacacgctgcaccttgatgagacggggcgataactggatgttaatgctgagggatacgatagaagatctctcacggcagtggcggagccatgctctgaacacctcacaatag

SEQ ID NO: 12315 - RNA, 159 nt, synthetic construct
  misc_feature 1..159: note = source = /note="Description of Artificial Sequence: Synthetic coding sequence"
  source 1..159: mol_type = other RNA
atgaagctttgcgttaccgtgctgtcactgcttgtcctggtagctgccttttgttcactcgcactatccgcgccgtctaacaaacctctggaagccagtaagtccgccctgactcccgtaagcccaggctctaggagtacctgcatgacatggaattag

SEQ ID NO: 12316 - RNA, 675 nt, synthetic construct
  misc_feature 1..675: note = source = /note="Description of Artificial Sequence: Synthetic coding sequence"
  source 1..675: mol_type = other RNA
atgcgggtcagcggtgttctgcgacttctggctcttatctttgccattgttacaacctggatgttcattcgttcctatatgtctttctcaatgaagacaatacgcctgccacgatggctcgcagcctcacctacaaaagagatccaagtgaaaaagtataaatgcgggttgattaaaccttgtcctgctaattattttgccttcaaaatatgttccggcgccgccaacgtcgttgggcctaccatgtgtttcgaagatcgcatgattatgagccctgtgaagaacaacgtaggcaggggcctgaacatcgcactggtcaacggtacaacgggagctgtcctcggacagaaggccttcgacatgtatagcggcgacgtcatgcatctggtgaagtttctcaaagagatccccggtggcgccctggtacttgtggcttcctacgacgatcccgggactaaaatgaatgatgagagcaggaagctcttcagcgacctcggatcctcctatgccaaacaattaggatttcgggattcttgggtatttattggtgcaaaagatctgcgaggcaagagccctttcgaacagtttttgaagaattccccagacacaaacaaatacgaaggatggcccgagctcctggaaatggaaggatgcatgcccccaaagcccttctag

SEQ ID NO: 12317 - RNA, 1404 nt, synthetic construct
  misc_feature 1..1404: note = source = /note="Description of Artificial Sequence: Synthetic coding sequence"
  source 1..1404: mol_type = other RNA
atgttgatcttttggaccattacgctattcttgctcggtgctgctaaggggaaggaagtctgctatgaggacttgggttgcttctccgacactgagccatgggggggcacagccatccgacctctgaagatcctgccgtggtctcccgagaaaatcggaactcggttcctcctgtatacaaacgagaaccctaacaacttccagatactgctgctgagtgacccttcaaccatcgaggcgagcaattttcagatggacaggaagactagattcataatacatggctttattgataagggggacgaatcatgggtgacagatatgtgtaagaaactgttcgaggttgaagaggtaaactgtatttgcgtcgattggaagaaagggtcccaagcgacttacacacaggcggccaacaatgtaagggtcgtaggagcgcaagtcgctcaaatgctcgatatcctactcaccgagtattcttacccccctagtaaggtgcatctgattggccacagtctgggcgcgcacgtcgccggggaggcgggttctaaaaccccggggttgagccgaataacgggcctggatcccgtggaagcgtcctttgaatccacacctgaggaagtacgtttagatccctccgacgccgatttcgtagacgtgatacacaccgacgctgctccactcatccctttcctcgggttcgggactaaccagcagatgggtcacctcgatttcttccccaacggcggtgagagtatgcctggctgtaagaaaaacgcacttagtcaaatcgtggatctagacggcatctgggccggcacacgggatttcgtcgcctgcaaccatcttaggagctataaatattatctcgagtcaatcctgaatcccgacggcttcgctgcatacccttgtacgtcgtataagtcatttgaatccgataaatgtttcccctgtccagaccaaggctgcccccagatgggccactacgccgacaagtttgcaggcaggacgtccgaggagcagcagaagttttttctgaacacaggagaggcctcaaactttgccagatggcggtatggggtttcgattacattgtcgggaaggaccgcgaccggtcagatcaaggtcgctctgttcggcaataaaggcaatactcaccagtatagtatctttagggggattctgaaacccggatccacacatagttatgaatttgacgcgaaattagatgtaggtactattgaaaaagtgaagtttctgtggaacaataacgtgattaaccccacacttccaaaggtgggcgctacaaaaattactgtccagaaaggagaggaaaagactgtctacaacttctgctccgaggatacagtgcgagaagatactctacttactttaactccatgctag

SEQ ID NO: 12318 - RNA, 237 nt, synthetic construct
  misc_feature 1..237: note = source = /note="Description of Artificial Sequence: Synthetic coding sequence"
  source 1..237: mol_type = other RNA
atgggctctggcttgcctctagtgctcttattaactctactggggtcttctcacgggaccggcccaggtatgaccctccagctcaaattaaaagaatcttttctgactaacagctcatatgagtcctcttttctcgaattacttgagaagctctgtctgttactgcatctgccctccggcaccagcgtcaccttacaccatgcaagaagtcagcaccacgtcgtgtgtaacacttag

SEQ ID NO: 12319 - RNA, 291 nt, synthetic construct
  misc_feature 1..291: note = source = /note="Description of Artificial Sequence: Synthetic coding sequence"
  source 1..291: mol_type = other RNA
atggaacataaggaagttgtcctgctactgctcctgttcttgaaaagcggtcagggggagccgctagatgactatgttaatacacaaggtccatctttatttagcgtgactaagaagcaactgggtgcaggatcccgcgaagagtgtgccgccaagtgtgaagaggacaaagaatttacctgccgggcctttcagtaccattctaaagagcaacagtgtgtaattatggctgagaatcggaaaagttctatcattattagaatgagggatgccgtgctgtttgaaaagtag

SEQ ID NO: 12320 - RNA, 1083 nt, synthetic construct
  misc_feature 1..1083: note = source = /note="Description of Artificial Sequence: Synthetic coding sequence"
  source 1..1083: mol_type = other RNA
atggggcttctgctccttgtgcctctccttctgctccccgggtcatacggcttacccttttataacggtttttactactcaaattccgctaacgatcaaaacctgggaaacggtcacggcaaggatttgcttaacggggtgaagttggttgtggaaacccccgaagaaactctatttacatatcagggcgcctcggtaatccttccctgccgatataggtatgaacccgccttggtgtccccccgaagagtgagggttaagtggtggaagctatctgaaaacggggctccagaaaaagacgtgttggtagccatcggcctgcggcataggagcttcggagattatcaggggcgggttcacctgagacaggacaaggagcacgacgtgtctctcgagatacaagacttgagattagaggattacggtcggtaccgctgcgaagttattgatggattggaggatgaatcaggcttggtcgaattggagctccgcggcgtggtttttccttatcagagtccaaacggacgctatcagttcaactttcacgaggggcaacaggtgtgtgccgaacaggcagcggtagtcgccagctttgagcagctctttcgggcgtgggaggaaggtctggactggtgtaacgcgggttggctgcaggacgctacggtgcaatatccgatcatgcttcctaggcagccctgcggcggccctggactcgcgcccggggtcagatcctacgggccaaggcatagacgcctgcacagatatgatgtgttctgttttgccacagcacttaaaggccgggtttattatctcgaacacccagagaagcttacactgactgaagcacgagaagcctgccaggaagatgatgccaccatcgctaaagtgggacagctattcgctgcgtggaagtttcatggcttggaccgctgcgatgcaggatggctagcggacggttccgtgaggtaccctgtggttcatccgcaccccaactgtggacctccggaacctggtgttcggagcttcgggtttccagaccctcagtctcgcttatatggcgtgtattgttatcgccagcattag

SEQ ID NO: 12321 - RNA, 810 nt, synthetic construct
  misc_feature 1..810: note = source = /note="Description of Artificial Sequence: Synthetic coding sequence"
  source 1..810: mol_type = other RNA
atgattcgtaccctgctgctctcaacacttgtggccggagctctaagctgtggggatcccacctatcccccctacgtgactcgcgttgttggcggagaagaggcaagacccaattcttggccgtggcaggtctcattacaatacagctctaatggaaaatggtatcatacgtgcggcggatcccttattgccaatagctgggttttgaccgctgctcactgcatcagctcctcacgtacgtacagagttgggctcggcagacataacctttatgtggcagagagtggatcactggccgtgtccgtctcaaaaatcgttgtgcacaaggactggaactctaatcagattagtaagggcaatgatatcgcccttcttaagttggcgaatcctgtgtctctcaccgataaaatccagctcgcctgccttcctccagccggaaccatccttcctaacaactacccatgttacgttaccggatggggccgcctccagaccaacggtgctgtgcctgacgttctccaacaggggcgcttactggttgttgattatgccacatgttcaagctcagcctggtggggttcttcagtcaagacgtccatgatctgtgctggtggggatggagtgatctcaagctgtaatggggattcagggggacctctgaactgccaggcctcagatggacggtggcaggtgcacggtattgtctcttttggcagtcgactggggtgcaactactaccacaagccaagcgtgtttacgcgtgtatcgaactatatcgattggattaatagcgtgatcgccaataattag

SEQ ID NO: 12322 - RNA, 1122 nt, synthetic construct
  misc_feature 1..1122: note = source = /note="Description of Artificial Sequence: Synthetic coding sequence"
  source 1..1122: mol_type = other RNA
atgttaccttggctcttggtcttttccgcgctcggcattcaggcttggggggacagcagttggaataagactcaggccaaacaggttagcgaaggacttcagtacctgtttgagaacatttcacaactgacggagaagggactccctacggacgtatccaccacagtatccaggaaagcctggggcgcggaggccgtgggatgcagcattcagctaacaactccagttaatgtgctggtgatacaccacgtgccagggctggaatgtcatgatcagactgtgtgtagccagcgcctgagagagttgcaggcacaccatgttcacaacaacagcggatgcgacgtcgcctacaacttcttggtcggcgatgatggacgggtgtacgagggcgtgggttggaacatacaaggagttcacacccagggatacaataacatcagcctgggcttcgcatttttcgggacgaagaagggtcactctccgagccccgccgcactcagtgccatggaaaacctcatcacttatgcagtgcagaaaggacatttgtctagctcttatgtgcagccactgctcggcaaaggcgagaattgcctagccccaagacagaagacatccctcaaaaaggcgtgcccaggggtcgttccaagatccgtttggggagcacgggagacccactgccctagaatgacgctgcctgccaaatacggaattatcatccacactgctggccgcacatgcaacatctctgatgaatgtaggctgctggtgcgcgatatccagtccttctacattgacaggctaaaaagctgcgacatcggctacaattttctggtggggcaggatggcgctatctatgaaggcgtcgggtggaacgtgcagggatcgagtacacccggatacgacgatattgcgctaggtatcactttcatggggactttcaccgggattcctccaaatgccgccgccctggaagccgcccaggatttaatacagtgcgctatggtgaaaggttaccttaccccaaattatctgctggtcggacattcagatgtagcaaggacactgtctcccggccaagcgctttacaacattatttccacttggccacattttaagcattag

SEQ ID NO: 12323 - RNA, 327 nt, synthetic construct
  misc_feature 1..327: note = source = /note="Description of Artificial Sequence: Synthetic coding sequence"
  source 1..327: mol_type = other RNA
atgcggcagcgattactgcctagcgtgactagtctcctcttagttgccctcctgttcccagggtcctcccaggcaaggcatgttaaccactccgcgacagaggcccttggagaattgagagaaagagcaccaggccagggaaccaacggcttccagctcctgcggcatgctgtgaagcgagacttgcttccacccagaaccccaccttaccaaggggacgtacccccaggcatcagaaatacaatttgtcatatgcagcagggaatttgcagactttttttctgtcactcaggcacgggacagcagcatcgccaaagatgcggctag

SEQ ID NO: 12324 - RNA, 708 nt, synthetic construct
  misc_feature 1..708: note = source = /note="Description of Artificial Sequence: Synthetic coding sequence"
  source 1..708: mol_type = other RNA
atgtcaccacccttgctcaagttgggcgcagtgctttccaccatggcaatgatttcaaattggatgtcgcaaacacttccaagccttgtgggactgaatactactaggctgtctacccccgatacactaacacagatcagtcctaaagaaggttggcaggtttactcctctgctcaagatcccgacggccgctgcatctgtactgttgtcgcccctgagcagaacctgtgtagcagagatgctaaaagtcggcaacttagacagctgctggaaaaagtgcaaaacatgtcgcagtctatcgaggtgcttaatcttcggacacaaagagacttccaatatgtgcttaaaatggaaactcagatgaaagggctgaaagctaagtttagacaaatagaagatgacaggaagactcttatgacaaaacatttccaggagctcaaagagaaaatggacgagttgctgccactgattcccgtgttagagcaatacaaaacagatgccaaactcatcacacagttcaaggaagaaataaggaacctgagcgctgtgctcaccggtatacaggaagaaattggggcctatgattacgaagagctgcatcaacgggtgctgagtttagagacccgcctaagagattgcatgaaaaaactgatcgatctgaagaagaggaaagaggaggaaaaacgacaacagaaaggagaagcctag

SEQ ID NO: 12325 - RNA, 606 nt, synthetic construct
  misc_feature 1..606: note = source = /note="Description of Artificial Sequence: Synthetic coding sequence"
  source 1..606: mol_type = other RNA
atgaatctaaactgccccccctgtgtcaccgggctgagagtatggtccagctgtcgctccaaacccaattctagggcgcgtagctgtaggagttgtaccggagcttctcgaacattaccaagccaccacatgtctcatgttgaatgcccaagcggcatcgtcaatgaagaaaattttaaacagatctattctcaattcttcccacagggtgactcaagtacgtacgccacatttctcttcaatgcattcgataccaatcatgatgggagtgtatcctttgaggacttcgtggccggactgtctgtaatattgagggggactgttgacgataggttgaactgggcctttaatctgtacgacctgaataaggatgggtgtatcacaaaagaagaaatgctcgatatcatgaaatccatctatgatatgatgggtaagtatacctacccggctctccgcgaagaggcaccaagagagcacgtcgagtccttttttcagaaaatggaccggaacaaagatggagttgtcaccatagaggaattcattgagagctgccagaaagatgaaaatataatgagatccatgcagttgtttgacaacgtgatctag

SEQ ID NO: 12326 - RNA, 693 nt, synthetic construct
  misc_feature 1..693: note = source = /note="Description of Artificial Sequence: Synthetic coding sequence"
  source 1..693: mol_type = other RNA
atgcgcttggctggccccctaagaatcgtggttttggtggtgtctgtcggggtgacatggatcgtggtgtcaattctcctcggaggccctgggtcaggatttcctcgaattcaacaactattcacctcccccgaatcatccgtcaccgcagcccccagagccagaaagtacaaatgtggactgccacagccatgcccagaggagcatctggcctttcgtgtggttagcggcgcagcaaatgttataggaccgaagatatgtctcgaggacaaaatgcttatgtcaagtgtgaaggacaacgtgggccgcggacttaacattgccttggtgaatggggtctctggcgaactcattgaggcccgggcattcgacatgtgggccggggacgtcaatgatctgcttaagtttattcgccctcttcacgaagggaccctcgtgttcgtagcttcttatgacgacccggctactaaaatgaatgaggagacccggaaattgttctctgaattaggttcccggaatgctaaagaactggccttcagggactcttgggtatttgtcggcgcaaagggagtgcagaataagtccccctttgagcaacatgttaagaattctaaacacagtaacaagtatgaaggatggccagaagccttggagatggagggctgtatccccaggagatcaacagcgtcatag

SEQ ID NO: 12327 - RNA, 684 nt, synthetic construct
  misc_feature 1..684: note = source = /note="Description of Artificial Sequence: Synthetic coding sequence"
  source 1..684: mol_type = other RNA
atgagagttgccggcgctgctaaactggtggtggctgtcgcggtgtttctccttaccttttatgttattagtcaggtcttcgagattaagatggacgcctcgctcggcaatctgtttgctcgaagcgccctagacacagccgcaagaagtacaaaacccccacgttacaagtgcggaatcagcaaagcatgtccagaaaagcactttgcattcaagatggcgtcaggtgcggccaacgtggtggggcctaaaatctgcttggaggataatgtgttgatgagcggggtcaaaaacaacgtaggcagagggattaatgtggcgctggctaacggcaagactggagaagtgttggacacaaagtacttcgacatgtggggcggggacgttgctccgtttatcgagttcctgaaagcgatccaggacggaacgattgtgctgatgggaacctacgacgacggggccacgaaattgaatgatgaagctaggcgacttatcgcagacctgggcagcactagtattactaacctgggctttagagacaactgggtgttctgcgggggaaaaggaattaagaccaagtcacctttcgaacagcatatcaaaaacaataaggatacaaataaatatgaggggtggccagaagtcgttgaaatggaggggtgtattccgcagaagcaagattag

SEQ ID NO: 12328 - RNA, 1656 nt, synthetic construct
  misc_feature 1..1656: note = source = /note="Description of Artificial Sequence: Synthetic coding sequence"
  source 1..1656: mol_type = other RNA
atggaggatagtgattctgcagccaaacaactggggttagcggaggccgctgccgcaggaggcgaggccgaagaacctgtgctgtcccgtgacgaagatagtgaggaagacgcagactccgaagctgagcgtgagaccccccgcgttaccgcagttgcggtcatggctgccgagcctggacatatggacatgggcgctgaagccctcccaggtcctgatgaagctgctgcagccgccgcttttgctgaagttacaacagtcacagtggcgaatgtgggggccgccgcagacaacgtttttactacttctgtcgctaatgcagcctccatcagcggtcacgtcttgtctgggcgcaccgccctgcaaattggagatagtttgaataccgagaaggcaaccctcatagtcgttcatacagatggatccattgttgaaaccaccggactgaagggtccggcagcccccttgacaccaggacctcagtcaccccccacacccctggccccaggacaggagaaaggcgggaccaaatataattgggacccttcggtttatgattcagaactgcctgtccgatgcagaaacatcagtggaaccctttacaagaatcgcctgggatcaggcggccgcggaagatgtatcaaacagggtgaaaactggtattccccaactgagttcgaggcaatggctgggagagcaagcagtaaggactggaaacgttctatccgttacgccgggaggcctctgcaatgcctgatccaggacggaatacttaatccccacgctgcaagttgcacatgtgccgcctgctgcgacgacatgaccctatccgggccagttagactgtttgtaccttacaagcggaggaagaaagaaaacgaactgccaaccaccccggtcaaaaaggactcacccaaaaacatcactctgctaccagcaacagctgctacgacatttactgtgactccttcaggccagatcacaacctctggggccttgacatttgatcgtgcctcaacagttgaagcaaccgcggtaatcagcgaatctcctgctcagggggacgtgtttgcaggtgccacagtgcaagaggcttctgttcagcctccatgtcgggcttcacatcccgagcctcactaccctggataccaagacagctgccagattgcccccttccctgaagcggccctgcccacttcccatccaaaaatcgtgctaacaagcctacctgccctagcagttccccctcctacaccaaccaaagcggctcccccagccctggtcaacggcctggagcttagcgaaccacgttcttggctttacctcgaggagatggtgaatagcctgttgaatacggctcagcagctgaagactctatttgagcaagctaagcatgcatcaacctatagagaggccgccaccaaccaagccaagattcatgcagacgcagagagaaaagagcagtcatgtgtcaactgtggaagggaagcaatgagcgaatgcaccggatgccacaaagtaaattactgctccaccttttgtcagcgaaaggattggaaggaccaccagcacatctgcggccagtcggctgccgtgaccgttcaggctgatgaagtgcacgtggcagagtccgtgatggagaaggtcaccgtctag

SEQ ID NO: 12329 - RNA, 2022 nt, synthetic construct
  misc_feature 1..2022: note = source = /note="Description of Artificial Sequence: Synthetic coding sequence"
  source 1..2022: mol_type = other RNA
atgaagcccggtgggttctggctgcacctgacgctgctcggcgccagtctgcctgccgccctgggatggatggaccccggaacctcccgtggacctgacgtcggcgttggagagtcccaagccgaagagccaagatctttcgaagtgacgcgaagggagggcctgtctagccacaacgaactgctggcgagctgcgggaaaaagttttgcagccgcgggtctagatgtgtgctttccttggcccccgaagaccgagtgagcgtgaccactgtcactgttggactgagcaccgttttaacatgtgctgtacatggcgacctgagacccccaatcatctggaagcgcaacggcctgaccctgaactttctggatctcgaggatattaacgatttcggagaggatgattctctgtacatcacaaaagtaactaccatccatatgggaaactacacttgtcatgccagcgggcacgagcagctgtttcaaacccatgtgctgcaggtgaacgtgccccctgtgattcgggtgtaccctgagtctcaagcacaagaacccggggttgctgcctcccttaggtgtcacgccgagggaattcctatgcccaggattacctggcttaagaatggagtcgacgtgagtacacagatgagcaagcaactttcactgttggctaacggatccgaactgcacatctcttctgtgaggtatgaggacaccggggcctatacttgtattgctaagaatgaggtcggggtcgacgaggatatctcttccctttttatagaggactctgctcgcaaaacgctggctaacatcctttggcgtgaagaaggattgagtgtcggcaacatgttctatgtcttttctgatgatgggatcatcgtgatccaccctgttgattgcgagatccagagacaccttaagcccacggagaaaatttttatgagttatgaagagatctgcccgcaacgtgaaaagaacgcgacccagccatgtcaatgggtgagtgcagttaacgtaaggaacagatacatttacgtggcacagcccgcactgagtcgcgtgcttgtcgtcgatatccaagctcagaaggtgctgcagtctataggggttgaccccttgcccgctaaactctcatacgacaaatcgcacgatcaagtctgggtgttaagctggggcgacgttcacaaaagccgtccctccctccaggtgattacagaagcatccactggacagagtcagcatctgattcgaaccccatttgcgggagtggatgatttctttatcccccctacaaacctgataattaatcacatccgatttggatttatcttcaataaaagtgatcccgctgtgcataaggtcgatctggagacaatgatgcccctgaagacgatcggccttcatcatcatggatgcgtgccccaggctatggctcacacacacctaggtggttatttcttcatccaatgtagacaagacagccccgcgtccgccgcccgacagcttctcgtggacagcgtgactgattcggtcctcggacctaacggcgatgtgacaggaaccccccatacatctcctgatgggaggtttattgtgagtgcagccgccgactcaccttggctccatgtacaggaaatcacagtgaggggtgaaatccagacattatacgacctgcagatcaactcgggtatttccgacctggcctttcaacgtagtttcaccgaatccaatcaatataacatctacgctgcactccatacagagcctgaccttctcttcttggaactgtccactggcaaggttggaatgctcaagaacttgaaggagcctcctgccggccccgcacagccatgggggggcacacatagaattatgagagactctggactctttggccagtaccttctgactcctgcaagagagagtttattccttattaatggtagacagaacacactgaggtgtgaagtaagtggtataaagggtgggaccacagtggtttgggtcggcgaggtgtag

SEQ ID NO: 12330 - RNA, 2007 nt, synthetic construct
  misc_feature 1..2007: note = source = /note="Description of Artificial Sequence: Synthetic coding sequence"
  source 1..2007: mol_type = other RNA
atggatttggtgctcaagcgctgtctgctgcatttggccgtaatcggcgctctgttggcggtgggagctaccaaagttccaagaaatcaggactggctcggtgtgagcagacaactcaggacaaaagcttggaacaggcagctgtaccctgagtggacagaagctcagaggctggattgctggaggggaggccaggtgagcctgaaagtctctaatgatgggccaacacttattggtgccaacgctagtttttctattgcgttaaattttccaggtagccagaaagttcttcctgacggacaggtgatttgggtgaataacactattatcaatggagatcaggtgtggggtggacagcccgtttatccacaggagacagacgatgcatgcatcttccccgatgggggaccctgtcctagtggcagctggagtcaaaagaggagtttcgtgtatgtttggaagacctgggggcagtattggcaagtgctgggcggccctgtttccggacttagcataggaaccggtagagccatgctgggcacccacacaatggaagtgacagtgtatcacagaagaggctcccggagctacgtccctctggctcacagcagttcagcctttaccattaccgaccaggtccccttctctgtcagtgtctcacagctccgcgcgctggacggaggaaataagcatttcctgagaaaccaaccgctaacctttgctttacagctccacgatccatctggctacctggccgaagcagatctttcctacacttgggattttggtgatagctccggcacgcttatctcacgggccctcgtggtcacccatacttacctcgaacccgggccagtgactgcccaggttgttttgcaagccgctatccctcttacatcctgcggcagttcacctgttccagggactacagacggtcacagacccacagccgaggcacctaacaccacagcaggacaggttccgaccacggaggtcgtcggcactactcccggtcaggccccaaccgcagagccctcagggactacgtcagtgcaggttccaacgaccgaagtgatttcaactgctccagtgcaaatgccaacagccgagtccaccggtatgacaccagaaaaagttcctgtaagtgaggtcatggggactacgttagccgagatgtccacccccgaggccacaggcatgacacccgccgaggtaagtattgtggtgctttcaggaaccaccgctgctcaggttacaaccaccgaatgggtggagacaacagctcgagaactgccgatacccgaacccgagggtcctgacgcttcttccatcatgtccacagagagtattaccggctctctcggtcctctgctggatgggactgccaccctccgcctggtcaaacgccaagtccccctggactgcgtcttatatcgctacggttcttttagcgtgactctggatatcgtgcagggcattgaatctgccgagattctccaagctgtcccctccggcgaaggtgacgccttcgagctaactgtgagttgtcaaggtggcctaccgaaagaagcttgcatggaaattagtagtcctggatgccagccacccgcacagcggctgtgccaacctgtgctcccttctccagcctgccagctggtgcttcatcaaatcctgaaaggcggtagtggaacatattgcttgaatgttagcctggctgacaccaactcattggccgtcgttagcacccagctgattatgcccgtgcccggcattctgttaacgggtcaggaggccggcctagggcaggtacccctgatcgtgggcatccttctcgttctcatggccgtcgtgctggcttcactgatttaccgcaggagactgatgaaacaggacttctccgtgccacaacttccacattctagctctcactggttacggctgcctagaatattttgtagttgcccgattggtgagaactcccctcttctgtctggacagcaggtgtag

SEQ ID NO: 12331 - RNA, 1746 nt, synthetic construct
  misc_feature 1..1746: note = source = /note="Description of Artificial Sequence: Synthetic coding sequence"
  source 1..1746: mol_type = other RNA
atgcagcaggacggacttggagtcggcactcgcaacggttcaggaaaagggagaagcgtccatccctcttggccctggtgtgccccaagaccattgcgatacttcggccgtgatgctcgtgccaggagagcacagaccgccgcgatggctttattggctggtggcctatctagaggactgggctcccaccccgctgcagccggacgagacgcagtggtgttcgtctggcttctgctgtccacatggtgcaccgccccagcccgcgctatccaggtcaccgtgagcaatccttaccacgtcgtgatcctgttccaacctgttactttgccttgcacatatcagatgactagtacacccacgcagcctattgtgatctggaagtacaaatccttctgtagagatcgcattgccgacgcattttcaccagccagcgtggataaccagctcaacgcccagctggccgcggggaatcccggctacaatccttacgttgagtgccaggactccgtgagaaccgttagggtggtagcaaccaaacagggtaacgcagtaaccctgggggattactaccagggtcggagaattacaattaccggcaatgccgatctcaccttcgatcagacagcttggggtgatagtggtgtatactactgctccgtggtctccgcccaggacctccaagggaataacgaagcttatgccgagctgatcgtacttgtctacgcagccggcaaggctgcaaccagcggcgtcccaagcatttacgctccgtcgacctacgctcatctatccccggcgaagaccccccctccccccgcgatgatacctatggggcctgcctataacgggtacccgggcggctaccccggagacgtcgacaggagttcttccgctggcggccagggctcttatgtgcccctcttgagggacacagattcatcggtagctagtgaggtgagatccggttaccgtatacaagcttctcagcaggacgatagcatgcgggtgctgtattacatggagaaggaactcgcaaactttgacccaagtagacctggtcccccttcgggtcgagttgaaagggcaatgagcgaagtcaccagtctgcacgaggacgactggagaagccggccctctcggggcccggctcttacccccatcagagacgaggagtggggaggacattcccccaggtcccctagagggtgggaccaagagcctgccagggaacaggctggcggtggatggagggcccggagaccgagagcaaggagtgtcgatgctctcgatgatctcactcccccaagtacagctgaatctggctcccggagcccaactagcaacggcggcagatcgagggcctatatgccgccacgctctagatcccgggacgacctgtacgaccaggatgactcccgcgactttccccgatcccgagacccccactatgacgatttccggtccagggaacgcccgccagcagacccccgatcacatcatcacagaacacgagatccacgggacaatgggtctaggtcaggcgacctgccctatgacggccgtctacttgaagaggcagttcgcaagaagggatcagaggaacggagacggccccacaaggaggaagaagaggaggcttattacccccctgcccctccaccctatagcgaaacggattctcaggcttctcgcgaacggaggctgaaaaaaaacttagcactgtctagagagtcacttgtggtttag

SEQ ID NO: 12332 - RNA, 1959 nt, synthetic construct
  misc_feature 1..1959: note = source = /note="Description of Artificial Sequence: Synthetic coding sequence"
  source 1..1959: mol_type = other RNA
atgcccccacccctgcctctgctgttactaacagtcctggttgtagctgccgctcgcccaggatgcgaatttgagcggaatccagccggagagtgtcatagacctccagctgccgactctgctacatgcgtggacctacaactgcgcacctgtagcgatgccgcctacaatcatacgacattccctaatttgttgcagcataggtcatgggaggtggtagaagcatcatccgagtacattttgctgtccgtcctccaccagttgctggaaggacagtgcaatcctgatcttagactcctgggatgcgcggtccttgcacctaggtgcgagggaggctgggttagacggccatgtcggcacatttgcgagggactgagggaggtttgccagcccgcattcgacgccattgacatggcctggccatacttcctagattgtcatcggtatttcacaagagaagatgaaggctgttacgacccattggaaaagctgaggggagggttggaggcggatgaagccctaccttccggactcccaccaacatttatccgattttcacatcattcctatgcccagatggtgagggtgttgcgaagaaccgccagccgttgcgcccacgtggctagaacttacagtatcggtcggtcatttgacggtagagaattactggtcatcgaatttagcagccgccccggccaacacgaactgatggagcccgaagtcaaactaatcggaaatatacatggaaatgaggtggctggacgggagatgttaatttacctagcgcagtatctatgttctgagtatctcctggggaaccccagaattcaacgcttactgaatacaacccggatccatcttctcccttctatgaatcccgatgggtacgaggtcgctgcagcagaaggtgcaggatacaatggctggacctctgggcgtcagaacgctcaaaatcttgacttgaatcgtaacttccccgatctcacctctgaatattacagactggctgaaacaagaggcgcccgatctgaccatatccccatccctcaacattactggtgggggaaggtggccccagaaacaaaagcgatcatgaagtggatgcagaccatcccctttgtcctgagtgcatcattacatgggggtgatctcgtagtgtcctatccttttgatttttctaagcatcctcaggaggagaagatgttctctcccactcctgacgagaaaatgttcaaactgttgagtagggcttacgcagacgtccacccaatgatgatggacagatcagagaaccggtgcgggggaaattttcttaagcggggatcaatcataaatggcgcagattggtactcattcacggggggtatgtctgacttcaattacctccacacaaactgctttgagattactgttgagctgggctgcgtaaaattccccccggaagaggccctgtacatactgtggcagcacaataaagaatctctgctaaactttgtagaaaccgtccatcgggggataaagggcgtggtgacggacaaatttggcaagcctgtaaaaaacgcccgcatttccgtaaagggcattcgacatgatattaccacagccccagatggcgattactggaggctcctacctcccggtatccatattgtgatagctcaggcgccagggtatgctaaggtgattaaaaaggtcattattcccgcccgcatgaagcgcgctggaagggtcgactttatattgcagcccttaggaatgggacctaagaacttcattcatggactcaggaggacgggtccacatgacccattgggtggcgcatcatccctgggagaggctaccgagcctgacccattgcgagcgcgacggcagccctctgccgacggctccaagccttggtggtggtcatattttactagcttatccacgcaccgcccacgctggctcctcaagtactag

SEQ ID NO: 12333 - RNA, 279 nt, synthetic construct
  misc_feature 1..279: note = source = /note="Description of Artificial Sequence: Synthetic coding sequence"
  source 1..279: mol_type = other RNA
atgaaattatgtgtaactgtcctttcactccttgtgctagttgccgcattctgttccctggccctctccgctcctatgggaagtgacccccctaccgcatgttgttttagttacacagctcggaaacttcctaggaacttcgtggtggactattacgaaacatcttcactttgtagccagcccgcagtggttgggtttttgggtaggaagggtaaacaagtatgcgctgatcccagtgaatcgtgggtccaggaatatgtttatgatctggagttgtag

SEQ ID NO: 12334 - RNA, 249 nt, synthetic construct
  misc_feature 1..249: note = source = /note="Description of Artificial Sequence: Synthetic coding sequence"
  source 1..249: mol_type = other RNA
atgaggcagcgattactcccttccgttacgagcctgctcctcgtcgcgctcttgttccctggatcatcccaagcccggcacgtgaatcactccgctacagaggccctgggtgagctgcgggagagagctccagggcaaggcacaaatggctttcagctgctcaggcacgccgtaaagagggatcttcttccccccagaacacccccttaccaaggaacaggccaacagcacagacaaaggtgtggttag

SEQ ID NO: 12335 - RNA, 411 nt, synthetic construct
  misc_feature 1..411: note = source = /note="Description of Artificial Sequence: Synthetic coding sequence"
  source 1..411: mol_type = other RNA
atggacaatgtgcaaccgaagatcaaacaccgaccattttgtttttccgtcaagggccatgtgaaaatgttgagacttgccctgaccgtgacatcaatgacgttctttatcatagcgcaggcgcctgaaccctatatcgtgattaccggttttgaggtgactgtaatcctcttcttcatcttattatacgttctgaggctggatcgcctgatgaaatggctcttttggcccttactggacattataaactcactggtgactactgttttcatgctcatcgtgtcagtcctcgccctgattcctgaaactacgacactcacagtgggcgggggcgtcttcgcactggtaactgctgtttgttgtttggcagatggagctcttatctacaggaagttgctattcctcagatag

SEQ ID NO: 12336 - RNA, 1068 nt, synthetic construct
  misc_feature 1..1068: note = source = /note="Description of Artificial Sequence: Synthetic coding sequence"
  source 1..1068: mol_type = other RNA
atgcagctcactacatgtctgcgggaaactctcttcaccggcgccagtcaaaagacatccctgtggtggctgggaatcgcttccttcggagtgccagaaaagctgggttgcgccaatttgcccttaaacagccgacaaaaggaattgtgtaagcgtaagccgtacctgctcccatctattagggaaggggctaggttggggatacaggagtgtgggtcacaatttagacatgagcgatggaattgcatgataacagcagccgctactaccgctccgatgggggccagtcctctgttcggttatgagctctccagcggcactaaggaaactgcgtttatctacgctgttatggccgcagggctggtccactcagtaactcgctcatgctccgcaggtaacatgaccgagtgctcatgcgacacaacactccagaacgggggaagtgccagcgaaggctggcactggggggggtgctctgatgatgtccaatacggcatgtggtttagtaggaaatttctagatttcccaatcggtaatacaactggtaaggagaataaagtactgttagctatgaacttacataataacgaagctggccggcaagccgtggctaaactaatgagcgttgattgccgatgccacggcgtgagcggctcctgcgcagtgaagacctgttggaagaccatgtctagcttcgaaaaaataggacacttgctcaaagataaatatgaaaactctattcaaatttccgataaaactaagcgtaagatgcgaagaagagaaaaagaccagagaaagatcccgatccataaagacgacttgctgtatgtgaacaagtctcctaactactgcgtggaggacaagaaattgggaattccgggtacacaggggcgggaatgtaacaggaccagcgaaggggctgacgggtgtaatcttttgtgttgcggtagagggtataatacgcatgtcgtccggcacgtggaaagatgcgaatgtaaatttatttggtgctgctacgtcagatgtcgcagatgcgagtctatgactgacgtccatacctgtaaatag

SEQ ID NO: 12337 - RNA, 2916 nt, synthetic construct
  misc_feature 1..2916: note = source = /note="Description of Artificial Sequence: Synthetic coding sequence"
  source 1..2916: mol_type = other RNA
atgttgcgtagacccgcacccgcgctcgccccagctgcccggttgttacttgccggcctgctgtgcggtggcggtgtctgggcagccagggtaaataaacacaagccatggctggagccaacctaccacggtattgtcacagaaaatgacaacaccgtactacttgacccccccctgatcgccttggacaaggacgcccccctgagattcgcaggagagatctgcggctttaagatccatggtcagaacgttccctttgacgccgttgtagtggataagtcaacgggagagggtgtaattaggtctaaagagaagttggactgtgaactccagaaagactactcattcactatccaggcctacgactgtggaaagggaccagacggaacaaacgtaaagaaatctcacaaggccaccgttcacatccaggtgaacgacgttaacgaatatgcccccgtgttcaaggagaagtcctataaagcaacggtgattgagggcaaacagtatgattccattctaagagtagaggcggttgacgcagactgtagtcctcagttctctcagatctgctcttacgagattattacccccgacgtccccttcacagtcgataaggacggatacatcaaaaataccgaaaaactcaattacgggaaggagcaccaatacaaacttactgtcacggcctacgactgtggcaaaaaacgcgccacggaggacgtcctggttaaaataagtatcaaacctacatgcacgcctggctggcaaggctggaacaaccggatcgaatacgagccgggaacaggcgcactagcagtattccccaatatacacctggagacctgcgacgaacccgtcgcatcagtgcaggctactgtggaattggagaccagtcacattggcaaaggttgtgacagggatacctactcagagaagtcacttcatcgattgtgcggcgccgccgctggaacagccgagttactgccttctccttcaggtagcctaaattggaccatgggtttgcctacggacaacggacatgattctgaccaggtcttcgaattcaatggaacccaggctgtgcgaatccccgatggcgtggtgtccgtaagccctaaagagccttttactatttccgtctggatgcggcatggcccatttggacgtaaaaaagagacaatcctgtgctcaagcgataagactgatatgaatagacatcactacagtctgtacgtgcacggctgtaggcttatattcttgttcagacaggaccctagcgaggaaaagaagtataggcctgctgaattccattggaaactgaaccaggtttgcgacgaagaatggcatcactacgtgctgaacgtcgagttccccagtgttacattgtacgtggatggaacatcccatgagcccttcagtgtaacagaggactacccactgcacccaagcaagatcgaaacccagctggtggtgggagcttgttggcaggaatttagtggagtggaaaacgataacgagactgagcccgtcacagtggcatcggccgggggagatcttcacatgacgcagttttttagagggaacttggcagggctgaccctgagatccggcaagctcgctgataagaaggtgattgattgtctctacacatgtaaggaaggtctggatcttcaggtgctggaagactccggaagaggagtgcagattcaagcacacccgtcccagcttgtgctgactctcgagggggaggatttgggtgagctcgataaggctatgcagcacattagttatctgaactcccgacagttccccacacctggtatcaggagactaaagatcacttccacaattaaatgcttcaacgaggccacttgtatctccgtgccccctgtggacgggtacgtcatggtgctgcagccagaggagccaaaaatttctctctcgggcgtccaccattttgccagagcagcttctgagtttgagtccagcgaaggcgtttttctgtttcccgaactgaggataattagtaccataacccgggaagtggaaccagaaggtgacggtgctgaagaccctacggtccaagaatccctcgtctcagaggaaattgtacatgatctggacacatgtgaagtgacagtggagggcgaggaactgaatcacgagcaggagagcctggaagtggacatggcccgactccaacagaagggaattgaagtgagcagtagcgaactgggaatgacattcacaggcgtggacacaatggcttcatatgaggaagtgcttcatttgctgagataccggaattggcacgccaggagcctcctggatcggaagttcaagctaatatgtagtgaactgaatggcagatacatcagcaatgagttcaaagtcgaggtcaacgtgattcacactgctaaccccatggagcacgccaaccacatggccgcgcaacctcaattcgtgcatcctgaacacagatcatttgtggatctctccggtcacaatctggccaacccgcacccctttgcagttgtgccttccaccgcaactgtcgtcattgtcgtgtgtgtgtcgtttctggtattcatgataatcttgggcgtctttcgaattcgagctgcacaccgtcggacaatgcgtgaccaggacaccggaaaagagaatgaaatggactgggatgactccgccctgactatcaccgttaatccaatggaaacctatgaggatcaacactcatcagaggaagaggaagaagaagaagaggaggaagaatctgaagacggagaagaggaagatgacatcacatccgccgagtcagagagttcagaagaggaagagggagaacagggcgatcctcagaatgcaacgaggcaacagcaactggagtgggatgatagcaccctaagctattag

SEQ ID NO: 12338 - RNA, 564 nt, synthetic construct
  misc_feature 1..564: note = source = /note="Description of Artificial Sequence: Synthetic coding sequence"
  source 1..564: mol_type = other RNA
atggtcgctgctacagtggccgccgcttggttgctcttgtgggccgccgcttgtgcgcagcaagaacaggatttttacgatttcaaagcagtgaacatccggggaaagttggtgagcctggagaaatacaggggcagcgtgtcattggtggtcaatgtggccagtgaatgtgggttcaccgatcagcattacagagccctgcagcagctacagcgtgatcttggccctcaccattttaatgtcctggcgttcccctgcaatcagttcggacagcaggagcccgacagcaataaggaaattgagtcgtttgcccggaggacctatagcgtaagtttcccaatgtttagcaagattgcggttaccgggaccggagcacacccagcgtttaaatatctcgctcagacctctggtaaggaacccacgtggaatttttggaaatatctggtagccccagacggaaaagtcgtcggtgcatgggaccctacagtgagtgtagaagaagtgcgtccccagattacagccctggtcagaaaactcattctcctcaagagagaggatctctag

SEQ ID NO: 12339 - RNA, 303 nt, synthetic construct
  misc_feature 1..303: note = source = /note="Description of Artificial Sequence: Synthetic coding sequence"
  source 1..303: mol_type = other RNA
atgtggggctttttagtattaaaggcacgttggctggttacaccagttcgcactctcgcaaccgaggccggccagaagccgtcactccgtggactgctagacgtggggaatatacagcaccgcgccgctagagcaaggggattgacacggggagtcattcgggtttccccccaggaacgctcccagcagaaccagtccgcacccaagggaccaactccatccacgcgccctaaaccgaggacattaggcccccaagcacactctctggcgctacaatccgtcgatctgctcttcagaccctag

SEQ ID NO: 12340 - RNA, 2352 nt, synthetic construct
  misc_feature 1..2352: note = source = /note="Description of Artificial Sequence: Synthetic coding sequence"
  source 1..2352: mol_type = other RNA
atgcgctggcagtgcggtactagattcaggggcctccgtcccgccgtggctccatggaccgctttactggccctgggccttccaggatgggtgctggccgtgtcggctactgcagctgcggttgtccctgaacaacacgcaagcgtggccggccagcatccccttgactggctgctgacagaccgaggtccattccacagggcacaggagtacgccgatttcatggagcgctaccgccaagggtttaccacaaggtatagaatttatcgcgagttcgctaggtggaaagttaataatctggcattggagcggaaagactttttcagcttacctttacctctagcacccgagttcatccgcaacataagactgctcggccgtagacccaatttacagcaggttacagaaaatttgatcaagaaatacggtacacacttcctattaagtgctacactgggaggcgaggaaagcctaacaatcttcgtggataaacaaaagctcggtcggaagacagagaccactgggggcgcaagtatcatcggaggcagcggcaacagcacagccgtgtcacttgaaacactgcaccagctcgccgcgagctatttcatagatcgagaaagcaccttgcgcagactgcaccatattcagatcgccacaggggccattaaagtgaccgagaccaggactggccctttaggatgcagcaattatgataacctagacagcgtgtctagcgtgctagtccaatctccagagaataaagtgcagctgctcgggctgcaggtgttgttaccagagtacttaagagaacgctttgttgcagctgctttatcctatatcacgtgcagctctgaaggggaactggtctgtaaggagaacgactgctggtgtaagtgctcaccgactttccctgaatgcaactgccccgatgcagatatacaggccatggaagacagcttgctgcaaatccaggatagctgggcaacccataaccgtcaatttgaggagagcgaggaattccaagcattgctgaagaggctacctgacgacaggttcctgaactctactgccatctctcagttctgggccatggatacatctctccaacatcgctaccagcaactgggagctgggctcaaagtgttattcaaaaaaactcaccgcattttgaggcgactgttcaacttgtgtaaacgctgccacaggcaaccccgttttaggcttccaaaggaacggagtctctcttattggtggaaccgcattcaatcacttttgtattgtggcgaaagcaccttccctggcacctttctggagcagtcccattcatgtacatgcccatatgatcagtcctcttgtcaggggccaatcccctgcgctttgggagagggacccgcttgcgcgcactgcgccccggacaattcaacaagatgtggatcttgtaaccccggatatgtactcgcccagggactgtgtcgaccagaggtcgccgagtcactggagaatttcctcggacttgagacagacctacaagacctagaattaaagtatctgctgcagaagcaagactctcgcatagaggttcattcaatctttattagcaatgacatgcgcctgggtagttggttcgacccctcctggcggaagcggatgcttttgaccctgaaatctaacaagtataagcccggcctggtccacgtgatgctcgcccttagccttcagatctgtctaactaagaatagcaccttggagcccgtcatggcgatctacgtgaaccccttcggcgggtctcattctgagtcctggtttatgccggtgaacgaaggatcgttccccgattgggagagaaccaacgtcgatgccgcagctcaatgtcaaaattggactatcaccctaggcaacagatggaagacctttttcgagacggtccacgtgtacctgaggagccgtattaagagcctggatgatagcagcaatgagaccatttactacgaaccactcgagatgaccgacccatccaaaaacctcggctacatgaagatcaatacgctacaggtgtttggctacagtctgcccttcgacccagatgctatccgagatctaatattgcagcttgattatccctacacccagggttcacaggactccgcactgctgcagctgatcgagttacgagacagggtgaatcagctttccccccccgggaaggtccggctggacttgttcagctgtctcctgcgtcatcgattgaagctggcaaacaacgaggtggggcgtatccagtcttcacttcgtgcctttaacagtaagctacctaatccagtcgaatatgaaaccggcaagctctgctcctag

SEQ ID NO: 12341 - RNA, 2016 nt, synthetic construct
  misc_feature 1..2016: note = source = /note="Description of Artificial Sequence: Synthetic coding sequence"
  source 1..2016: mol_type = other RNA
atggctcagctgttcctgcccttgctcgccgcgctggtgctcgcacaggcaccagcagcactcgccgatgtactggaaggagattcttccgaggaccgtgcattccgagtgcgcattgcaggggacgcaccgctgcagggcgtcctcggcggcgcactgactataccttgccacgttcactatttgcgccccccgccaagccgaagggctgtgctgggttccccacgagtgaaatggactttcttaagccgcgggcgggaagcggaggtcttggtggcacggggagttcgagtgaaagttaatgaagcctatcgctttagagtggcgttgcctgcataccctgcgtccctgactgacgtctctctggccctttcagaactgcgacctaatgacagtggcatctaccgttgcgaagtccagcacggtatcgatgactcttctgacgctgttgaagtgaaggttaaaggagtggtattcttgtatagagagggatcagctcggtacgcattctccttttctggggctcaggaggcatgcgccaggataggagcccatatcgccactccagaacagctgtacgccgcttatctgggtggatacgagcagtgcgacgctgggtggctatctgaccagactgtccggtacccgatccaaacccccagggaagcatgttacggtgacatggacggatttcccggggtgcgcaactacggagtagtggatccagacgacctttacgacgtgtactgttatgccgaggacctaaatggtgagttgtttctgggggacccgccagaaaagctgaccctggaggaggcacgcgcctattgccaggagagaggagctgaaatcgcaaccacgggacagctgtacgccgcctgggacggcgggctggatcattgcagccctggctggctggccgatgggtctgttagataccccatcgtcactccatcacagaggtgtgggggaggtcttcccggagtgaaaaccctcttcctgttcccaaatcaaacaggcttccccaacaaacactcaagatttaacgtgtactgttttcgtgactcagcgcagccttcagccatccccgaagcaagcaaccccgctagtaacccagcaagcgatggactggaagccatcgtgaccgtgacggagaccctggaggagctccagctgccccaggaagctaccgagtcagagagtcgtggcgcgatttactctatccctattatggaagacggaggaggtggaagctctacacccgaagaccccgccgaggccccacgtaccctccttgaatttgagacccagtcaatggttccccctacgggcttctctgaggaagaaggcaaagctctcgaggaagaggaaaaatatgaagacgaagaggagaaagaggaagaagaggaagaggaggaagtcgaagacgaggccttatgggcctggcctagtgaactttcctcaccgggacccgaagcgagcctacctacagaacccgcagcgcaggaggaatctctgtctcaagcacccgcaagggctgtgttacaacctggtgcctcacccctcccagacggagaaagcgaggcctctagacctccaagggtgcacggccccccaacagaaacactgccaaccccgagagagagaaatttggcctccccatctcctagtactctcgtagaagccagggaagtcggcgaggctacaggtgggccagagctctccggagtcccgagaggcgaaagtgaagagaccggaagctctgagggagccccgtcactcctgcccgcaaccagggccccagaaggaacgagagaactggaagcccctagcgaggacaactccggccgtaccgcccctgccggcacctccgtgcaggctcagcccgtcctgcctacagattcagcctccaggggaggggtggccgtcgtgcccgctagcgggaattctgcccaaggttctaccgccctgtcaatattattactattttttcctttacagctctgggttacctag

SEQ ID NO: 12342 - RNA, 375 nt, synthetic construct
  misc_feature 1..375: note = source = /note="Description of Artificial Sequence: Synthetic coding sequence"
  source 1..375: mol_type = other RNA
atgtataaattggcctcctgttgcctgctgtttatcggatttctcaacccccttctctctctgcccctcttagactctcgagaaatttctttccaactttctgccccacacgaagatgccaggctgactcctgaggagcttgagcgtgcgagtcttttgcaaattctgcccgaaatgttaggcgctgaaaggggcgacatcctgcgcaaagctgacagctccacaaatattttcaaccccagagggaatctacggaaatttcaggacttctctggccaggacccaaacattctcctgtctcatcttctggcaagaatctggaaaccttataagaagcgcgagacccccgactgcttttggaaatactgcgtgtag

SEQ ID NO: 12343 - RNA, 1326 nt, synthetic construct
  misc_feature 1..1326: note = source = /note="Description of Artificial Sequence: Synthetic coding sequence"
  source 1..1326: mol_type = other RNA
atggagttcgagttcgacagactgagggcgttccaggccatgcaggtccattgcaataatatgcatacattgggcgcccggttacctggaggagtggagtgtcgattcagacgcgggcctgcaatggcatgggaaggagagccaatgagacataacttaggtggtaaccttggcgacccgagagctagggccgtttcagttcctctgggcgggagagttgccagattccttcagtgtcgctttctcttcgccggcccttggttgctttttagcgagattagctttatcagtgatgtcgtgaataactctagcccagctcttggagggacattccccccggccccctggtggcctcctggtcctcccccgacaaatttctcttcgttggagctcgagcctagaggacagcaaccagtcgcaaaggccgaaggatctccaaccgcaatcctcattggctgtcttgtcgccattatcctgctgttacttctaattatagcgttgatgctatggcgtctgcattggcgcagactcttgtctaaagtactcgagagccacccacgaaccagatcacccggcctcgtaggcataagaccaactccattgcccgtgagccccatggcacttcgatgttgtagtcccatccagcctacggctagtttctggccactgactcctgttcctctagaagcccgggcacccccacatcctcccggacctaacccacctactccacgaggagtgaccggcggtaatacctacgcagtgcctgcccttccccctggagccgtgggggacggaccacctagggtggacttcccacgttctagactgaggtttaaggagaaattgggagagggccagtttggtgaggtacacctatgcgaggtcgattctcctcaggacctggtgagcctggattttcctttgaacgtgagaaaaggtcatccactgttggttgccgtgaaaattctacgcccagacgctactaaaaacgcccggaacgatttcctgaaggaggtgaaaattatgtcccggctcaaagaccccaacatcatcagattactgggagtatgcgttcaggacgacccactgtgcatgattaccgattatatggagaacggagaccttaaccagtttctaagtgcacaccaactcgaggataaggctgctgagggcgctccaggtgatggacaggcggcacagggccctactatttcttaccctatgctgctacatgtggcggctcagatcgcgagcgggatgcgctatctggccacgctaaactttgtgcatttctggggcgagcgccaccgcttcctacactag

SEQ ID NO: 12344 - RNA, 1950 nt, synthetic construct
  misc_feature 1..1950: note = source = /note="Description of Artificial Sequence: Synthetic coding sequence"
  source 1..1950: mol_type = other RNA
atgcagcaggacggactcggagttggcacgcggaatgggtccggtaagggtagaagtgtgcatccttcatggccttggtgtgcacctagacctctcagatacttcggccgcgacgccagggccaggcgcgctcagactgcggcaatggccctgctggccggcggactctcgcgcggtctaggatctcatccagccgctgctggacgagatgccgtagttttcgtctggctccttcttagcacctggtgcactgcccctgccagagcaattcaagttaccgtctcaaacccctatcatgtagtgattctcttccagccagtcacactaccatgtacataccagatgaccagtactcccacccaacctatcgtgatatggaaatataaatccttctgcagggataggatcgccgacgccttctctcctgcgtccgtggataaccagcttaacgcacaactggccgcaggcaatcctgggtataatccatacgtagaatgtcaggacagtgttcggacagttcgagtagtcgccacaaagcaaggcaacgctgtgaccctgggtgattattaccaagggcggagaatcacaatcacaggaaacgctgatctaacctttgaccaaaccgcctggggcgattcaggtgtttattattgtagtgtggtcagtgcccaggatcttcaggggaacaatgaggcctatgctgaattgattgtccttggccgaacatctggcgtcgccgaacttctcccaggattccaagccggccccattgaggattggttattcgtggtcgtagtctgcttggctgcctttctgattttcctcttattgggcatttgctggtgccagtgctgcccacacacgtgttgctgctatgttcggtgcccttgttgtcccgataaatgctgctgccccgaggccctctacgcagcggggaaagccgcgacctcgggagttccaagcatttacgctccgtccacttacgcccacctctctcctgcaaagacgcccccccccccggctatgatccccatggggccagcctacaacgggtatccaggcggctatcccggggacgtagatcggtcaagtagcgccggaggacaaggcagttatgtccccttactacgagacactgacagctccgtggcaagcgaagtgcggtccggctatagaatacaggctagccagcaagatgattccatgagagtgctgtactatatggaaaaagaattggctaatttcgacccttctagacccgggccccctagtgggcgagtggagcgggcaatgtctgaggtgacgagcctccacgaggacgattggaggagtcggccatcacggggcccagcactgacaccaatccgtgacgaggaatggggaggccatagcccccgaagccctcgtggttgggatcaagaaccggcaagagagcaggccggagggggatggagagctcgcagaccccgcgctaggagtgtggatgctctcgatgacctgacgcccccttctacagctgaaagcggaagccggtctcccaccagtaatggggggcgaagcagggcctacatgcctcctcggtccaggtctcgggatgatttgtatgaccaggacgactcacgggacttccctagatctagggatccccattacgacgatttccgctctcgggaaaggccaccagccgaccccagaagtcaccatcaccgtaccagggatcccagagacaacgggtcccgctccggcgatctcccctatgatggtcgcctgctagaggaggcggtcaggaagaaggggtccgaggagcgaagaagaccacataaagaagaagaggaagaggcctattacccccctgcaccccctccttatagcgaaaccgatagtcaggcttcccgtgaacgaagactgaaaaagaatctggccctgtcacgcgaaagcctcgtggtctag

SEQ ID NO: 12345 - RNA, 402 nt, synthetic construct
  misc_feature 1..402: note = source = /note="Description of Artificial Sequence: Synthetic coding sequence"
  source 1..402: mol_type = other RNA
atgagcgagagagtcgaacgtaactggtctaccggtggttggctgctcgctctctgcctggcctggctttggacacatcttaccctggcagcactccagcccccgacagcgactgtgttagtgcagcaaggaacatgtgaggtcattgctgcccatcggtgttgcaataggaatcgaattgaggaaagaagtcaaacagtgaagtgctcatgtttttccggtcaggtggccggaaccaccagagccaagcccagttgcgtggatgcttccattgttctgcagagatggtggtgccagatggagccttgcctccctggtgaagagtgtaaggttcttccggatctcagcggctggtcctgttcgagtgggcataaagtaaagacaacaaaggtgactcgttag

SEQ ID NO: 12346 - RNA, 699 nt, synthetic construct
  misc_feature 1..699: note = source = /note="Description of Artificial Sequence: Synthetic coding sequence"
  source 1..699: mol_type = other RNA
atggtagccgcaaacactcgcgcacccgaagacactcgagcccctgcaggccccaaaccatcctcctgtgaatgggcagtgtgctgggcaccagcacgttgtcgcatttctgccacagcctgtggtaactcgtgggaccgccctgccggccgcacccagttactgtggacgcctgccgctccgactgctatggctgaagttggcccaggacatacccccgcacatcctagtcagggagcagtccccccctcacgagccgcggccgaaccccacctcaaaccaagccccagtgagcttcagactgcaggccccgccgctactataccggcacggctgtgcacaaggaaacccaggctcgtgtatactcaatgttggtacgtcaaggagccaaagcaccctgagattgtcacaccgtggggcaccgctgctaggcattcgtggcggcaacaccaaatgttgtccgcatcagaacgaagatgtttaccacgggatgttgagcagaagttaggacctgagcacaccggaccttgcctcgatgaacagggccgagaagcagaactggcgcgcagcggtccttccgcagcaggcccagtccgcctgaaaccaggtctggtgccaggactcttcctattatcttgtaccacatccccaagcacgtgcctcccggtgggccaagaaggcgaaaggggtatgctgtag

SEQ ID NO: 12347 - RNA, 711 nt, synthetic construct
  misc_feature 1..711: note = source = /note="Description of Artificial Sequence: Synthetic coding sequence"
  source 1..711: mol_type = other RNA
atgtgcgtaacctaccataatggaacaggctactgcaagtgtcccgagggatttcttggcgaatattgtcagcaccgtgatccttgtgaaaaaaatagatgtcagaatggcgggacatgtgttgcccaggctatgctgggaaaggcaacttgtagatgtgcctcaggcttcacaggagaagactgccaatatagtacctcacatccatgttttgtgagtaggccatgcctgaacggaggcacgtgccacatgctttcacgcgatacctacgagtgcacctgccaagttggtttcacaggcaaggaatgccagtggactgacgcttgtctgagccatccctgtgcaaatggttccacgtgtaccaccgtggctaatcagtttagctgcaaatgcctaacaggcttcacgggccagaagtgcgagactgatgtaaatgaatgtgatatccccggacactgtcagcatggggggacctgcttgaatctgcccggttcttaccagtgtcagtgcctacagggctttaccggccagtattgcgattccctgtacgtgccatgcgctcccagcccttgcgtcaacggaggcacctgccgccagaccggtgattttaccttcgagtgtaactgcctgcccgagactgtcagaagagggaccgagctctgggaacgagatagagaggtgtggaacggcaaggagcacgacgaaaactag

SEQ ID NO: 12348 - RNA, 204 nt, synthetic construct
  misc_feature 1..204: note = source = /note="Description of Artificial Sequence: Synthetic coding sequence"
  source 1..204: mol_type = other RNA
atggataacgtgcagcccaagatcaagcatagacctttctgcttctctgtcaagggacatgtgaaaatgcttcgactagtgttcgccttagttaccgcagtgtgttgtcttgcagacggcgccctcatctatcgtaaactactcttcaacccaagcggtccgtaccaaaaaaagcccgtgcatgaaaagaaagaagtgctctag

SEQ ID NO: 12349 - RNA, 75 nt, synthetic construct
  misc_feature 1..75: note = source = /note="Description of Artificial Sequence: Synthetic coding sequence"
  source 1..75: mol_type = other RNA
atgctcgttgatggaccctccgaaaggcccgcgctctgtttcctactcctcgccgtagcaatgtctttcttctag

SEQ ID NO: 12350 - RNA, 3345 nt, synthetic construct
  misc_feature 1..3345: note = source = /note="Description of Artificial Sequence: Synthetic coding sequence"
  source 1..3345: mol_type = other RNA
atgctcgcctcctcctctcggatacgtgccgcttggactcgagctctgctgctccctctcttactggctggacctgtggggtgcctctctagacaggagctgtttccctttgggcccggtcagggcgatttggaacttgaagatggggacgattttgtttcacccgccctcgagctcagcggagccctgcgcttttatgatcggagcgatatagatgctgtctatgtgaccaccaacggcatcatagcgacctctgaaccgcccgcaaaagaaagccatcccggcctctttcctccaacatttggtgccgtagccccattcttggcagacctcgatactacagacggcctggggaaggtttattaccgtgaagatctctcaccgagtatcacgcagagagctgctgaatgcgttcatcggggcttcccagaaattagtttccagccatcctcggccgtcgtggtgacatgggaaagtgtggcaccatatcagggccctagccgtgaccccgatcagaagggaaaacgcaacacttttcaagccgtacttgcctccagcgattcaagctcttacgctattttcctctatccagaagatggactgcagtttcatacaactttcagcaaaaaagagaacaatcaggtccctgcagtggtggccttctcacaaggatccgtcgggtttctctggaagagtaatggggcctacaatattttcgctaatgaccgcgagagcgttgagaatctagccaagtcatcaaacagcggacagcagggagtgtgggtttttgagattggaagcccagcaacaactaacggggtcgtaccagcagacgtgatcctgggaaccgaagatggcgccgagtacgacgacgaagacgaagactatgatctggccaccacccggcttgggcttgaggacgttggaacgaccccttttagctacaaggcccttcgacgtggtggcgccgatacgtactctgttccaagtgtcctctctccacggagggccgccaccgaaaggcccctcggcccgcctacagaacggacgcgaagtttccaactcgccgtcgaaacgttccaccaacagcacccccaggtgattgatgtagatgaagtggaggaaactggagtcgtcttttcttataacaccgatagcagacaaacctgcgcgaacaacaggcaccagtgtagtgtgcacgctgagtgtcgggattacgcaacagggttttgctgctcctgtgtcgccggttacaccggcaatggccgccaatgtgtggctgaagggagcccacagagagtcaacggtaaggtgaaaggccggatatttgtgggatcgtctcaggtgcccatcgtgtttgaaaatactgatctgcacagctacgttgtcatgaatcacggccggagctacaccgcgatttcaactatacccgagaccgttggctattctctgctacctctggctcctgtaggtggaatcataggctggatgttcgcagtcgagcaagatgggtttaagaacggcttttccatcacgggtggcgagttcacacgacaggccgaggtgactttcgtcggacaccctggaaatctggttattaagcaacggtttagtggcattgacgagcacggtcatttaaccattgacaccgagttagagggacgcgtgccacagattccttttggtagctcagttcatatcgaaccctataccgagctttaccactatagcacctcagtgattaccagctcctctactagggagtacaccgtgacggaacctgagcgggacggcgcctctccatcccgtatttatacctatcagtggcgtcagaccataacattccaagagtgcgtgcacgacgacagcaggcccgctttgccttccacacagcagctatccgtcgattctgtctttgtgctgtacaaccaggaagaaaaaatccttaggtatgccttgagtaattctattggaccggtgagggaagggagtccagatgccctgcagaatccctgctacatcggtacacatgggtgtgacacaaacgcagcttgtcgtccagggccgagaacgcaatttacatgcgagtgttctatcggctttaggggagacggacgcacatgctacgaggttgaaaagactagatgccagcatgagagggaacatatactgggcgccgccggagcgactgacccccagagacctatcccacccggactttttgtacccgaatgtgatgcgcatggacactacgccccgacacagtgtcatggttctaccgggtattgctggtgtgtcgaccgggacggccgggaagtggaaggtaccaggactcggccaggtatgactcctccctgtctgagcacagtggcaccccccatccatcaaggccctgcagtcccaacagctgtgattccccttccccctggcacccacttactttttgcccagaccgggaagattgaacggttacctcttgaggggaacacaatgagaaaaaccgaagccaaggccttcctacacgtgcctgcgaaagtaataattggcttggcatttgactgtgtggacaaaatggtgtattggaccgatattaccgagccaagcattggaagagcctcattacacggcggtgaacccaccactattattcggcaggatctcggaagtccggagggcatcgccgtggaccacctgggccggaacattttctggaccgactccaatttggatcgtattgaggttgccaaactggacggcacccaacgacgggtgctattcgaaaccgacttagtcaacccgagagggatagtgacagactccgtgcggggcaacttatactggacggattggaacagagataatcccaaaatcgagacttcctatatggatggtaccaatcggagaatcctcgttcaagacgatctgggccttcccaatggtctgacattcgatgccttctcatcacagctttgttgggtcgacgccggtaccaatcgcgccgagtgtctaaatccttcccagccctcccgtaggaaggcgctggagggactccagtatcccttcgcagttacaagttatggaaagaacctgtacttcacggattggaaaatgaattccgtagtggcactagatctagcgatatccaaagaaaccgacgcatttcagccacacaaacagacccggctgtatggcatcacaacagctctatctcaatgtcctcagggacataattattgctcagtcaacaacggaggctgtacccacctgtgtcttgcgacccccggatcccgtacttgtaggtgtcccgacaatactcttggagtggactgcatcgagcaaaagtag

SEQ ID NO: 12351 - RNA, 2172 nt, synthetic construct
  misc_feature 1..2172: note = source = /note="Description of Artificial Sequence: Synthetic coding sequence"
  source 1..2172: mol_type = other RNA
atgggctcccgctgtgctctggcgcttgctgtcctctcagccctgctctgtcaagtgtggtcctcaggtgtgtttgaattgaagctgcaggagttcgttaataaaaaggggctcctcggcaatcgaaattgctgtagaggcggggcagggccccctccatgtgcctgcagaacttttttccgagtttgcctcaagcactatcaggcctctgtctccccagaacctccttgtacctacggaagcgccgttacaccagtgctgggcgtggactcattcagcctgcctgatggcgggggagccgattcagctttctctaatcccatccggtttccctttggcttcacatggcccggcactttcagtctgatcatagaggcacttcataccgactctcccgatgatctggcaaccgagaaccctgagagactgatttctagattggccacccagaggcaccttaccgttggcgaggaatggagccaagatctacacagcagtggcagaactgatctaaaatattcataccggttcgtgtgcgatgaacactattatggagagggttgctccgtgttctgtcgccctagggacgacgcatttggccacttcacctgtggcgagaggggcgagaaggtgtgtaaccccggctggaaaggaccatactgtaccgagcctatctgcctcccaggatgtgatgagcagcacggtttctgtgacaagccgggggagtgtaagtgccgggttgggtggcagggcagatactgtgatgagtgtatcaggtatccaggttgcctccatgggacatgtcagcaaccatggcagtgcaactgtcaggagggctgggggggcctgttctgcaaccaggacctgaattactgtacacatcacaaaccatgcaaaaatggagccacatgtacaaacacgggccagggaagctatacctgttcatgtcgacccggctatactggcgccacctgcgagttgggcatcgacgagtgtgatccgtcgccttgtaaaaacggagggagttgtaccgacctagaaaacagctattcatgcacctgccctcccggattttatgggaaaatttgtgaactgtccgccatgacttgtgctgatggtccgtgttttaacggagggcggtgttctgattctccagatggcggttattcatgtaggtgcccggtgggctattccggattcaactgtgaaaagaagattgattattgtagttcatccccatgttccaacggagcaaagtgcgtggatctgggcgacgcctatctttgccgatgccaggccggattctccggacgacattgtgacgataacgtcgatgactgtgcctcgagtccctgcgccaatggcggaacttgtagggatggggtgaatgacttctcgtgtacttgtcccccaggttataccggaagaaactgcagcgctcctgtttctcgttgtgagcacgctccctgccacaacggtgccacttgtcacgagcggggccaccgttatgtgtgcgaatgtgctcgcggctacggagggccaaattgtcagtttctgctgcctgagctgccccccggacctgccgtggtcgacctcacagagaagctcgaaggacaaggcggcccatttccgtgggtggcagtctgtgctggcgtgatccttgtcttgatgctcctgctcggctgtgccgctgtcgtcgtctgtgttaggcttcgactgcagaaacaccgtccacccgcagatccttgcagaggcgaaaccgagacaatgaataacttggccaactgccagcgggaaaaggatatatctgtttccatcataggcgcgacgcagataaaaaataccaacaaaaaggcagactttcatggcgaccacagcgccgacaaaaacgggtttaaagcaaggtatccagctgtggactataatcttgtgcaggacttgaaaggtgacgataccgctgtccgcgatgcacactccaagcgagatactaagtgccagccgcagggatcctcaggtgaagaaaagggcacgcctaccacgctgcgggggggtgaggcatccgaaaggaaaaggcccgactccggttgctctacaagcaaagacaccaagtaccaatcggtgtacgtcatcagtgaagaaaaagacgagtgcgtgatagctacagaagtgtag

SEQ ID NO: 12352 - RNA, 981 nt, synthetic construct
  misc_feature 1..981: note = source = /note="Description of Artificial Sequence: Synthetic coding sequence"
  source 1..981: mol_type = other RNA
atggccgcccccgcttctgttatgggccctcttggccccagtgcgttgggcctgctgctgttattacttgtggtagctcccccacgcgttgccgcattagtccatagacaacccgaaaaccaggggatctcgctgacgggctccgtcgcatgcggaagaccctccatggaaggcaagattcttggcggcgttcccgcccctgaaaggaagtggccctggcaggtatcggtccattatgccggactgcacgtctgtggtggcagcatattaaacgagtattgggttctctccgccgctcattgttttcaccgtgataaaaacattaaaatttacgacatgtacgtgggcttagtcaatctacgagtggcaggtaaccatacccagtggtacgaggttaacagagtcatcctgcatccgacatacgaaatgtatcacccgatcggtggagacgtggccctcgtgcagctcaaaaccaggatcgtgtttagtgagtctgtgctgcccgtgtgtctcgctactccagaagtcaatctgacctccgcgaactgctgggcaactggctggggacttgtctccaagcagggggagacaagcgacgaactgcaggagatgcagttgccactgatccttgaaccttggtgccacttactgtacggccacatgtcctacattatgcccgatatgctgtgcgcaggggacatcctgaacgccaaaactgtgtgtgagggagactcaggcggaccgctggtctgtgagtttaatagaagctggttacagatcgggatcgtcagctggggcagaggctgtagtaatcccctttatccaggcgtgtacgcatcggtatcatacttttccaagtggatttgcgataacattgagatcacacccacccccgctcagccagcacctgccttatctcctgcccttggccccactctttctgtcctgatggccatgcttgcaggatggagcgtgctctag

SEQ ID NO: 12353 - RNA, 1596 nt, synthetic construct
  misc_feature 1..1596: note = source = /note="Description of Artificial Sequence: Synthetic coding sequence"
  source 1..1596: mol_type = other RNA
atgtctctggcagcctattgcgtgatttgctgcaggcgaatcggcacctctacatcaccaccaaagtccgggactcactggcgggatattcgtaacatcatcaaatttacaggatcgctgattctgggcggaagcttattcttgacgtatgaagtgcttgctttaaagaaggccgttacactggacactcaagtcgtggaaagagaaaagatgaagtcctatatttatgtccacaccgtgagccttgataaaggcgaaaatcacggaatcgcctggcaggcaaggaaagaactccataaagccgtgagaaaagtgctcgcaacaagtgccaaaattttgcggaaccccttcgcagatccattttctacagtggacatcgaggaccatgagtgtgctgtgtggctgctcctccgcaaatccaagagcgacgacaagacaacaaggcttgaggccgttcgggagatgtcagaaacacatcactggcacgattatcaataccggatcatcgcgcaggcatgcgaccccaaaactctgattggcttggcgcgaagcgaagagtctgatttacgatttttcctattacctccgcctctgccatcattaaaagaggattcatccaccgaagaagagctccgccagctcttagcgtccctaccgcagacagaactggatgagtgtattcaatactttacctctcttgccctgtctgagtctagtcagagtttagcagcacagaaaggtggactttggtgcttcggcgggaatgggcttccatatgcagagtcttttggcgaggtaccatccgctaccgtagagatgttctgcctggaggctatagtgaagcatagcgaaatctccacccattgcgacaagatagaggctaacggcgggttgcagttgcttcaacggctctatcgattgcataaagattgccctaaggttcaacgaaatatcatgcgagtgattggaaatatggccctgaatgagcaccttcactcctctatcgtgcgatcaggatgggtttcaatcatggccgaggctatgaagagcccccacatcatggaatcctcccatgctgctcggattctcgcaaatctcgatcgagagacagtacaggagaaataccaggatggagtatacgttttgcacccccagtacaggaccagccaacctattaaggccgatgtgttgtttatccacggcctgatgggagcagcttttaagacctggcgccaacaagattctgagcaggccgtaatcgaaaagcccatggaagacgaagacagatacacaacttgttggccgaaaacgtggctcgcaaaagactgccctgctctgcgcattatctcagttgagtacgataccagcttatctgactggcgggcaaggtgtcctatggaacgaagatccttgctgagcatcagctctggaatcgtcgaaggattagagtctcctctacatagtgaggccacgaattttttaggatcttccgaacttcttgtgctcggcataggccagtggtttggctatcacattgcctgggaagtgtttctgagcaaacggtgctgctggaagcccctacgttctcagaagtag

SEQ ID NO: 12354 - RNA, 1596 nt, synthetic construct
  misc_feature 1..1596: note = source = /note="Description of Artificial Sequence: Synthetic coding sequence"
  source 1..1596: mol_type = other RNA
atgtccctggccgcctactgtgtcatctgctgtcgcagaataggtacttccacctctccaccaaaatctggcacccactggcgtgatattcgcaacattatcaagttcaccggctcactgattcttggcggaagccttttcttaacttacgaagtcctggccttaaaaaaagctgtaacactagacactcaggtagtagaaagggagaaaatgaagagttatatctacgttcacaccgtgtcactggacaagggagagaatcacggaattgcatggcaggccagaaaggagctgcacaaagcagtgcggaaggtcctggcaactagcgctaagatccttaggaacccatttgccgacccgttttcaactgtggatatcgaagaccacgagtgtgccgtctggctgctgttgcggaaatccaaatcagacgacaaaacaacgcgactcgaggctgtaagggagatgtctgagactcaccattggcacgattatcagtatcgaattattgcacaggcttgcgaccccaagacacttattgggcttgcacgttccgaggagtccgatctgagattttttctcctcccccctccgttacctagtctcaaagaggatagctccacagaagaggaactgagacagctcctggcaagcctgccacagacagagctggacgaatgcattcaatacttcacgtcattagctctgtccgaatcttctcagtctcttgctgcgcagaagggaggactgtggtgcttcggcgggaatgggctcccttacgccgaaagctttggtgaggttccaagcgcaaccgtggagatgttctgtctcgaagcgattgtgaaacattcagagatatcaacgcattgcgacaaaatcgaggcaaacggcggtctgcaactgctccagcgcctgtaccggttacacaaggattgtcctaaagttcagaggaacattatgcgcgttattgggaatatggccctgaacgagcatctgcattcttcaatagtgcgctcaggttgggttagtattatggcagaggcaatgaagtctccccatataatggaatccagtcacgctgcccgcatactcgccaatctcgatagggaaacggtccaggagaaatatcaagatggggtctacgtccttcatccccagtaccgaactagccagccaatcaaagccgacgtcttatttattcatggcctgatgggtgccgcattcaagacctggcgccagcaggattctgagcaggctgttatcgagaagcctatggaagatgaagatcgatacacaacatgctggcctaagacatggctggctaaggactgcccagcccttagaattattagtgttgaatacgatactagcctatctgactggcgtgcaagatgtccaatggagcggcggagtttgctgagcatttcaagcgggatcgtggagggtttagaatcccccctgcattccgaggctaccaactttcttggctcctccgagcttcttgtgcttgggatcggtcagtggtttgggtaccatattgcttgggaagtatttttgtctaaacgctgttgttggaagcctttacgcagccagaaatag

SEQ ID NO: 12355 - RNA, 1965 nt, synthetic construct
  misc_feature 1..1965: note = source = /note="Description of Artificial Sequence: Synthetic coding sequence"
  source 1..1965: mol_type = other RNA
atgtctctggccgcttactgcgttatctgctgcaggaggatcgggacctctacatctcccccaaaatccggcactcactggcgggatatacgcaatattattaaattcaccgggtctcttattctgggaggttctctgttcctcacttacgaggtgttggccctgaaaaaagctgttactcttgacacccaagttgtggagcgagaaaagatgaagtcatatatttacgtacatacagttagcctggacaagggcgagaaccatggtatagcgtggcaggcaagaaaagagttgcacaaagcagtgcgtaaggttctggccacttctgccaagatcctgcggaacccgttcgcagaccccttttccaccgtggacatcgaggaccacgaatgtgctgtctggctcttgctccggaagtctaagagcgatgataagacaacacgcctggaggcagtgcgagaaatgtcagaaacccaccattggcacgactatcaataccggattattgctcaggcctgcgatcccaaaacactcatcggtctcgccagaagtgaggagagtgatctgcggttcttccttctaccaccaccactgcctagtctgaaggaagacagctctaccgaagaggagctcagacagctgctggcaagcctgccacaaacggaactcgacgaatgcattcagtattttacgtcacttgcactcagcgaatcctctcagagtctcgcagcccaaaaagggggtctgtggtgtttcggtggtaacgggttgccgtatgcagagtcctttggggaagtgccgtccgccacggtggaaatgttctgcttagaagccatcgtgaaacacagcgagatatccacccactgcgataagattgaagccaacggcgggcttcagcttctacagcgcctgtatcgactccacaaggactgtcccaaagtccagagaaatataatgcgcgttatcggtaacatggctcttaacgagcatctccattccagcatcgtacgcagcggctgggtgtctatcatggctgaagctatgaaatctcctcacattatggaatcttcccacgccgctcgtattcttgctaatctcgaccgcgagacagttcaggaaaaatatcaagacggagtttacgttttgcatcctcagtaccgaacaagtcagcctattaaggcagacgttttattcattcacggactgatgggtgcggccttcaagacgtggcgacaacaggatagcgaacaagccgtgattgagaaaccaatggaggacgaggatagatacacaacctgttggccaaagacatggcttgctaaagattgccccgccctgcgaataatttcagttgagtacgatacttctctctccgactggcgtgctagatgtccaatggagcgaaaatccatagcatttagaagtaatgagctactgagaaagttgagagcagccggggttggagatcgtcctgtggtatggatctcccacagcatgggtggcctgctagtaaaaaaaatgctccttgaagctagcacgaagccagaaatgagtacagtaattaacaacacacgaggtattattttctatagtgttccacaccatggctcaagactggcagagtattccgttaatatcaggtatctgttattcccttccctggaagtgaaagagctgagcaaggatagccccgctctaaagactttacaggacgactttctggagtttgccaaagacaaaaacttccaggtgctcaactttgttgaaacccttcccacatatatcggttcaatgatcaagctgcacgtcgtgccagtcgaaagcgccgacctaggaatcggagacctgatacccgtggacgtgaaccatttaaatatctgcaagccgaagaagaaggacgccttcttatatcagcggactctccaattcattcgtgaggctcttgctaaagatctcgagaactag

SEQ ID NO: 12356 - RNA, 1509 nt, synthetic construct
  misc_feature 1..1509: note = source = /note="Description of Artificial Sequence: Synthetic coding sequence"
  source 1..1509: mol_type = other RNA
atggcccagcgttgcgtttgcgtgcttgccctggtcgctatgttgttacttgtctttcctacagtatcaagaagcatgggtccacggagcggcgagcaccagcgagcgagcagaatccccagccaatttagcaaagaagaaagagtggctatgaaggaagcgcttaaaggcgcaattcagattcctaccgtgacattctcgtcagaaaagtccaatacaacagctctagccgagttcggcaagtatatccacaaggtatttcctacggtcgtgagcacttcatttatacaacatgaggtagtggaagagtacagccatctcttcaccatccagggctctgacccttccctccagccatacctgctgatggctcatttcgacgtagtaccggcccccgaggaaggttgggaggtcccgccattcagcgggttggaacgagacggaatcatctacgggcgcggcacattggatgataagaacagcgtgatggcccttttacaggcactggagctgttattgatccggaaatatatacctcggaggagcttctttataagcctcggccacgatgaagaatcgtctggaaccggggctcagcgaatatccgctcttctgcagtcccgaggagtccagcttgccttcatagtggatgaaggcggatttattctagatgatttcattcccaactttaagaagcctatagctcttatcgccgtgtcagaaaaaggcagtatgaatcttatgttacaggtgaacatgacaagtggtcattcaagcgcccccccaaaggagacaagcatcggtattcttgcggccgcagtgtctaggctggagcaaactccaatgcctataattttcggtagcgggacagttgtgacagtactgcagcaattggctaacgagtttccctttccagtgaacatcatcctgagcaacccctggttgtttgagcctcttattagtcgctttatggagcgtaatcctcttaccaatgcgattattagaactactacggcactcaccattttcaaggccggggtgaagtttaatgtcattccacctgtcgctcaggccacagtcaatttcaggatccacccgggtcagaccgtgcaagaagtgcttgaattaacaaaaaatattgttgccgataatagggtgcagtttcacgtactctccgccttcgatcccctgcccgtgagtccatctgacgacaaggctcttggctatcagctactacggcagacagttcagagtgtgtttccagaagtaaacattaccgcacctgtgacatcaattggcaatacagactcacgattttttaccaacctcacaacaggtatttaccggttctaccctatttatattcagcccgaagacttcaagcgaatccatggggtgaatgagaaaataagtgtgcaggcctacgaaacacaggtgaagttcatttttgagctgattcagaacgccgatacagatcaggaaccagtctcccacctccacaaactctag

SEQ ID NO: 12357 - RNA, 999 nt, synthetic construct
  misc_feature 1..999: note = source = /note="Description of Artificial Sequence: Synthetic coding sequence"
  source 1..999: mol_type = other RNA
atgaggctcctggcatttctgtccctgttagctttagtccttcaggaaacaggaaccgcatctcttccccggaaagaaagaaagcggagggaagagcagatgcctcgcgaaggcgacagcttcgaggtgctaccactgcgcaacgacgtgctaaacccagacaattacggcgaggtgattgacctcagcaattacgaagaattaaccgactatggcgatcagctgcccgaagtgaaagtcacaagccttgctccagccacctcaatttcacccgccaagtcaactactgctccaggcaccccctctagtaaccctacgatgactcgccctactacagctggcctcctgttatcctcacaacctaaccatggcttaccaacttgcttggtgtgtgtttgtctgggctcatccgtgtactgcgacgacatcgatctagaggacatcccccctttaccccgtagaaccgcctatctgtacgctcggttcaaccgcatttcccgtatcagagcagaagattttaagggcttgaccaagttgaaacggatcgatctctcaaataatcttatcagttctatcgacaatgacgcttttcggttgctccacgccctgcaggatctaattctcccagaaaatcaactcgaagcccttccagtcctgcctagtggcattgagttcctggacgtgagactgaaccgtctgcagtcaagcggaatccagccagccgcatttagggcaatggagaaactgcagtttctttatctatcagataatttgcttgatagtatcccaggcccccttcccctctctcttagatctgtgcatctgcagaacaatctcattgaaactatgcaacgagacgtgttctgtgatcctgaagaacataagcatacacggcggcagttggaagacataaggcttgacggcaatccgatcaatttgtctttattcccatcagcctacttctgtttgccacggctgcccatcggcagatttacatag

SEQ ID NO: 12358 - RNA, 1401 nt, synthetic construct
  misc_feature 1..1401: note = source = /note="Description of Artificial Sequence: Synthetic coding sequence"
  source 1..1401: mol_type = other RNA
atggtgagatcagttgcatgggccggattcatggttcttctgatgataccatggggttcagcagcaaagttagtttgttactttaccaactgggcgcaatatagacaaggcgaagcaagatttctgcccaaagacctggatccttccctgtgtactcaccttatctatgccttcgctggaatgacaaatcaccagttgagtaccacggaatggaacgacgagacgctttatcaggagtttaatggcctgaaaaaaatgaacccaaagctcaaaactttactcgcgattggcggatggaattttggtacacagaagttcacagacatggtcgctacggccaataaccggcagacatttgtaaatagtgctatcagatttttaagaaaatattccttcgacggtctcgatctggattgggaatatcccgggagccagggaagccctgccgttgacaaggaacgttttaccactttggtccaggatttggccaatgctttccaacaggaagcccagacatccggcaaagagagacttctactgagtgcagccgtgcccgctgggcagacttatgtggatgccggctacgaggttgacaagattgctcagaatttggattttgtcaatctgatggcgtatgatttccacggctcctgggaaaaagtgaccggtcacaactcccccctgtataagcgccaagaggaatccggtgcagctgccagtctaaatgtcgacgcagctgttcaacagtggctccagaaggggacaccagccagcaagcttatactgggcatgccaacctacggcaggagctttactttagcctcttcaagcgacacacgcgtcggcgcgcctgcaaccgggagcggcactcccgggccattcacgaaagaaggaggcatgttagcatattacgaagtctgctcttggaaaggcgcaactaagcagcggatccaggaccagaaggtaccatacatcttccgtgacaatcagtgggttggatttgacgacgtggaatccttcaaaacaaaagtaagctatctgaagcaaaagggactcggtggcgccatggtctgggcgctggacttggatgatttcgctggcttttcctgtaatcagggaaggtacccccttattcaaacgttaaggcaggaactgagtcttccctatctgccaagcggtacgcctgaactcgaagtgccaaagcctggacagccttccgagccggaacacggcccaagtccggggcaagacacattctgccagggcaaggctgacggcctgtacccaaacccacgcgagagatcatcattctactcatgcgcagccgggcgcttgttccagcagagctgcccaaccgggctggtgttcagtaactcctgtaagtgttgcacttggaattag

SEQ ID NO: 12359 - RNA, 1596 nt, synthetic construct
  misc_feature 1..1596: note = source = /note="Description of Artificial Sequence: Synthetic coding sequence"
  source 1..1596: mol_type = other RNA
atgcggttgtgtctgggacgcccacacccaagaggtcactccagggttggtaaatcagaacgcggtcgaggagcacgtggtctggccaggcagaggaccctcgaagatgaagaggaacaggagagggaaagaagacgccgtcatagaaatttatcaagcacgaccgatgacgaggctcctcgtctttcacaaaacggtgacagacaggcatcagcttccgaacgccttccctcagttgaagaagctgaagtgcctaagcccctcccacctgccagcaaggatgaagacgaggacatccagtcaatactcaggactcgacaggaacgcagacagcgcaggcaggtagtggaagcagcacaagctccaatccaggagcggctggaggccgaagaaggccgaaactctctaagcccagttcaggcaacgcaaaagcctcttgtgagcaaaaaggaactcgagatccctccccggcggcgtctgagtagagaacagaggggcccctgggcccttgaagaagagagcctcgttgggcgagaacccgaagagaggaaaaagggtgtgcctgagaaatctcctgtgctagagaaatcatctatgcctaagaagacagcaccagaaaaatctctggtgtctgataaaacctctatttcagaaaaggttttggcgtcggaaaaaacatccctgtctgagaagatcgccgtcagtgaaaaacgcaactcttccgagaagaaaagtgtgctagagaagacctcagtctccgaaaaatctttggcacccggaatggcattagggtcaggccggcgcctggtgagtgaaaaagccagcatttttgagaaagccctggcctcagaaaagtctcctacagctgatgccaaaccagcccccaagagagctaccgctagtgagcagcctctagctcaagaaccacccgcatcaggcggtagccccgcgactactaaagagcaacggggcagagcattgccagggaagaatttaccctcccttgccaaacaaggcgcatctgacccaccgactgtcgcctcaagactgcctcccgtgaccttacaagtgaagataccgtcaaaggaggaggaggcggacatgtctagccctacgcagcgtacgtattcctccagtctgaaacgttcaagtccaagaacgatatcctttagaatgaaacccaaaaaagagaattcggaaactaccctgacccgctctgcctcgatgaaacttcccgataatacagttaagctcggggagaaattggaaagataccacaccgcaatcaggagatccgagagcgtgaaatctaggggtctgccatgtaccgaactattcgtggcgcctgttggtgtagcaagtaaaaggcacctgtttgagaaggagctggcgggccagtcacgggccgaacctgcatcttctcggaaggaaaacctgagactttctggtgtggtaacttcgagactgaatttgtggattagccggacccaggaaagtggagatcaagacccccaggaggcccagaaagcttctagcgctaccgaaaggacacaatggggacagaaatcagatagtagcctggacgctgaagtgtag

SEQ ID NO: 12360 - RNA, 1782 nt, synthetic construct
  misc_feature 1..1782: note = source = /note="Description of Artificial Sequence: Synthetic coding sequence"
  source 1..1782: mol_type = other RNA
atgaaagccgacctaaagcagcatcatcaccattggagcattttctcctacatccgtctcaggttgccttcaatgcttcttctcttctcggttatcctcatatcttgggtttctaccgtgggtggggagggtacactttgtgactttcctaaaattcatcacggttttctgtatgatgaggaggattacaaccccttttcccaggtacccacaggggaggtcttctattattcctgcgaatacaacttcgtcagcccctctaagagtttttggaccagaatcacctgcactgaagagggctggtctccaaccccaaagtgtctgaggatgtgtagcttcccattcgtcaagaacggacattccgaaagttcaggacttattcatctggaaggtgatacagtgcagataatatgcaatacaggctacagcctccagaacaatgaaaaaaacataagttgtgtggagagaggttggtcaacgccacccatctgttctttcacaaagggagaatgccatgtgcctattctggaggcgaacgtggacgcacagcccaagaaagagtcatacaaggtgggcgatgtgctgaagttctcttgccggaaaaatcttataagagtaggatctgattctgtgcagtgctaccaatttggctggagcccgaattttcctacgtgtaagggacaagttcgcagctgtggcccgcctccacaactgtcaaatggagaggttaaagaaatccgtaaagaggaatacggacacaacgaggttgtcgagtacgattgcaatcccaatttcatcatcaatggtcctaagaagatccaatgtgttgatggagaatggaccaccctaccgacatgtgtcgaacaggtgaagacctgcggctatatcccggagttggagtatggctatgtgcaaccctcagtgcccccctatcagcacggggtgtcggtggaagtgaattgtagaaacgaatacgccatgattggtaacaatatgattacttgcatcaatggaatatggactgagttgccaatgtgcgtggccacacaccagcttaagaggtgtaaaatagccggcgtgaatataaaaaccctcttaaaattgtcagggaaagagttcaaccacaatagccgcatcaggtaccgctgctccgatatctttcgctaccggcatagcgtctgcatcaatggtaagtggaatccagaagtggattgtacagagaagagagaacagttttgccccccgcccccacagattcctaacgctcagaacatgaccacgaccgtgaactaccaggacggagagaaagtcgccgtgctgtgcaaagagaattacctgctccccgaggcgaaagagatcgtatgtaaagacggacgatggcagtcacttccaagatgtgttgaaagtacggcttactgtgggcccccaccatctatcaataatggcgatacaacaagtttcccgctgtccgtgtatcctcccgggagcaccgttacctatcgctgtcagagcttttacaagttgcaaggctccgtcacggttacatgcagaaacaaacagtggtcagagcccccacgctgcttggatccgtgtgtggtgtcagaggagaacatgaacaagaataacattcagttgaagtggcgcaacgatggaaaactgtacgcgaagacaggggatgcggtagaattccaatgcaagtttccccacaaggctatgataagctcgcctccatttagagccatctgccaggaggggaaattcgagtaccctatatgtgaatag

SEQ ID NO: 12361 - RNA, 2301 nt, synthetic construct
  misc_feature 1..2301: note = source = /note="Description of Artificial Sequence: Synthetic coding sequence"
  source 1..2301: mol_type = other RNA
atgatctggaggagtcgtgccggtgccgaactgttctcattgatggccctatgggaatggattgccctaagtttgcactgttgggtcctcgctgtggccgccgtgagtgatcagcacgctacatctcctttcgactggctactgtccgacaaagggcccttccaccggagtcaggaatatactgattttgtggaccgctctaggcaggggttttccaccaggtacaagatttaccgcgagtttggacggtggaaagtgaataatctggctgtcgagaggcgtaatttcttagggtcccccctgcccctcgcaccagaattcttccgcaatatcaggctcctaggccgccgaccaacgttacaacagatcaccgaaaatctgattaagaaatacggaacacatttcctgctctctgctactctgggaggagaagaatcattgaccattttcgtcgataagaggaaactttctaagagggccgagggatctgattctaccacaaactctagctcagtgacccttgagacacttcatcagttagccgccagctacttcattgacagagacagtacgctgagaagattgcaccatattcagatcgcctctacagccattaaagtcaccgaaacccggacgggtccactagggtgctccaactacgataatttggactctgtgtcctctgttcttgtgcagtctcccgagaataaaatacagctacaaggcctgcaggtcctccttcccgattatttgcaggaacgtttcgtgcaggcggctctctcgtatatcgcatgcaacagcgagggtgaattcatatgtaaagaaaacgattgttggtgtcattgcggcccaaagttccccgagtgcaactgtccgtcaatggacatccaggcaatggaggagaatctccttaggattacagaaacatggaaggcttacaattccgatttcgaagaatccgatgagttcaagctgttcatgaaacgtctgccaatgaactactttctgaacacctctaccataatgcacctatggacgatggattccaacttccagcgcagatatgagcaattggagaattcaatgaaacagttattcctgaaagcccagaagattgtgcacaagttattctccctttccaagcgatgccacaagcaacccctcatttccttaccccgccaacgaacttcaacatactggcttacccgtatccaatcattcctctactgcaatgagaatgggctgctgggttctttcagcgaagagacccattcttgtacctgccccaatgatcaagttgtgtgcacggctttccttccttgcaccgtgggggacgccagtgcttgtcttacctgtgcccccgacaatcgaactaggtgcggaacttgcaacactggctacatgctgagccaaggtctttgcaagcccgaggtggcagaatcgacagatcattacatcgggttcgagaccgacctccaggatcttgaaatgaaatatctattgcagaaaacagaccgtcgcattgaagtccacgccatctttatctctaatgatatgaggctaaattcctggttcgatccaagctggcgaaagcgaatgctacttacactcaaatctaataaatacaaatcttctctggtgcatatgattctaggactgagcctgcagatatgtctcactaaaaattctaccctggaacctgtgctcgctgtgtacgtgaatccttttggcggctcacactctgagtcctggtttatgcctgtgaacgagaattcattcccagactgggagcgaaccaagctggatttgccccttcagtgttataattggacgttgacccttgggaataagtggaaaactttcttcgagactgttcacatatatctcagaagccgtatcaagtcaaatggccccaatggaaatgagtctatctactacgagcctctggaattcatcgacccatccaggaacctgggttatatgaagattaataatatccaggtgtttggctactctatgcatttcgaccctgaagccatccgcgacttaattctgcagctggattatccgtacacccaaggatcccaagattcagcactcctgcagctgctggagattcgtgacagagtcaacaaactgtcaccccccggccagaggcggctggacttattctcttgcttactccgtcacagacttaaattatcaactagcgaagtggtgcgaatccaatcagccctccaggcttttaatgccaaacttcccaacacaatggattatgatactaccaaactgtgttcttag

SEQ ID NO: 12362 - RNA, 1815 nt, synthetic construct
  misc_feature 1..1815: note = source = /note="Description of Artificial Sequence: Synthetic coding sequence"
  source 1..1815: mol_type = other RNA
atgcggcgttgcaattccgggagtgggcctcccccatccttgctcctgctactcttatggctgctggccgtaccaggcgccaacgcagcaccacgcagtgctttgtattcacctagcgacccccttaccctcctccaggccgacaccgttcgtggggccgtcctcggatccaggagtgcctgggccgttgagttctttgcaagctggtgcggccactgcatcgcgttcgcacctacgtggaaggcactggctgaagacgtgaaggcctggcgcccagctttatacctggcagctctagattgtgctgaggaaacaaactcggccgtatgccgagatttcaatatccctggtttccccaccgtacggttctttaaagcttttaccaagaatggatccggcgccgtcttcccagtcgcaggtgccgatgtgcagacattaagagagcgactgattgacgcattggagagccaccatgacacttggcctcccgcatgccccccactggaaccagcaaagctagaagagattgacgggtttttcgcacggaacaacgaggagtacctggcacttatttttgagaaaggcggaagctacctcggcagggaggtggccttagacttgtctcagcacaaaggagtggccgttcgacgggtactgaataccgaggccaacgtagtccgtaaatttggcgttacggatttcccttcatgctacctgctgttcaggaacgggtctgtttctagggtgccggttttgatggaatctcgctcattctacacggcctatctgcagaggctctccgggctgacaagagaagccgctcaaacaacagtggcccccacaacagccaataaaatagcacctacagtttggaaactggcagacagaagcaagatttacatggcagacctcgaatcggcacttcattatattctgaggatcgaggtggggcgattcccagtgttggaggggcagaggctagtggccctcaaaaaattcgtggccgtgcttgctaaatatttcccaggccgaccgctggtacaaaacttccttcactctgtgaatgaatggctgaagagacagaagcgcaataagatcccgtactctttctttaagactgccttggatgatagaaaggaaggcgcagtcttagccaagaaagtgaactggatcggctgtcaagggagtgagccacattttagagggtttccttgcagcctatgggtcctcttccacttccttactgttcaggccgcaaggcagaatgtcgaccatagccaggaggcagccaaagcaaaagaggtgctacctgccatccggggctatgtccactatttctttggttgtcgcgattgtgccagtcatttcgaacagatggcagccgcctcaatgcatcgcgtcggcagccctaatgccgccgttctttggctgtggtcaagtcacaatcgcgtgaacgcacgtcttgccggagcaccaagtgaagatccgcaatttcccaaggttcaatggccgcctcgcgagctgtgcagtgcttgccacaatgagaggttagatgttccggtttgggacgtcgaggcaacgttgaactttctgaaagcacacttcagcccttccaatattattctggactttccagccgcgggatccgccgcgagaagggacgtgcagaatgttgccgcagcccctgagctggccatgggtgccttggaactggaaagcaggaactctacattggatcctggcaaacccgaaatgatgaagagcccaactaatactactccacacgtacccgctgaaggacctgaactgatttag

SEQ ID NO: 12363 - RNA, 2244 nt, synthetic construct
  misc_feature 1..2244: note = source = /note="Description of Artificial Sequence: Synthetic coding sequence"
  source 1..2244: mol_type = other RNA
atgagacggtgtaattcagggtctgggcctcctccaagtctgctgcttctgctactctggctcctggccgttccaggcgccaacgcagcccctagaagcgccttgtattccccttccgaccccctcacgctgttacaggccgatacagtaaggggggccgtgctaggatcacggtccgcttgggctgtcgaattctttgcgagctggtgtggacactgcattgccttcgccccgacctggaaggcgctggcagaggatgtcaaagcctggcgcccagccttgtatcttgctgcgctggactgcgccgaagaaacaaatagtgccgtttgcagggatttcaatatacccggtttccccacagtgagattcttcaaagccttcactaaaaatggttccggcgccgtgttcccagtggccggggccgatgtgcagactctgagagagagactcattgacgcactcgagagccatcatgatacatggccgcccgcctgtccacccctagaaccggctaaattggaggaaattgatggttttttcgctcggaataacgaagagtatctggcactgatcttcgagaaaggagggtcttacttgggacgggaagtggccttggatctaagccaacataagggtgtagcagtgcgccgcgtgctgaacaccgaagcgaacgtcgtgcgaaagttcggagtgacggactttccaagctgctatcttctgtttcgcaacggaagtgtgtcccgggtgcctgtgttgatggaatcaagatccttctatacagcttacctgcaaagactaagcggactgacgagagaggctgcccagactactgtcgccccgacaacagccaataaaattgcgccaaccgtgtggaagctggccgatcgctcaaaaatatacatggcagacttagagagcgccctgcactatatcctgagaatagaagtaggacggtttccagtgctggaaggacaaagattagtcgccctaaagaagtttgtggcagtgctcgctaagtatttcccaggccgccccctggtgcagaatttcctccacagcgttaacgaatggctcaagaggcaaaagcgaaataaaataccttactcatttttcaagacagcactcgacgacagaaaggagggcgccgtacttgccaaaaaagttaattggatcggctgtcagggttccgagcctcactttaggggatttccatgttcactatgggtactgtttcacttcctcaccgtgcaggcagcacgtcagaacgttgaccatagccaagaggccgccaaagccaaggaggtattgcccgcaattcgggggtacgttcactactttttcggatgcagagactgtgccagccacttcgagcagatggccgcagccagcatgcacagggttggaagtcctaatgccgccgtcctgtggctgtggtccagccacaaccgcgtgaatgccagactggccggggccccttctgaagacccgcagtttccgaaggtgcagtggccgcccagagaattgtgtagtgcatgtcacaatgagcgtcttgatgtacctgtgtgggatgtggaagccacccttaactttttaaaggcacatttcagtccctcaaatatcatcctggacttccctgccgctggatctgcggctaggcgcgatgttcagaatgtcgctgcggcaccagaacttgctatgggagcactggaactggaatctcgcaactcgacattggatcctggcaagcctgaaatgatgaaatccccgactaatacaacccctcatgtgccagccgaaggtccagaggcatcccggccccccaagcttcaccccggcttacgtgctgcccccggacaagagccgcccgaacacatggcagagctccagcgcaatgagcaggaacagcccctgggccagtggcatcttagtaagcgagacaccggggccgcgttattagccgaaagtcgtgcagaaaagaatcggttgtggggcccactcgaagtgcgcagagtgggacgtagtagcaaacaactggtagacatacccgagggccagttagaggctcgcgccgggagaggtcgggggcaatggctccaggtgttgggcggtggattctcctatctggacatttccctctgtgtaggactatatagccttagtttcatgggtctgctggcaatgtatacatattttcaggccaagatacgtgcactcaagggtcatgcgggtcatcccgcggcctag

SEQ ID NO: 12364 - RNA, 1476 nt, synthetic construct
  misc_feature 1..1476: note = source = /note="Description of Artificial Sequence: Synthetic coding sequence"
  source 1..1476: mol_type = other RNA
atgaagaccttcacttggacacttggggtactctttttcctgttggtggacacgggtcactgcaggggcggccaattcaaaattaagaaaatcaatcagcggcgttatcctagagcaacagatggtaaagaagaagcaaaaaaatgtgcctataccttcctcgtcccagagcagagaatcactggccccatatgtgttaacaccaaagggcaagatgcaagcaccatcaaggacatgattacccgaatggatctggagaaccttaaggatgtgctcagcagacaaaagcgagagattgatgtcttgcagttagttgtagatgtggatgggaatatcgtgaatgaggtcaaactgttgcggaaggagtctaggaacatgaactcccgggtcacacagctttatatgcagttgctgcacgagatcattcgtaaaagggataactcactcgagctctcgcaactggagaacaagatcctaaatgtgacaaccgaaatgctgaagatggccacacgctacagggagctcgaagtgaaatacgcatctttgaccgatctggttaacaaccagagcgttatgatcacactgctggaggaacagtgcctgcgtatcttttccagacaagatacacatgtctctcccccactggtccaggtcgtaccccagcatattcccaattcccagcagtatactccaggactcctcggcggcaacgaaatccaacgggaccccgggtaccctcgcgatctcatgcctcctcctgacctcgcaactagtccgacaaagagtcccttcaaaatccctcctgtcacattcatcaacgagggcccatttaaagattgtcagcaagctaaggaggcaggacattccgtcagtggaatctatatgataaaacccgagaacagcaatggaccgatgcagctgtggtgtgagaactccttagatccagggggctggacagttatccagaaaagaactgacggaagcgtgaattttttccggaattgggaaaactacaagaagggcttcggtaacatcgatggcgaatactggctgggactcgaaaatatctacatgctcagtaatcaagataattacaagctcctgatcgaactggaggactggagcgacaagaaggtttacgccgaatatagctcatttcgactcgaacccgaatccgagttttatcgattgcgcttggggacctaccagggcaatgcaggagattcaatgatgtggcataacggcaagcagttcacgacattagatagagataaggatatgtatgctgggaattgcgctcactttcataagggcggctggtggtacaatgcctgtgcccactctaaccttaacggggtctggtaccgggggggacactataggagtaagcatcaggacggaatattttgggcagaatatcggggcggatcgtacagcctgagagcggtgcaaatgatgatcaagcccatcgactag

SEQ ID NO: 12365 - RNA, 2484 nt, synthetic construct
  misc_feature 1..2484: note = source = /note="Description of Artificial Sequence: Synthetic coding sequence"
  source 1..2484: mol_type = other RNA
atgatgtgcctgaaaatcctgcgtattagtcttgctattctagccggctgggcactgtgctccgccaattcggagcttgggtggaccagaaagaagagtttagtggagcgcgagcatctgaatcaggtcctgctggagggggaaagatgttggctcggcgccaaggttcgcagaccacgcgcatcgccccagcaccacctgttcggggtctacccctccagagccggaaattacctcagaccatatccagtcggagaacaagagatccaccatacgggccgatctaaaccagatacagaaggcaatgccgtgtcccttgtcccacccgatctcacagaaaatcctgccggtctgcggggcgctgtggaggagcctgcggcaccatgggtgggtgattcacctatcggccaaagcgagcttttgggcgacgacgacgcttatcttgggaaccagaggagcaaagagtcactgggagaggcgggtatccagaaaggatccgcgatggcggctactacaacaactgccatattcactaccttaaatgagccaaagccagagacacagcgccggggatgggccaaatcaagacagcggcggcaggtgtggaagagaagagctgaagacggccagggagactccggaatctcgagccactttcagccttggcccaagcatagtctgaaacaccgcgttaaaaagtcaccacctgaggaatccaatcagaacgggggtgagggatcataccgggaagccgagacatttaattcccaggtcggactgcccattctctactttagtggccgtcgtgagcgcctgcttctgcgacccgaagtgctggccgagatcccccgagaggccttcaccgttgaggcctgggtgaagcctgaaggaggacaaaacaatcccgccatcatcgctggtgtgttcgataattgttcgcacaccgttagcgacaaagggtgggctctcggaatcagaagcgggaaagacaagggcaaaagggatgcccgttttttcttcagtctttgcacagaccgggttaagaaagcgaccattttgatctcacattctagatatcaacctggtacatggacccatgtggcagccacctacgacggccgccacatggcactgtatgtcgacggtactcaggtcgcctcctctttagaccagtccggcccgctgaacagccccttcatggcgtcgtgccgctcactgctgttgggaggagatagcagcgaggatggccattacttcagggggcatctcggaactttagtgttttggtcaacggctctaccccagtcacacttccagcactcttcacagcactcgagcggcgaagaggaggctactgacctagtgctgacagcatcatttgaacccgtcaacaccgaatgggtccctttccgcgatgaaaaataccctcggttagaagtgctgcagggattcgagcccgaaccggagatcttgagcccactgcagccgccactttgtggacagacagtctgcgataatgtcgagctcatatcccaatataacggctattggcccctgagaggcgagaaagtcatcagataccaggtggtgaacatatgtgacgacgagggtctaaatcctattgtctcggaggaacagataaggctgcagcatgaggctttaaatgaggctttttcccgctataacatctcctggcagctgtcagtgcatcaggttcataacagtacgcttagacaccgcgtcgtgctcgtgaattgtgagccatccaaaatcgggaatgaccattgcgatcctgagtgtgagcatcctttgacagggtacgatggtggcgactgcaggctccagggaaggtgctactcctggaaccgccgggatggtctgtgccatgtcgagtgcaataacatgcttaacgatttcgacgatggcgattgctgcgaccctcaggtagcagatgtgcgcaaaacctgtttcgaccccgattctccgaaaagagcatatatgtctgtcaaggagctgaaggaagcactgcaattgaactcaacacattttctcaacatctacttcgcctcctccgttagagaggatctcgctggcgctgcaacctggccatgggataaagatgcggtcactcaccttggaggcattgtgctttctccagcatactacggaatgcccggacatacagatacaatgattcacgaggtaggtcatgtgctcggtctgtatcatgtattcaagggtgtctccgagagagaatcctgtaacgacccttgtaaagaaacagtcccctcgatggagactggggacctttgtgccgacaccgccccaacccctaaatcagagctctgcagagaaccagagccaacatcagacacttgcggtttcacacggttccctggggcaccattcactaattatatgtcttacaccggcatcacgaccgtgctgttttgttttttgctgcggatccacggtgggctttag

SEQ ID NO: 12366 - RNA, 5376 nt, synthetic construct
  misc_feature 1..5376: note = source = /note="Description of Artificial Sequence: Synthetic coding sequence"
  source 1..5376: mol_type = other RNA
atgatgtgcttgaaaattctgaggatatccctagcaattctcgctgggtgggccttgtgctctgcaaactcagaactaggttggaccagaaagaaatccctggtcgagcgggagcacttgaatcaggtgttactcgagggcgagcgctgctggttaggagccaaagtgcgccggccacgagcttccccacagcaccatctgtttggagtgtaccctagtcgagccgggaattatctgcggccgtatcccgtaggcgagcaagagattcatcacactggaagaagtaagcccgacacagagggcaacgctgtgtcactcgtgccccccgatctgacagagaaccctgccggcttgcgaggggccgtggaggagcctgctgccccttgggtgggcgactcccctatcggtcagtcagagctgctgggggacgatgatgcctatctcggcaatcagcgaagcaaagagtcgctgggcgaagcaggtatacagaaaggctccgctatggctgctaccactacgaccgcaatattcacgaccttgaacgagcccaaacccgagacccaaaggagaggctgggccaaaagtaggcagcggaggcaagtttggaaacggcgcgctgaggacggacagggcgatagcggcatttcctcccacttccagccctggcccaaacactcccttaagcacagggtgaagaagtctccccccgaggaatctaaccaaaacggcggcgagggttcttatcgggaagcagaaaccttcaatagccaggtgggtttacccatcctttacttttctggcagacgcgaacgtctgctgctgcgccccgaagtgctggcagagatccctagggaagcattcaccgtggaggcatgggtaaagccagagggcggccagaataaccctgccatcatcgctggggtattcgataattgctcacacacagtatccgacaagggttgggccctaggcattcgaagcggtaaggataagggaaaacgagatgctaggtttttcttttctctttgtactgatcgcgttaagaaggctacaatcctcatctcgcattcgcgctaccaaccaggaacatggacccacgttgccgccacatacgacggccggcacatggccctgtacgttgacggaactcaggtggccagttccctcgatcaaagcggtcctttaaacagcccatttatggcttcgtgcagatctcttttactaggaggagattcttcagaggatggccactacttccggggccacctgggaactctggtattttggtctactgcccttccccagtcgcactttcagcacagcagccaacacagcagcggggaagaagaagctacggatctggtactaaccgcgagctttgaacctgtgaacacagaatgggttcctttccgggatgaaaagtacccccggctggaagtattacaaggattcgaaccagagcctgagattctttcaccactgcagccacccctctgcggccagaccgtttgtgacaacgtcgagcttataagccagtacaacggctattggcccctcagaggggaaaaggtcatccggtaccaggtcgttaatatttgtgacgatgaagggctgaatcctatcgtctctgaagagcaaatcagattacaacatgaagctctgaatgaagctttctcccgatataatatttcttggcagctgtccgtgcaccaagtgcacaactccactctccggcaccgcgtggtcctggttaattgtgagccctctaaaattggaaacgaccactgcgatcccgagtgtgaacaccccctgaccggttatgacggcggagattgcagattgcaaggcagatgctatagttggaatagacgcgatggcctttgtcatgtggaatgcaataatatgttaaatgacttcgacgacggtgattgctgtgacccccaggtcgcagatgtgcggaaaacctgtttcgacccagacagtcccaagagggcctacatgagcgtgaaagagctgaaggaggctcttcaacttaattccacccatttcttaaacatttactttgcatccagtgtccgagaagatcttgcgggagcggccacctggccttgggataaagatgctgtaactcatctgggcggcatcgtgctgtcccccgcttattatggaatgcccgggcatactgacactatgatccacgaagtgggccacgtcctgggactataccacgtgttcaaaggcgtgagtgaacgagagtcctgtaatgatccctgtaaagagactgtgccttccatggaaacaggggacctatgtgcagataccgcacccacacccaagtcggagctgtgtagagagccggaacctacatctgatacctgtgggttcacgcgttttccaggcgctccattcacgaattatatgtcctataccgacgataactgcaccgacaatttcactcccaatcaagtcgcccggatgcactgctacctagatctcgtatatcagcaatggacagaatctaggaagcccacccctatccctatcccaccaatggtgatcggtcaaacaaataaatcactcacaattcactggctacccccaatctcaggggtcgtgtatgatcgtgcaagcggcagtctctgtggagcatgcacggaggacggcacatttagacagtatgtgcatactgcttcatctcgacgagtatgtgattccagcggctattggactcctgaggaagccgtgggcccccccgacgtggaccagccctgtgaaccatcactgcaggcttggagccccgaagtgcacctgtatcatatgaatatgaccgttccatgtccaaccgagggctgttccctggaattgttgtttcagcaccctgtacaggccgatactctgactttatgggtaacatctttcttcatggaatcttcccaggtgctctttgatacagagattctgctggaaaacaaagagagcgtgcacctcggccctcttgacaccttctgtgacatacccttgaccatcaagttgcacgtcgacggtaaagtgtccggcgttaaagtttacaccttcgatgagcgcatcgagatcgacgcagcgctgctcacaagccagccccacagcccactgtgctccgggtgtaggcccgtgaggtatcaggtgcttcgcgatcccccttttgcgagcggcctgcctgtggtcgtgacgcacagtcataggaagttcactgatgttgaagtgacccctggccagatgtaccagtaccaggtcctggctgaggccggaggagaactgggggaggcttctccacccttaaatcatatccatggcgccccgtactgcggggacggcaaagtttctgagagactaggcgaagaatgcgatgacggcgaccttgtctcgggagatggatgtagcaaagtctgtgaactggaggaggggttcaattgcgtgggagagccctctctgtgctacatgtatgaaggcgacgggatttgcgaaccattcgagcgcaaaacttccatcgtggattgcggcatttacactccaaaggggtatctggatcaatgggcgaccagagcctattcaagccatgaggataaaaagaaatgcccagtaagcctcgtgactggggagccacactcactcatctgtacgagttaccatccggaccttccaaatcaccggccgttgaccgggtggttcccgtgcgtggcctcagagaacgagacccaggacgatagaagcgaacaacctgaggggtccttgaagaaggaggatgaagtgtggctgaaggtctgcttcaaccgccctggcgaagcaagagccatctttatttttttaaccaccgatggcctcgtcccgggggagcaccaacagccaactgtcacgctgtacctcacagacgtgcgtgggagcaatcattctctgggaacatacggcctgagctgccagcacaacccattgattatcaatgtgacccaccaccagaacgtgttatttcaccacactactagcgtgttgctcaatttcagttcgcctagagttggtatctccgccgtggcgttacgaacttcctcgagaattgggctatccgcgccctctaactgcatctcagaggatgagggtcagaatcatcaggggcagagctgcatccaccgtccttgcggtaagcaagatagttgcccaagcctgctgcttgatcatgccgacgtggtgaactgtacctccataggacccggcttgatgaagtgtgccattacgtgccaacgtggttttgcactacaggcctcctcgggacagtatataaggcccatgcaaaaggaaatcctgctaacctgcagctccggacactgggatcaaaatgtatcatgtctgccagttgattgtggtgtcccagatcctagtctcgtcaactacgcgaacttctcctgttcagaagggactaaatttctgaaacgctgcagcatatcttgtgtcccccctgccaaactgcaggggcttagcccgtggctcacctgcctggaggacggactgtggtccctgccggaggtgtactgtaagctcgaatgtgacgcccctccaatcattctgaatgccaatttgctactgccacattgcctccaagacaaccacgatgtgggaaccatctgtaagtacgaatgcaagccaggctactacgtggcagagtccgccgagggtaaagtgagaaataagctgttgaaaattcagtgtctggagggtggaatttgggagcaaggatcctgcattcctgtcgtatgtgaacctcccccccccgtgtttgaggggatgtacgaatgtacaaacggattctctctcgactcccaatgtgtcctaaattgtaatcaggagagagagaaactgcctatactgtgtaccaaagaaggactgtggacgcaggaattcaagctgtgtgagaatttacaaggagagtgccctcctcctccctctgagctgaactccgtcgaatacaagtgcgagcagggctacggtattggagccgtgtgttcccccttgtgcgttattccaccctcggatccagttatgcttccagagaacataacggctgacacccttgaacattggatggaacccgtgaaagtacagtccatcgtttgcaccggcaggcgacaatggcacccagaccctgtgctggtgcactgcatacaatcctgcgagcctttccaggcagacgggtggtgtgacactataaataatagggcctactgccactacgacggaggagattgttgcagcagtaccctgtctagtaagaaggtgatcccattcgctgctgattgcgatctggatgagtgcacatgtcgagacccaaaagcagaggagaatcaatag

SEQ ID NO: 12367 - RNA, 702 nt, synthetic construct
  misc_feature 1..702: note = source = /note="Description of Artificial Sequence: Synthetic coding sequence"
  source 1..702: mol_type = other RNA
atgaaggaccccctcgctaaggatgaacgaatttatgtgacaaactattattacggtaatactcttgtagaattccggaatctcgagaacttcaagcagggtagatggagcaattcatacaaactcccttattcatggatcggcacaggccatgtggtctacaatggcgctttctattacaatagagccttcacaagaaatattattaaatacgatctgaaacaaagatatgtggctgcttgggctatgttacatgacgtcgcctatgaggaggccacgccatggcgttggcagggacactccgacgttgacttcgcggtggacgagaatggcctatggctcatatatcccgccctcgacgatgagggatttagccaggaagtgatagtgctgagcaaattaaatgccgccgatctgagcacacaaaaagagacaacttggaggaccggactccgtcgcaacttttatggcaattgcttcgttatttgcggcgtgctttacgctgtggatagttataaccaaaggaacgccaacattagctatgctttcgacacccacactaatacccaaatcgtgccgcgcttgctcttcgaaaacgaatattcttacaccacacagatcgactataaccccaaggataggcttctgtacgcctgggataacggccaccaggtaacctatcacgttatcttcgcttattag

SEQ ID NO: 12368 - RNA, 579 nt, synthetic construct
  misc_feature 1..579: note = source = /note="Description of Artificial Sequence: Synthetic coding sequence"
  source 1..579: mol_type = other RNA
atgttgaagaaaatatccgtaggcgttgcaggcgatctaaacaccgttacaatgaagttgggatgcgtactcatggcctgggccctttacttatcacttggcgtcctgtgggtggcccaaatgctgctggctgcttcctttgaaactctgcagtgcgaggggcccgtctgtaccgaggagagtagctgtcacacggaggacgacttaaccgatgccagggaagcaggttttcaggtgaaagcttatacgttctccgaaccattccacctgatcgtctcctatggcgcctccagttccgcagccccaccgaccctgaatccggcaccccaaaagtccgccgctcccggaacagcgcccgaggaagccccaggccccctgcctccacctcctactccctcctccgaggacccaggcttttcatcccccctcggcatgccagacccacatttataccaccagatgggtctactgctcaagcatatgcaggatgttcgggtgttactaggacatctcctgatggaactcagagaactgtctggccacagaaaacccggcactactaaggccactgctgagtag

SEQ ID NO: 12369 - RNA, 459 nt, synthetic construct
  misc_feature 1..459: note = source = /note="Description of Artificial Sequence: Synthetic coding sequence"
  source 1..459: mol_type = other RNA
atgttactggctgcatcctttgaaaccctgcaatgcgaggggcccgtgtgcaccgaggaatcatcatgtcataccgaagacgacctaacagatgcacgtgaggctggtttccaagtgaaggcatacaccttctccgaaccctttcacctgattgtgagctatggcgccagctcatcagcagcccctcctacgctcaatcctgctccccaaaaatcagccgcacccgggacagctccagaagaggctccagggccgctcccgcccccaccgaccccaagtagcgaggacccaggcttttcttcgcctctcgggatgcctgatccccatctttatcatcagatgggcctgctgctcaagcacatgcaagatgtgagagtgctattgggccatttactcatggagttacgagaactctccggacaccggaagcctggaaccacaaaggcgaccgctgaatag

SEQ ID NO: 12370 - RNA, 1098 nt, synthetic construct
  misc_feature 1..1098: note = source = /note="Description of Artificial Sequence: Synthetic coding sequence"
  source 1..1098: mol_type = other RNA
atgaagcttggatgcgtactcatggcctgggctctttacttgtcactcggtgtcctctgggttgcacagatgttactggccgcaggatgccatgccgccgcctcttttgagacactccagtgtgaaggccccgtgtgtaccgaggaaagttcatgccataccgaagacgatctaactgacgcacgagaggccggcttccaagtgaaggcctacactttcagtgagcctttccaccttattgtgagttatgattggctgatactgcagggacctgcgaaacctgtgttcgaaggcgacctgctcgttctgcgttgccaggcgtggcaggactggccgcttacacaggtgactttctaccgagacgggtcagccctgggaccacctggaccaaatcgcgagttctctatcactgtcgtacagaaagctgacagtgggcactaccactgctcaggaatctttcaatccccagggcctggaatccctgaaaccgcatccgtagtagctattaccgttcaggaactcttccccgcgcccatactccgggcagtgccgagtgccgaaccccaggctggctcccccatgaccttaagctgtcagaccaaactgcctttacagaggtccgccgcaagacttctcttcagcttttataaagatgggcgcattgtccagagtcggggcctcagctccgagttccaaatccccacggcctctgaggatcattcaggaagttattggtgtgaggccgctactgaagacaatcaggtctggaaacaatctccacagctagagatccgcgtacagggggccagtagtagcgccgcacccccaaccctcaatcccgccccccaaaaatctgctgctcctggcaccgcccccgaagaggcccctggcccccttccccccccacctactccgtccagcgaggatcccggatttagttcccctctgggcatgcctgacccacatctctatcaccagatgggacttttgcttaagcacatgcaggatgtgagggtcctcctcggtcatttattgatggagttgagagaactgagcgggcaccgtaaaccaggcactaccaaggcgacggctgaatag

SEQ ID NO: 12371 - RNA, 711 nt, synthetic construct
  misc_feature 1..711: note = source = /note="Description of Artificial Sequence: Synthetic coding sequence"
  source 1..711: mol_type = other RNA
atgcttaaaaagatctctgtcggagttgccggggatctcaacaccgtgactatgaaacttggatgcgttcttatggcctgggccttgtatctgtctcttggggtactgtgggtcgcccagatgttgttagagctgttccctgcccccatacttcgcgccgtcccgtccgccgagcctcaagcagggagtcccatgactctttcatgtcagaccaaactgcccctccaacgctctgccgcacggctgctgttctccttctataaagacggacgcatcgtccaatcaagaggacttagctcagagttccagatccctaccgcatctgaagatcacagtggcagctactggtgtgaagctgcaaccgaggacaaccaggtgtggaaacagagcccccaattggagattcgggttcagggggcttcatctagtgcagcgcctcctacattgaatcctgccccccaaaagtctgccgcacctggcactgcccctgaggaggcccctggaccactacccccgccccctactccctcgtctgaagatccaggcttttccagcccactcggaatgcccgatccccacttgtatcaccaaatgggccttctgttgaagcatatgcaagacgtcagagtgttgctgggccacctgcttatggagctgcgggagctgtccggccacaggaagccaggaacaacaaaagcaactgctgagtag

SEQ ID NO: 12372 - RNA, 1149 nt, synthetic construct
  misc_feature 1..1149: note = source = /note="Description of Artificial Sequence: Synthetic coding sequence"
  source 1..1149: mol_type = other RNA
atgttgaagaagattagcgtaggagtggctggcgatctgaatactgtgacaatgaaactgggttgtgtgttaatggcctgggcactgtacctgagtttaggcgtgctctgggttgcccagatgctcctggccgctggctgtcacgctgccgcttcctttgagaccctacaatgtgaagggcctgtttgcaccgaagagtcaagttgtcacactgaagacgatttaacagacgctcgtgaggcgggcttccaggtcaaggcctacacgttttccgagccatttcaccttatcgtgagttatgattggctgattctgcagggtccagctaaacctgtgtttgagggggatctgttggttctccgatgtcaggcctggcaggactggcctctgacccaggtgaccttctatagggatggcagtgcgctgggaccccccggaccgaaccgcgaattttccattaccgtagtgcaaaaggccgattcaggccattaccactgttcagggatttttcagagcccaggcccagggattccagaaaccgcatccgtggtggcaattaccgttcaggaactgtttcccgctcccatactgcgcgccgtgccgtctgccgaacctcaggctggaagtcctatgaccctttcttgccagactaaactcccgctccagcgctccgcggctagacttctcttctccttttataaggatgggcgcatcgtccaatcccggggcctatcatcagaattccaaatccctaccgcgagcgaagatcactctggaagctactggtgcgaagctgcaactgaggacaaccaagtgtggaagcagtctcctcagcttgagattagagtacagggtgctagcagtagcgctgcaccccccaccctgaaccccgcaccgcagaaaagcgctgccccagggaccgctcctgaggaagctcctggtcctctgccacctccgcctactccttcctctgaggacccaggtttctcaagcccacttgggatgcctgacccccacctgtatcatcagatgggattgttgctgaagcatatgcaggacgtccgggtcctactaggccatctgctcatggagcttagagaactctccggacatagaaagccagggacaacaaaggccacagctgagtag

SEQ ID NO: 12373 - RNA, 738 nt, synthetic construct
  misc_feature 1..738: note = source = /note="Description of Artificial Sequence: Synthetic coding sequence"
  source 1..738: mol_type = other RNA
atgagccggctacgtgcgctgctggggctgggactattggtggcaggttcgagggtgccccgcatcaagagtcagaccatcgcatgcagaagcggacccacctggtgggggccacagcgactaaatagtggaggccggtgggacagcgaggttatggcctcaactgtggtgaagtacctttcccaggaggaagcgcaagccgttgatcaggagctttttaatgaataccagttctccgtagaccagttgatggagttggcaggcctgtcctgcgctaccgcgattgccaaggcataccctccaacatcaatgagtcgcagccctccgaccgtgctggtgatatgcggcccagggaacaacggcggggatgggcttgtgtgtgcccgccacctgaaactgttcggctatgagcctaccatatattatccaaagcgccctaataaacccctcttcaccgccttagtcacccaatgccagaaaatggatattcctttcctcggggagatgcctgctgagcccatgacgatagatgagctgtacgaactagttgtggatgccattttcggtttttccttcaaaggtgatgtcagagaaccttttcattccattctgagtgtcctaaaaggcctgaccgtcccaattgccagtattgacatcccgagtggcgcgggcatccagaaagttggctgggggcggctcggcccttaccctccagactcctgcccccatcaagtgtag

SEQ ID NO: 12374 - RNA, 783 nt, synthetic construct
  misc_feature 1..783: note = source = /note="Description of Artificial Sequence: Synthetic coding sequence"
  source 1..783: mol_type = other RNA
atgtcacgactgcgtgcgctgcttggactgggtctgctagtagccgggtctcgcgtgccaagaatcaagtcccagactatcgcctgtaggtccgggccgacctggtgggggccacaaaggcttaatagcgggggccgctgggacagcgaggttatggcttcaacggttgttaaatacttgagtcaggaggaggcacaggcagtggatcaagaactctttaatgaataccagttttcagtggatcagctgatggagctggccggcctgtcctgtgctaccgcgattgccaaagcctacccccctacaagcatgtctaggtcccccccaactgtccttgtcatatgtggtcccggtaacaatggaggagatggcctcgtgtgcgcccggcatcttaaattattcggctatgaacccacgatttattacccaaagcggcccaacaagccattgttcacagcccttgtgacccagtgccaaaaaatggatataccttttctgggagaaatgccagccgagctgcaaggcagatgtagcgggacagttcctcagcatcccgagtgtcccgagggaacccattgcgcacattgccagcacagacactcgttgcgcatgggccgtggcgaaggaaaatgctggcgcgatcctgctcgactggctcacattccgcatagtcctcagaagatttgtaaccccgtatacaggagcttacccctgcctggtggttctttctgcgctacttgttcaggagaagaggtgccagcagaacccgcaacacttccctag

SEQ ID NO: 12375 - RNA, 867 nt, synthetic construct
  misc_feature 1..867: note = source = /note="Description of Artificial Sequence: Synthetic coding sequence"
  source 1..867: mol_type = other RNA
atgtcaagactacgcgctctccttggcctggggctgctggtggccggttccagagttcctcgcatcaagtctcaaaccatcgcatgcagaagcggccccacatggtggggtccccagaggttaaatagcggcggacgttgggatagtgaggtcatggcaagcaccgtggttaagtatttgtcccaggaggaggcgcaagcagtggaccaagagctctttaacgaataccaatttagcgttgaccagctcatggaactggccggacttagctgtgcaaccgctattgctaaagcctacccgccaacatctatgtcaagatctccacccaccgtcctagtgatctgtggccctggtaataatggaggcgatggcttggtctgcgcaaggcacctgaaactgttcggatatgaaccaacgatctattatcctaaaagaccaaacaaaccactcttcaccgcgctggtgactcaatgtcagaagatggatatcccgtttctgggcgaaatgcccgccgaacctatgaccatcgacgagctttacgaattggtagtcgatgcaatattcggattctctttcaaaggcgacgttagggaaccattccacagcattttaagcgtactaaagggattgacagtgccaatcgcgtctatagatatcccttctggttgggatgtggagaaaggcaacgctggtggtatacagcccgatctgcttatctccctcaccgctcccaagaaaagtgccacacagttcactggaagatatcattacctgggtggacgctttgtgcctcccgccctcgaaaagaaataccagctcaatcttcccccgtaccctgatacagaatgcgtataccgcttacagtag

SEQ ID NO: 12376 - RNA, 879 nt, synthetic construct
  misc_feature 1..879: note = source = /note="Description of Artificial Sequence: Synthetic coding sequence"
  source 1..879: mol_type = other RNA
atgcatcttagattgatctcatggctgtttatcatcttaaattttatggaatatatcggctcccaaaatgcctcaagaggaaggaggcagagacgaatgcaccccaatgtgagtcagggttgtcagggcggctgcgccacatgttccgattacaatggctgcctctcttgtaaacctcgccttttcttcgccctcgagaggatcggaatgaagcagataggggtgtgtctgtcgtcctgtccctctggctactacggcacacggtaccccgacatcaacaaatgcactaagtgtaaagccgactgcgatacatgctttaacaagaatttctgcacaaaatgtaagtctggattttatctccacttaggtaagtgcttggacaattgcccagagggccttgaggccaataatcatacgatggagtgcgttagcatagttcactgcgaggtgagtgagtggaacccatggtctccttgtacaaagaaggggaagacctgcgggttcaagaggggcacagagacgcgagtcagagaaattattcagcatccttcagcaaaaggtaatctatgtccgccaacgaatgagacacgtaagtgcaccgtccagcgtaaaaaatgccaaaaaggagagaggggaaaaaaaggccgcgaacgcaagaggaaaaagcctaacaaaggcgagagcaaagaagcgattccagattcaaaatctctggaatccagtaaggaaattccagaacagagggaaaacaagcaacagcagaagaagagaaaggtgcaagacaaacagaaaagcggcatcgaagtaaccctggctgaaggcttaacaagcgtttcccagcgcacacagcctacgccctgccgccgaagatatttatag

SEQ ID NO: 12377 - RNA, 2871 nt, synthetic construct
  misc_feature 1..2871: note = source = /note="Description of Artificial Sequence: Synthetic coding sequence"
  source 1..2871: mol_type = other RNA
atggagactcaggaactacggggcgcactggctctcttgctcctctgctttttcacctccgcctctcaagacttgcaagttatcgaccttcttacagtgggagaaagcaggcagatggtagccgtcgccgagaaaatcagaaccgccttgctcacagccggggatatatatctgttaagcacctttagactgccccccaagcagggcggcgtgttattcgggctgtactctaggcaggataatactaggtggttagaggcgagcgtagtgggcaaaatcaataaagttctagtgcggtatcagagggaagacggaaaagtacacgcagtcaatctccagcaggcaggccttgctgacggccgtacgcacactgtactgttgaggcttagaggtccatcacggcctagcccagctcttcacctgtatgtggactgcaaactaggcgatcaacacgccggtcttcctgctctggcccctatcccacccgccgaagtagatggattagaaattagaacgggacaaaaagcatacctccggatgcagggcttcgtggagagcatgaaaattattctaggcggcagtatggctcgagtgggagcattgtcagagtgtccgtttcaaggagatgagagtattcacagcgctgttactaacgccctgcactcaatcctgggtgagcagaccaaagcccttgtcacacaattaacactcttcaaccaaatactggttgagcttagagacgacatcagggaccaagtcaaggagatgtccctgatcaggaacacaatcatggaatgccaggtgtgtgggtttcacgaacagaggtctcattgttctcccaatccctgctttaggggagtggactgtatggaggtgtatgagtatcccggctaccggtgtggcccttgccccccaggtctgcaaggtaatggcactcactgctcagatattaatgaatgcgcacacgctgacccttgttttcctggctcttcttgcatcaacacaatgcccggcttccactgtgaggcatgccctcggggctacaagggcacgcaggtctccggggtaggcattgattatgcacgcgcatccaagcaggtctgtaacgacatcgacgaatgcaacgacggtaataacggcggatgtgacccaaattccatttgtaccaatacagtggggtcttttaagtgcgggccttgtcgattaggatttctggggaaccagtcccagggctgtctccccgccagaacatgccacagcccggcccacagtccctgccatatccacgcacattgcctgtttgaacggaacggagctgtcagctgtcaatgtaatgtgggctgggcgggaaatggtaatgtctgtggcaccgacaccgatattgacggatatccagaccaggcactgccatgtatggacaacaacaagcactgcaagcaggataattgtctgctgacaccaaacagtggacaagaggatgctgataacgacggggtgggagatcagtgcgatgacgacgccgacggcgatgggatcaagaatgtagaagacaactgtaggctgttccccaataaggaccagcaaaactccgacacagactctttcggcgacgcatgtgataactgtcctaatgttcccaacaatgatcagaaggataccgatggaaatggggaaggtgacgcttgtgacaatgacgtggacggagacgggatcccaaatggtctggataactgtcctaaggtccccaatcctcttcagacagacagagacgaggatggagtgggagacgcttgcgatagctgccccgagatgagtaacccaacccaaacagacgccgattcggacctagttggtgacgtctgcgacaccaatgaggactctgatggcgatggccatcaggataccaaagataactgcccgcagctcccaaatagttcccagttagacagtgataacgacgggctcggagatgagtgtgacggcgatgatgacaatgatggcatacccgattacgtcccccccggccctgataactgccggctggttcccaatccaaatcagaaggatagcgacggaaatggcgtcggcgatgtgtgcgaagacgatttcgataatgatgctgtggtggacccactcgatgtgtgcccagagtcagctgaggtaacactaaccgacttcagggcatatcagacagttgtgctggatcccgagggagacgcccaaatcgatccaaactgggtggtgctgaaccaaggaatggagattgtgcagactatgaacagtgacccagggctagccgtcggatacacagccttcaatggtgtggattttgaaggaactttccacgtgaataccgtcacagacgacgactacgctggattcctgttctcctatcaggactctggcagattttatgtcgttatgtggaaacagacagagcagacctattggcaggctactcctttcagggccgttgcccagcccggcttgcagctgaaagccgtgacaagtgtctcagggcccggcgagcatctccgaaacgcattgtggcataccgggcatacccctgatcaggtacgtttgctgtggacagaccctcgcaacgtcggttggcgagataagaccagctatagatggcagctgttgcatagaccacaggttgggtacattcgcgtcaagttgtatgagggaccgcagctagtggctgacagtggcgttatcattgatactagcatgcgcggcggcaggctgggcgttttctgctttagtcaggaaaacattatttggagcaacttacagtatagatgcaatgacactgtacccgaggattttgagcccttccgccgtcagctgcttcagggaagggtatag

SEQ ID NO: 12378 - RNA, 1110 nt, synthetic construct
  misc_feature 1..1110: note = source = /note="Description of Artificial Sequence: Synthetic coding sequence"
  source 1..1110: mol_type = other RNA
atgttaccatggctcctggtttttagcgcactgggaattcaggcctggggggactcctcttggaataagactcaggcaaagcaggtgtcagagggtttgcagtacttatttgagaatattagtcagctgaccgaaaaggacgtgagcacaacagtgagccgtaaggcctggggggcggaggctgtggggtgctcaattcagctcaccacccccgttaacgttttggtgattcaccatgttccgggccttgaatgtcacgaccagacggtttgctcccagaggcttcgtgagctgcaagcacatcatgttcataacaattcaggctgcgacgttgcctataattttctcgtgggggacgacggacgggtttatgaaggagttggctggaacatccaaggcgtgcacacccagggctataacaatatctcattaggctttgccttcttcggaacgaaaaagggacattctccctctcctgccgcgttgtctgccatggaaaacctgattacttacgctgtccagaagggacaccttagttccagctacgtgcaacccctactaggaaaaggagaaaattgtctggccccacgtcaaaagacgtctcttaaaaaggcatgccccggagtcgttcccagaagtgtgtggggtgctagagaaacacactgtccccgcatgacactcccggctaaatatggaattatcatacataccgcaggccggacttgtaacataagcgatgaatgcagactcctggtgagggacattcaatctttctacatagaccggctcaagtcttgtgatattggatacaactttctggttggccaagatggtgccatttacgagggagtaggatggaatgttcagggttcttctactcccggctacgacgacatcgccttagggataacttttatgggtacatttaccggcattccgcctaatgccgctgctctggaggccgctcaggatttaatacaatgtgctatggttaagggttacttaactcctaactaccttctggtgggacactcagacgtggctagaacactcagtcctggacaggccctgtacaacataatttcaacttggccgcacttcaagcactag

SEQ ID NO: 12379 - RNA, 675 nt, synthetic construct
  misc_feature 1..675: note = source = /note="Description of Artificial Sequence: Synthetic coding sequence"
  source 1..675: mol_type = other RNA
atggagaagatccctttcgttttgggaggcaatctgcagggtggcgagcttgtggtggcttacccttatgacctggtgcggtccccctggaagacccaggagcatacacctacgcccgacgatcatgtgtttagatggttagcctattcgtacgctagcacccaccgattaatgactgatgcaagacggcgcgtttgccacactgaggattttcagaaagaggagggaactgttaatggcgcatcttggcacaccgtagctggcagcttgaatgacttctcctacctacataccaattgtttcgagctcagcatctatgtcggatgtgacaagtatccccatgaatcccaattacccgaggagtgggaaaataaccgcgagagcttgatagtttttatggaacaggtccatcgtggcatcaagggattggttagggacagtcacggcaagggcattcctaacgctatcatctctgtcgagggtattaatcacgacatccgcaccggacgtgtctcattgcaaaaactgtcattagcttgtcggagggttcgttgcgcctttgctctcagtagtagcagtacaatgattgtccgccccccgcagccttatggtaccgttccccatagttcccctgatcccgtaactaccaaaatctcacctttgagaaacttttag

SEQ ID NO: 12380 - RNA, 285 nt, synthetic construct
  misc_feature 1..285: note = source = /note="Description of Artificial Sequence: Synthetic coding sequence"
  source 1..285: mol_type = other RNA
atgcccgtcatcgcagggggaatcttggctgccctcttgctactcatcgtggtggtgttgtgcctgtactttaaaatccacaatgccctgaaagccgccaaagagcccgaggccgttgccgttaaaaaccataatcccgacaaagtgtggtgggctaagaatagtcaagccaaaacaatcgccacagagagttgccccgctctgcagtgttgcgagggatatcgaatgtgtgcaagtttcgactcgctccctccatgctgctgtgatatcaatgaaggtctatag

SEQ ID NO: 12381 - RNA, 285 nt, synthetic construct
  misc_feature 1..285: note = source = /note="Description of Artificial Sequence: Synthetic coding sequence"
  source 1..285: mol_type = other RNA
atgcctgtgatcgctggaggaatcctggctgccttactgcttttaatcgtggtcgttctctgcttgtactttaaaatccacaatgctctcaaggccgccaaggagcctgaagctgtcgccgttaaaaatcataacccagacaaggtatggtgggccaagaactcccaagcaaagacaattgcaactgaaagctgtcctgcactacagtgctgcgagggataccgtatgtgtgcatcgtttgactcactgcccccctgctgttgcgacattaatgaaggcctgtag

SEQ ID NO: 12382 - RNA, 1026 nt, synthetic construct
  misc_feature 1..1026: note = source = /note="Description of Artificial Sequence: Synthetic coding sequence"
  source 1..1026: mol_type = other RNA
atggtccccgcagctggcgccctcttgtgggtactgctcctcaatttggggcctcgcgccgctggcgcgcagggactaactcagactcccacagagatgcagcgtgtctccctccggttcggcggcccaatgactcgctcttaccgctctaccgctcgcaccggcctccctagaaagacaagaatcatactggaagacgaaaacgacgcaatggccgatgcagaccgactggccggtccggccgcagctgagttattggcagccactgtctccactggcttctcacggtccagtgctatcaatgaagaggatggctcttccgaggaaggtgtagtcattaacgcaggcaaggactctacaagccgagagcttccatcagccacccccaatactgctggatcatccagcactcgattcatcgcaaactctcaagagccagaaataagacttacctcctcgctgcctcgatcgccggggaggtctacagaggaccttccaggatctcaggccaccctgtcccagtggtcaactccaggttccactccaagccggtggccttcccctagccctacagctatgcccagcccagaggatctgcgccttgttctaatgccatgggggccatggcactgccactgcaaatccggaacgatgtctcggtctagaagtggaaagttacacggattgagtggaaggttgcgagtcggcgcgttgagccaacttcgaaccgaacacaaaccctgtacctaccaacagtgtccctgtaatcgacttcgcgaagagtgcccgctcgatacatctttgtgtactgacactaattgcgcttcacagagtaccaccagcacacggacgacaaccaccccttttcccacaatccatttgcgatcctccccttcccttcctcccgcttcaccctgccccgccttagcattttggaaacgagttaggatcgggctggaggatatctggaatagcctttcctcggtgttcaccgaaatgcagcctatcgaccgcaaccagcgctag

SEQ ID NO: 12383 - RNA, 366 nt, synthetic construct
  misc_feature 1..366: note = source = /note="Description of Artificial Sequence: Synthetic coding sequence"
  source 1..366: mol_type = other RNA
atggatgtcttgtttgtagccatatttgctgtaccattgatcctgggacaagagtatgaggatgaggaaagactcggagaggatgaatactaccaggtagtgtactattacaccgtaacacctagctatgacgatttttccgccgacttcacaatcgattatagcatttttgaatctgaggacagattgaacagactagataaggacatcaccgaagcgattgaaaccactatatccctggaaacggcccgggccgaccacccaaagcctgtcactgttaagcccgttaccaccgaaccagtcgaagaaggctgttatgactccctcgatggcagcctggcacgcggaaattggaagattaaatag

SEQ ID NO: 12384 - RNA, 396 nt, synthetic construct
  misc_feature 1..396: note = source = /note="Description of Artificial Sequence: Synthetic coding sequence"
  source 1..396: mol_type = other RNA
atggacgtcctgtttgttgcgatcttcgcggtgcctctaatcctagggcaagagtacgaggatgaggaaagactgggcgaagatgaatattaccaggtggtgtactactacactgttactccttcctatgatgactttagtgcagatttcacaatagactatagcatttttgaaagcgaggaccggctcaatcggctggacaaagacatcacagaggctattgaaactaccatttctctagaaacagcccgagcagatcatcccaaacccgtcaccgtcaaacctgtcactaccgaaccttcccccgacctgaatgacgccgtgtcaagtctcagaagccctattcccctgttgctctcttgtgccttcgtccaggtggggatgtacttcatgtag

SEQ ID NO: 12385 - RNA, 396 nt, synthetic construct
  misc_feature 1..396: note = source = /note="Description of Artificial Sequence: Synthetic coding sequence"
  source 1..396: mol_type = other RNA
atggacgttctctttgttgcaattttcgccgtgccactgattctcggacaggaatatgaagacgaagaaaggcttggggaagatgagtactaccaggttgtttactactataccgtgaccccgtcttatgacgacttctcagccgattttacaatagactattccatttttgagtccgaggaccgcctgaataggctagataaggatataaccgaggcgatcgagacgacgattagtttagaaacagcacgcgcggatcatcccaaacccgtgactgtgaagcctgttaccaccgaaccatcgcctgacctcaacgacgccgtctcctcactgagatccccaatcccccttctcctttcatgcgcctttgttcaagtgggcatgtacttcatgtag

SEQ ID NO: 12386 - RNA, 312 nt, synthetic construct
  misc_feature 1..312: note = source = /note="Description of Artificial Sequence: Synthetic coding sequence"
  source 1..312: mol_type = other RNA
atgtccggaagagggaagggaggcaaaggactggggaaaggaggcgcgaaaaggcatcggaaagtgcttcgggacaatatacagggaatcacaaagcccgccattagacgtctcgctagacggggaggggtgaaaagaatcagtggattgatctacgaagagactcgaggcgtactgaaagtattcctggaaaacgtgatccgcgatgcagtgacttatacagagcacgctaagagaaaaactgttaccgctatggatgtcgtgtacgctctgaagcgccaagggcgaaccctgtatggatttggaggctag

SEQ ID NO: 12387 - RNA, 312 nt, synthetic construct
  misc_feature 1..312: note = source = /note="Description of Artificial Sequence: Synthetic coding sequence"
  source 1..312: mol_type = other RNA
atgtctggtaggggcaaggggggaaaagggctgggaaagggaggagccaagaggcaccggaaagtgctgagagacaacattcaagggattaccaaaccagccattcgcagactcgcgcgccgcggaggagtaaagagaattagcggactcatctacgaggaaacaaggggggtgctcaaggtgttcctcgaaaatgtcattcgggatgctgtcacatatacagagcatgcaaaaagaaaaaccgttacagccatggacgtggtctatgcactcaagagacagggacgaacactgtacggattcggaggatag

SEQ ID NO: 12388 - RNA, 1404 nt, synthetic construct
  misc_feature 1..1404: note = source = /note="Description of Artificial Sequence: Synthetic coding sequence"
  source 1..1404: mol_type = other RNA
atgctcggcatttggatagtggcctttctcttcttcggcacaagtcgaggcaaggaagtgtgttacgagcgactgggctgcttcaaagatggactgccctggactaggacattctctacagagctagtcggactgccctggtctcccgagaagattaatacccgattcctcttgtacaccattcataatccaaacgcctaccaggaaatctccgcagttaatagctcaacgattcaggcatcatacttcggcactgacaagattacgcgcataaatatcgccgggtggaaaacagacggaaagtggcaacgggatatgtgtaacgtgttactgcagctggaggacattaactgtatcaacctcgactggattaatggaagccgcgaatatatccacgccgtcaataatctgagagtcgttggtgcagaggttgcctacttcatagacgtactgatgaagaagtttgagtactcccccagtaaggtgcatctgatcggccactcgctaggagcgcacctggccggcgaggcaggcagcaggatcccagggctgggcaggataacaggtctcgatccagctggtccatttttccacaatacacccaaggaggtgagactggacccttcagatgcaaactttgtggatgtcatacacacgaacgccgcccggatcttgttcgagcttggcgtcggaaccattgatgcctgcggtcacctagacttttacccaaacggcggaaagcatatgcccgggtgtgaggacttaattacgccactgttgaagttcaatttcaacgcatacaaaaaagaaatggcctcttttttcgactgcaatcatgcccgctcatatcagttctacgcagaatcaatcttaaatcctgatgcttttatcgcctatccatgccgtagctacacctcttttaaggccggcaattgttttttttgctcaaaagaaggctgtccgactatgggtcattttgccgaccgcttccacttcaaaaacatgaagacaaatggctctcattatttcctcaatacaggctccctgtcacccttcgcgaggtggaggcacaaactgagtgttaagttaagcggctctgaagttacacagggcacagtatttctgagagtagggggtgccgtgcgcaaaacgggggagtttgccatagttagcggaaaactggaacctggtatgacctatactaaactcatcgacgcggatgttaacgttggcaacatcacatccgttcagtttatttggaaaaagcacctcttcgaagattcacagaataaactaggagctgagatggtcataaacacaagcggaaagtacggatataagtcaacattctgctcccaggatataatggggccaaatattctgcaaaacctgaaaccgtgctag

SEQ ID NO: 12389 - RNA, 1287 nt, synthetic construct
  misc_feature 1..1287: note = source = /note="Description of Artificial Sequence: Synthetic coding sequence"
  source 1..1287: mol_type = other RNA
atgattactggtgttttttctatgcgtctgtggacccctgtcggcgtcttaacttcacttgcctattgccttcaccagagacgagttgccctcgctgagttgcaggaagctgatggtcagtgccccgtggaccggtccttgctgaagctgaagatggtgcaggtggtttttcgtcacggggctcggtcccccctcaaacccctgccactggaggagcaggtcgaatggaacccccagttactagaggtcccgccacagactcagttcgactacactgtgaccaacctggccggtggacctaaaccatactcaccttatgattcccagtaccacgagaccactcttaagggtggaatgttcgctggccagctaactaaagtgggtatgcaacagatgtttgctctaggcgagcgactccggaaaaattacgttgaagatatcccatttctgtcacctacattcaaccctcaggaggtgtttatccggtctacgaacatctttcgcaatctcgaaagcacaagatgtctgctggccggcttatttcagtgtcaaaaagagggacctataatcatccataccgacgaagctgacagcgaggtactgtaccctaactaccagtcctgctggtctctccgccagcggaccagaggcagaaggcagactgctagtctgcagcctggaatctctgaagatctgaaaaaggttaaggaccgcatggggatagatagctctgataaagtggacttttttattctcctggataatgtggcagctgagcaagcccacaatctgccaagctgtcctatgcttaagagattcgcacgcatgatcgaacagcgcgcagtggataccagtctctatatcctcccaaaagaggacagggaaagccttcagatggcagtcggacccttcctgcacattctagagagtaacctgttaaaagctgtcgacagtgccacagcacctgataaaataaggaaactctacttgtatgctgctcatgacgttacatttattccacttctgatgactttagggatctttgaccataaatggcctcctttcgccgttgacctcactatggagttataccagcatctggaatcaaaggaatggttcgtccagctgtactatcacggcaaggagcaagtgccgcggggttgccctgatggactgtgccctttagatatgttcttaaacgccatgtccgtatacactctttcgcccgaaaagtatcacgccctatgtagccagacacaggttatggaagtcggcaacgaggagtag

SEQ ID NO: 12390 - RNA, 711 nt, synthetic construct
  misc_feature 1..711: note = source = /note="Description of Artificial Sequence: Synthetic coding sequence"
  source 1..711: mol_type = other RNA
atgtgcgtgacataccacaatgggaccggctactgtaagtgtcccgagggctttctgggagagtattgccagcaccgggatccctgcgaaaaaaacagatgtcagaatgggggcacctgcgtcgctcaggccatgctggggaaagccacttgtcgttgcgctagcggctttacgggggaggactgccagtactcaacttcgcacccttgctttgtctcaaggccctgcctgaacggaggtacatgccacatgctttcacgtgacacatacgaatgtacctgccaggtgggcttcaccggaaaggagtgccagtggactgacgcatgcctctctcatccttgtgccaacgggtctacctgcaccactgtcgctaaccaatttagttgtaagtgtttgaccggattcactggacaaaaatgtgagacggatgttaatgaatgtgacatcccaggccactgtcagcatggaggaacctgccttaatctgcctggcagctatcaatgtcaatgtttacagggctttaccggacaatattgtgactcactgtacgtgccgtgcgccccctctccctgcgtcaatggaggaacctgccggcagacaggtgactttactttcgaatgtaattgtctgcctgaaactgtaagacggggaactgagttatgggagcgagatagagaggtttggaatgggaaagagcatgatgagaattag

SEQ ID NO: 12391 - RNA, 990 nt, synthetic construct
  misc_feature 1..990: note = source = /note="Description of Artificial Sequence: Synthetic coding sequence"
  source 1..990: mol_type = other RNA
atggtaaccaaagccttcgttctgctagctatctttgcggaagcgtctgctaaatcttgcgcgcccaacaaagccgacgtaatattggtattctgctacccaaaaacgatcattaccaagatccccgaatgcccctacggctgggaggtgcaccagctggccctcgggggcctgtgttataacggagtgcacgagggcggatactaccagtttgtgattcctgacctttcccccaaaaataaatcatactgcggcacccagtccgagtacaaaccacccatctatcacttttacagccatattgtcagcaatgacacaacagtaatcgtgaagaaccaacccgtgaattattcattttcatgcacttatcacagtacttacctggtcaatcaagccgcgtttgatcaaagagtcgcgactgtgcacgtcaaaaatggatcaatgggtacctttgaatctcagctcagcctgaacttttacacaaacgctaagttctctatcaagaaggaggccccgtttgtgctggaagcgtcagagatcggttcggacttattcgcaggcgtagaagccaaaggacttagcatacggtttaaggttgtgttgaattcctgctgggccacaccctctgctgatttcatgtacccactgcagtggcagctaattaacaaaggatgtcctacagacgagaccgtgctggtacacgagaatgggagagaccatagagccacctttcagttcaatgctttcagattccagaacatcccgaaactttctaaggtttggctgcattgtgaaaccttcatctgtgatagcgaaaaactttcgtgccccgtgacatgcgataaaaggaagcggcttcttagagatcaaactggaggagttttggtcgtcgagctttccctgcgctctaggggtttctcctccctttatagtttcagtgacgtacttcaccatttgataatgatgctcggaatttgtgccgtgctatag

SEQ ID NO: 12392 - RNA, 1161 nt, synthetic construct
  misc_feature 1..1161: note = source = /note="Description of Artificial Sequence: Synthetic coding sequence"
  source 1..1161: mol_type = other RNA
atggcccaatggcactgctcccagaggacccaggcaggaggtcacggcgtcggagaacgcctggcccagtgccaggaccaatctagccggcacgccgctgagctgcgagacttcaaaaataaaatgctcccactgctagaggtggcggagaaagaacgtgaagccctgcgcaccgaggcagatacaatctcagggagggtcgatagactagaaagggaggtggattatctcgagacccagaacccggctctgccttgtgtggagttcgacgagaaggttacgggaggacccggaaccaaaggtaagggccgcaggaacgagaagtatgacatggttaccgactgtggctacacgatcagccaagtaagatctatgaagatcctcaaacggtttggcggacccgcaggattgtggaccaaagaccctttaggtcagacagaaaagatatacgttctcgacggtacgcaaaatgacaccgctttcgtgtttccccgcctccgcgacttcacccttgctatggctgcccgaaaagccagccgagtccgggtcccctttccgtgggttggaactggacagcttgtatacgggggattcctgtattttgcccggagacccccaggccgccctggcggaggaggagagatggagaacacccttcagctgattaagttccatctcgccaacaggacagtcgtggatagctctgtgttccccgccgaagggctgattccaccatacggactgaccgccgatacatacattgacctcgccgctgatgaggaagggctgtgggcggtatatgctacccgggaagatgatagacacttatgcctcgcaaagctagaccctcagactctcgataccgagcagcagtgggatactccgtgccccagagagaatgcagaagccgcatttgttatctgcggaacactgtacgtagtctataataccaggcctgcttccagggctagaattcagtgcagctttgacgcttccggcacactaacaccggaacgagccgccttgccctactttcccaggagatatggcgcccacgcatccctgagatataaccccagagagagacaattgtacgcatgggacgatggctatcagattgtttacaagttggagatgcgcaaaaaggaggaggaggtgtag

SEQ ID NO: 12393 - RNA, 510 nt, synthetic construct
  misc_feature 1..510: note = source = /note="Description of Artificial Sequence: Synthetic coding sequence"
  source 1..510: mol_type = other RNA
atgtcagagcgagtggaaaggaactggagcacaggcggatggctgttggccttgtgcctggcttggctgtggacacatctcacactcgcggccctgcagcctcccaccgctacagtattagtgcagcaaggaacatgcgaagttatagccgcccaccgttgttgtaatcgtaaccggatcgaggaaagatcacagaccgttaagtgttcttgcttttccgggcaagtcgccggaactacccgtgcaaagcccagttgcgtggatgacctcctactggccgcacactgcgctagaagggacccccgtgcagccttacgtcttctgttgccccaaccccccagtagttgtcgggacggaggcgtgcgctggagccccgcttgtagagggaggagcgtgaggtgcagccggacatgtcgagacggagctgccgccgtagatactaagagtaagcctcctaggagtcacgatagtagctggggcagccgtccagggcaggagcgtcttgactag

SEQ ID NO: 12394 - RNA, 693 nt, synthetic construct
  misc_feature 1..693: note = source = /note="Description of Artificial Sequence: Synthetic coding sequence"
  source 1..693: mol_type = other RNA
atgagactcgccggaccattgcggattgtggtgcttgtggtgagcgtgggcgttacatggattgtggtgtcaattctgttgggtgggccgggctccgggttcccccggattcagcagctcttcacttctccagaatcctcagtgactgcggcaccccgtgctcgcaagtacaaatgtgggcttccacagccctgcccagaggaacatttagcattccgcgttgttagcggcgccgctaatgtgatcggccccaaaatttgcctcgaagacaagatgctcatgtccagcgtgaaggataacgtaggaagaggactcaacattgctttggtgaatggtgtatcaggtgagttgatagaggcaagagcctttgatatgtgggcaggagacgttaacgatctgcttaaatttattaggccactgcatgaaggcacactggtctttgttgcgagctacgatgacccagcaactaagatgaatgaagaaacgagaaagctgtttagcgaactcgggagcagaaacgccaaagagctggcatttagggactcatgggtttttgttggagccaaaggtgtgcagaacaagtcaccgttcgaacagcacgtgaagaattcaaagcattcaaataaatacgagggatggccggaagcactcgagatggaaggatgtatccctcggcgatccacggcttcatag

SEQ ID NO: 12395 - RNA, 1176 nt, synthetic construct
  misc_feature 1..1176: note = source = /note="Description of Artificial Sequence: Synthetic coding sequence"
  source 1..1176: mol_type = other RNA
atgctgagaccaggcggagctgaggaggcagcccagctcccactccgaagggcatccgctcctgtacccgtgcctagccccgcagcaccagatggctctcgggcctctgcaaggctaggattagcctgcttgttgctactacttctcctgactttgcccgctcgcgttgatacaagctggtggtacattggcgcactgggtgccagggttatatgtgacaatatccccggcctcgtgtcccggcagagacagctatgccaaagatacccagacatcatgcgcagtgtcggagaaggggctagagagtggatcagggaatgccagcaccagtttagacatcatcgttggaattgcactacactggatagagatcacactgtgttcgggagggtcatgctgcgctctagcagagaggccgcctttgtgtacgccataagttctgccggcgttgttcacgccatcactagagcatgttcacagggagaactgagcgtttgttcttgcgatccctatacccgtgggcgtcatcatgaccaacggggcgattttgactggggcggttgttctgataacatccactatggagttaggtttgccaaggcttttgtggacgccaaagagaagaggctgaaggacgctagggctctgatgaacctgcataataatagatgcggaagaaccgcagtgcgaagatttttaaaactcgagtgcaagtgccatggtgtaagcggatcctgtaccctgaggacctgttggagagccttgtccgattttcggaggaccggagattatctcagacgaagatacgacggagcagtgcaagtaatggctacgcaagacggtgccaattttaccgccgccagacaggggtatcggcgtgctacccgtacagatcttgtttacttcgataattctccagactactgcgttctcgacaaggctgcagggtcactggggaccgccggccgcgtatgttctaagacctctaagggcaccgacgggtgtgagatcatgtgttgtggtagaggctatgacacaacgagagttaccagagtgacacagtgcgaatgcaaattccattggtgttgtgccgtgagatgcaaagagtgccgtaacacggtagacgtccacacatgtaaagccccaaagaaagctgaatggttggaccagacctag

SEQ ID NO: 12396 - RNA, 1119 nt, synthetic construct
  misc_feature 1..1119: note = source = /note="Description of Artificial Sequence: Synthetic coding sequence"
  source 1..1119: mol_type = other RNA
atgctcgacgggcttggtgtggtggctatctcaatttttgggattcagctaaaaacagaaggatcattaaggaccgcagtacctggcatacctacacagagcgccttcaacaagtgtcttcagcgctacattggtgcgctcggagctagggtcatttgcgataacatccctgggctggtgtcccgacaaaggcaactctgccagagatatccagatatcatgcgatcagtcggcgagggggcccgcgagtggatccgcgagtgccagcatcagttccgccatcatagatggaattgtaccactcttgaccgcgatcacaccgtattcggaagagtgatgctccgttcaagcagggaggcagcattcgtgtatgccatctcttccgctggcgtcgtgcacgcaatcactcgcgcttgctcccagggcgaactgtccgtgtgctcctgcgatccatatacacgaggacggcatcatgaccagagaggcgatttcgattggggcgggtgcagcgacaatattcattatggggtgagatttgctaaggcgtttgttgatgccaaggaaaaacgattgaaagacgcccgggctttaatgaacttacacaacaaccggtgtggcaggaccgccgtcaggagatttttaaaattagaatgcaagtgtcacggggtgtctgggagttgcaccctacgtacctgttggagggccctgagcgattttagaaggacgggtgactatctgcggagacgatacgatggggcagtccaggtgatggctacccaggacggcgctaactttacagctgctcggcagggttacaggagggcaacaagaaccgacctagtctactttgataattctccagactactgcgtcctcgataaggcggccggctccttgggcaccgcagggagggtttgtagtaaaactagcaaaggtaccgatggatgcgaaatcatgtgctgcggaagaggatatgacactactagagtaactcgggtgacgcaatgcgagtgcaagttccactggtgctgcgcagtgagatgcaaggaatgtagaaacaccgtggatgtgcatacttgtaaagcacctaagaaagccgagtggctggatcaaacatag

SEQ ID NO: 12397 - RNA, 1242 nt, synthetic construct
  misc_feature 1..1242: note = source = /note="Description of Artificial Sequence: Synthetic coding sequence"
  source 1..1242: mol_type = other RNA
atggagaacatgctgctctggctaatattctttacccctggatggacactaattgacggcagcgagatggagtgggactttatgtggcacctgcgaaaagtgcctcgcattgtcagcgagagaacctttcaccttacttctcccgcttttgaagcagacgcaaagatgatggtgaataccgtctgcggaatagaatgccagaaggagcttccgaccccttcactctctgaactcgaggactatttgtcttacgagaccgtgtttgaaaatggtacaagaacattaacgagggttaaagtgcaagacctcgtgctggagccaacccagaacattacaaccaaaggagttagcgtgagacgcaagaggcaagtgtatggaacagactcacgattttctatccttgacaaacgattcctgacgaattttccgttttctactgctgtgaaactttcaaccggctgctccggtattcttatatcaccccagcacgtgttgaccgccgcccactgcgttcacgacggcaaagattatgttaaagggtcaaaaaagctgcgcgtgggactgctgaagatgaggaacaaatctggtggcaaaaagagaagagggtccaaaaggagtcgtcgggaggcttccgggggagatcagcgtgaaggaactcgggaacacctccgagaacgtgccaaagggggccgaaggaggaaaaagtcaggaaggggacagcgaattgctgaaggtaggccatcctttcagtggacacgggtgaagaacacacatattccaaaggggtgggcacgtggggggatgggggatgcaactttggactacgattacgctctgcttgaactgaaacgggctcataagaagaaatacatggagctggggatctcacccactattaaaaaaatgcccgggggcatgatacatttcagcggcttcgataacgatcgagcagaccagctggtgtaccgcttctgttcagtgagcgacgaatcaaatgaccttctgtatcaatactgcgacgctgaatcaggctctacagggtcaggtgtatatctccgcctgaaggatcccgacaaaaagaattggaagaggaaaattatcgctgtgtattcaggacaccaatgggtcgatgttcatggcgtgcagaaagattataatgtggccgtgagaatcaccccactgaagtacgcgcagatttgtctctggattcatgggaatgatgctaactgtgcatacggatag

SEQ ID NO: 12398 - RNA, 1143 nt, synthetic construct
  misc_feature 1..1143: note = source = /note="Description of Artificial Sequence: Synthetic coding sequence"
  source 1..1143: mol_type = other RNA
atgggcgcaacaactatggatcagaaatcattatgggctggcagcgcatataaacttgtctgctattttaccaattggtcgcaggatcggcaggagcctgggaagtttacacctgagaacatcgacccattcctctgctctcatctgatttactcttttgcatccatcgaaaataacaaagtgattataaaagacaaatcagaggtcatgttgtaccaaaccatcaactccttgaagacaaaaaatcccaagctgaaaattctcttgtctattggaggttacctgttcggctccaaagggttccaccccatggtggactcgtccacttccaggctcgaattcataaatagcattatcctgttcctgcgtaatcacaactttgacggtttagacgtgtcctggatttaccccgatcagaaagaaaacacccattttactgtcctcattcacgagctggcagaggcatttcagaaagactttacgaagtccaccaaggagcgcctcctgctcactgccggcgtttcagcgggaaggcagatgatcgataattcttatcaggttgagaaacttgctaaggatcttgactttattaaccttctttccttcgacttccatgggtcttgggagaaacctctgattaccggtcacaacagtcccttgtctaaaggatggcaggaccggggaccgagcagctactacaatgtagagtacgccgtaggctattggatacataagggaatgccatccgaaaaagtcgtgatggggatccccacgtacggccattcattcactctggcctctgctgaaacaactgttggagcacccgcctccggacccggtgctgcggggcccatcactgagagctcaggctttctggcgtactatgagatttgccagttcttaaaaggtgccaagatcactagacttcaggatcagcaggttccttatgcagtaaaaggcaaccagtgggtcggatacgacgatgtgaaatcaatggaaacaaaagtccaattcctcaagaacttgaacctcgggggagcaatgatatggagcattgacatggacgacttcactggtaaaagttgcaatcagggaccttatccacttgtgcaggctgtgaagcggtctctgggttctctgtag

SEQ ID NO: 12399 - RNA, 1173 nt, synthetic construct
  misc_feature 1..1173: note = source = /note="Description of Artificial Sequence: Synthetic coding sequence"
  source 1..1173: mol_type = other RNA
atgggcgctactaccatggatcagaaaagcctctgggcgggtgtggtggtcttactgcttcttcaggggggatcagcctacaagctggtgtgttatttcacaaattggagccaagatagacaggagcctggcaaattcactccagagaacattgatcctttcctgtgctctcatctgatttattcctttgcatctatcgagaataacaaggtaattatcaaagataaatccgaggtgatgctttatcagacgattaactccctaaagactaaaaaccctaaacttaaaattctactgagtatcggcggttacctcttcgggtctaaaggcttccatcctatggttgactcctcgacgtctcgtctcgagttcataaacagtataatcctgttcctccgcaaccataacttcgacggcctggacgtgtcatggatctatccggaccagaaagaaaacacccatttcactgtcctcattcatgaactggccgaggcctttcagaaagattttacaaagagcacaaaggaaaggctgctgctaaccgctggggtctcggctggccgacagatgatcgataattcttaccaggtcgagaagctggccaaagatctcgactttataaacctactcagtttcgatttccacggctcatgggagaagccgctgattacaggtcacaacagccccctgagtaaaggttggcaagatcggggtccatctagctactataacgtcgagtacgccgttgggtactggattcataagggaatgccctctgagaaggtagtaatgggtatcccaacctacggacattcttttaccctagcatctgctgagactaccgttggagcccctgcctctggccctggcgccgctgggcctatcactgaaagttcaggattcctggcttactacgaaatttgtcagttcctgaaaggcgccaaaataacaagactccaagatcagcaagtgccttatgccgtgaaaggtaaccaatgggtggggtatgacgatgtaaagtctatggagactaaagtgcagttcctcaagaatctgaacttgggtggtgccatgatttggagtatcgatatggacgacttcaccggcaaatcctgcaaccagggcccatatccactcgtgcaggctgtgaagcggtctctggggagcctctag

SEQ ID NO: 12400 - RNA, 2202 nt, synthetic construct
  misc_feature 1..2202: note = source = /note="Description of Artificial Sequence: Synthetic coding sequence"
  source 1..2202: mol_type = other RNA
atggcagggggaagggaaacatgtctaccgctaataggcttcattttgatctgcctgaagatggtagccagtgccaagtctgctccagagatcccaacaattgatcaggcttatagcaagctgtcaaatagtattaccgtggaatgggccaccgtgccaggggccacttcatacctccttactgccgaggatggagatactgttattgagaccaccgtcgcaaacagcccaggcacagttactggcctcaaagcagccacctggtatgagataactattcggagcatatctgcagcaggcaggtcccaggcctcgcctcccaaacaagctaagactgtgctggcagcccccatactcgaggtgtccagcccctcgtcggatagcatactggtccaatgggaggcggtgtatatggctattgccttttcagtgtctattatgcgggctaacgggctagggagtatctggaaagagaacacgaccaatacatccctgacgtttacatctttggaggcagggacactttatacaatcaaagcttatgcctggaacgctaaccgcatccccggcgacgactcaacatgtaaccagcgaacctcgcctcgcgcgcccgctaacatacaagtgtcttttgactcaggcgcgctaaaggctagcttcagttgggcaagggctgaaggcgcctttaattataccgtgatggcattaagcgactctagtgagctcacctgcagcacaactttttcttcctgtactatcagctctcttcaatgtggcacggaatacctaatttctgtcttagcttcgaacgatgcaggatcatccaagtcatccagcgccatgacactaaagaccgtggcttgtgccccggggcgagttactattcaggaagacccacctggtcacctgtctgtggcctggtcctccgtggacctgggagactactacgtagtgttcgtgaagagcgacgacggattggaggtacactgtaatactagcctcacacagtgcaattttctgtccgagtgtgggttcacctactttatctctgtattcgtgtataacaaagctggtcagagtccacttggcgatatcttcaactataccaccgcgccatgttgcccctcggacattaatcctgttctcgtgagtagcgaccgcgtagaaattgtttggtcccccgtgagaggcgcagagctttacgagacaaaggctgtggatggatataatatggtggagtgcaatgatacaacccctgcctgcactctgagcgccctagaatgtgacacaaagtataatattacagtgtactctttcaatgaagtgagaggctccaacatgtcatgcacacctcagttcattacaacagctccctgctcaccagaaatcaagaacgtgagccgcgatgccttcagcatgattaacgtccactggagatccacaaatgatgacgcaacttatacggtgaccgcacagggggaaaaaggtctgtaccaatgctccagcactggcgagagttgtactatgagaggtctgccttgcggcagcgttttttctgtgacagctgtcgctgagacccaggccggccggtctcttcccagctattctgtgcctctcgagaccgtaccatgttgcccaactggcttgacagtgacccagatcacacagtctgtcataaacgtctcgtggaccatcgggcgcgtcgctcaaacccatgtagccgtattagagtctcatacgggacagagtaagtgccatactcaccagaaccattgcctccttgggtgtataacatgcggaatcaactacacagtgactctaaaagctatctcggcgacaggactcaccgctgactgctcatatcagagctatttctcaggggcttgctgccctttgggggttaaactgtacagactgggaccaaacggtattcgcatttattggcaagcaagcaggggcagcgcaaattactccaccgatctctatggatcaaaaggaattttcacttgtacaccaagtgccggcctctcgttttgcgatgtgaccgagataccttgcggcgacgtgtatactgttatggtctctccggttgcaaagactggactcaagttgaccttttgcccaaagaaaatctacagcgtgacatgttccggttcgaccctcgggatggtaatatatcgaggtaagaggaacgaggaatag

SEQ ID NO: 12401 - RNA, 555 nt, synthetic construct
  misc_feature 1..555: note = source = /note="Description of Artificial Sequence: Synthetic coding sequence"
  source 1..555: mol_type = other RNA
atgcggggccagggaagaaaggaatcccttagcgattctagggatcttgatggcagctatgatcagcttaccgactctgtcgatgatgagttcgagctttcaacagtctgtcaccggccagagggactggagcaactgcaggaacaaaccaagtttacacggaaagaactgcaagtgctgtacaggggatttaagaacgaatgtcctagtggaatagttaacgaagagaacttcaagcagatttattcccagttttttccacagggcgatagcagtacctatgccacattcctgtttaacgcatttgataccaatcatgacggctcagttagttttgaggaaatgcttgacattatgaaatccatttacgacatgatggggaagtatacctatcccgccctgcgcgaggaggcacccagagaacatgttgagtctttctttcagaagatggatagaaacaaagatggggtcgtgaccatagaagaatttatcgaatcttgccagaaggacgagaacatcatgcgtagcatgcagctatttgataatgtgatctag

SEQ ID NO: 12402 - RNA, 759 nt, synthetic construct
  misc_feature 1..759: note = source = /note="Description of Artificial Sequence: Synthetic coding sequence"
  source 1..759: mol_type = other RNA
atgaggggccaaggccgaaaggaaagcctttccgactcgagggacctggacggctcatacgaccagctgactgggcaccctcccggccccactaaaaaagcgttgaaacagagattcctgaagctattaccttgttgtgggccccaggcactgccatcagtgagtgaatcaaacgtagacgacgagtttgaactcagtacagtgtgtcaccggcccgaaggccttgagcagcttcaagaacagaccaagttcactcgcaaagagctccaggtgctgtacaggggctttaaaaatgagtgtccaagcggcatcgtgaatgaagaaaactttaaacagatttattcccaatttttcccacagggagacagttccacatatgcaacatttttgttcaacgcgttcgatacaaatcacgacggaagcgtcagctttgaagattttgtggctggtctcagcgtaattctccgcggcacagtcgacgaccgtttgaattgggctttcaacctgtatgacttaaacaaggacggttgcattactaaagaagaaatgcttgatattatgaaatcaatttacgacatgatggggaagtatacatacccagccctgagagaggaggctccgagagagcatgtcgaatcatttttccaaaagatggataggaataaggatggggtagtgacaatagaagaattcatagagagctgccagaaagacgagaatatcatgcgatcaatgcaacttttcgacaacgtcatttag

SEQ ID NO: 12403 - RNA, 1377 nt, synthetic construct
  misc_feature 1..1377: note = source = /note="Description of Artificial Sequence: Synthetic coding sequence"
  source 1..1377: mol_type = other RNA
atgcaggctacaagcaacttgctgaacttgctgctgttgagcttgtttgccggacttgacccaagcaaaacacaaatatcgccaaaggagggctggcaggtctatagttcagcgcaagaccccgatgggcggtgtatctgcacggttgttgctcctgaacagaatctttgtagccgggacgccaagagtcgtcagctgcggcagttgttagagaaggtacagaacatgtctcagagcattgaagtactgaatctcagaactcagagggactttcaatatgtcttgaaaatggaaacccagatgaagggactgaaggctaagtttcggcagatcgaggacgatcgcaagacactgatgacgaaacacttccaggagctgaaggaaaagatggatgagctgctcccccttatcccggtgttggagcagtataagacagatgcaaaactaattacgcagtttaaagaggaaatccggaacctgtcagctgtattgactggtattcaggaagagatcggggcttatgactatgaagaactgcaccagcgtgtcttatctctggagacccgccttagggactgtatgaagaagcttacttgcggcaagctgatgaaaataaccggaccagtcaccgttaagacaagcggcacaagatttggtgcatggatgactgaccctctcgcttccgaaaaaaataacagggtgtggtacatggactcgtataccaacaacaaaatcgtccgagagtataaaagtatcgcagattttgtcagcggcgcggaaagccggacatataaccttccattcaagtgggccggtaccaatcacgttgtgtacaatggctccctttacttcaataaataccagagcaatataatcatcaagtactcatttgacatgggcagagtcttggcccaacgctctctcgagtatgccggtttccataacgtttacccctacacctggggaggattctcagatatcgacttaatggctgacgaaatcggactgtgggccgtgtatgcgactaaccagaacgccggcaatatcgtcatctcccagctgaaccaagatactctggaggtgatgaagagctggtccactggatatcctaaaagatcggccggggagtccttcatgatttgcggcacactttacgtgaccaattctcaccttacaggagccaaagtttactactcctatagcacaaagacatcaacgtatgagtatactgatatcccattccacaaccagtatttccacatcagtatgctagactacaacgcgagagatagagcactctacgcgtggaacaacggacatcaagttctgtttaacgttacattgtttcatattattaagactgaggacgacacatag

SEQ ID NO: 12404 - RNA, 915 nt, synthetic construct
  misc_feature 1..915: note = source = /note="Description of Artificial Sequence: Synthetic coding sequence"
  source 1..915: mol_type = other RNA
atgttacccccccccagacccgcagcggcgctcgctctccctgtgctgctcttgttactagtcgttctcacaccaccccctacaggagcccggccttcaccaggccccgattacctgcggcgaggatggatgcggctgctagccgaaggcgaaggatgtgctccttgccgacctgaggaatgtgcagctcctaggggctgtctggctggtcgagtccgggatgcttgcggctgttgctgggagtgcgccaacctggagggtcagctgtgtgatctggatccctctgcccacttctacggacactgcggggaacagttggagtgtcgcctcgacaccggaggcgacctcagccgcggagaagtgcccgagccattgtgcgcctgcagaagccaaagtcctctatgcgggtcagacggccacacttattcccaaatatgtcggctgcaggaggctgccagagcccgccccgacgcaaatcttactgtcgcccatcctggcccatgcgagtccggccctcagattgtctcacatccatatgatacatggaacgtgactggccaggatgtgatctttggctgcgaagtgtttgcatatccaatggccagtatcgagtggcgaaaagacggccttgacatccagctgcctggcgatgacccccacattagcgttcagtttcgcggtggtccccagaggttcgaggtgacgggctggctacagatccaggcggtaagaccttctgacgaggggacataccgctgcctcggcaggaatgccctgggccaggtcgaagcgcccgcttccttgaccgtcctcactccagatcagctaaactctacaggtatccctcaactgaggtccctgaatttagtccctgaagaagaagccgagtcagaagaaaatgacgattactactag

SEQ ID NO: 12405 - RNA, 327 nt, synthetic construct
  misc_feature 1..327: note = source = /note="Description of Artificial Sequence: Synthetic coding sequence"
  source 1..327: mol_type = other RNA
atgactccaagccgattaccgtggctgttgtcctgggtatctgccacggcatggcgagctgccagatcgcccctcctgtgtcactcactacgcaaaacatccagttcccagggaggcaagagcgaactggtgaagcagtcattaaaaaagcctaaattaccagaagggcgcttcgacgcacccgaagactcacacctggaaaaggaacctctcgaaaaattcccggacgacgttaacccagtaaccaaggagaaagggggtcctcggggaccagagccaacccggtacggagactgggagcggaaaggaaggtgtattgacttctag

SEQ ID NO: 12406 - RNA, 663 nt, synthetic construct
  misc_feature 1..663: note = source = /note="Description of Artificial Sequence: Synthetic coding sequence"
  source 1..663: mol_type = other RNA
atggcaggattaagccgtggcagcgcaagagcactgttagcagccttgctggcctctacactgcttgccctcttagttagccctgcaagaggccgcggcggcagggatcatggagattgggacgaggctagcagactccctcctctgcccccccgcgaagacgcagctcgcgtggctagattcgtgacacatgtcagcgactggggcgccttagctactatttctacactagaggcagtacgaggtcgtccatttgctgacgttctctccctttcggatggtcctcccggggccgggtctggagtgccgtatttttacctcagcccattacagcttagcgtctcgaatctccaggagaatccgtacgccaccctcacaatgacactcgctcagactaacttttgtaagaagcacggcttcgatccacaatccccactctgtgtccacatcatgcttagcgggacggtgactaaagtgaacgaaacggagatggacattgccaagcattccttgtttatccgccatcccgaaatgaaaacctggccatcttcacataactggttctttgcgaaactcaacataaccaatatctgggtcctagactactttggcggtccgaaaattgttaccccagaagagtactacaatgtaactgttcaatag

SEQ ID NO: 12407 - RNA, 2760 nt, synthetic construct
  misc_feature 1..2760: note = source = /note="Description of Artificial Sequence: Synthetic coding sequence"
  source 1..2760: mol_type = other RNA
atgggcctgtttaggggcttcgtgtttcttctggtgctgtgcctgctgcatcaaagtaacacttctttcatcaaactgaacaacaatggatttgaagacatcgtgatcgttatagacccctcagttccagaagacgaaaaaattatcgagcagatcgaggatatggtgaccacagcctcaacctatctgtttgaggctaccgaaaaacgctttttttttaaaaatgtgagcattttgattcccgagaactggaaggagaatccccagtacaaaagacctaaacacgaaaaccacaaacacgctgatgtgatcgtggcccctccaaccttacccggtcgcgatgaaccctacacaaagcaattcacagaatgcggggaaaaaggagaatacatacattttacgcccgatctcctgctcggaaaaaaacaaaacgaatacggacctcccggtaaactgttcgttcacgaatgggcacatctcagatggggagtgtttgatgagtacaacgaagaccaaccattctatcgagccaaatctaaaaagatcgaagctacccgctgcagtgccgggatttctggccggaacagggtgtataaatgccaaggggggagctgtctctcacgggcttgtagaatagactcaaccacaaagctgtatgggaaggactgccagttcttcccagataaggtccaaaccgaaaaagcctcaatcatgtttatgcagagcattgattctgtcgtcgaattctgtaatgagaagactcacaaccaggaggctccctccctgcaaaacattaagtgcaatttccgcagtacctgggaagtcatcagtaattccgaggactttaagaatactatccctatggtaactcctcctcctccacctgttttctccttgctaaagatatcgcagaggattgtgtgcctggtgttggataagtccggctcaatgggcggaaaggatcgtctaaatcggatgaatcaggccgctaagcatttcttgctccaaacagtcgaaaatggaagttgggtgggcatggtgcactttgattccaccgccactattgtaaacaaattgatacagattaagtcttcagatgagagaaacacactgatggccggactccccacctatccattgggaggcacctccatttgtagtggcatcaagtacgccttccaggtcattggagaactgcatagccagctggacggctccgaagttcttctcttgactgacggtgaggacaacacagcatccagctgcattgatgaagtaaagcagtctggcgccattgtgcattttattgccctgggcagggcagcagacgaggccgtgatcgagatgagtaagattacgggaggaagccacttctacgtatccgacgaagcacagaacaatggactcatcgacgctttcggagctctgactagtggcaataccgaccttagtcaaaagagccttcagcttgaaagtaagggactgacgctcaactccaacgcgtggatgaacgacaccgtgattattgactctacagttggaaaggacacgtttttcctcatcacctggaattctctgcctcccagtatctcactttgggacccttcagggaccattatggagaactttaccgttgatgcgacctctaagatggcttatctgtcaatccccggcaccgcaaaggtgggcacatgggcctacaatttgcaagccaaagctaatcccgagactctgaccatcaccgtgacgagtagagcggccaactcttcagtcccaccaatcacagttaatgccaagatgaataaagatgttaattctttcccttcccctatgatcgtgtatgctgaaattctccaggggtacgtgcccgtgctgggtgcaaatgtcactgcgtttatcgagagtcaaaacggccataccgaagtgttggagctgttggataatggggccggtgcagactcattcaagaatgatggggtctacagtcgatactttaccgcatacaccgagaacggaagatactcactcaaggtcagagctcacggtggggctaacaccgcaaggctgaaactgcgccccccattaaatagggcagcctatatacctggctgggtggtgaacggcgagatcgaggctaacccaccgagacccgaaatcgatgaggacactcaaactacactcgaagatttctcccgcacagcctcgggtggtgcatttgtggtaagccaggtgccaagtctccccttgcctgaccagtaccccccttcacagattacagacctggatgcaactgttcacgaagataagatcattcttacctggacagctcctggagataacttcgacgtgggtaaggtgcaaagatatattatacggatctctgccagcatccttgacttacgagatagtttcgatgatgccctacaggtcaataccacagacctgtctcccaaggaagctaactccaaagagtcttttgccttcaagcccgaaaacatttctgaagaaaatgctacccacattttcattgcgataaagtccatcgataagtctaatcttaccagtaaggtgtctaacatcgctcaagtgacattatttataccccaggcaaatcctgacgatatcgaccctacccccacccccactcctactcccaccccagacaaatcccataatagtggcgttaacatatcaacactggtcctgtctgttattggctcagtggttatagtcaattttatcctaagcactacaatatag

SEQ ID NO: 12408 - RNA, 1938 nt, synthetic construct
  misc_feature 1..1938: note = source = /note="Description of Artificial Sequence: Synthetic coding sequence"
  source 1..1938: mol_type = other RNA
atggccccatccgcggacccggggatgtcacgcatgctgccctttcttttactattgtggtttctgcctatcaccgagggttcccaacgtgctgagcctatgttcaccgccgtcaccaactccgtgctgccccctgattatgattccaatcctacacagctaaattatggcgtcgctgtgaccgatgtggatcacgacggggatttcgagattgtggttgccggatataatggccctaatttagtactgaagtatgatagagctcagaagcggctagtgaatatcgctgtagatgaacgctcaagcccttactacgccctgcgggatagacaaggtaatgccatcggggtcacagcttgcgacatcgatggcgatggaagagaagagatctatttcctgaacacaaacaatgctttcagtggcgtggccacttatactgataagctgtttaaattcagaaataatagatgggaagatatattgtcggacgaggtaaacgtggccagaggggtggcctctttatttgcaggtcggtcagttgcctgcgttgatcgcaaaggcagcggcagatatagcatctacatagctaactatgcttatggtaacgttggtcccgacgccctcatcgaaatggatccagaagccagcgatctatctcgcggcatcctagctctgcgagacgtggccgccgaggctggtgtcagcaagtacacgggtggcaggggcgtctccgtgggcccaatactgagtagtagcgcaagcgacattttttgtgataatgagaacggcccgaactttctgtttcataaccgcggagatggtacgttcgtggatgctgcagctagcgcaggcgtagacgatcctcaccagcacggccgtggtgtcgctctggcagattttaatcgagatgggaaggtcgatatagtctacgggaactggaacgggcctcacagactttatttgcagatgtccacccacgggaaagtgcgattccgagacatcgcgagtcccaaattctctatgccctccccagtccgcactgtcattacggctgatttcgacaacgatcaggagttagagatattttttaataacattgcataccgatcatccagcgcaaatagactcttccgcgtgatacgacgtgaacacggcgatcctttgatagaagagctgaatccaggagatgccctggagccagagggccggggcaccggcggggttgttaccgacttcgatggcgatgggatgcttgatctgattttaagtcacggcgagtctatggcgcagcccttgtcagtgttcagaggcaatcaggggtttaacaacaactggttgcgggtggtgccaagaacaagatttggggcctttgctcgaggtgcaaaggtggtgctgtacaccaaaaagtcaggcgcacatttgcggataatcgacggcgggtctggatacttgtgcgagatggagccagtagcccacttcggcctcggaaaggacgaagcctcgtcagttgaagttacttggcctgacggtaagatggtctctcggaacgtggctagtggtgagatgaatagtgttctggaaattctgtatccacgggatgaggatactttacaggaccccgcccctctcgaatgtggccaggggtttagtcaacaggagaatggccattgcatggatacaaatgaatgtatccaattcccattcgtgtgtccacgcgataagccggtctgcgttaatacctacggatcctatcgatgccggaccaataagaaatgcagtcgcggctacgaacctaatgaggacgggactgcctgtgttgcacaggtcgccttcttggggggctattcctccgcagccagcaggattagtgaaccgctgtctcgagcatcatatctgtcactgggtctggggctttgcttacaactctatgctctctag

SEQ ID NO: 12409 - RNA, 1986 nt, synthetic construct
  misc_feature 1..1986: note = source = /note="Description of Artificial Sequence: Synthetic coding sequence"
  source 1..1986: mol_type = other RNA
atggctccttccgccgaccccggcatgagccgaatgctcccgttcctgctgcttctctggtttcttcccattacggagggctctcagcgcgccgaaccaatgtttactgcagtcactaactcagtcctgccaccagactatgattctaaccccacacaactgaactatggcgtggctgtgacagatgtggatcacgacggggatttcgagattgtcgttgctgggtacaacggtcccaatcttgttctcaaatacgaccgcgcccagaagcgtctagtgaacatcgcagtggatgagaggtctagtccttactatgctctaagagaccgccaggggaatgcaattggtgttaccgcatgcgacatagatggcgacggaagggaggaaatctactttcttaatacaaacaatgcctttagtggggttgccacatacaccgataaactgttcaaatttagaaataataggtgggaagatattctaagcgatgaggtaaatgttgcccggggcgtggcgtcactatttgccggcaggtctgtggcctgcgtcgacagaaaaggctcgggccggtacagcatctatatcgctaattacgcctatggcaatgtaggaccagacgccctgattgaaatggatcctgaagcctccgacctgtcacggggaattttagccctgcgcgatgtggcggccgaggctggtgtctctaagtatacggggggcaggggtgtatctgttgggcctattctgtcatcaagcgcttcggatattttctgtgacaacgaaaacggaccgaattttctctttcacaatcgtggtgatggcaccttcgtagatgccgccgcctccgccggcgttgacgacccccaccagcatggcaggggagtggcacttgcggactttaatcgtgacggcaaggtggatattgtctacggcaattggaacggtcctcatcgcctgtacctccagatgagcacccatgggaaagtgcgcttcagggacatcgcaagtcccaaattcagcatgcctagccctgtgaggactgtgatcacagctgactttgacaacgaccaagagttagaaatttttttcaataacatcgcatataggagctcgagcgcaaaccggttattccgtgtgatccgccgggaacacggggaccccctaatcgaggaacttaatcccggagatgctctggagcccgaagggcgaggaacgggtggtgtggtaaccgacttcgatggcgatgggatgctggacttaatcctgtcccatggagagagtatggcccagcccctctccgtcttccgcggcaaccagggctttaacaacaactggctccgggttgtccctagaacgcggttcggtgcgtttgctcgcggggccaaggttgtgctgtacactaaaaagtcaggggcccacctccgtataattgatggcgggtcaggctatctgtgcgagatggagcccgtcgcacatttcggcttagggaaggacgaagccagttcagttgaggtcacatggcctgatggcaaaatggttagtagaaatgttgcgagtggggaaatgaatagcgttctggaaatcctgtacccgcgagacgaagacactctgcaagaccccgcccctctcgagtgcggccaagggttctctcagcaggaaaacggacactgcatggacactaacgaatgcattcagttcccttttgtatgcccgcgagataaacctgtttgcgttaatacctacggatcctacagatgtagaactaacaagaagtgctcgagaggttacgaacccaatgaagacggtaccgcgtgtgtaggaaccctcggacagtcaccaggtccccggcccactacccccactgctgccgccgccactgccgccgctgctgccgccgccggagccgcgactgctgcccctgtgttggtggacggagacttaaatcttggaagtgtggttaaagaaagctgcgagccaagttgctag

SEQ ID NO: 12410 - RNA, 1230 nt, synthetic construct
  misc_feature 1..1230: note = source = /note="Description of Artificial Sequence: Synthetic coding sequence"
  source 1..1230: mol_type = other RNA
atggcattgactccaggatggggctctagcgcaggtccagttcggccagagctttggctactgctgtgggccgccgcgtggcgattaggtgccagtgcgtgtcctgccctatgcacctgcaccgggaccactgtggactgtcatggaactgggttgcaggccattccaaagaacatacctagaaacaccgagaggctcgaactgaacggtaacaatataacaaggattcataaaaatgatttcgccggcctgaagcaacttagagtgctgcagctcatggagaatcagattggcgctgtggagcggggcgccttcgacgatatgaaagagctggaacgccttcgtctgaatagaaatcagctgcatatgttgcccgagctgctatttcagaacaaccaagccttgagccgcctcgatctgtccgaaaacgccattcaggctatccctcgtaaagcatttaggggcgctaccgacctcaaaaatctccagctggacaagaaccagatttcgtgcatcgaggaaggggctttcagagccctgagagggctcgaagttttaacgcttaataacaacaatatcaccactattcctgtatcctccttcaaccacatgcctaagcttcgaactttcaggttgcactccaaccacctcttctgcgactgtcatctggcttggctttcccagtggttaaggcagcggccaactatcggcctgtttacccagtgcagtggccccgctagtctccggggtttgaatgttgctgaggtccagaagtccgaatttagttgctctggacaaggggaagctggacgcgtgcctacctgtaccctgtcatccggttcctgccctgccatgtgcacctgcagcaacgggatcgtcgattgtcgaggaaaaggtctcacagctatccccgccaacctccctgagactatgacagagatcaggctggaactgaacggcattaagtctatcccgccaggcgcctttagtccatatagaaagctccgccgcatcgacctgagtaacaatcagattgcggagatcgctcctgatgctttccagggtcttcgcagtctcaactccttgcataccgggcccgtcacatgcccacatacaacaggcacgcactccagtcactgcagagcgtttgctgtggccgtccctcactctcgcaatgatcttgaggctatgtttgaagaggaagtgcctcggattttctattcagcgtag

SEQ ID NO: 12411 - RNA, 1143 nt, synthetic construct
  misc_feature 1..1143: note = source = /note="Description of Artificial Sequence: Synthetic coding sequence"
  source 1..1143: mol_type = other RNA
atggccttaactccaggatgggggtcaagcgctggacctgtgcggcctgagctctggcttctgctctgggcagcggcttggcggctgggcgcatctgcatgtcccgctctgtgcacatgcaccggcacgaccgtggactgccatggtaccgggctgcaagcgattcctaagaacattccgcggaacaccgagcgactggaattgaacgggaacaacatcacacggatacacaagaacgacttcgcggggctgaaacagttgagagtactgcagctgatggaaaatcagataggcgcagtagagagaggcgcatttgacgatatgaaggagttggagagactggacctgagcgaaaacgccattcaagctatacccagaaaagcctttcgcggcgcgacggacctgaaaaatttgcaactggataagaaccaaatctcttgcattgaagagggggcattccgagccttacgcggacttgaagtgctcacattgaataataacaatatcactaccatacctgtgtcctctttcaatcatatgccaaaactgaggacatttcggctgcacagcaaccacctcttctgcgattgtcacctcgcctggctatcacagtggctcagacagcgccccactataggattgtttacacaatgttctggccctgccagcctgagaggcctaaatgtggcggaggtgcagaaatccgaattctcttgctcaggacagggggaagctggccgggtgccgacctgtaccctctcttcaggaagctgtcccgctatgtgcacatgttctaatggtattgttgattgccgtggtaaaggactaaccgccatccccgctaacctcccggagacaatgaccgaaattaggcttgagctcaacgggatcaaatccatccccccaggcgcattctcaccctaccgtaaacttcgaaggattgacctgagcaacaatcagatcgccgaaattgcccctgacgcatttcagggattgaggtctctcaacagcttggtgctttatggcaacaaaattactgatttacccaggggcgtttttggtgggttatatacgttgcagcttttacttttaaacgcaaacaaaattaattgcatacgacctgatgctttccaggacctctag

SEQ ID NO: 12412 - RNA, 2448 nt, synthetic construct
  misc_feature 1..2448: note = source = /note="Description of Artificial Sequence: Synthetic coding sequence"
  source 1..2448: mol_type = other RNA
atggcactcacacccgggtggggctcctccgccggacccgttcgcccagaactgtggctgcttttgtgggcagctgcctggcgccttggagcaagcgcctgccccgctctgtgtacttgcacagggaccacagtggactgtcatggcaccgggttgcaggctatccctaagaatatcccacgcaataccgaacgtctggaactgaatggaaataatattactcgcatccacaaaaatgatttcgctggccttaagcaactcagggtactacagctgatggaaaaccagatcggtgcagtggaacgaggcgccttcgatgatatgaaagaattggagcgactgcggctcaaccggaatcagctgcatatgcttcccgaactcctgttccaaaataatcaagccctgtctagactcgatcttagtgagaatgcaattcaggccataccacgcaaagcatttcgcggggcaactgatctcaagaatctgcagctagacaaaaaccagatcagttgcattgaagagggtgcatttagggctttgcgcgggctcgaggttctcacactaaataacaacaatatcaccaccatccctgtatcgtcctttaatcatatgcccaagcttagaacatttaggcttcatagcaaccacttattttgtgactgtcatctcgcatggctctcccagtggttgcggcaacggcccactatcggcttgttcactcaatgctctggcccagcttccctacgcgggctgaatgtagcggaggtgcagaagtcagagttctcatgctcaggccagggggaagcaggacgtgtgcccacctgtaccctctcatcagggtcctgtcctgcaatgtgcacctgcagcaatggaatcgtcgactgccgcgggaaaggactgaccgctattcctgcaaacctgccagaaactatgaccgagatccgactcgagctcaatggaattaagtctattccaccgggcgccttctccccctaccgcaaactgaggcgcatttgccctcttagcttctgcagtccatgcagggatctctcgaacaatcagatcgcagaaatcgcccccgacgcctttcaaggtctgagaagtctcaacagcttagttctgtacggcaacaagataaccgacctgcctagaggtgtattcggagggctgtatacactgcaacttctcctgcttaacgcaaacaaaattaactgtatcagacctgacgcatttcaagatctgcagaacttgtctctgctgtctctgtatgacaacaagatccagtccttagcgaaaggaacctttacttcactgcgggcgatccagactctccacctcgctcagaatcccttcatttgtgattgtaacctgaagtggctcgccgacttcctgaggacaaaccctattgaaacatcaggcgctaggtgtgcatctcccagacgactggccaacaagcgtatagggcagattaaatccaagaaattcaggtgcagtgctaaggagcaatatttcatcccagggaccgaagattatcaactgaacagtgaatgtaattccgatgtcgtgtgtcctcacaagtgcaggtgcgaagcaaacgttgttgagtgctcatctttaaaacttactaagatcccagaaaggatcccccagtccacggctgagctcaggctaaataataatgaaattagtatcctggaggccactggtatgttcaaaaagctcacgcatctgaaaaagataaatctgagcaataacaaagtgtcagaaatcgaagatggggcttttgaaggcgctgcctccgtgagcgagttacaccttactgctaaccaactagagtcaatcaggtccggaatgtttcggggccttgatggcttacgaactctaatgctgcgtaacaatcggatctcttgtatacacaacgatagttttactgggttacgtaacgtccggctcctgtccttgtacgacaatcagatcaccacagtaagccccggggccttcgatactcttcagagtctctccacgctgaacttactggcaaatccttttaactgcaattgccagcttgcatggctgggaggctggcttcgtaagagaaagattgtgacaggaaatccccgctgccagaaccctgacttcttgcgccagattcctctccaagacgtcgctttccctgactttcggtgtgaagaaggtcaggaagaaggaggttgtctcccccgcccccagtgtcctcaagagtgcgcctgtctggacactgtagtcagatgtagtaacaagcaccttagggccctgcccaagggcattccaaaaaatgtgaccgagttatatctggacggcaaccagtttacgctagttcctggtcaactgtcgacttttaagtacctgcagctagtaatcctctcctacaacgcactccagtgtattccgccgctggcttttcaatag

SEQ ID NO: 12413 - RNA, 4386 nt, synthetic construct
  misc_feature 1..4386: note = source = /note="Description of Artificial Sequence: Synthetic coding sequence"
  source 1..4386: mol_type = other RNA
atggctttgacaccaggctggggatcaagcgcgggccccgttcgacccgagctttggttactgctgtgggctgccgcatggcgacttggagctagtgcttgtcctgcgctgtgcacatgtacagggactactgtggactgccacggcaccggactacaagcaattcctaagaatattcccaggaataccgagcgactcgaactaaacgggaataacataacccggattcacaagaatgattttgccggattaaagcagctccgcgtgcttcagcttatggagaatcagatcggagctgtggagcgcggcgcctttgatgacatgaaggaactcgaaagattgagactgaacaggaaccagctgcatatgctccctgagctcctgttccagaacaatcaagctcttagtcgactcgatttgagtgaaaacgcaatacaggctatccctcgcaaggccttccggggcgctactgatctgaagaacctgcagctcgataagaaccaaatatcatgcatcgaagagggagcattcagggccctgcggggcctcgaggtgctgacgctaaacaataataatattaccacaatccctgtgtcctcctttaaccacatgccgaagttacggacatttaggttgcattcgaatcacctcttctgcgactgtcacctggcctggttatcccagtggctgcgacagcgccccaccatcggactattcacccagtgctccgggcccgcctccctgcgcggcctgaacgtggccgaagttcaaaaatctgagttctcttgttctggacaaggcgaggctggaagagttcccacctgtactctttcctcagggagctgccccgccatgtgtacctgttcaaacggcattgtggattgtagaggaaaaggcctcaccgctatccccgccaacttgcccgaaactatgaccgagatccggctggagctgaacggcatcaagtctattcctccaggcgcgttttccccatatagaaaacttagaagaattgacctcagcaacaatcagattgccgaaatagcccctgacgcttttcaaggcctgagatccctgaactcactggttctttacggaaacaaaattaccgaccttcctagaggggtctttggcggcctgtacacccttcagctgctgttacttaacgcaaacaagatcaactgcatccgccctgatgcattccaggacttacagaatctttcacttttatctttgtacgacaataagatacagtccctggcgaaggggacctttacttcccttcgggcgatccagacactgcatctcgcccagaaccctttcatttgtgactgcaacctcaaatggttagctgattttcttcggacaaatcccattgaaacgagcggggcgcgctgtgcctccccgaggagactcgctaataagagaatcgggcaaataaagtcaaagaagtttagatgcagtgctaaggagcagtatttcattcccggcaccgaggattaccagcttaattccgagtgtaattcagacgtggtgtgtccacacaagtgtcggtgtgaggcaaatgttgttgaatgcagttccctgaaactgactaaaatcccggagcgaatcccgcaatcaaccgccgagctgaggcttaacaataacgagatatcaattctcgaagctaccggtatgttcaaaaaactgactcatctcaagaaaatcaacctgtcaaacaacaaggtctcagagattgaggatggagcatttgagggtgctgcatcagttagcgagcttcatttaacagcaaaccagttggaaagcattcgctccggcatgtttagaggtttggacgggctaaggacccttatgctgcggaataaccgtatctcttgtatacataatgattccttcacgggtcttagaaacgtccgcctcctgtctttatatgacaatcagattactacagtcagccccggcgcgtttgataccttacaatctctcagcaccctaaatttgctggccaaccccttcaattgtaactgccagctcgcatggttaggcgggtggctgcgcaaaagaaaaatagtcaccgggaacccgcgctgccagaaccctgattttttgcgccaaattccacttcaagacgttgcctttcctgacttccgatgcgaggagggacaggaggaaggggggtgcctacctcgccctcaatgccctcaggaatgcgcctgcctggacacagtcgtcagatgttccaacaaacacctaagagcacttcccaaaggcataccaaaaaatgtcactgaactatacctggacggaaatcagttcaccctcgttcccggtcagttgtctacattcaaatacttgcaactcgtcgacctgtccaataataaaatttctagtctgagcaattcaagcttcacaaatatgtctcagttgactacattaattttatcgtacaacgcgcttcagtgtatcccccctctggccttccaaggcttacgatccttgagactgctctccctccacggaaacgatatctctaccctgcaggaaggaatcttcgctgatgtcacgagcctttcacacctcgccataggtgccaatccactgtactgcgattgccatttgcggtggctttcgagctgggtgaagacgggttataaagagccgggtatcgcccgctgcgcaggaccacaagacatggaagggaaactcctgctcacaactcctgcaaaaaaattcgagtgccaaggcccacctacactggccgttcaagcaaaatgtgacctatgtttatcgtccccctgtcagaaccaaggcacttgccacaacgaccccttagaggtataccggtgcgcttgccctagcggctataaagggagagactgtgaggtttcgctcgacagttgtagctctggcccttgcgagaatggaggaacatgccacgcacaagaaggggaggatgccccgtttacgtgtagctgtcctacagggtttgaaggcccgacgtgtggcgtgaacaccgatgattgtgtagatcatgcctgtgccaacggtggggtatgtgttgacggagtcggcaattacacctgccagtgccctttgcagtacgagggcaaggcctgcgagcagcttgtggacctctgctcaccagatcttaacccatgtcagcatgaggcccaatgtgttgggactccagacgggcctaggtgtgagtgcatgccaggttatgccggcgacaattgctctgagaatcaggacgactgccgcgaccatcgttgccagaatggcgcacaatgtatggacgaggttaatagctacagctgcctgtgtgctgagggatactctggccagctctgtgaaattccaccgcatttgcctgccccgaagtccccctgcgaagggaccgaatgccagaatggggcgaattgtgtagaccaagggaataggcccgtgtgccagtgcctgccgggctttgggggtcccgagtgtgagaagttacttagcgtaaattttgtcgacagggacacttatctccaatttacagacctccaaaactggccgagggctaatattacactgcaagtgtccaccgctgaagacaacgggatcctcctttataacggcgataacgatcacatcgcagttgagctttaccagggccacgtgcgagtatcatacgaccctggctcgtacccctcttcagccatatatagcgcagagacgatcaatgacggacagtttcatacagtagagctggttgcctttgaccaaatggtcaatttgagcatagatggcgggagccccatgacaatggataattttggcaaacattatacacttaactcggaggcaccgctatatgtgggggggatgccggtcgatgtgaattccgctgcatttcgcctgtggcaaattttgaatggcacaggattccacggctgcataaggaatctttacatcaacaacgaattacaggacttcacaaagacccagatgaagcccggggtggttcctggctgcgagccatgccgaaagttgtactgcctccacgggatttgccaaccaaacgcaacacctggaccaatgtgccactgtgaagctggttgggtgggccttcattgtgaccagccggcagatgggccttgccatggtcacaagtgtgtgcacggacagtgcgtgccactcgatgccttgtcctacagttgccagtgccaggacggctactctggcgccttgtgcaaccagtctccttcggcgggcggcacactctctgggacgttcacgcgatcccggggggccatgccatccgctcgaccacgtgccccttgccacggctggagcgccggagcccgagctcaggcccgcgcagccgcccgggcttttggatag

SEQ ID NO: 12414 - RNA, 570 nt, synthetic construct
  misc_feature 1..570: note = source = /note="Description of Artificial Sequence: Synthetic coding sequence"
  source 1..570: mol_type = other RNA
atggaggccactgggacagacgaggtcgacaaactgaagacaaaatttatatccgcctggaataatatgaaatatagctgggtgctgaaaacaaagacttacttttctagaaattcaccagttcttctcttgggaaaatgctaccatttcaagtatgaggatgaggataaaactcttcccgcagagtctgggtgcaccatcgaagatcacgtcatcgccgggaatgtggaggaattccgcaaagactttataagtagaatttggctcacctacagagaggaattccctcagatcgagggtagtgctctgaccacggactgtggatggggatgcacgcttcgaaccggacaaatgctgctggcccagggactgattctgcactttcttggccgcgcttggacctggcccgacgccctgaacattgaaaattcagactctgaatcgtggacatcacacactgtcaaaaagttcacagcaagcttcgaagccagtctgtctggtgaacgcgaatttaagacgccaaccatcagccttaaggagacaatcgggaaatacagcgatgatcactag

SEQ ID NO: 12415 - RNA, 1377 nt, synthetic construct
  misc_feature 1..1377: note = source = /note="Description of Artificial Sequence: Synthetic coding sequence"
  source 1..1377: mol_type = other RNA
atggaggccacagggacagatgaagtggataaactgaagactaaatttataagtgcgtggaacaatatgaagtactcttgggttctgaaaactaaaacctacttttcaagaaatagccccgtgctgctccttgggaaatgctaccacttcaaatacgaagatgaagacaaaaccctaccagccgagtccggatgtaccatcgaagaccatgtcatcgcaggtaatgtcgaggaattcaggaaagattttatctcccgaatctggctgacctacagagaggaatttcctcaaatcgaaggatcagccttaacgaccgactgtggatggggctgcacactgcgaacaggtcaaatgctgctggcccagggtttaatcctccatttcctcggtagggcctggacctggcccgatgcgctcaacatcgagaattccgactctgagtcctggacatcacatacagtcaagaaattcacggcaagtttcgaagcctccctttccggcgagcgggaatttaaaacccccaccatctctctgaaggagaccataggaaagtatagcgacgatcacgagatgaggaatgaggtgtaccatcgaaaaatcattagttggtttggcgacagccctctggctctctttggactccaccagcttattgaatacggtaaaaaaagcggaaagaaagctggcgactggtatggtcccgccgtggtggctcatatcctgcgaaaggccgtggaggaggcaaggcacccagaccttcagggaatcactatctacgtagcccaagattgtaccgtttataactccgatgtgatcgacaagcagagtgccagtatgactagtgacaatgcagacgacaaagcggtgatcattctagtgccagtgcgccttggaggagaacgcaccaacacggattatctggaattcgtgaagggcatcttgtccttagagtactgcgtgggaatcattggcggcaaacctaagcagtcttactacttcgctggatttcaggatgacagtctaatatatatggatccccattactgccaatcattcgtggatgtgtctatcaaagacttccctctagagacctttcattgcccgtcaccaaagaaaatgagcttccggaagatggacccaagttgcactatcggattttattgccggaacgtgcaagacttcaagcgggcatccgaggagataacaaagatgcttaagttttcttcgaaagaaaaatatcctctgttcaccttcgtgaacggtcatagcagagattacgactttacatcaacaaccacaaacgaagaggatttattctccgaagacgaaaaaaagcaacttaaacgtttttccacagaagagttcgttctcttatag

SEQ ID NO: 12416 - RNA, 8178 nt, synthetic construct
  misc_feature 1..8178: note = source = /note="Description of Artificial Sequence: Synthetic coding sequence"
  source 1..8178: mol_type = other RNA
atggagcagacagactgtaaaccataccagccgctgccgaaagtgaagcacgagatggatcttgcttacacaagtagcagtgacgagagtgaggacggaagaaaacccagacagtcttataatagtagggagacgctccatgagtataaccaagaactgcgaatgaactataactcacaatctagaaagaggaaggaggtggaaaagagtacccaggaaatggagttctgcgaaacttcccataccctttgctccgggtaccagacagatatgcactccgtctctcgacatggttaccagcttgagatgggcagtgatgtcgacacagagacagagggtgcagcctcacctgaccacgccctgagaatgtggataagaggaatgaagtcagaacactcgtcttgcttgtcctcccgggccaactcagcactcagtcttaccgatactgaccatgagcgtaagtccgatggcgaaaacggcttcaaatttagccctgtgtgttgtgacatggaagctcaggccggatctacccaggatgttcagtcctcgcctcacaatcaattcacatttcgccctctgccaccaccaccccctccacctcatgcttgcacctgcgctcggaagcccccccccgcggccgacagcctgcagcgcagaagcatgaccactcgttcccaacctagcccagcagctcccgcacctccaactagcactcaggacagtgttcatcttcataacagctgggtcctcaatagtaatatacctttggaaactcgccactttctgttcaagcacggatccggctcaagtgcgattttcagcgctgcatcacagaactatccacttacttctaacactgtgtacagccccccaccacggcccctgcccaggtccactttcagtcgccctgctttcactttcaataaaccttatagatgctgtaactggaagtgtactgctctctcagccacagccataaccgtgactcttgcactcctattggcttacgttatagcagtgcacctctttggactgacttggcagcttcagcccgttgagggggaactctatgcgaacggggtgagcaaggggaatcgaggaacagaaagtatggataccacttactcaccaatagggggcaaggttagtgacaagagtgagaagaaggtgttccaaaaaggccgcgccatcgacactggcgaggtcgacatcggagcacaggtcatgcagacgatcccccccggtctattttggaggtttcagatcaccatccaccaccctatttatctcaaattcaacatctctttagcaaaggattctctgttaggcatctacggccgcagaaacataccaccgactcacacccagtttgatttcgtgaaattgatggacggcaagcagctggttaaacaagatagcaagggctccgacgacactcagcacagcccccggaatctgatactgaccagcttgcaagagaccggcttcattgaatacatggaccagggaccttggtatctggctttttataacgacggcaaaaagatggaacaggtttttgtactaactaccgcaatcgagatcatggatgactgttcgactaactgcaatgggaatggggagtgcatatctggacactgccattgcttccctggtttcctcggacctgattgcgccagggactcctgtccggtactatgcgggggcaacggagagtacgaaaaaggtcattgtgtgtgccggcatggctggaagggccctgaatgtgatgtgccagaagaacaatgtatcgatcccacttgtttcggccacggcacgtgcattatgggtgtctgcatatgtgttcctggatacaagggagagatctgcgaagaggaggactgccttgatcctatgtgctctaatcacggtatctgcgttaagggagaatgtcattgctccactggctggggtggagttaattgtgagacaccactgcccgtatgtcaggagcagtgcagtgggcacggaacttttctcctcgacgctggggtgtgttcttgtgaccctaaatggacaggcagtgattgtagcaccgaattatgcacaatggagtgcggctcccacggtgtttgctctaggggaatctgtcagtgtgaagagggctgggtcggccccacctgcgaggaacgctcatgtcactctcattgcaccgagcacggccagtgcaaggatggcaaatgcgaatgctcgcccgggtgggagggtgatcattgcaccattgctcactatttggatgccgtgagagacggctgccccggactgtgctttggtaacggcagatgcacattggatcaaaatggctggcattgtgtctgccaggtgggctggagcggcactggctgcaatgtggtgatggagatgctgtgtggcgacaatttggacaacgacggggatggtttgacagattgtgttgatcctgactgctgccaacagtccaattgctatatttcccctttgtgccagggcagccccgaccccctcgacctcatccagcagtctcagacccttttcagtcagcacaccagccgccttttttacgatcggatcaagtttctgattgggaaggacagcactcacgtgatcccacccgaggtcagcttcgactcgaggagagcctgcgtgattagaggccaggtcgtcgctatagacggcacaccgctcgtgggcgtcaatgtgtctttcttgcaccactccgattacggctttactatttccagacaggatgggagttttgatttagtcgctattggcgggatcagcgtcattctcatatttgacagatctccgttcctacccgaaaaacgaaccctctggctgccgtggaatcagtttatagtcgtagagaaggtaaccatgcagcgagtcgtatctgacccacccagttgtgacatatctaacttcattagtccaaatccgattgtgctgccctcccctcttacatcattcggcgggagctgtcctgagaggggcacgatcgtgcctgaactccaggtagtgcaagaagaaattcccataccttccagttttgtgagactctcttatctcagctcccgcactccaggctataagactctgctgcgcatactcctgacacacagcacgatcccagttgggatgatcaaagtccatctgaccgtcgccgtcgaaggacgtctgacccagaagtggttcccagcagcaatcaacctcgtatacacttttgcatggaacaagacagacatttatggacagaaagtatggggacttgccgaagcgctggtgtcggtgggatacgagtacgaaacttgtcctgatttcatcttatgggagcagcgaaccgtggtgttgcagggtttcgaaatggacgcatccaatcttggtgggtggtccctcaacaaacaccacatcctgaatccccagagcggtatcattcacaaggggaatggagagaatatgtttatctcccagcagccaccagttattagtacgattatgggtaacggacatcagcgatccgtggcatgcacgaactgcaacgggcctgcccacaataataaactatttgcccctgtcgcacttgcaagcggcccggatgggtcagtctatgtgggcgactttaattttgtgcgccgcatatttcccagtgggaatagcgtaagtatcttagagctttctacatcacccgctcacaagtattatctcgcaatggacccagtctctgagtctctttatctgagcgacacaaatacgagaaaggtgtataagctgaaaagcctcgtagaaacaaaggatctgtctaagaattttgaggtggtagctggtaccggtgatcaatgtctgcccttcgatcagtcacactgcggagatggtggacgagcatccgaggcaagcctgaatagccctagggggatcacagtcgatagacatgggtttatttattttgtcgacggaaccatgatacgcaaaatcgacgaaaacgccgtgattacaactgtgataggcagcaacgggcttacctccacacaaccgctgtcttgcgattctggcatggacatcacgcaggtacgtctagaatggccgactgacttggccgtgaatcctatggacaactccttgtacgtgctagacaacaatattgtactgcagatctctgagaataggcgcgtgcggataatcgctggacgaccaattcactgccaggttcccggaatagatcactttctcgtgtccaaggtagcaatacattccactcttgagtccgcgcgcgccatttctgtgagtcacagtgggcttttgttcatcgcagagacagatgagaggaaggtaaaccgaatccagcaagtgaccactaatggggagatctacatcatcgcgggagcacccaccgactgcgactgcaaaatcgatcctaactgtgactgcttttctggagacggtggctacgcaaaggacgccaaaatgaaggcccccagttctctagctgtcagcccggacggcactttgtatgtggcagatctcggcaatgtacgtattagaactatcagcaggaaccaggcccatttgaatgacatgaatatttatgagatagcgtcacctgctgaccaggaactgtaccagttcacagttaatggaactcatcttcataccctcaacctcatcaccagagactacgtttataatttcacttataactctgagggagatctgggagccatcacaagttcgaatggcaactccgtccatataaggcgggacgccggcgggatgcctctgtggctagtagtgccgggtgggcaggtctactggctgacaatttctagtaacggcgtgctcaaacgagtgagcgcgcagggctacaatcttgcccttatgacttacccaggaaacacagggctcctggccacgaaatccaatgaaaatggatggacaaccgtgtacgaatacgaccctgaaggacacctaactaatgccacatttcctaccggtgaagtctctagcttccactccgatctcgaaaaactgaccaaagtggaactggatacctccaaccgggagaatgttctgatgagcacaaatctgactgcgacatctaccatatacatacttaagcaagagaacacacaatccacttaccgggttaatccagatggatctttgcgggtgacattcgcttcaggcatggaaatcgggttatcctctgaaccccacatactggctggcgcagtgaatcccactcttggcaaatgcaacattagccttccgggggagcacaacgctaacctcattgagtggcgacagcgcaaagagcagaataaggggaacgtttccgcatttgaacgaagacttcgggcacataaccgcaatctcctgagtatagattttgatcatattaccaggaccggaaaaatatatgacgatcatcgtaaatttacgctgagaatcctgtatgatcaaactggccgacccattctttggtcacctgtttctagatacaatgaggtcaatatcacgtacagtcccagcggcctcgttaccttcatccagaggggaacctggaacgagaaaatggaatatgaccagtccggcaaaattatctcgcgcacctgggccgacgggaaaatttggagctatacctacctggagaagtctgtgatgctcctgctgcatagccagcgccggtacatcttcgaatacgatcagccagattgccttctcagtgtgaccatgccgagtatggtacgtcactcactgcagactatgctgagcgtcggatattaccgcaacatttacactccacccgattcctctacttcattcatccaagattactctcgggacgggcgtctccttcaaacactgcatttagggactggccgtagggtactgtataagtataccaaacaggccaggttgagcgaagttctatacgacacgactcaagtcacgctgacctatgaagagagctcaggggtaataaagacgatccatctgatgcacgacgggtttatatgtaccatccggtaccgtcagaccggtccgcttatagggcgccagattttccgattttcggaagaagggctggttaatgcgagatttgactacagctataataacttcagggtgacctccatgcaagcagtgattaatgaaacacctcttccaatcgatctatacaggtatgtcgatgtgagcggcagaacggaacagttcggaaaattttccgtaatcaactatgatttgaaccaagtgattacgaccacagtgatgaaacacacaaaaatctttagcgctaacgggcaggtcattgaggtgcagtatgaaattttaaaggcgatcgcctactggatgaccatacaatatgacaacgttgggaggatggtcatctgtgatataagagtgggagtcgacgccaacattaccaggtatttctacgagtatgatgccgacggccagttacagaccgtgagcgtaaacgacaagacccagtggagatacagctacgatttgaatgggaacataaacctattgagccacggcaaatcagctagactaactcctttacgctatgacctcagggacagaatcacacgactcggagagatccaatacaagatggacgaggatggtttcttaagacagcgcggcaatgacatctttgaatacaacagtaatgggctgctacagaaagcatacaataaagctagtgggtggacagttcaatattattatgacggtctaggtcgaagggtagcttctaagagctctctgggacagcaccttcaattcttttacgcagacctgaccaatcccatccgggttacacacctctataatcatacttccagcgaaatcacgtccctgtattatgacctgcaggggcatctgattgctatggagctctcttctggagaagaatactacgtcgcttgcgacaatactggaactccactggccgtgttctctagtagaggccaggttattaaggaaattctttacaccccctacggcgacatctatcacgatacttatccagatttccaagtgatcatcggattccatggtggactctacgattttctgaccaaactggtgcaccttggccagcgggactatgacgtagtggctgggcgctggaccacacctaaccaccatatttggaaacagctgaaccttttacctaagcctttcaacctgtactcattcgagaacaattatccggtgggcaagatacaagacgtggcgaaatacacgacagatatcaggagttggcttgagctctttggctttcaattacataatgtgttgccaggctttccaaagcctgagttggagaatttggagttaacatacgagctgcttcgcctgcagaccaaaactcaagaatgggatcccggcaaaaccatcctcggcatccagtgcgaactccagaagcagctgcggaacttcatcagcctagatcagctaccaatgactccacgctataacgacggaagatgcctggaaggaggaaaacagccccgctttgcggccgtgccgtccgtgtttggcaagggcatcaagtttgccatcaaagatggaattgtaactgcggacattataggagttgccaacgaagacagtcgaaggttggccgcaatcttgaataatgctcactatctcgagaacctgcacttcaccattgagggacgcgacacacactattttatcaagctgggatccctggaggaagacctagttctgattggcaatacggggggcaggcgcatcctggaaaacggggttaatgtgactgtgtcccagatgacctcagtgctgaatggccggactagacgatttgctgacattcagctgcagcacggcgccctttgctttaacataagatatgggacaaccgtcgaggaggaaaagaaccacgtgctagaaatcgcccgtcagagagctgtggcccaggcctggacaaaggagcagcgccgcctgcaagagggggaagaaggaatacgcgcgtggaccgagggcgagaagcaacagctcctcagtaccggaagggtgcaaggctatgacggatatttcgtgctgagcgttgagcagtacctggagctgtctgattccgctaataacatccacttcatgcgccagtctgagattgggaggagatag

SEQ ID NO: 12417 - RNA, 204 nt, synthetic construct
  misc_feature 1..204: note = source = /note="Description of Artificial Sequence: Synthetic coding sequence"
  source 1..204: mol_type = other RNA
atgaaaattcaattattttttttcatcttacatttttgggtgactattctgccagcaaagaaaaagtaccccgaatatggttccttagatttgcggagagagtgtagaataggcaatggacaatgcaagaaccagtgccatgaaaacgaaatcaggatagcatactgcatcagacccgggacccattgctgtttgcaacagtag

SEQ ID NO: 12418 - RNA, 831 nt, synthetic construct
  misc_feature 1..831: note = source = /note="Description of Artificial Sequence: Synthetic coding sequence"
  source 1..831: mol_type = other RNA
atgaaacagattctgcacccggctctagaaactacagcttgtaccaaccatttcaatgctgatccctgttcaaccggctttgtgtttcctgctatgacactgtttcctgtactgctttttcttgtggcaggccttctcccgtcctttcccgcaaatgaggataaagatcctgcctttactgctctactaactacgcaaacacaagtgcaacgagaaattgttaataaacacaacgagttgcgcagggcagtttctccaccagcacgcaatatgttaaagatggagtggaacaaggaagccgctgcgaatgctcaaaaatgggctaaccagtgtaactacagacattctaaccccaaagacagaatgaccagcctaaaatgtggagagaatctgtacatgtcatccgccagtagcagctggtctcaggccatccagtcctggttcgatgaatacaacgatttcgacttcggcgtggggccgaagactccaaatgcggtagtgggtcactatacacaagtggtttggtatagctcttacctggtgggctgcgggaatgcttactgccccaatcagaaagtcctgaaatactattacgtttgccagtactgtcctgcagggaattgggccaacagactctatgttccctatgaacagggcgctccctgcgcaagttgccctgacaactgtgacgatggactgtgcaccaatggatgcaaatacgaagatctttatagcaattgcaagagcctgaaactcactctcacatgcaaacaccagcttgtgcgcgactcctgtaaagcgtcatgtaactgcagcaattctatttattag

SEQ ID NO: 12419 - RNA, 1350 nt, synthetic construct
  misc_feature 1..1350: note = source = /note="Description of Artificial Sequence: Synthetic coding sequence"
  source 1..1350: mol_type = other RNA
atgctggccgagtggggcgcatgcctgctgcttgccgtcgcactgctgggtccgggtctgcaggctcaggctatggagggcgtgaaatgcggaggtgtgctgtctgccccctctggcaacttttcctcacccaatttccccagactgtacccatacaacactgagtgctcttggttgatcgttgtggctgagggctcatccgtgttactcacctttcatgcttttgatttggagtatcatgacacatgctcctttgattttttggaaatttacaacggggcatctcccgataaagggaatcttttgggtcgcttttgcggcaaagtgccaccacctcctttcaccagttcttggcacgttatgtccgtgatttttcactcagacaagcacgtggcctcacacgggttcagtgcggggtaccagaaggacgtctgcggcggtgtcctgactgggctctcaggggttctgacctcccccgaataccctaacaactaccccaattcaatggagtgtcactgggtcataagggccgcaggccctgcccatgtcaaattggtgtttgtggactttcaggtggaaggcaacgaggaatgtacctacgactacgtggccgtgctcggcggcccggggcccacacggggccatcattattgtggcagcactcggccccctactttggtgagcttaggtcatgagctgcaagtggtgttcaagtcagacttcaacattggcggccgcggtttcaaagcgtattactttagtggggagtgccaggaggtatatatggcaatgaggggcaacttttcttcacctcagtaccctagctcttaccctaataacattagatgtcactggactattcgcctgcctccaggatatcaggtaaaggtctttttcttggatctggatttggaagagcctaatagtttaacaaagacttgtgacttcgatcatctcgccgcatttgacggcgcctccgaagaagcaccactgctaggtaactggtgcggtcatcatctccccccccccgtgacttcatctcataatcaattactgcttttgttgcacacggaccgcagcaccaccaggcggggtttcagtgtcgcatatatcggcgggcagctggggtgtgggagcggcagtaccgaaggcgagggtgaagccctccagccacagagtctccaatccccttcctctattccacccgtatgccctgcaccgcctatgaatggactcctccaacttctccttcactggttacacccttgcccactgtccgggcccctgcgtttggacgggaccgcaccagcctgttttcattactgcagagcttcttttccatctttttag

SEQ ID NO: 12420 - RNA, 1434 nt, synthetic construct
  misc_feature 1..1434: note = source = /note="Description of Artificial Sequence: Synthetic coding sequence"
  source 1..1434: mol_type = other RNA
atgacttctaagttcttactcgtgagttttattctggccgcactgagcctttctacaaccttttccttgcagccagaccagcaaaaggtattgctggtgtctttcgatggtttcagatgggattacctgtacaaagttcccacgccacactttcactacatcatgaagtatggggttcacgtaaaacaagtcaccaatgttttcattacaaagacttatccaaaccattacacactggtgacaggactgtttgctgagaatcatggaatagtggctaacgatatgtttgaccccattcgaaacaaaagctttagtctcgaccacatgaacatctatgactctaagttttgggaggaagccacccccatttggataacaaatcagagggccggtcacacctcgggtgccgcgatgtggcccggaacagatgttaagattcacaagcggtttcccactcactatatgccgtacaatgaaagtgtgagtttcgaagacagagttgcaaagatcattgagtggtttacctcaaaagaaccgataaaccttgggctgttgtactgggaagatcctgacgatatgggccaccacctcggcccagattccccacttatgggccctgttatatcggacatcgataagaagctgggctatctgatccaaatgctcaaaaaagccaaactgtggaatactctgaacctaatcattacctctgatcatggcatgacccagtgttcagaggaacgtctcattgagctggaccagtacttggacaaggaccattacaccctgattgatcaatcaccagtcgccgccattttaccgaaagagggtaaattcgatgaagtctatgaagctctgacccacgcccatcctaatctcactgtctacaagaaagaagatgtgcctgaacgctggcattataaatataattctcgaatacaacccataatcgccgtggccgacgaaggttggcacatcctgcagaacaagtctgatgactttctgttaggaaatcatggatacgacaacgctctcgctgacatgcaccccattttcttagcccacggacctgccttccgaaagaattttagtaaggaagccatgaactcaacagacttataccctttactgtgccaccttttaaatatcactgcaatgcctcataatggttcattctggaacgtgcaggacttgctgaacagcgcaatgccccgagtggttccttatacacagtctaccatcttgctgccaggaagtgtgaagccggccgaatatgatcaagaggggagctacccctattttatcggggttagtctcggttcgatcatcgtgatcgtgttctttgtcatctttattaaacacctgatacatagccagattccggcattacaggacatgcacgcagaaatagctcagcccctgctgcaagcatag

SEQ ID NO: 12421 - RNA, 1479 nt, synthetic construct
  misc_feature 1..1479: note = source = /note="Description of Artificial Sequence: Synthetic coding sequence"
  source 1..1479: mol_type = other RNA
atgggttccgcaccttgggcccccgtcttgctgttagctctgggactgaggggcctgcaggctggggccagaagagcccccgacccaggattccaggagcgcttcttccagcagagactggaccattttaattttgaacggtttgggaacaaaacctttccacagagatttctcgtgtcggatcgtttttgggtgcggggagaggggcccatcttcttctacacaggaaatgaaggagacgtgtgggctttcgctaataattctgccttcgtcgcagaactcgcagcagaaagaggcgcgctgctcgttttcgccgaacatcgatattacggcaaatcattaccattcggtgctcaatctacccagcgcggccacactgagctcctgacggtagagcaggccctggccgactttgccgaactgcttcgcgcgcttaggagagacctgggggcccaggatgctcctgcgattgcattcggcgggtcatacggaggtatgctgagcgcttatttaagaatgaaatacccacatcttgtcgcgggagccctcgctgcatccgcccccgtcctagcagtcgccgggctgggagattctaatcagttctttcgagacgtaactgcagatttcgagggccagagccccaaatgtacccagggggtacgggaggcttttagacagattaaagaccttttcctccagggggcctatgataccgtgaggtgggaatttgggacgtgccagcccctgagcgatgaaaaagatctgacccagctatttatgttcgctcggaatgcctttacagttctcgcgatgatggactatccataccctaccgactttctgggacctctgcccgctaaccccgttaaggtcggttgcgatagattgttgtcagaggcgcaaagaatcacaggactgagggccttagccggcctggtgtataatgccagtggcagtgagcattgttatgacatttaccgcttataccattcatgtgctgacccgactggatgtggtactgggccagacgcgagggcctgggactatcaagcgtgcacagagatcaacctgacctttgcatccaacaacgtaacagacatgttccctgacctgcccttcacagatgagcttcgtcaacggtactgcctggacacatggggggtttggccgagacctgactggctattgacttccttttggggcggggaccttcgcgccgcatcaaacatcatcttctccaacgggaacctagacccgtgggctggcgggggaataagaaggaatctttccgcctccgtcatagctgttaccatccaaggcggcgcccaccacctcgatctgcgggcctcccatcccgaagacccggcctccgtggtggaagctcgcaagctggaagcgactataatcggtgaatgggttaaagccgctagaagggagcagcagcccgcgctgcgagggggaccccggttatccctgtag

SEQ ID NO: 12422 - RNA, 2850 nt, synthetic construct
  misc_feature 1..2850: note = source = /note="Description of Artificial Sequence: Synthetic coding sequence"
  source 1..2850: mol_type = other RNA
atgatcctaagcctgttgttttcacttggcggacctctgggctggggtctgttaggggcttgggctcaggcatctagcacatcactttcggacctgcagtctagccgcacacccggagtgtggaaggcagaggcggaagacaccggcaaggatccagttgggcggaattggtgtccgtaccccatgtctaaattagtcacactgctcgccctgtgtaagactgagaaatttctgatccactctcagcaaccttgcccacaaggtgcgcctgactgtcagaaagtgaaagttatgtacagaatggcccataagcctgtctaccaagtgaagcaaaaggttcttactagcctcgcctggcgttgttgtcccggttataccggccccaattgtgaacaccatgattccatggcaattcccgagcccgccgatcccggagattctcaccaggagccccaggacggacccgtgtcattcaagcccggacacttagctgcagtgatcaacgaggtcgaggtacaacaggaacagcaggagcacctgctgggggatttgcagaacgatgtccatagggttgcagattcactccctggactctggaaagcgctgccggggaatcttaccgctgcagtgatggaagccaaccagacaggtcacgagttcccggatagatcgttagaacaggtcctgttgccccacgtagataccttcctgcaagttcacttttcaccaatatggcggagcttcaatcaatccctgcacagcttaactcaggccattcggaatctttccttggatgtggaggctaatcgtcaggctatatcacgtgtccaagatagcgcagttgccagggctgacttccaggagttgggagctaaatttgaagccaaagtccaggaaaatacacaacgggtgggacagctgaggcaggatgtagaggaccggctgcacgcccagcacttcacactgcacaggtccattagcgagttgcaggcagacgttgataccaaactcaaaagattacacaaggcccaggaagcccctggaaccaacggatctttggtgctggccaccccgggcgccggggcacgccccgagcccgacagcctccaggcaagactgggccagctgcaaaggaatttgtccgagttacacatgacaactgctcgtcgcgaagaggagcttcaatacactctcgaggacatgcgcgccactttgacccggcacgtggacgaaattaaggagctttattcagaatctgacgaaacttttgaccagatttcaaaggttgaaagacaggtggaggagttacaggtgaaccacacagcactaagagaacttcgggtgatcctgatggaaaagtccctgatcatggaagaaaataaggaagaggtcgaacgtcagctgctggaactgaatttgaccctgcaacacctccagggggggcacgcggatctcatcaaatatgtgaaagattgcaactgccaaaagctctacctagacctggatgtcattcgcgaaggccaacgagacgccacaagggcactggaggagacgcaggtgtccttggacgagaggcgtcagctggatggctcatcactacaagccttgcagaacgccgtggacgccgtttctctcgccgttgacgcccacaaggctgaaggtgagcgggctcgggctgccacaagtcgattgcgatctcaggtgcaagcattggacgatgaagtcggggcactcaaggctgctgctgcagaagcacgccatgaagtgcgacagctacattccgcctttgccgcattgctcgaggacgccctccgccatgaggccgtcctggccgcacttttcggcgaggaggtgttagaagagatgtctgagcagactccgggacctctcccactgtcctacgagcagatccgggtggccctgcaagacgctgcaagcggtctccaggaacaggccttgggctgggatgaactcgccgctcgtgtcacagcactcgaacaggcttcagagcccccccggcccgctgaacaccttgagccaagccacgatgctggccgggaagaagctgccactactgccttagccggtctcgccagggaacttcaaagcctatcgaacgacgttaagaatgttggacgctgctgcgaggcagaggcgggggccggcgctgcttctctgaatgcgagcctccatgggcttcacaatgcactgtttgcgacccagcgctcgctggaacaacaccaaaggctgttccattccctgttcggcaattttcaagggttgatggaggctaatgtcagtctggatctgggcaaactccagacaatgttatctcgaaaggggaaaaagcagcagaaagatctcgaggcaccccggaagcgcgataagaaggaggccgaacccctagtcgacataagagtcaccggccctgtgcctggagctctgggagccgccctgtgggaagcaggatcccctgtagcattttatgcatcgttcagcgaagggaccgccgctttgcaaaccgtcaagtttaataccacctatatcaacattggtagttcctactttcctgaacatggctactttcgagcacctgaacgcggtgtgtacctgttcgctgtgagcgtggagttcggacctggacccgggacgggccagctggtcttcggcggacatcataggacacctgtgtgtacgactgggcagggaagtggctccactgctacagtcttcgccatggccgaactccagaaaggggaacgcgtgtggtttgaactgacacaaggctcaattaccaaacgctccctgtctggtactgcttttgggggctttctcatgttcaaaacctag

SEQ ID NO: 12423 - RNA, 246 nt, synthetic construct
  misc_feature 1..246: note = source = /note="Description of Artificial Sequence: Synthetic coding sequence"
  source 1..246: mol_type = other RNA
atgcgcctgttagtcctttcctctttgctatgcatactgctgctttgtttctctattttttcaacagaagggaagcgtagacccgccaaggcttggtcaggccgtcggacccgcctgtgttgccacagagtgccatcgccaaatagcaccaacctcaagggccatcatgtgagactgtgtaagccttgcaagctagaaccagaaccgaggctgtgggttgttcctggtgctctcccccaggtctag

SEQ ID NO: 12424 - RNA, 690 nt, synthetic construct
  misc_feature 1..690: note = source = /note="Description of Artificial Sequence: Synthetic coding sequence"
  source 1..690: mol_type = other RNA
atgtctttcctgcaggacccatccttcttcaccatggggatgtggagcatcggagccggagcattgggtgcggccgcactggctctgctcttagcgaatactgacgtgttcctatcaaaacctcagaaggccgctcttgagtacctagaagacattgacctaaaaaccctagaaaaggagccaaggacgttcaaggcaaaagaactgtgggagaagaacggagctgtaatcatggccgtacggagaccagggtgcttcctctgcagagaagaggcagccgatctgtcctcgctcaagagtatgctcgatcaactgggggttcctctgtatgctgtggttaaagaacacatcagaacagaggtgaaagatttccagccctacttcaaaggcgagatctttctggacgagaagaaaaagttctatgggccccagaggagaaaaatgatgtttatgggatttattaggctgggcgtgtggtacaatttctttcgcgcatggaacggcggcttttctggtaacctggaaggggaaggatttattctgggcggcgtattcgtagtcggatctggtaagcaaggtatcctgttagagcatagggaaaaagaatttggggataaagttaacttgttgagcgtgctggaggctgcaaagatgatcaaaccacagacactcgcctccgaaaagaagtag

SEQ ID NO: 12425 - RNA, 657 nt, synthetic construct
  misc_feature 1..657: note = source = /note="Description of Artificial Sequence: Synthetic coding sequence"
  source 1..657: mol_type = other RNA
atgggaatgtggtctattggtgccggcgccctcggggctgcagccttagctctgctactggcgaataccgatgtgttcctgagcaaacctcagaaagccgcattagaatatctggaggacatcgatctaaaaaccttggaaaaagaaccacgaacatttaaagccaaagaactgtgggaaaaaaacggtgccgtcattatggcggtgcgcagacctggttgcttcctgtgccgcgaagaggccgccgatctttcgagtttaaaaagcatgctggatcaattaggcgtcccactgtacgctgtggtgaaggaacacattcgcacagaagtgaaggatttccaaccttattttaagggagaaatttttctggacgaaaagaagaaattctatggtcctcagagacgaaaaatgatgttcatgggctttattcgtctgggggtgtggtacaatttctttcgggcgtggaacgggggtttttccggcaatctcgagggggaagggtttatccttggaggagtttttgtggtcggaagtggtaagcaagggattttgctagagcatagagagaaagagtttggagacaaagtgaacctgctcagcgtgttggaggccgctaaaatgatcaaaccccagacacttgcgtctgagaaaaagtag

SEQ ID NO: 12426 - RNA, 690 nt, synthetic construct
  misc_feature 1..690: note = source = /note="Description of Artificial Sequence: Synthetic coding sequence"
  source 1..690: mol_type = other RNA
atgagctttctgcaagacccctcattttttacaatggggatgtggtccatcggagccggggccctgggcgccgccgcattggccctcctgctggctaacaccgacgttttcttgtccaaacctcagaaagccgcgctcgaatacctggaggacattgatctgaagaccctcgagaaagaacctagaaccttcaaggccaaggagttatgggaaaaaaatggcgctgtcatcatggctgtccggagaccaggctgttttctttgccgagaagaggccgctgacctgagctccttgaaatccatgctcgatcagctgggcgtgccactttatgccgtggtcaaagagcacatccgaaccgaggtcaaggacttccagccttatttcaaaggagaaatctttctggacgaaaagaaaaagttttacggaccccagagaagaaagatgatgtttatgggttttatacggttaggagtgtggtataattttttcagagcctggaatggcggtttctcaggtaatcttgagggcgagggcttcattctgggcggcgtgttcgtcgtcgggagcggtaagcagggaattttactggaacaccgagagaaggaattcggggacaaagtgaatcttcttagcgtattagaagcggccaaaatgataaagcctcaaactctggccagcgagaaaaagtag

SEQ ID NO: 12427 - RNA, 690 nt, synthetic construct
  misc_feature 1..690: note = source = /note="Description of Artificial Sequence: Synthetic coding sequence"
  source 1..690: mol_type = other RNA
atgtctttcctgcaggatccctccttctttaccatggggatgtggtctatcggagccggcgctctcggagccgcagctttagcacttcttctggccaatactgatgtctttctcagcaaacctcagaaggccgcactggaatacttggaggacattgacctgaaaactctcgaaaaggagccccggacattcaaagccaaagagctgtgggaaaagaacggcgcagtcatcatggccgtccgacgaccaggttgctttctatgcagggaggaggccgcagatctgtcttcactcaagagcatgctcgaccagctaggagttcccctctacgctgtcgtaaaagagcacataaggacagaagttaaagacttccagccttacttcaagggcgaaatctttttggatgaaaaaaaaaaattctacgggcctcagagaaggaagatgatgttcatgggatttattcggctcggcgtttggtataatttttttagggcgtggaatggcggattttctggcaatctggaaggagagggattcatacttggtggggtgtttgttgttgggagcggtaagcaggggattctgctcgagcaccgcgagaaagaattcggggacaaagtgaacctattaagtgtgctggaggccgccaagatgattaagccccagacactggcgagcgagaagaaatag

SEQ ID NO: 12428 - RNA, 1248 nt, synthetic construct
  misc_feature 1..1248: note = source = /note="Description of Artificial Sequence: Synthetic coding sequence"
  source 1..1248: mol_type = other RNA
atgagcccatttctgtacctagtcttgttagtattaggcttacatgccacgatccactgtgcctctccagagggcaaggttaccgcgtgtcactcttcccagcccaatgctaccctgtacaaaatgagctccattaatgccgactttgcgtttaacctgtataggcgctttacagtggagacccctgacaaaaacatcttcttctcccccgttagcatcagtgccgccctcgtcatgttgagtttcggggcctgctgttcgacacaaaccgagatagtcgagactctcggatttaacttaaccgatactcccatggtggaaatccagcatggcttccaacaccttatatgtagtcttaattttcctaagaaagaacttgaactccagatcggaaacgctctcttcattggcaagcacctcaagcccctggccaaattccttaacgatgtaaagactctgtacgaaaccgaagtgttctcaactgactttagcaacatctcagcggccaagcaggaaatcaacagccacgtggaaatgcaaactaagggcaaggtggttggcttgatccaggaccttaaaccgaatacaatcatggtactcgtcaactatattcacttcaaggcacagtgggcgaatccatttgatcccagtaaaaccgaagactcgtcatcctttcttatcgataaaactaccacagtgcaggtgccgatgatgcatcagatggaacagtattatcaccttgtggacatggaactaaattgtaccgttctgcagatggattattctaaaaacgcacttgctctgtttgtgctgcccaaggagggccagatggaatccgtagaagctgccatgagcagtaagacactgaaaaagtggaacaggctcttgcagaagggatgggtcgacctctttgtgcctaaatttagcatatctgccacatacgatctaggcgccactctgcttaaaatggggatccagcacgcctattctgagaacgcagattttagcggtctgacagaagataacggcctcaagctatccaatgccgcccataaggccgtgctgcacatcggtgagaagggcacagaggccgcagccgttcccgaggtggaattatcagaccagccagaaaacaccttcttgcaccccatcatccagattgaccgttctttcatgctgcttatcttagaacgctctaccagatccattctgtttttagggaaggtggtcaatccgaccgaagcctag

SEQ ID NO: 12429 - RNA, 240 nt, synthetic construct
  misc_feature 1..240: note = source = /note="Description of Artificial Sequence: Synthetic coding sequence"
  source 1..240: mol_type = other RNA
atggccccccagaccctgctgccagtcttggtcttgtgtgtgctcctactgcaggctcaaggtgggtacagagacaagaaacgcatgcaaaaaacacagttgagtcccgaaattaaagtctgtcagcagcagcccaagctatatctgtgtaagcatctctgtgaatcccaccgcgactgccaagcaaataatatctgttgctctacgtattgtggtaatgtttgtatgtctatcctgtag

SEQ ID NO: 12430 - RNA, 486 nt, synthetic construct
  misc_feature 1..486: note = source = /note="Description of Artificial Sequence: Synthetic coding sequence"
  source 1..486: mol_type = other RNA
atgggtctctcaggtttactgcctatattagtgcctttcattctcctcggagatattcaggaaccaggtcacgctgagggaatcctcgggaaaccttgccccaaaattaaggtagagtgcgaagtagaagaaatcgaccagtgcacaaaacctcgagactgccccgaaaacatgaaatgttgcccattctctagaggtaaaaaatgtctggacttccgcaaaatctatgcagtctgtcacagaagattagctcctgcctggccgccgtatcatacaggtggaaccatcaaaaaaaccaaaatctgcagcgagtttatttacggtggtagccaagggaataacaataacttccaaacagaggcgatttgcctggtcacctgcaaaaaatatcataaaagcgcattgctttacactatcaggagatccctgaataatttgcaagatcttgcccacaatccaggattgagccctcgagttcccgattag

SEQ ID NO: 12431 - RNA, 261 nt, synthetic construct
  misc_feature 1..261: note = source = /note="Description of Artificial Sequence: Synthetic coding sequence"
  source 1..261: mol_type = other RNA
atgggactgagcgggctccttcctatactggtgccctttatcttgctgggtgatattcaggaacctggccatgcagaaggcattttaggcaagccttgtccaaaaataaaagtggaatgtgaggtggaggagattgatcaatgtacaaaacccagagactgccctgaaaatatgaaatgttgcccttttagtaggggaaaaaaatgcctcgactttaggaaagtgagtttaacactgtatcataaggaagaactagaatag

SEQ ID NO: 12432 - RNA, 375 nt, synthetic construct
  misc_feature 1..375: note = source = /note="Description of Artificial Sequence: Synthetic coding sequence"
  source 1..375: mol_type = other RNA
atgcccgcgtgccgccttggcccgctcgccgctgccctgctgctgtccttactgctctttggcttcactttagtgtcaggaacaggagccgagaaaaccggagtgtgtcccgaactgcaggctgatcagaactgcacacaggaatgcgtgagtgacagtgagtgtgcggataatcttaagtgctgcagcgctggttgcgcgacattttgctccctccccaatgacaaggaaggtagttgtcctcaagtgaacatcaatttcccccagttggggctgtgtagagaccagtgccaggtcgattcccagtgtcccggacaaatgaaatgctgtcgtaacggttgcggaaaggtgtcctgtgtcacccccaacttttag

SEQ ID NO: 12433 - RNA, 1428 nt, synthetic construct
  misc_feature 1..1428: note = source = /note="Description of Artificial Sequence: Synthetic coding sequence"
  source 1..1428: mol_type = other RNA
atggccgacatgcagaatctggtagagcgcttagaacgcgccgttgggcgcctggaggctgtgagtcacacctcagacatgcacagaggttatgccgatagtccaagtaaagcgggcgcagccccctatgttcaggccttcgactcactgcttgccgggcccgtcgctgaatacctgaaaatttcaaaggaaattggaggagatgttcagaaacatgccgagatggtccacacggggctaaagttggaacgggccctcttggtaaccgcatcccagtgtcagcagcccgcggagaacaaattgtctgacttgctggctcccatatctgaacagatcaaggaagtcattacgtttcgcgaaaaaaacagaggatccaaactattcaaccacctgtccgctgtttccgagagcatccaggcattgggttgggtcgcaatggcccccaagcctgggccgtatgtgaaagaaatgaacgatgccgcaatgttttacacaaaccgtgtgctaaaagagtacaaggacgtcgacaagaagcacgtcgattgggtgaaagcctatctgagtatttggaccgaactgcaggcatatataaaggagttccatacaactggacttgcctggtcgaaaaccggtcccgtggcaaaagaattgtcagggctaccatctggacctagcgctggttcctgccccccccccccacctccttgccctccacccccacccgtttccaccataagctgttcctatgaatccgcatcccgttcatccctcttcgcccagattaatcagggcgagagcattactcacgctctgaagcacgtgagcgatgacatgaagacccacaaaaaccctgcactgaaggctcagtcaggtcccgtcagaagtgggcctaagcctttctctgctccaaaacctcaaacatcaccctctccaaaacgggccactaaaaaggagccggcagtgctcgaactggaaggtaaaaagtggcgcgtggaaaatcaggagaacgtttccaacctggtgattgaagatacggaactgaagcaagtcgcgtacatttacaaatgtgtgaacacaaccttacagataaaaggcaaaatcaattcaatcactgttgataattgtaaaaaactgggcctcgttttcgatgatgtggtcgggattgtagaaattattaactccaaagatgtaaaagtacaagtgatggggaaagtgcccacgatttctatcaacaagactgatggctgtcacgcctatctttcaaagaactccctagattgtgagatcgtgagtgccaagtctagcgaaatgaacgttttaatccccactgaaggcggagactttaacgagttcccagtaccagagcagttcaaaactctgtggaatggccagaaactggtcactaccgtcactgaaattgcaggttag

SEQ ID NO: 12434 - RNA, 438 nt, synthetic construct
  misc_feature 1..438: note = source = /note="Description of Artificial Sequence: Synthetic coding sequence"
  source 1..438: mol_type = other RNA
atggcagatatgcagaacctcgtggaacgcctggagagagccgtcggcagactggaagccgtgtcccatacttcagatatgcaccgaggttacgctgactccccctctaaggccggcgccgccccttatgtgcaagcttatatcaaggaattccataccacaggcctggcctggagcaaaactggccctgtggccaaagaactcagtgggctacctagcgggccaagcgcaggatcatgcccaccacctcctcccccttgtcccccaccccctccagtatcaactatatcatgctcctacgagagcgcttcccgcagcagcttattcgctcagattaaccaaggtgaaagcatcacacatgccttgaaacatgtatccgatgacatgaaaacacataaaaatccagcactcaaagcacaaagtggacccgtccggtag

SEQ ID NO: 12435 - RNA, 1428 nt, synthetic construct
  misc_feature 1..1428: note = source = /note="Description of Artificial Sequence: Synthetic coding sequence"
  source 1..1428: mol_type = other RNA
atggctgatatgcagaaccttgtggagaggttagaacgtgctgttgggcgcctagaagccgtgtctcatacaagcgacatgcatagaggatacgccgacagcccctccaaagctggcgcagcaccttacgtgcaggcttttgatagcctgctcgctgggcctgtggcagagtatctcaaaatatccaaagaaatcgggggggatgtccaaaagcatgcggaaatggtgcataccggacttaaacttgagagggctcttttggtcactgctagccaatgccagcagcctgctgagaacaagctgtcagatctgctggcccccattagcgagcagattaaagaagtgattacattcagggaaaaaaatagaggctcaaaactatttaaccacctgtcggcagtctccgagagcatccaggcgctggggtgggtagctatggcacccaaacccggaccatatgttaaggaaatgaacgacgctgccatgttctacaccaaccgggttcttaaagagtacaaggatgtggacaagaagcacgtcgactgggtaaaggcgtacttgtccatttggaccgaactgcaggcatatatcaaagagtttcatacaaccggtctcgcctggtccaagactgggccagtcgcaaaggaactttctggacttccctctggaccctcagccgggtcttgtcctcccccgccaccaccctgccctccacctcctcccgtgagcacaatcagctgctcttacgaatcggccagccggagctccctttttgcgcaaattaatcagggggaaagcataacccatgcgctgaaacatgtatccgacgacatgaaaacacacaagaaccctgccctgaaggcccaatccgggcccgtcagaagcggccctaaacctttttccgctcccaagccccagacttcaccatcgcctaagcgggcaacaaaaaaggaacctgctgtcctggaattagagggaaaaaaatggagagtagagaatcaagaaaacgtatcaaatcttgtgatagaagataccgaattaaagcaggtagcttatatatacaagtgtgtgaacacaaccctgcagattaaaggcaagattaattccataaccgtggacaattgcaaaaagctgggcctggtgtttgatgatgtagtgggaatcgtagagattattaacagcaaggatgtcaaagtgcaagttatgggaaaagtgcctaccattagcatcaataaaacagacggctgccacgcctatctcagcaagaactctctcgattgcgagatcgtgtcagcgaaaagtagtgagatgaacgtgcttattcccactgaagggggagacttcaatgaatttccagtgcctgaacagtttaaaactctgtggaatggacagaaattggtcacaaccgtcaccgagattgcgggctag

SEQ ID NO: 12436 - RNA, 1425 nt, synthetic construct
  misc_feature 1..1425: note = source = /note="Description of Artificial Sequence: Synthetic coding sequence"
  source 1..1425: mol_type = other RNA
atggcggacatgcagaacctggtcgaacgcctcgaaagagcagtgggccggctcgaggccgtgtcacataccagcgatatgcacaggggatatgccgatagcccttcgaagggagcagcaccttacgttcaggcttttgacagtctgctggccgggccagtcgcggagtacctaaagatctcgaaagagattggcggagacgtccagaaacacgctgaaatggtgcacacaggcttgaagctcgagagggcccttctcgtgaccgccagtcagtgtcagcagccggcagagaacaagctaagtgatctccttgcccccatttctgagcagatcaaagaagtaattacattcagggagaagaaccgaggaagcaaattgttcaaccatctaagcgcagtctccgaatcaatccaggccctcgggtgggttgcaatggcccctaagcccggcccatatgtcaaagagatgaacgatgcggccatgttctataccaatcgagtgctcaaggaatacaaggacgtagacaagaagcacgtggactgggttaaggcttatctgtctatttggactgagctccaagcttatattaaagaattccacactacgggactggcttggtccaagactggccccgtcgcaaaagaactttctgggctccctagtggtccatcagccgggtcctgtccacccccccccccaccatgccccccccctccacctgttagcactattagctgcagttatgagtcagcctcgcgatcctcattattcgcgcaaatcaatcagggtgaatctatcactcacgcgctgaaacacgtcagtgacgacatgaaaacacataagaatccagcactgaaggctcagtctggacctgtgagaagcggcccaaagcctttttctgcgccaaaacctcagacatccccttcgccaaagcgtgctaccaagaaagaaccggcagtcctagagttagaggggaaaaagtggcgcgtggagaaccaggagaatgtgtctaacctcgttattgaggataccgagcttaaacaagttgcatatatctataagtgcgttaacaccaccttgcaaatcaagggtaagataaatagcataactgtggataattgcaagaagctcggtctggtctttgatgacgtcgttggcatcgttgagatcataaatagcaaggatgtgaaagtacaggtcatgggcaaagtccctaccattagtatcaacaaaaccgacggctgccacgcatacctgagcaaaaattccctcgattgcgagatcgtttcagccaagtccagtgaaatgaatgtgcttattcctaccgaaggtggcgactttaacgaattccccgtgccagaacaatttaaaactctatggaatggtcagaagttagttaccacggttacagagatagccggctag

SEQ ID NO: 12437 - RNA, 1425 nt, synthetic construct
  misc_feature 1..1425: note = source = /note="Description of Artificial Sequence: Synthetic coding sequence"
  source 1..1425: mol_type = other RNA
atggctgacatgcagaaccttgtggaaagattagagcgcgccgttgggcgtctcgaggccgtgtcgcacacaagcgacatgcacagaggatacgccgacagtccctccaagggagcagcaccgtatgtgcaggcattcgactccctgcttgctggccctgtggcggagtatctcaaaatttcaaaggaaatcggaggagacgtgcagaaacacgcagaaatggtccatacggggctcaaactggagagagcactgcttgtcactgcatcccaatgccagcagccagccgagaacaaactttcagatctgctcgcgcctatttctgaacagattaaggaagttatcacattccgtgaaaagaacaggggttcaaagttattcaatcacctaagcgccgtcagcgaatcaatccaggccctgggatgggtcgccatggcccctaaacccggaccctatgtgaaggaaatgaatgacgccgctatgttttataccaatagggttctcaaggaatacaaggacgtcgataaaaagcacgtcgattgggtgaaagcctatttgagtatttggaccgagttacaagcctacattaaggagtttcacacgacaggactggcttggagcaaaactggtcccgttgcaaaggagctgagcggcctgccctccggcccatcagctggctcatgcccacccccgccgcccccttgcccaccaccaccgccagtgtcaactatctcttgcagttacgagagtgcaagccggagttccttgttcgcacagattaatcagggggaaagcatcactcatgctctaaaacacgtatccgacgacatgaagactcacaagaacccggcccttaaggctcaaagcgggcctgtcagatctggtcctaagcctttttccgcacctaaacctcagacttcccctagtccgaagagggctactaagaaagaaccagctgtcctagaactggaaggaaaaaagtggcgagtcgaaaaccaagagaatgtgtccaatctcgttatcgaagacacagaactgaagcaggtagcgtacatctacaagtgcgttaacactaccctccaaatcaaaggaaagattaattccatcacagtggataactgtaaaaagctgggtctcgtctttgacgatgtggtgggcattgtcgagatcattaactccaaggatgtcaaggtgcaggtcatgggcaaagtcccaactatttcaatcaataaaactgatggctgtcacgcctatctatctaagaattccttggactgcgagattgtatctgcgaagagctctgaaatgaatgtattaattcccactgaaggtggcgacttcaacgagttcccagtccccgaacagttcaaaacgctgtggaatggacagaagttggttactacggttactgagatcgcaggatag

SEQ ID NO: 12438 - RNA, 1428 nt, synthetic construct
  misc_feature 1..1428: note = source = /note="Description of Artificial Sequence: Synthetic coding sequence"
  source 1..1428: mol_type = other RNA
atggcagacatgcagaacctggtcgaaaggcttgagagagcggtgggaagattggaggctgtttcccacacctctgacatgcatcgcgggtatgccgatagtcctagcaaagcaggcgctgctccatatgtgcaggcattcgacagtttactagccggccctgttgcagaatatctcaaaatatccaaggaaatcggaggcgacgttcagaagcacgctgagatggttcacacagggctcaagttggagagagctcttttggtaactgccagtcaatgtcaacaaccagctgagaataagctgagcgacctcttagcccctatttctgagcaaattaaggaagtcattacctttagagaaaagaaccgcggcagcaaattgtttaatcatctgagcgccgtaagcgaatctatccaggctttaggctgggttgcaatggcacctaagccagggccatacgtgaaggagatgaatgacgctgctatgttttacaccaatcgggtgcttaaagagtataaagatgttgataagaaacatgttgactgggtgaaagcgtacctgtctatctggaccgaactccaggcatatatcaaagaattccacacaaccggcctagcctggtctaaaacgggtcctgtggcaaaagaactgtctggactgccctccgggccatccgctggatcgtgcccccctccacctccaccttgccccccgccacctcccgtgagtaccataagttgctcttacgagtccgccagccgtagcagcctgttcgcccaaatcaaccaaggagagtctatcacgcacgcgctcaagcacgtaagtgacgacatgaagacccataaaaatccagccctgaaagcccagtccggccctgttcgcagcggacctaagcctttctctgcccccaaaccacagactagtccaagcccgaaacgcgctacaaaaaaggagccagctgtactggagttagagggaaaaaagtggagagtggaaaaccaggaaaacgtctctaatctcgtgatcgaggatacagaactaaaacaagttgcctatatctacaaatgcgtgaatacaactctgcagatcaagggcaaaatcaattctataacagttgacaactgtaagaagttaggcctggtatttgacgatgtggtcggcattgtggaaattatcaactcgaaggatgtcaaggtgcaggttatgggaaaagtgcctacgatctctatcaacaagaccgatggatgccatgcatacctctcgaagaacagcctggactgcgaaattgtgtctgccaagagttctgagatgaatgtcttgatccccactgagggcggcgactttaacgagttcccagttccagaacagtttaagacgctgtggaatggccagaagctggtcaccaccgttaccgaaatcgctggttag

SEQ ID NO: 12439 - RNA, 1209 nt, synthetic construct
  misc_feature 1..1209: note = source = /note="Description of Artificial Sequence: Synthetic coding sequence"
  source 1..1209: mol_type = other RNA
atgaccgcactgccaggtcccctttggctgctgggccttgccctttgtgccctgggaggaggggggcctggactgagaccaccacccggatgtcctcagaggcggttaggcgcgagagaacgacgagacgtgcagcgggaaattttagcagtcttgggccttccaggtcgtcctcgaccacgggccccacccgcagcttcccgactcccagcgtccgctccactgtttatgctagatctctatcacgcgatggctggcgacgacgatgaggacggcgcccctgctgagagacgcctcgggagagccgatctagtcatgtctttcgtcaatatggtcgaacgtgatcgagcacttggacaccaggaacctcactggaaagagttccgctttgaccttacacagatccccgccggcgaggcagtaaccgcagccgagttccggatctataaggttccctccatccatctgctgaataggaccctgcacgtgtcaatgtttcaagttgtacaggagcagagcaacagggagtctgatttgttcttcctggatctgcaaactcttcgcgcgggtgacgagggttggctcgttctggacgtcacagccgcctccgattgttggctcttaaagagacacaaagacctcggcttacgcctttatgtcgagaccgaggatgggcactcagttgatccggggctcgccggcctgctcgggcagagggcaccccgttctcagcagccctttgttgtgacattcttcagagcatctcctagccctattcgcacgccaagggccgtccggccactgagacgtaggcagcccaagaaatcaaacgaactaccacaggccaaccgcctccctggcatctttgacgatgtccacgggtcgcatggaagacaagtgtgccgaagacatgaactttacgtttcattccaagacctgggttggctggattgggtcatcgctcctcagggctactccgcttactactgtgaaggcgaatgttcctttccgctggacagctgtatgaatgccaccaatcacgccattctgcaatctctggtgcacctgatgatgccagacgccgtacccaaggcctgctgtgctcctaccaaattgtctgccactagcgtgctgtattatgattcatctaataacgtcatccttcgcaagcatagaaatatggttgtaaaggcttgtggatgccactag

SEQ ID NO: 12440 - RNA, 804 nt, synthetic construct
  misc_feature 1..804: note = source = /note="Description of Artificial Sequence: Synthetic coding sequence"
  source 1..804: mol_type = other RNA
atggctgcgatcagaatggggaaactgactacgatgcccgccggtctgatctatgcttcagtaagtgtccacgcagctaaacaggaggagtctaaaaagcagctcgtgaagcccgaacagctgcctatctacacggcgccccctttgcaatcaaagtatgtcgaggaacaacccggtcacttacaaatgggctttgcttcaattagaactgccactggatgttacataggatggtgcaagggagtctatgtattcgtcaagaatggtataatggacaccgtccagttcgggaaagatgcctatgtttacctgaaaaaccctccgagagatttcctgccaaagatgggcgtgattactgttagtggactggccggccttgtgtccgcccgcaaaggatcaaagttcaaaaaaattacttatcccctgggactggccaccctaggtgccaccgtatgttatccagttcagagtgttataattgccaaggtgacagccaagagatatatgctgcaggcttctaagttcctggaacaattaaaccattgtggacagaaagcggccaaaaagtcacacagcctgaacttgaagaagaccaaattgggtagttcctccgaaatcgaggttccggcaaaaacaacccatgttcttaaacattcggtacctctccctacggaattgagttcagaagcaaagaccaaatccgaatctaccagcggtgctacgcagtttatgcctgatcctaaactgatggaccatgggcaaagccaccctgaggatatcgatatgtacagcacccgctcctag

SEQ ID NO: 12441 - RNA, 807 nt, synthetic construct
  misc_feature 1..807: note = source = /note="Description of Artificial Sequence: Synthetic coding sequence"
  source 1..807: mol_type = other RNA
atggctgctattaggatgggcaagctgacaaccatgccagccggtctgatttatgcttcagtctcagttcatgcagccaaacaggaagagtctaagaaacagctggtgaagcccgagcagctacccatttatacagctcctcctttgcagagtaaatacgttgaggaacagcctggccacctccagatggggttcgcaagtatcaggacagcaactggctgttacatcgggtggtgtaagggtgtttatgtctttgtgaagaatggcatcatggataccgtgcagttcggcaaagatgcctacgtgtatttgaagaatcctccacgagacttcttacccaaaatgggtgttatcacagtttccggtttggcgggcctggtctcggctcggaagggttccaaatttaagaaaattacgtatccactcggtctcgccacgttaggagcaaccgtgtgttacccagtccaatctgtcattatcgccaaggttaccgccaagaaagtgtacgctacatctcagcagatcttcggtgctgtgaagtcactgtggacaaaaagttctaaagaagagtctctgccaaaacccaaagaaaaaactaaacttggttcctcctccgaaattgaggtacctgccaaaacaacccacgtactaaagcactcagtgccactccccaccgagctttcctctgaagcgaagaccaaatccgagtcaacctcgggcgctactcaatttatgccggacccgaagctaatggatcacggtcaatcacaccctgaggatattgacatgtacagcacccgctcatag

SEQ ID NO: 12442 - RNA, 3672 nt, synthetic construct
  misc_feature 1..3672: note = source = /note="Description of Artificial Sequence: Synthetic coding sequence"
  source 1..3672: mol_type = other RNA
atggcgccattgagagccttgctatcctaccttttgcctcttcactgtgctctgtgtgctgctgcaggcagcaggactcctgaactacacttgtccggcaagttatccgactatggtgtgactgtaccatgcagcacagatttccgaggaagattcctgagtcatgtcgtgtccggcccagccgctgccagtgccggttccatggtcgttgacaccccacccaccctgccacgacattctagtcacttgcgggtggcacggtcacccctacatcccggggggactctctggcccggccgcgtgggcagacatagcctgtacttcaacgtgactgttttcggcaaggaattgcacttgcgactgcgaccaaataggcggctggtggtccccggcagctcagtggaatggcaggaggacttcagagaattattccggcagccgctgaggcaggaatgcgtgtacactggaggcgtaaccggaatgcctggggctgctgtggccatttctaattgcgacgggttagccggcctcattcggactgattcaaccgatttcttcatcgaacctttggagagaggccagcaggaaaaggaggctagtggacggacccatgtagtctacaggcgagaggccgtacagcaggagtgggctgaacccgatggcgacctgcataatgaggcttttggactgggcgatctacccaatctcctcgggctggtgggggatcagctgggcgacaccgaaagaaagagacgccacgctaagccaggaagttattccatagaggtcttgttggtggtggacgattctgttgttcggtttcacggcaaagagcatgtgcagaactacgtgttaacgctgatgaatattgtcgatgaaatctatcacgacgagtctctaggggtgcacattaacatcgccttggtgcgtctcatcatggtgggataccggcagagcctgagcctcatcgagcgaggaaatccaagccggagtctggaacaggtgtgtcgctgggcccacagtcaacagagacaagatccttctcatgcagagcatcatgaccacgtcgtctttcttacacgccaagacttcgggccgagcggttatgcccccgtcaccggaatgtgtcaccctctcagatcttgtgccctgaatcatgaggatggattctccagtgcctttgtgatcgcccacgaaacaggtcacgtgctgggtatggaacacgatggccaggggaatggctgtgccgacgagacaagtctcgggagtgtcatggctccactggtacaggctgcattccacagattccattggtctaggtgctcaaaactggaactgtctcgctacttgccctcttatgattgcttactcgacgaccccttcgatcccgcttggccacagcctcccgaacttcctggaattaattattccatggatgaacagtgtcgcttcgatttcggctccggctaccaaacatgtctggcattcagaaccttcgagccctgcaagcagttgtggtgtagccaccccgacaacccctacttttgcaaaactaaaaagggtcctccactcgacggcaccgaatgcgctccagggaaatggtgtttcaaggggcactgcatctggaagtcccctgagcagacgtacggccaggacggcgggtggagcagttggacaaagtttggctcctgttcaagaagctgcggggggggagtcaggagtcggagccgctcatgcaacaacccaagtccggcttacggaggccggctatgccttggccctatgtttgaataccaagtctgtaactctgaagagtgcccaggcacttacgaggattttcgagcgcaacagtgcgcaaaaagaaattcttattacgtccaccagaacgccaaacattcctgggttccttacgagcccgatgacgatgcccagaaatgtgagctgatctgtcaatctgcggatacaggggacgtcgtttttatgaatcaggtggttcacgatggcacccggtgttcctacagggacccttattcagtctgcgcacggggggaatgcgtgccagtaggctgcgataaagaggtcggttctatgaaagccgacgataaatgcggcgtttgcggcggcgacaattctcattgcagaaccgtgaagggaacactgggaaaggcctccaagcaggccggggcactgaaactcgttcaaattccagctggggcaagacacatccaaatagaagctcttgagaagtccccccatagaatagtggtgaaaaaccaagtgacagggagctttatcttaaacccaaaaggcaaagaagcaacatcccgcacatttaccgccatgggtcttgagtgggaggacgcagtcgaagatgctaaggagagtctcaagacatccggccctttgcccgaggcaatcgctatactcgcactgcccccaacagaggggggaccccgatctagtctcgcttataaatatgtaatccatgaggatctattgcctttgatcggtagcaataatgtcctcctggaagagatggatacctacgagtgggctctcaaaagctgggctccatgctccaaagcatgtggcggtggtatccagttcactaagtatggatgccgtaggagaagggatcatcacatggtccagcgccacctgtgtgaccacaaaaagaggcctaaacctatcaggagaagatgcaatcaacacccatgtagccagcccgtatgggtgacagaagaatggggagcttgttctagaagttgcggcaagctcggggtccagactagaggtatccagtgcctgctccccctcagcaacggaactcataaagtaatgcctgctaaggcatgtgcaggggacaggcccgaggctcgtaggccctgtcttcgagtcccttgtcccgcccaatggaggctgggcgcatggtctcaatgcagcgctacttgcggagaaggcatacaacagagacaggtcgtgtgtcggactaatgcaaactctctggggcactgcgaaggggacaggccagatacggtccaggtctgcagcctaccagcctgcggcggaaaccaccaaaatagtaccgtccgagctgacgtgtgggaactcggcaccccagaggggcaatgggtgccgcagtcagagccacttcatcccataaacaagatctcctccaccgagccatgcacaggtgaccgaagtgtgttttgtcaaatggaggtcctggaccggtactgttccatccctggataccatagactatgctgtgttagttgcataaagaaggctagcggccctaatccgggacccgaccctggtccaacctctttgcccccattttcaacccccggctcacccctgcctggcccacaagatcctgccgatgccgcagagcctccggggaagccaaccgggtcagaagaccaccagcatgggagggccactcagctgcctggcgcactggacacaagcagtccaggaacccagcaccctttcgcgcccgagacacccatcccgggcgccagctggagcataagtccaaccacaccgggtggattgccatggggttggacacagactcccacccccgtgcctgaggataagggacagcccggagaagatcttagacaccccggcactagtctgccggcagcatcgcctgttacctag

SEQ ID NO: 12443 - RNA, 3681 nt, synthetic construct
  misc_feature 1..3681: note = source = /note="Description of Artificial Sequence: Synthetic coding sequence"
  source 1..3681: mol_type = other RNA
atggcccccttgcgcgctctgctgtcctatctcttgcccctacactgtgctctatgcgcagccgccggttcccgtaccccggagttgcacctgtccggcaagttgtcagactacggtgtcacagttccatgctctacagattttagagggcggtttctcagccacgtcgtttcaggtcctgcagctgcctcggctggatcaatggttgttgacaccccaccaactctgcctcgtcactcttcccacctgagagtggcgagaagcccacttcatccaggcggcaccctgtggccaggtcgggtgggacgacatagcctgtactttaacgtgaccgtgttcggcaaagagctgcacctgcgcctacgtcctaatcgtcgactagtcgtgcccggcagttccgtcgagtggcaagaggatttcagggagctatttcgacagcctttacgtcaggagtgtgtatatactgggggggtcaccggaatgcctggagctgccgtcgccatatccaactgcgatgggctggcaggcctgatccgcaccgactctaccgactttttcattgagccactcgagcgcggtcaacaggaaaaagaagctagcggtcggacccatgtggtgtatcgtagggaggctgtgcagcaggaatgggcagaaccggatggagatctccacaatgaggcattcggacttggcgatctgcccaacctgcttggtctcgtgggagaccaacttggagacacggagcgaaaaagaaggcacgcaaagcccggtagctatagcattgaagtcctgttagtagtggacgacagcgttgtgcgcttccatggcaaagagcacgttcaaaattatgtgcttaccttgatgaatatcgttgacgagatctatcatgatgaaagcctaggcgtgcatatcaatatagcgctcgttaggctgataatggtgggctatcggcaatctttgtcattaatcgaacgtggtaatccctccagaagcttagaacaggtgtgtaggtgggcacattctcaacagagacaggaccctagccatgcagagcaccacgaccacgtcgtttttttaacaaggcaggacttcggaccgagcggaatgcagggttacgctccggtgactgggatgtgccacccgctgcgctcttgtgctttgaatcatgaagatggttttagttcagccttcgttatcgctcatgagaccgggcacgtcctgggcatggagcacgatggacaggggaatggatgtgccgacgagacgagcctgggaagtgttatggccccactcgtgcaagccgcgttccatcggttccattggtcccggtgctcgaagctggagctgagcaggtaccttcctagctacgattgcttgttggacgatcctttcgaccccgcctggcctcagccccccgagttacctggcatcaactatagtatggacgaacagtgtcggttcgacttcggctcaggctaccagacatgtctcgcttttagaacttttgaaccttgcaaacagctttggtgcagtcaccctgataacccctatttctgcaaaaccaaaaaaggccctcctctggatgggacagagtgcgccccgggtaagtggtgcttcaagggacattgcatatggaaaagccctgaacagacttacggccaggacggcggctggagtagctggactaaatttggctcttgcagtaggtcttgcgggggcggagtaaggagcaggagcaggagctgcaacaatccctcccccgcctacggcggcagattgtgccttggccctatgttcgagtaccaagtgtgcaatagcgaagaatgcccagggacatacgaggactttagagcccagcaatgcgcaaagagaaatagttactacgtgcatcagaacgcgaaacattcatgggtcccatacgagcctgacgatgatgcacaaaaatgtgagttgatctgtcagtccgccgataccggcgatgtcgtctttatgaaccaggtggttcacgacggtaccaggtgcagttatcgagacccctactctgtttgcgctagaggtgagtgtgtgcccgtgggctgcgataaagaagtcggttctatgaaggcggacgacaagtgcggcgtgtgtggcggcgacaattcacattgccgcaccgtaaagggcacacttggtaaggctagcaaacaggccggcgccttgaaattagtgcagattccagccggcgcaagacatatccagatcgaggcacttgagaaatctcctcacagaatcgtggttaagaatcaggtcaccggctccttcattttgaatcccaagggcaaggaagccacatccagaaccttcacggcgatggggctcgagtgggaggatgccgtggaggatgccaaagagtcccttaagacgtcaggccctttacccgaagctatcgctatcctggcactccccccaacagagggaggcccaagaagcagccttgcatataagtacgttatccacgaagatcttttgcccttgataggctccaataacgtactcttggaggaaatggacacttatgaatgggctctcaagagttgggctccttgctctaaggcctgtggaggcggcatccaattcacgaagtatggttgtcgtagacggcgcgatcaccacatggtgcagagacatctctgtgatcacaagaagcgtcctaaaccaatcagacgcaggtgtaaccagcacccttgctcacagcccgtgtgggtaaccgaagagtggggcgcttgttcccggtcatgcggaaaattgggcgtgcagactcggggtatccagtgtctcctgccattgtccaacggaacccataaggtcatgccggccaaggcctgcgctggggataggccggaagctcgtagaccttgtctcagggtcccatgtcctgcccaatggaggctgggcgcttggtctcaatgttctgccacatgtggagaaggcatccagcaacgtcaggttgtgtgtaggaccaatgctaatagcctgggtcactgcgaaggggaccggccagatacagtccaggtctgcagcttacccgcctgtggcgggaaccaccagaatagcactgtcagggccgatgtttgggagctcggtactccagagggacagtgggtgcctcagtcagagcctctgcaccccattaataaaataagtagcaccgaaccatgcaccggcgatcgctcagttttttgccagatggaagtcttagatcgatattgttccattccaggataccacagactgtgttgcgtgtcttgtatcaaaaaggcttctggccccaatccaggtcccgaccccggacctacgtctctacctcccttcagtaccccaggctcacccttgccgggtccacaggatcccgctgacgcagctgaaccccccgggaagcccaccggaagtgaagatcatcagcacggcagagccactcaactcccaggagcactggacacttccagccccggcacccagcatccttttgctcccgagacccccatccccggcgccagttggtccattagtccaacaacccccggggggttaccatggggttggactcagacacctaccccagtgcccgaggacaaggggcaaccaggcgaggatctgagacaccccgggaccagtttaccagctgcttcgcccgtcacctag

SEQ ID NO: 12444 - RNA, 762 nt, synthetic construct
  misc_feature 1..762: note = source = /note="Description of Artificial Sequence: Synthetic coding sequence"
  source 1..762: mol_type = other RNA
atggcagccgcaacgagaggttgtcgcccatggggaagtctgttgggcttgctcggccttgtgagcgctgctgcagccgcttgggatttggcaagtctcaggtgcacattgggcgcgttctgtgagtgtgacttcagacccgacctcccagggctggaatgcgatctcgcccagcaccttgctggacagcatctcgctaaagctttggtcgtgaaggctctaaaagcatttgttagagacccagctcctaccaagcccttagtgcttagcctccatgggtggacaggcaccggcaaaagctacgtaagctctctgttggctcactaccttttccaaggagggttgagaagcccacgcgtccatcatttctcacccgtcttacacttcccccatccctcacacatcgaaagatacaaaaaagatctgaagagttgggtccaaggcaacctcactgcctgtggtagatcattatttctgttcgatgaaatggacaagatgccacctggtttgatggaagttctgaggccctttctcggttcgtcatgggtagtttatggaacgaattaccgcaaagctattttcatcttcatccgctggggcccagccctgcagtgggcacagtggggcggacatttttccgaggttcagctgtactcactgagtctatgtagccagcagaatcctgtgccccacggcctaagttgggccttcccagtgcccagcgctaccttacgggacgatatcgtgattcccccaggttag

SEQ ID NO: 12445 - RNA, 966 nt, synthetic construct
  misc_feature 1..966: note = source = /note="Description of Artificial Sequence: Synthetic coding sequence"
  source 1..966: mol_type = other RNA
atggctgccgctacacgcggatgtcgaccgtggggttccctcttgggtctgctgggacttgtgtcagctgccgctgccgcctgggacctggcttctcttagatgtacccttggggctttttgcgaatgcgattttagacccgacctgcctgggttagaatgcgaccttgcccaacatcttgccggtcagcacctcgctaaagccctcgtcgtcaaggccctcaaggcgtttgtccgcgaccccgccccaaccaagccccttgtgctgagcctgcacggatggacgggaacagggaaatcatacgtttcaagtctcctggcacactatctgttccagggggggcttcggtcaccacgggtgcaccacttctctccggtactgcacttcccacatccctcccacattgaaagatataagaaagatctcaagagttgggtgcaggggaatttaacagcctgtggacgaagtctgtttctgtttgatgagatggataagatgccaccaggacttatggaagtgctgcggccgttcctaggctcctcttgggtcgtgtacggaacgaactatagaaaggcgatcttcatttttattagtaatactggtgggaagcagattaaccaggtggctcttgaagcctggcgttcaagaagggatagagaggagatcttgcttcaggagctagaaccagtaatttcacgggctgtgctcgacaacccacaccacggctttagcaattccggcatcatggaagagcgcctcctggacgctgtggtgccatttctcccgctccagaggcaccatgtccgtcactgcgtgttgaatgaacttgctcagctgggactcgagcctcgcgacgaggttgtacaggcggtcctcgattcaaccacattcttccctgaagatgaacagctattcagttctaatggatgtaaaacagtggcctcccgaatcgccttttttttgtag

SEQ ID NO: 12446 - RNA, 576 nt, synthetic construct
  misc_feature 1..576: note = source = /note="Description of Artificial Sequence: Synthetic coding sequence"
  source 1..576: mol_type = other RNA
atgcaggtctggtgtgaccaacgacacgatcccgggggctggacggtcattcagcgtcgcttggacggctctgtaaattttttccgtaactgggaaacatacaaacaggggttcggcaacatcgatggtgagtactggctgggcttagaaaatatctactggctcacgaaccaaggtaactacaagcttctggttacgatggaggattggagcggtagaaaggtgtttgccgagtacgcctccttccggctggaacccgagtccgaatactacaagttgcgtttaggtagatatcacgggaatgcaggagatagcttcacctggcataatgggaaacagtttactacgttagatagagaccacgatgtgtacaccgggaattgcgcccattatcagaaaggaggttggtggtacaatgcctgcgcccattctaatcttaacggagtatggtatcgcgggggtcattaccgcagtagataccaagacggagtttattgggccgagttccgtgggggtagctactcgctgaagaaggtggtgatgatgatccgtcccaatcctaacacatttcattag

SEQ ID NO: 12447 - RNA, 1482 nt, synthetic construct
  misc_feature 1..1482: note = source = /note="Description of Artificial Sequence: Synthetic coding sequence"
  source 1..1482: mol_type = other RNA
atgcggccactgtgtgtcacgtgttggtggcttggccttttggccgctatgggtgctgttgcagggcaagaagacgggttcgaaggaactgaagagggaagcccaagagaatttatctacctaaaccgctacaaaagagcaggggaatctcaggataagtgcacttatactttcatcgtcccgcagcagagggtgaccggtgccatttgtgtgaactcaaaagaaccagaggtgctactcgagaatagggtacataagcaggagctggaattgctgaataacgagctgctcaaacaaaagaggcagatcgagacactccagcaattggttgaagtggatggaggaatagtctcagaagttaagctcctcaggaaggaatcgcggaatatgaactcgagagtgacacagctgtacatgcaattactccatgagattattcgcaaacgggacaatgctttggagctttcacaactagaaaataggatactaaatcaaacagcagatatgctgcagcttgctagcaaatacaaggacttagagcacaagtatcagcacttagccaccttagcgcataaccaatctgaaataatcgctcagctcgaggagcactgtcaacgcgtaccctcggccagacccgtgcctcagcctccacctgctgcgcccccacgggtgtaccaacctccaacctataaccgcatcatcaaccagatttccaccaacgaaatccaaagcgatcagaacctgaaggtattgccaccaccccttccaaccatgcctaccctgacaagcttgccctcttcgactgacaagcccagtggcccgtggagagactgcctgcaggctctggaggacggccatgatacatccagtatttatctcgttaagcccgaaaacaccaaccgattgatgcaggtgtggtgcgatcagagacacgatcctggcgggtggactgtgatccagcgtaggctagatgggtctgtcaacttttttagaaattgggagacatataagcagggtttcgggaacattgacggggagtattggttgggccttgaaaatatatactggctcactaatcagggaaactataagttgctcgttactatggaggattggtccgggaggaaagtcttcgcggagtatgcttcttttcggttagagcccgagtccgagtactacaagcttagactcggtcgttaccatggcaacgcaggggattctttcacttggcataatggcaaacagttcaccactctggacagagaccatgacgtgtacaccggtaattgtgcccactatcagaagggaggctggtggtataatgcttgtgcccattccaatctgaacggagtgtggtatcggggagggcattaccggagccgctatcaggatggagtgtactgggccgagtttcggggcgggagttatagccttaaaaaggtagtgatgatgattagacctaatcccaacacctttcattag

SEQ ID NO: 12448 - RNA, 1959 nt, synthetic construct
  misc_feature 1..1959: note = source = /note="Description of Artificial Sequence: Synthetic coding sequence"
  source 1..1959: mol_type = other RNA
atggctgcggcagccctgcccccgagacctcttcttttgctgccccttgttcttctgctgagcgggaggccaacaagagcagacagcaaagttttcggcgatcttgaccaagttaggatgacgagtgaggggtcagactgccgatgcaagtgtatcatgcgccccctgtcaaaggacgcctgttcgcgggtgagatcaggaagagctagagtggaagatttttacactgtcgaaacagtctcatccggaaccgactgtcggtgcagctgtactgcgccaccttcctcactgaatccctgtgagaacgaatggaagatggagaaactgaagaaacaggcaccagagttgttgaagctgcagtcaatggttgatctgcttgaagggacattgtattccatggacctcatgaaagtccacgcatacgtgcacaaagtcgcgagtcagatgaatacattggaggagtccatcaaagctaacctttccagagaaaatgaggtggtcaaggactccgtgcggcatctctcggagcagctcagacattatgagaatcactccgcaattatgctcggaattaagaaggagctgtccagactcggactgcagctgctgcagaaggatgccgccgctgcccccgctacaccagctacagggaccggttctaaggcacaggacacggctagaggaaagggtaaggatatctctaaatatggatccgttcaaaaatcattcgcggatcgaggattgcccaagcccccaaaagaaaaactactacaggtggagaagttgagaaaagagtccgggaaaggctcttttcttcagcctactgccaaaccacgggccttagctcaacagcaggccgttattcgcgggttcacgtactacaaagccggcaagcaagaagtcacggaggccgtagctgacaacaccttgcaaggaacaagctggctcgaacaactaccccccaaagtggagggcaggtctaacagcgccgagcctaatagtgccgaacaggacgaagcggagcctcgatcctcagagagagtcgacctggccagcggtacgcccacttccattcccgccacaacaaccaccgctaccaccactccaaccccgactacgtccctgcttccaaccgaacccccctctggacctgaggttagctcccagggaagagaggcatcgtgcgagggaacactccgcgcagtggatccccctgtgcgacatcacagctatggaaggcacgagggcgcctggatgaaggatcctgctgcacgcgacgaccgtatctatgtgacgaattactattatggcaattcgttggttgagtttcgcaacttagagaacttcaagcagggccgctggtccaacatgtacaaactgccttataactggattgggacaggtcacgtcgtctaccagggtgccttttactataatcgggcattcacaaaaaacataataaagtatgacctgcgccaaagatttgtggcttcctgggccctgctgcctgatgttgtttatgaggacacgactccctggaaatggcggggccactcagacattgattttgccgtggacgaatccggtctttgggtaatttaccctgctgttgacgatagagacgaggcccagccagaagtgatagtgctatccagactggatcctggcgacctttccgtccacagggagactacatggaaaacgcggctacgccggaatagctatggcaattgctttctcgtttgcggcatactctatgctgttgacacgtacaatcagcaggaaggccaggtcgcctacgcttttgacacacataccggcactgatgcacgcccccagcttccgttcttaaacgaacatgcatacacaacccaaatcgattacaaccccaaggagagagttctctatgcatgggataatggccaccagttgacttacacattgcactttgtggtgtag

SEQ ID NO: 12449 - RNA, 1641 nt, synthetic construct
  misc_feature 1..1641: note = source = /note="Description of Artificial Sequence: Synthetic coding sequence"
  source 1..1641: mol_type = other RNA
atgaagaaccaggacaaaaaaaacggcgccgccaagcagtccaacccgaaatcatccccgggccagcctgaggccggccctgaaggtgctcaggagaggccaagccaagcagcacccgccgtggaagccgaaggaccaggcagctcacaggctccaagaaagcccgagggtgcccaggctcggacggctcagagcggagccctgcgagatgtgagcgaggaattaagcaggcagctggaagacattctgtccacatattgcgtcgataacaaccaaggcggacccggggaagacggggcccagggagagccggctgagccagaggacgctgagaagtccaggacatacgtggctaggaatggagaacctgaacccaccccagtcgtgaacggagaaaaagagccgagtaagggggatccgaatacagaagaaatccgacagagtgacgaggtgggcgaccgcgatcatcggagaccgcaagagaagaaaaaagccaagggacttggaaaagaaatcaccctcctgatgcaaacacttaacacactttccacacctgaagagaaactggccgctctgtgcaagaaatacgctgagctgctcgaagagcaccgcaattctcagaagcagatgaaattactccagaagaagcaatcccagcttgtacaggaaaaggatcacctgcggggagaacattccaaggctgtgctggccagaagcaagctcgagagcctgtgcagagagttgcagaggcataaccggagtttgaaggaagagggcgtccagagggcacgggaggaggaagaaaaacggaaggaggtgaccagccattttcaggtaactctgaacgatattcaactgcagatggaacagcacaatgaacgcaattcaaagctgaggcaagagaacatggagctagctgagcgcctgaagaagctcatcgaacaatatgaactgcgggaggagcacatcgacaaagtatttaaacacaaggaccttcagcagcagctagtagacgccaaactccagcaggcccaagagatgctgaaagaggccgaggaaagacaccagcgagagaaagactttctgctgaaggaggcagtcgagagccagcgcatgtgcgagttgatgaagcagcaggagactcacctgaaacagcagctggccctatataccgagaagttcgaggaattccaaaataccctgtcaaaatcaagcgaggtcttcactacgttcaagcaggaaatggagaaaatgactaagaagatcaaaaagctggagaaagaaacaacgatgtacaggagccgctgggagtcatccaacaaagctctactcgagatggccgaagaaaaaaccgtgcgtgataaagagttagagggactccaagtgaagatccaaaggctggaaaagctgtgccgggcgctacagacagaacggaatgacttaaacaagcgagttcaagatctcagcgcagggggccagggtagcctcacagatagcggcccagaaaggagacccgaaggcccaggagctcaggctccctcatcaccccgggtaacggaggccccctgttatccaggagcgccttcaacagaggccagcggccagaccgggccacaggagcccacgtcggctcgggcctag

SEQ ID NO: 12450 - RNA, 1641 nt, synthetic construct
  misc_feature 1..1641: note = source = /note="Description of Artificial Sequence: Synthetic coding sequence"
  source 1..1641: mol_type = other RNA
atgaaaaaccaggacaagaagaacggggccgctaagcagagcaacccaaagtcctcacctggccagccagaggcggggcccgaaggcgcccaagagaggccgtcccaagcagctccagccgttgaggctgaaggaccggggtcgtcgcaagcgccaaggaagcctgaaggcgcccaggctagaaccgcccagagcggtgccttacgagatgttagtgaagaactttctaggcagcttgaggatattttgtctacatactgtgtcgataacaatcaaggaggccctggggaagatggagcccagggtgagcccgccgagcccgaggacgctgagaagtccaggacatacgtcgcacgaaatggcgaacccgagccgacacctgtggtcaacggcgaaaaggaaccaagtaagggtgatccgaacactgaagagattaggcaatcagatgaagttggagacagagaccatcgcagaccacaggaaaagaagaaagctaaaggtctcggcaaagaaatcacgctgttaatgcagaccctcaatacgctgtccacgccggaagagaagctggccgctctgtgcaagaagtacgctgaacttctcgaagagcaccgaaatagccagaagcaaatgaaactactgcaaaagaaacaatcgcagttggtccaggaaaaagatcacttacgaggagaacattccaaggctgtgcttgcccgatccaaactcgaatccttatgtcgcgagctgcaacgccataatagaagtcttaaagaggagggcgtccaaagagcgcgtgaggaggaagagaaaaggaaggaagtaacgtcacattttcaggttactcttaacgacatccagctgcagatggagcaacacaatgaaaggaacagcaaactaaggcaggagaatatggagctggctgagagactgaagaagttaattgagcagtacgagctgcgggaagagcacatcgataaagtcttcaagcataaggatctgcagcagcagttggtggatgccaaactgcaacaggcacaagaaatgctcaaggaggctgaggagcgacatcaaagggagaaagattttcttttaaaggaggctgtggagtcgcagaggatgtgcgaacttatgaagcagcaggaaactcacttaaagcaacagctcgcactgtatacagagaagtttgaggagttccagaatacattgagcaagagcagcgaggtctttaccaccttcaagcaggagatggagaagatgacaaaaaagataaagaagcttgaaaaagaaaccaccatgtacaggagcagatgggagagttctaacaaggcactgctggagatggctgaggagaagacggtgcgggataaggagttggaaggtttacaggtgaagatccagagactcgagaaactctgccgggcccttcagactgagaggaacgacctgaataaaagagtgcaagatctgtctgcgggtgggcaggggagcctgaccgattccgggccagaaaggcgtcccgaaggcccaggcgcccaggccccaagctcacctagagtaacagaagccccctgctatcctggcgcaccatcaacagaagcttcaggacagacaggtccgcaggagcctacctctgcaagagcctag

SEQ ID NO: 12451 - RNA, 1392 nt, synthetic construct
  misc_feature 1..1392: note = source = /note="Description of Artificial Sequence: Synthetic coding sequence"
  source 1..1392: mol_type = other RNA
atgcacggctcatgtagcttcttaatgctcctgctgccattgctgctcctgctggtagctactaccggccctgtcggtgccttaaccgatgaggaaaagcgcctcatggtagaactgcacaatctctatcgagcacaggtttcccccacagcaagcgatatgcttcacatgcgatgggatgaagagctggccgcttttgccaaggcctatgcccgtcagtgcgtgtggggtcacaacaaggaacggggaaggaggggggaaaatctgttcgctattactgatgagggaatggacgtgccattggctatggaggaatggcaccatgagcgtgaacactacaatctgtctgccgctacctgcagtcccggacaaatgtgtggccattacacacaagtcgtgtgggcgaaaacggagcggatcggctgcggtagtcatttctgcgaaaagctgcagggtgtagaggaaactaatatcgaactgctagtatgcaactacgagcctccaggcaacgttaagggcaagcgaccctaccaagaaggaactccctgctcccaatgcccttctgggtaccactgcaagaactcattatgcgaacccattgggagtccagaggacgcccaggacctgccctaccttgtgacagaggccccgagttttcgggctactgaggcctctgattcaagaaagatgggtacaccttcatctttagccaccggcattccagcattcctcgtcactgaagtctctggttcactggccaccaaagcgttgccagccgtcgagacccaggctccaacttctcttgcaacgaaggaccctccatccatggctaccgaggccccaccctgcgtcaccaccgaggtgccttcaatccttgctgctcacagtctgcccagcctggacgaggagccagtcacatttcccaagagtacacacgtccctataccaaaaagcgccgacaaggtcacagacaagacaaaagtacctagccgcagtcccgagaattcactggatcctaaaatgagcctgacaggggcacgggagcttctgccacatgctcaggaggaggcagaggccgaggccgaactccccccttcttccgaagtactggcctccgtctttccagcgcaggataaacctggcgaacttcaggccacactagatcacacaggacatacttcatctaaaagcctcccgaatttccccaatactagtgcaactgcgaacgcaactggaggtagggctctggccctgcagagtagtttgcccggtgcagaagggcctgacaaaccatctgtggtgagcggactgaactcaggacccggacacgtgtgggggccccttttaggactgctcttgctgccccccctcgtcctggccgggatattttag

SEQ ID NO: 12452 - RNA, 459 nt, synthetic construct
  misc_feature 1..459: note = source = /note="Description of Artificial Sequence: Synthetic coding sequence"
  source 1..459: mol_type = other RNA
atgatgttgcctcagtggctgctccttttgttcctgctgttttttttcttattcttgttgacacgcggtagtctgtcgcctaccaaatataacttactcgagctcaaggagtcctgcattagaaatcaagactgtgagaccggatgttgtcaacgcgcccctgataattgtgagagtcactgtgctgaaaaaggaagtgaaggctcactgtgccagacccaagtcttttttggccagtatcgcgcatgtccttgtttacggaatctgacatgtatctattctaaaaacgaaaagtggctgtctatcgcatacggccggtgccaaaaaatcggaagacaaaaattagcaaagaagatgttcctggtactgcctccgagttgctgcctgttgttgcttcaccttctgtccagcctcccacgtgccctctgcagcccctgctcacctgagccccccccctag

SEQ ID NO: 12453 - RNA, 366 nt, synthetic construct
  misc_feature 1..366: note = source = /note="Description of Artificial Sequence: Synthetic coding sequence"
  source 1..366: mol_type = other RNA
atgatgctgcctcagtggctactgctgttatttcttttgtttttttttttattcctgttgactcgtggaagtctgtctcccacaaagtataacctgctagaattgaaagagagttgcatacgtaaccaagactgtgaaaccggctgttgtcaacgcgcacccgacaactgcgagagtcactgcgcagaaaaaggaagtgaagggtcactctgccagacacaggttttcttcggccagtatcgtgcgtgcccttgtctgagaaaccttacatgcatttattccaaaaacgagaagtggctttctatcgcctacggaagatgtcagaagattggtcgccagaaacttgccaaaaagatgtttttctag

SEQ ID NO: 12454 - RNA, 1122 nt, synthetic construct
  misc_feature 1..1122: note = source = /note="Description of Artificial Sequence: Synthetic coding sequence"
  source 1..1122: mol_type = other RNA
atgaggcttctcgcgtggctgattttcttggcaaattggggtggcgctagagctgagccgggtaagttttggcatatagccgatttgcatttagaccccgactataaagtcagcaaggatccgttccaggtctgtccctccgccggatcccaacctgtacctgacgcaggtccttggggagattacctctgtgattctccctgggcacttattaactcttcaatttacgcgatgaaggaaattgagcctgagcccgacttcattctctggaccggagatgacaccccgcatgtcccggatgagaaactaggtgaggccgccgtcctcgagatagttgaacgcttgacaaagcttattagggaagtgtttcctgacactaaggtgtacgccgcattgggaaaccatgattttcacccaaaaaaccagttcccagccgggagtaataatatctataaccagatagcagaattatggaagccctggttatccaacgagtccatagctctgttcaagaagggggcattctattgtgagaaattaccggggccaagcggcgctggacgtattgttgtgctaaacactaacctgtattacacctccaatgccttgacagcagacatggcagatccaggtcagcaattccagtggcttgaggatgtccttacggatgccagcaaggcaggtgacatggtctatattgtggggcacgtcccacctggcttttttgaaaagacgcagaacaaggcctggtttcgtgaaggattcaacgagaagtacctgaaagttgtacgcaaacaccatagggtcatagccggtcagtttttcggacatcaccacaccgactcctttagaatgctgtatgacgacgctggtgtgccaatctccgcaatgttcatcacccccggtgtgaccccttggaaaactactctgcctggggtagtgaatggcgccaataatccggccattcgggttttcgagtatgaccgagcgactttgtccctgaaggtacggagcccggcagaggccaggggaggaggctgggagggcctcaaatgcataactacattcccacattctcaactgatacatctccccctgacgacagagccgcaggaaggctag

SEQ ID NO: 12455 - RNA, 810 nt, synthetic construct
  misc_feature 1..810: note = source = /note="Description of Artificial Sequence: Synthetic coding sequence"
  source 1..810: mol_type = other RNA
atgcggctcttggcctggctgatcttcttggcaaactggggtggtgcacgagcggaacctgaagaagcacagggcccttgcgcacaggagaagggtaagggacctccaccaaccagcatcctggcatccttagcaccaggactggaagctggcaagttttggcatattgcagatttgcatttagaccccgactacaaggtatccaaggatccatttcaagtttgccccagtgcaggttcccagccagttcccgacgctggtccctggggtgactacctgtgtgactcgccctgggcattaatcaatagttccatctatgccatgaaagaaattgagcctgaacccgattttatcctttggacaggcgacgacaccccccacgtccccgacgaaaaactgggagaggctgcggtactggagattgtggagcgattaaccaaactgatccgggaagtgttccccgacacaaaggtgtatgccgccctcggcaaccacgacttccaccccaaaaaccagttccctgccggatcaaataacatttacaatcagatcgccgaactgtggaaaccttggctttccaatgagagtatcgccctcttcaaaaagggcgcattctactgtgaaaagctgcccgggccatcaggagcaggaaggattgtggtgctgaataccaatctctactacactagcaatgcactcacggctgatatggccgacccaggacagcagttccaatggcttgaggatgtattaacagacgccagtaaagctggagacatggtttatatagtgggacacgtgcccccttag

SEQ ID NO: 12456 - RNA, 1368 nt, synthetic construct
  misc_feature 1..1368: note = source = /note="Description of Artificial Sequence: Synthetic coding sequence"
  source 1..1368: mol_type = other RNA
atgagactgctggcctggttgatctttttagccaactgggggggtgctcgggctgagcccggcaaattctggcatatcgctgacttacatttggacccagattataaggtttcaaaagaccctttccaggtttgcccttctgcaggtagccaacctgtccctgatgccggcccttggggtgactatctgtgtgattccccttgggccctgattaacagttcaatctatgctatgaaggagatcgaacctgaacctgattttattttatggaccggcgatgataccccccatgttcctgacgaaaagctgggcgaagccgctgtgcttgaaattgtggagagactaacaaagcttatcagagaggtgtttccggacactaaagtgtacgccgcactggggaatcacgattttcacccaaaaaaccagttccccgccggatccaacaacatatataatcagattgccgagttgtggaaaccatggctgtcgaacgagtctatagccctcttcaaaaagggagcattctattgtgagaaactgcctggcccatcaggtgcaggacggatcgtcgtattaaacacaaacctgtattacaccagcaacgctctgaccgcggacatggctgacccaggacagcagttccagtggctggaagacgtcctgactgatgcttctaaggccggcgatatggtgtacatcgttgggcatgtcccaccaggcttcttcgaaaagacccagaacaaggcatggtttagagaaggtttcaacgaaaaatacctgaaagtggtgaggaagcatcatcgcgtgattgctggccagttcttcggacatcatcataccgattcatttcgcatgttgtatgatgacgcaggtgtccccatttccgccatgtttattacccctggtgttaccccatggaaaacgactctgcccggcgttgtaaacggcgctaacaatcctgccattagagtgtttgaatacgaccgggccaccctgagcctgaaagacatggtcacttattttatgaatctgtctcaggcaaacgcacagggaacaccccgctgggaactagaatatcagttaactgaagcctacggggtgcccgacgcctccgctcacagcatgcatactgtgctcgaccgcattgccggggatcagagtacccttcagagatattacgtctataacagcgttagctattctgctggagtctgcgacgaggcctgctctatgcagcatgtttgtgctatgcgacaagtcgacattgatgcatacactacatgcctgtacgcatcaggcactacaccagttccccagttacccctgctgctgatggcactgttgggactatgcacactggtcctgtag

SEQ ID NO: 12457 - RNA, 867 nt, synthetic construct
  misc_feature 1..867: note = source = /note="Description of Artificial Sequence: Synthetic coding sequence"
  source 1..867: mol_type = other RNA
atggccttagcacctccgcctagaggcctctggcaggccaaagacatttctcccatcgtgaaggccgctcgtcgagatggagagcttttgctgtctgcccaactcgattccgaagaaagggacccaggtgtcccaagaccttccccctacgcaccctacattttggtttatgcaaacgacctggccatttccgaaccaaatagcgtagcagtgacattacaaaggtacgaccccttccctgcaggcgatcctgaaccacgtgcagcaccaaacaactccgccgaccctagggttagacgcgccgcacaggccactggacctctgcaagacaacgagctgcccgggctcgacgaacgtccacctcgtgcccacgctcagcacttccataaacaccaactgtggccatctcctttccgggctcttaaaccacgtcccggccgtaaggataggcgcaagaagggacaggaggtattcatggccgcctcacaggtccttgacttcgatgagaagacgatgcaaaaggcccgccgcaagcagtgggacgagccccgcgtgtgtagtcgccgatacctcaaagtcgactttgccgatattggctggaacgagtggataatctcacccaagtctttcgatgcctattactgtgcaggagcctgtgaattccctatgcccaaaattgtacgaccttccaaccatgcaacgattcagtccattgtgcgggcggtggggataatccctggaatccccgaaccctgttgtgtgcccgataaaatgaacagcctgggagtgttgttcctggacgagaaccgcaatgttgtgttgaaggtgtacccgaacatgtctgtcgacacctgcgcatgtcgctag

SEQ ID NO: 12458 - RNA, 1626 nt, synthetic construct
  misc_feature 1..1626: note = source = /note="Description of Artificial Sequence: Synthetic coding sequence"
  source 1..1626: mol_type = other RNA
atgccgtttcggctgctgattcctctgggcttgctatgcgctttattacctcagcaccatggggctcctggccctgacggctctgcgcctgaccctgcccactattctttttccctgacccttattgacgcccttgacaccctgctgatacttggaaatgtgtctgaattccaacgcgtggtagaggttctccaggattccgtagactttgatatcgatgtaaacgcttcagtcttcgaaactaatattcgggtcgtcgggggcctgcttagtgcgcacctcctgtccaaaaaggccggggtagaagtggaggcaggttggccctgttcaggacctctgctccgcatggccgaagaggcagcacgcaaattactaccagcattccaaaccccaacaggcatgccctacggaactgtgaatctgctgcacggcgtgaatcctggggagaccccagtcacttgtactgccggtataggcaccttcattgtggagttcgccacacttagcagcctgaccggggatcctgtcttcgaggacgtagcaagagtggccctgatgagactatgggaatctcggtcagacattggcctggttggtaaccatatcgatgtgcttacaggcaaatgggtagctcaggacgccggcatcggcgcgggcgtggatagctattttgagtaccttgtgaaaggagcaattctgctacaggacaaaaaattaatggctatgttcctggagtacaacaaggccatccgaaactacacaagattcgatgattggtatctttgggttcagatgtacaaaggaacggtcagcatgccggtttttcaatccctcgaggcctactggccaggcttgcagagtctaattggagatattgataatgccatgagaacatttcttaactactacaccgtttggaaacagtttggggggcttccagagttctataatattccacaaggatacacagtcgagaaacgggaaggttatccattacgacctgaactgattgagtccgccatgtacttgtaccgggcaactggggatcccaccctgttagagctgggcagggacgcagttgagtctattgaaaagatttctaaagtggaatgtggctttgcaactatcaaggacctcagggaccacaagctcgacaacaggatggagagctttttcctggcagagaccgtgaaatatctgtacctgctgttcgatcctactaattttatccacaataatggaagcactttcgatgccgtgataacaccttacggcgagtgtatcctcggcgccggaggttacatcttcaacactgaagcccacccgatagaccctgccgcgctgcactgttgccagcgtctgaaggaggaacagtgggaggtcgaggatcttatgcgggaattttacagcctgaaaaggtcacgatcaaaattccagaaaaacactgtcagcagtggaccctgggaaccgcctgcacggcctgggaccttgttcagtccagaaaaccacgaccaggctagggaacgaaaacctgccaaacaaaaggtacctcttctgtcttgcccttcacagcctttcacgtctaaactggcactattggggcaggtcttcttggattcaagttag

SEQ ID NO: 12459 - RNA, 1737 nt, synthetic construct
  misc_feature 1..1737: note = source = /note="Description of Artificial Sequence: Synthetic coding sequence"
  source 1..1737: mol_type = other RNA
atgcccttcaggctcctgatccccctaggcttgctttgcgcactcctccctcagcatcatggggctcccggcccagatggttccgcccccgaccccgctcattaccgggagcgagttaaagcaatgttttatcatgcctacgattcatacctcgaaaatgccttcccctttgacgagcttcggcctctaacctgcgatgggcacgacacttggggcagcttttcacttaccttgatcgatgcactcgataccctgctgatccttggaaatgtgtctgagtttcagcgcgtggtggaagtgctgcaggacagcgtcgatttcgatatcgatgtgaacgcttctgtcttcgagacaaatattcgagtggtgggggggctgctgagcgcacatttgctgtctaaaaaagccggcgtcgaagtggaggctggttggccctgctccggccctttactgagaatggccgaggaagccgctagaaaactcctgccggcctttcaaaccccgaccggcatgccctatggaacagtcaatcttctgcatggcgttaatccaggagaaacccccgtgacctgcacagccgggattgggaccttcatcgtggagttcgcaaccctctcctccttgacaggcgatcccgttttcgaggacgtcgccagagtcgcgctgatgcgcttgtgggagtctaggtcagacatcgggctggtaggcaaccacattgatgtgctaaccggtaagtgggtggcgcaggatgccggcataggagcgggtgttgactcttactttgagtatctggtcaagggtgctattctgctgcaggataaaaaattaatggccatgttcctagagtacaacaaggccattagaaactataccaggtttgacgattggtatctgtgggttcagatgtataaaggcacagtgtctatgccagtatttcagtccctcgaagcatattggccgggcctgcagtccctcattggtgacatcgataacgccatgcgcacattcctaaattattacaccgtatggaagcagttcggcgggctgcccgagttctataacatacctcagggttacaccgtggaaaagcgcgagggataccctttgagacctgaactgattgaaagcgcaatgtatctgtatcgggccactggcgaccctaccctcctcgagttaggacgagatgcagtggagagcatcgagaaaatctcaaaagtggaatgcggtttcgcaacgataaaggacctccgggatcacaagctggacaatcgcatggagtcgttctttttagctgaaacagtgaagtacttatatctacttttcgatccgaccaactttatacataataacggttccaccttcgatgccgtgattaccccttatggtgagtgtatcctgggcgccggcgggtacatctttaacaccgaggcccacccaatagatcccgctgccctgcactgctgccagaggctgaaagaggaacagtgggaggtcgaggacctcatgcgcgaattctactctttgaagcgcagtcgctcaaaatttcagaaaaatactgtgtcatctggcccgtgggagccgccagcaaggcccggcaccctgttttccccagaaaatcacgatcaggcccgcgaaagaaaacctgccaaacagaaagtccctttactgagctgcccatcacaacccttcacatccaagcttgccctgttgggccaggtgtttctcgattctagctag

SEQ ID NO: 12460 - RNA, 495 nt, synthetic construct
  misc_feature 1..495: note = source = /note="Description of Artificial Sequence: Synthetic coding sequence"
  source 1..495: mol_type = other RNA
atgcgttcctgttatgtagcccaagccggcttgaaactgcctgggagtagtgatcccccagccagcgctagccagtcaacccgcattacagctagtggatacggccctccatcgtccagaccatccagtagagtggtgaacggcgaagatgccgtgccttactcatggccatggcaagtatcactgcaatatgagaaaagcgggtctttctaccacacgtgtggtggttccctgattgcacctgattgggtggttactgcaggccactgtatctcgagttcaagaacctatcaggttgttttaggcgagtacgatcgcgcagttaaagaaggcccggagcaagtgatcccaattaattcaggggacctctttgtccaccccctctggaaccgctcatgtgtggcttgcggcaatgacatcgccttaatcaagctcagccggtcagcccagctaggagacgccgtccaattggcttccctgcctcccgcgggctag

SEQ ID NO: 12461 - RNA, 3663 nt, synthetic construct
  misc_feature 1..3663: note = source = /note="Description of Artificial Sequence: Synthetic coding sequence"
  source 1..3663: mol_type = other RNA
atgcctggcttattaaattggatcacaggagccgccttgcctttaaccgcgtctgatgtgacatcttgtgtgagcggctacgcccttggccttactgcctcccttacttacggaaatctggaggctcagccattccagggactttttgtgtaccccttagacgagtgcaccacagtgatcggatttgaggccgtgatcgcggatcgcgtggtgactgtgcagattaaagacaaggcaaaactggagtccggacattttgacgcctctcatgttagatctccgaccgtgaccggtaacattcttcaggacggcgtttcaattgcaccccattcatgcactcccggcaaggtgaccctagatgaggatctggagaggattctatttgtagccaacctcggaaccatcgctcccatggagaacgtgactatttttatctctacatcttctgagttgcctaccctaccatccggcgccgtgcgcgtccttctgcctgccgtgtgcgcgcctaccgtaccccagttttgcaccaaatcgacaggcaccagtaatcagcaagcccaggggaaggacagacactgctttggcgcctgggcacctggaagctggaacaagctatgtctggccacactgctgaacacagaggttagtaaccccatggaatatgagttcaacttccagctcgagatccgtggaccctgcttactggcaggggtcgagtctcctacccacgagatccgcgctgatgccgccccaagtgcgagaagtgccaagtcaatcattatcaccttggctaacaagcacacttttgacaggcctgtggagatcctcatccatccatccgagcctcacatgccgcacgtacttatcgagaaaggcgatatgaccctcggcgaatttgaccaacaccttaagggaaggaccgatttcattaaaggaatgaaaaaaaagtcaagagcagaacgaaagacagaaattatcagaaagagactgcataaggacattcctcatcatagcgtgataatgttgaacttctgccctgacctgcaaagcgtacagccttgcctacgaaaggctcatggggagtttatctttctgatagataggtcctcgtctatgagtgggatatctatgcatcgcgtgaaagacgccatgctcgtagctttaaagtcgttaatgcccgcctgtcttttcaacatcattgggttcggttcgacattcaagagtctttttccctcaagccagacatactcagaggattcactggctatggcttgtgacgacattcaacgcatgaaagccgatatggggggaacaaacatcttatctcccctcaaatgggtgattagacagcccgtccacagagggcatccacggctactgtttgtaattactgacggcgcagtgaataatactggaaaggtcctagagttagtcaggaaccacgcattctcaactaggtgttacagcttcggcattggccccaatgtatgccatagactggtgaaaggactcgcaagtgttagcgaggggtcggcggagttactgatggaaggtgagcgcctgcagccaaaaatggtgaagagtctgaagaaggctatggcccccgtcctgtctgatgttacggtggaatggatcttcccggaaaccaccgaagtgttagtgtcccctgttagcgctagctcgctgttcccgggagaacggctagttggatacggaattgtctgcgacgccagcctacatatcagcaatcccaggagcgataagcggcgacgatattctatgctccactcccaagagtctgggagttccgtgttctaccattcgcaggacgatggacccggcctggagggcggcgactgcgctaaaaatagcggagcgcccttcatcctcggtcaggccaagaatgctcgattagcatccggcgacagtaccactaagcacgacctgaacctgtcacagcgacgacgggcttatagtacaaaccagattacgaatcacaagcccctcccccgtgccacaatggcaagtgatcccatgccagcagcaaagaggtatcccctccggaaggccaggctacaggatttgaccaaccaaacttcccttgatgtgcagagatggcagatcgacctgcagccccttctgaattccggtcaagatctcaaccagggacccaagctccggggtcccggtgcacgccgtccatcactgctcccacagggctgccagccgttcctgccttggggtcaggaaacgcaggcctggagtcctgttagggaacggaccagtgatagtcgcagtcccggcgacctcgagccctcccaccatcctagcgcgttcgaaactgaaacctctagcgactgggatcctccggccgagtcacaggaacgagcaagcccgagccggcctgcaacaccggccccagtcctcgggaaagcactggtaaaagggctccacgatagccaaaggctgcagtgggaggtatcctttgagctgggaacccccgggccagagcgcggcggtgcacaagatgctgacctgtggtctgaaacatttcaccatctggccgcccgagctataatacgcgactttgagcagctcgccgagcgggaaggcgaaattgagcagggatccaatcgccggtaccaggtcagcgctttacatacatccaaagcctgtaatataatctcaaaatataccgcttttgttcccgttgatgtgagcaaaagcagatacctgccaactgttgtggagtatccaaactcagcggcgttacgaatgctcggatcgagggctttggcccaacagtggagaggaacctccagcggcttcggccgaccacagactatgctgggagaagactcggccccaggcaatggtaaattccaggctttgaacatggaggcgtcccctaccgcacttttttcagaggcccgaagcccaggtagagaaaaacacggcgcatctgaggggccccaaagatcactggccacaaatacgctgagttccatgaaggcatccgagaacttgtttgggagctggctgaatctcaacaaaagcaggctgttaacaagagcagcaaaaggcttcctgtctaagccactgataaaggctgtcgaatctacgagcggcaaccagtcatttgactatatacctttggtgtcactccagctggcaagcggggcgttcctcctgaacgaggccttttgtgaagctacccatatcccaatggagaagctaaaatggacttcccctttcacatgccaccgtgtatccctaaccacaagaccgtcagagtccaaaaccccttctcctcagctttgcacctcctcacctccacgccacccatcttgcgactcattctcccttgagcctctcgccaagggcaagctgggacttgaaccacgagctgtagtagagcacactggaaaactgtgggccaccgttgtgggcctcgcctggttggagcactcatcagctagctactttactgagtgggaactggtggccgcgaaggctaattcatggttggaacaacaggaggtccccgaaggacgaactcagggcacactcaaggcagcggcaagacagctgttcgtcctgctccggcattgggacgagaatttagagtttaacatgctgtgttataatcctaattatgtgtag

SEQ ID NO: 12462 - RNA, 3051 nt, synthetic construct
  misc_feature 1..3051: note = source = /note="Description of Artificial Sequence: Synthetic coding sequence"
  source 1..3051: mol_type = other RNA
atgcccgggctcctgaattggattactggagcggccctgccactgacggcttccgacgttaccagctgcgtttcaggatacgccctcggtctaactgcttcactgacttatggtaatctggaggcccaaccattccagggactgtttgtttaccctctcgacgagtgcacaaccgtcattggatttgaggcagtgattgctgatcgcgtggtcactgttcagataaaggacaaggccaaactggagtctggacactttgatgccagccatgtacgatctccaaccgtcactggtaacattctacaggatggagtatccatcgctccacattcatgcaccccaggcaaagtgaccttggacgaagacctcgagcgcattttgtttgtagccaatctggggactatcgcacctatggagaacgtaacaatctttattagcaccagctccgaattgcctactctgccatcgggggccgtccgcgtcctgctgcccgccgtctgtgcccccactgtcccacaattctgtacaaaaagcaccgggacctccaatcagcaggctcaagggaaagatcgtcattgtttcggcgcgtgggcccccggctcatggaataagctgtgcttagcaacccttttaaacaccgaagtaagtaatccaatggaatatgagtttaactttcagcttgagattcggggaccttgtctcctggccggggtcgaaagtcccacccacgaaatccgggccgatgccgcaccttccgccagaagtgccaagtccatcattattaccctcgcaaacaaacatacatttgaccgccccgtcgaaatacttatccatcccagtgagcctcatatgcctcacgttcttatcgagaagggggacatgactctcggcgagttcgaccagcacctgaaaggcagaacggacttcatcaagggaatgaaaaagaaaagtagagccgagcgcaagacggagatcatacgaaagcgtctccataaggacataccacatcacagtgtcattatgcttaatttctgtcccgacctccagtccgtgcaaccgtgccttcggaaagcccacggcgaattcattttcctgatagatcgctcttcttccatgagcggtattagcatgcatcgcgttaaagatgcaatgctggtagccctgaaatcacttatgccagcctgtttattcaatatcattggctttggtagtacctttaaatctctgttccccagctcccaaacctacagcgaggactctcttgcaatggcctgcgacgacatccagcgtatgaaggcagacatgggcggcacaaacatcctaagccctctgaagtgggtgattagacagccggtgcatcggggtcacccacggctcctgtttgtcataactgacggcgccgtcaacaatacggggaaagtgcttgagctggtacggaatcacgccttttctacgcggtgctatagttttggaatcgggccaaacgtttgccacagattggtgaagggtctcgcctctgtatctgaagggagcgcagagcttttgatggaaggagaaagacttcaacctaagatggttaaaagtttaaagaaagccatggccccagtcctctccgatgtgacggtagagtggatcttccccgagaccacggaggtcctggtcagtcctgtatccgcctcttccttgtttcctggggaacgcttagtaggttacggaatcgtgtgcgatgcatccctgcacatctctaatccgagaagcgataaaaggcgtcggtacagtatgctgcatagccaagaatctggtagctctgtgttttaccatagccaagacgatggacctgggctggagggcggcgactgcgcgaagaattcaggggcgcccttcattctcggccaggctaaaaatgcccgcctggcctcaggcgattctaccacaaagcatgacctgaatctttcacagcgacggagggcgtacagcacaaaccagatcaccaaccataagcctttgccccgcgcaacaatggcatccgaccccatgcccgctgcaaaacgttatcccttgagaaaagcccgactgcaggaccttacaaaccagacttccctagatgtccagcgatggcaaatcgacttacagccactcctgaactccggacaagatctgaatcagggtccgaaactaagaggaccgggagcccggcgcccatcgctgctgcctcagggctgtcagcccttcttgccttggggacaggaaacacaagcctggtcaccagttcgggaaaggacttccgatagccgcagtccgggcgatctggagcctagccaccatccctctgcctttgaaacagaaacgtcaagcgattgggatcctcctgcagaaagtcaagaacgcgcaagccctagccgccctgctactcctgctcctgtgctcggcaaagcactcgtaaagggactgcatgatagtcagaggctccagtgggaggtttcatttgaactcggcaccccaggaccagagcggggtggagcgcaagatgccgatctgtggtccgaaaccttccaccacctggccgcgcgtgcgatcatacgcgattttgagcagcttgcagaacgagaaggggagatcgagcagggaagtaacagaagatatcaggtgagcgccctgcacacatccaaggcctgcaatatcatatccaagtacacagcttttgtaccagtggacgtctcaaagtctcggtatctccccacagtggtcgagtatccgaattctgctgcattaagaatgctgggtagccgggcactggcccagcagtggagaggaacatccagtgggttcgggcggccccagaccatgctgggcgaagatagcgccccaggaaacggccctaggaaatgttcgcagaccctcatgggatttaagactaaaaccgaaaccgagcattcggttcgtggatggaagcccagaggcgcattgcagaaccaatctgtgctgtcaaccagttggagtcattggccccccaaacctcggaggacgagctcaactccagagcctagctag

SEQ ID NO: 12463 - RNA, 3663 nt, synthetic construct
  misc_feature 1..3663: note = source = /note="Description of Artificial Sequence: Synthetic coding sequence"
  source 1..3663: mol_type = other RNA
atgccaggtctgctgaattggattactggagccgcactccccttgactgcatccgatgtgacctcttgtgtgtctggttatgccctggggttaaccgcaagccttacatatgggaatcttgaggcacagccattccagggcctgttcgtctatcctctggatgagtgtactacagtcattgggttcgaagctgtgattgccgaccgcgtggttacggtccagatcaaagataaagccaaacttgaatcaggccattttgatgcgtcgcacgtaaggtccccgactgttactgggaacattctgcaggatggcgtgagcattgctccgcattcttgtactcctggcaaagtcaccctagacgaggatctggagagaatcctttttgtcgccaacctggggacgatcgctccaatggaaaatgttacgatatttatctctaccagctccgagcttccaacactgccaagcggagcagtcagggtacttctccctgcagtgtgcgcccctacagtgccccaattctgtactaagagcacgggcacatccaatcagcaggcgcagggaaaggaccgacattgcttcggcgcatgggcccccggcagttggaacaagctctgtctggccacgctccttaacaccgaggtgtctaatcctatggaatacgagttcaacttccaacttgaaattcgcgggccgtgcctgctagctggcgttgaaagtcccacacatgagatcagggccgatgccgccccttccgcgcgatcagcaaagagcataatcatcacccttgcgaacaaacacactttcgataggccagtcgagatcctcatccatcccagcgagccccatatgccgcatgtgctcatagagaagggagacatgaccctgggggagttcgaccagcacctgaagggaagaaccgacttcataaagggcatgaaaaagaagagcagggcagagaggaaaacagagataattcgtaaacgtctgcataaggacattccgcatcactccgtgatcatgcttaatttttgcccagacctgcagagcgtgcagccctgcctgaggaaggctcacggggaattcatttttctgatcgacagaagttcgtccatgagtggaattagcatgcaccgagttaaggacgccatgttggtggcactgaaatctcttatgccagcttgtctttttaacatcattggattcgggtccacttttaagtccctgttcccaagctcccaaacgtacagcgaagattcactggctatggcatgtgatgatattcagcgaatgaaagctgatatgggtggcacaaacatactcagtccgctcaaatgggtcatcagacagccagtccacagaggccatccaagacttctttttgttatcaccgacggcgccgtcaataacacaggcaaagtgctggaactggtgcggaatcacgccttcagcacgaggtgctactcgtttggcatcggacccaatgtgtgtcaccgcctggtgaagggactcgccagtgtctccgagggaagcgccgagttgctcatggagggtgaacgcctgcagccaaaaatggtgaaatctctaaaaaaagctatggccccagtactgagcgacgtaacagtggagtggatctttccagaaacaaccgaggtgcttgtgtcccccgtgtccgccagttccctttttcccggcgagaggttggtgggctatggaatagtttgcgacgcgtcactacatatcagtaacccgcgctctgacaagaggagacgttattccatgctgcactcccaggagagtggaagtagcgtgttttatcactctcaggacgatggccccggactcgagggcggagattgcgcaaaaaacagtggtgctcctttcattttagggcaagcaaaaaacgcgaggcttgcctcaggtgactctactaccaaacacgatctgaatttgtctcagcgtaggagggcatactctaccaatcagatcactaatcataagccactgcccagagctactatggccagcgatccaatgcctgcagccaagcgttatccccttaggaaggctagacttcaggacctgactaaccagaccagcctcgatgtgcagaggtggcagatcgacctgcaacccttgctgaattccggccaggaccttaatcagggtccaaaactcaggggcccaggcgcaagacggcctagcttactcccccaagggtgccagccattcctaccctggggccaggagactcaagcctggtcacccgtccgagagaggacgagcgatagtagaagccctggcgacctcgaaccttcccatcacccttctgctttcgaaacagagacatccagcgattgggacccaccagccgaatcacaggaaagggcaagcccttctcgccccgctacaccagcccctgtgctgggcaaggcccttgtcaaaggcttacacgacagccagaggcttcaatgggaggtgagttttgagttaggaaccccaggccccgagcgagggggcgcccaagacgcagacttgtggagcgagacctttcatcacttggcagccagggccattatcagggattttgaacaacttgcggagagagaaggagagatcgagcagggatctaacagaagataccaagtgagtgctcttcatacatccaaagcatgcaatatcatctcaaagtacacagctttcgtcccggtggacgtttccaaatcacgatacctcccgacagtagtcgaataccctaattctgcagctttgagaatgctggggtcccgagcactcgctcaacagtggagaggcacttccagcggtttcgggaggccgcaaactatgctgggagaggactctgcacctggtaacggaaagttccaggctctaaatatggaggcctccccgaccgccctcttctcagaggcgcgatccccaggcagagagaaacatggtgcttcagaggggccacagcggagcctagctacaaacaccctgtcctccatgaaagccagcgaaaatctgttcggtagttggttgaacctcaataagagtcgcttactgacccgggccgccaaaggcttcctttcaaagcctttgataaaggccgtcgaatccacctctggaaaccagagttttgattacatccccctggtgtcgttgcagttagctagtggcgctttcctactgaatgaggcattctgtgaggctactcatatccccatggagaagctgaagtggacatctccattcacctgccacagagtgtcgctcacaactcgtccctctgaaagtaagacgccctccccccaactttgtacatcgtcaccccccaggcatccttcatgcgactctttcagcttggaacccctcgctaaaggcaagctcgggctggaaccccgcgcggtggtcgagcatacaggcaaactatgggccaccgtcgtaggcctcgcctggctggaacattcttccgctagctacttcacagagtgggaactcgtggcggcaaaggcaaactcgtggctcgagcagcaagaggtgcccgaaggaagaactcagggcaccctgaaagcagccgccaggcagctcttcgttttactccggcactgggatgagaatcttgagtttaacatgttatgctacaatccaaactatgtttag

SEQ ID NO: 12464 - RNA, 5235 nt, synthetic construct
  misc_feature 1..5235: note = source = /note="Description of Artificial Sequence: Synthetic coding sequence"
  source 1..5235: mol_type = other RNA
atgcggctgctgtggggcctgatctgggctagtagcttctttacactgagtttgcagaaaccccgattgttgcttttctctccctctgtagtgcatctcggcgtgcccctcagcgtaggagtgcagctacaggacgtgcctagaggccaggttgtgaaggggagcgtgttcttacgaaacccatctaggaataacgtcccttgctctcccaaggttgacttcaccctcagctcagaacgagatttcgccttgctttccctacaggtcccgcttaaggatgcaaaatcttgtggcttgcaccaactgcttcgaggacctgaggtgcagctggtcgcacactcaccgtggctgaaagattcgctatcccgcacaacgaacattcagggaattaatttgcttttctcaagccgtcgcggccacctgtttctacaaacggaccaaccaatctacaatccagggcagagggtgcgatatagagtcttcgccctggatcagaagatgcgcccgtcgaccgatacaattacggttatggtggaaaactcgcacggattaagggtgcgtaaaaaagaggtctacatgcccagttccatcttccaggatgacttcgtcatcccagacatctctgagcctggaacctggaaaatttccgccagattctccgatggacttgaatctaattcaagtacacagtttgaagtgaagaaatatgttctccctaacttcgaggtaaaaatcaccccaggcaagccgtatatcctgactgtgccaggtcacctggatgagatgcaacttgatatccaggcaagatacatctacggcaagcccgtgcagggggtcgcctacgtgcgattcgggctcctggacgaggatgggaagaagactttctttcgagggctagaaagccagactaagttagtcaacggacagtcacacattagcctttcaaaggcagagtttcaggatgcgcttgagaaattgaatatgggcataacagacctgcaagggcttcggctatatgtcgctgccgccatcattgaataccctggaggggagatggaagaagcagagctcacctcatggtatttcgtgtcatcaccctttagcctcgatttgagcaagaccaaaagacacctggtgccaggtgcccccttcctgcttcaagccttagtgcgcgaaatgtcaggcagtccagcctcggggatccccgtcaaagtctctgctactgtgtcctcaccaggttctgttccagaggtgcaggacattcagcagaacactgatgggagcggtcaggtgtccatcccaataattatccctcagacaatatccgaactgcagctttccgtctccgctgggtccccacaccccgcaatcgcacgtttaactgtggcggcacctccgagcggagggccgggatttctctctatcgaacgccctgacagccgccctccaagggtgggcgatacactgaacctcaatctgcgggctgttggaagtggcgcaactttttcacattactactacatgattttaagcagggggcagatcgtgttcatgaatagagagcctaaaaggacacttacaagcgtttctgtgtttgtggaccaccatttagcacctagcttctatttcgtggccttctactaccatggtgatcatcccgtggccaatagtttgcgcgtggacgtgcaagccggagcttgtgaaggaaagttagagctgtccgtggacggggctaaacaataccgtaatggggagagcgtcaaattgcacctggagactgacagcctcgccctggtagccctcggtgcccttgataccgccctgtatgctgcagggtcaaagagtcacaaacccttgaatatggggaaggtcttcgaggccatgaattcctacgacctaggctgcggtcccggtggaggggattccgctttgcaggtctttcaggcagctgggcttgcttttagtgacggcgaccaatggacgttatctagaaagcggttgtcctgtcccaaagaaaagacaacaaggaagaagagaaatgtgaacttccagaaggctattaacgagaaactggggcagtatgcttctccaacagccaaacgatgttgtcaagacggagttaccaggttgcctatgatgagatcctgcgagcagagagcagcaagagtgcagcagcccgattgcagagagccttttctgtcctgttgccagtttgctgagagtctacgtaagaagtccagagacaagggacaggctgggttacaacgagctctcgagattttgcaggaagaggacctcattgatgaggacgatataccggttcgatctttctttcctgagaactggctgtggcgtgtggaaacagtggatagatttcagatcctgacactgtggctgcccgatagcctgactacttgggagatccacgggctgtccctgagcaaaaccaaggggctctgcgtagcgacgcctgtgcagcttagggtgtttcgagaattccacctccatctccggctccctatgtccgtcagaaggtttgaacaactggaactaagaccagtgctgtacaactatctagacaaaaatctgactgtttccgtccatgtcagtcccgtggagggcctgtgcctagcaggaggcgggggtttggcccagcaggtcttggtgcctgccggctccgcgcgcccggtggctttctctgtcgtacctacggcagccgcagctgtttcactaaaagtggtagcccggggctcattcgagtttcccgtgggcgatgctgtaagtaaagtactccagattgagaaggaaggcgctattcacagggaggagcttgtatacgaattgaatcctttagaccaccgtggccgcacactcgagattcccgggaacagcgaccccaacatgattccggacggagatttcaatagctacgtgcgggttacagcctctgaccctctggacacattgggctccgagggcgccctgagcccagggggagtcgccagtcttttgcgtctgcccagaggatgtggtgaacagaccatgatttacctggccccaaccctggccgcttctcggtatctcgacaagactgaacagtggtcaaccctaccccccgagacaaaggatcacgccgtcgacttaatccagaaggggtacatgcggatccagcagttccgcaaagccgatggatcctacgctgcctggttgtctcgaggcagctctacatggttgaccgcttttgttcttaaggtcttgtccctcgcacaggaacaagtgggcgggagcccagaaaagttgcaagagacctctaactggttgctgagccagcagcaggctgacggatcctttcaggacctgagtcccgtgatccaccgcagcatgcaggggggactggtgggtaacgacgaaactgtggcattaacagcatttgtgaccatagcactgcatcatggcctggccgtgtttcaggatgaaggagctgagcctttgaagcaaagagtggaggcatctatctcgaaagcgtcctcctttttgggtgaaaaggcaagtgccggcttattgggtgcgcatgccgccgcaataactgcttatgcattgactcttacaaaggctcctgccgatttgaggggcgtcgctcataataatctgatggcgatggcccaagagacaggcgataatctgtattggggatcagtgacgggctcacagagtaatgccgtctcccccacacccgctcccagaaatccctcagatccaatgcctcaggcccccgctctctggatcgagaccaccgcttacgccctcctacatctgctcttgcatgagggaaaagcggagatggcggaccaggccgccgcctggctcactcgtcaaggaagctttcagggcggctttcggagtacacaagataccgtcatagctttagatgccctgtctgcctattggatcgcatcacacacaactgaagaacggggcttaaatgtaaccctgtctagcactggccgcaatggctttaaatcccacgccctgcaactgaacaacagacagatacggggcctagaagaggagctacaattcagcctcggctccaaaatcaatgtcaaagtcggggggaactccaaggggactctgaaagtactacgaacttacaacgtacttgacatgaaaaacaccacctgccaggatctgcagatcgaagttacagtcaagggtcacgtggaatacacaatggaagctaatgaggactacgaagattatgaatatgacgaactgcctgcaaaagacgatccggacgcccctctgcagcctgtgacacccctgcagctgtttgagggccggagaaaccgcaggcgccgggaggcaccgaaagttgtcgaggaacaggagagcagggtccattacacagtctgtatctggcgaaatggcaaggtggggctgtccgggatggccatagccgatgtgacactcctctcaggttttcacgccctccgggctgacttggaaaagttaactagtctgagcgatcgctacgtctcccattttgagactgagggcccccacgtcctgctctatttcgattctgtgcccacctctagggagtgtgtgggtttcgaggccgtgcaagaagtgcccgttgggctggtgcagccagctagcgccaccctttacgactactataatcccgaacgaaggtgcagcgtgttctacggggctccttctaaaagccgactcttggctaccctgtgctcagctgaagtttgccaatgtgcagaaggaaagtgcccacgccaacggcgagcccttgaaagaggattacaggatgaggacggttaccgaatgaagttcgcctgctactaccctcgagtcgagtatgggtttcaagtgaaggttttacgcgaggactcgcgcgctgctttcagattgtttgagactaagattacccaagttctgcacttcaccaaggacgtcaaggcggctgccaaccaaatgcgtaacttcctcgtgcgagccagctgccgcctccgcctcgaacccggtaaggaatatctgatcatgggacttgacggcgctacctatgatctggaaggccatcctcagtacctcctggattctaattcttggattgaagaaatgcccagcgaaagactatgccgatctacccgacaaagggccgcatgtgcacaactcaatgatttcctgcaggaatacggtacacaggggtgccaggtgtag

SEQ ID NO: 12465 - RNA, 1242 nt, synthetic construct
  misc_feature 1..1242: note = source = /note="Description of Artificial Sequence: Synthetic coding sequence"
  source 1..1242: mol_type = other RNA
atgaagggtgcactgggtagcccagttgcggcggcaggggcagcgatgcaggagtctttcggatgtgtggtagctaatcgtttccaccagctactggacgacgagagcgacccttttgacatcctccgtgaggcagaacgcagaaggcagcaacaacttcagagaaaacgacgggacgaagcagccgctgctgcaggagcaggtcccagaggtgggcgaagccccgccggagcctctggtcaccgggcgggggcagggggcaggagagagagtcagaaagaacgtaagtcgcttcctgcgccagttgctcaacggcccgactctcccggtggagggctacaggcaccgggacagaagagaactccccgcagaggagaacagcaggggtggaatgactcacggggccctgaagggatgttggagagggccgaacgcagatcctatagagaataccgcccctatgagactgaaaggcaggccgatttcacagcagaaaaattccccgacgaaaaacccggagacaggtttgatcgagacagaccactcagagggcgaggcgggccaagaggcggtatgagagggcggggccgaggtggcccaggcaacagagtctttgacgcttttgaccagcgggggaaaagagaattcgaaaggtacggcggtaatgataaaatagcggtgcggactgaggataatatgggtggatgcggagtgcggacttggggctcgggtaaggatacctctgatgtggaaccaaccgctcccatggaggagccgactgtggtggaggaatcacaagggacacccgaagaagagagccccgcgaaagttccagaactcgaagtcgaagaagaaacacaggtgcaagagatgactctggacgagtggaaaaacctccaagaacagactagaccgaaacccgagtttaatatcaggaagcctgagtctacagtaccatctaaagccgttgtgatccataaatcgaaatatcgcgacgacatggtgaaggacgattacgaggacgattcacatgtatttcggaaacctgctaatgatatcactagccaattggagatcaatttcggtaatttgcccaggccaggcaggggcgcaagaggtggcaccagaggaggccggggaagaatacgtcgagccgaaaattatggacctagagccgaagtcgtgatgcaggacgtggcgccaaacccggacgacccagaagatttcccagcgctgtcctag

SEQ ID NO: 12466 - RNA, 927 nt, synthetic construct
  misc_feature 1..927: note = source = /note="Description of Artificial Sequence: Synthetic coding sequence"
  source 1..927: mol_type = other RNA
atgaaaggcgctcttggctctcccgtggcggccgcaggtgccgctatgcaagaatcatttggatgtgtcgtggcaaatagattccatcaactactggacgatgaaagtgatccttttgatatcttgcgtgaagccgagcgccgtcgccagcagcaactccaacgaaagaggcgcgatgaagccgcggctgcagccggcgcaggacccagaggtggcaggtcgcctgccggagcctcggggcaccgggctggggcaggcggcagacgtgagtctcaaaaggaacgcaagtccctgccggccccagtggctcaaagacccgactctcctggaggaggccttcaagcgccaggccagaagagaactccaaggagaggagaacagcaaggatggaatgacagtagaggacccgaaggaatgttagagcgagcggaacgcaggtcatatagagaatacagaccttatgaaaccgagagacaggctgatttcactgccgaaaaattcccagatgagaaagttccggaattggaagttgaggaggaaacacaggttcaggagatgactttggacgaatggaaaaatctgcaggagcagacgcgcccaaaacctgagtttaacatccgcaaaccagaatcaaccgtgccttctaaggccgtggtgatccataaatcaaagtatcgggatgacatggtgaaagatgattacgaggatgactcccatgtgttcagaaaacctgcgaacgatataacatcacagctagaaatcaattttgggaatttgccgaggcctggcagaggcgctcggggcggcactcgcggaggtcgtgggcgcattaggagggctgaaaattacggacctcgagctgaagtggtgatgcaggacgtagcccccaatcccgatgatccggaggactttcctgccctaagctag

SEQ ID NO: 12467 - RNA, 1437 nt, synthetic construct
  misc_feature 1..1437: note = source = /note="Description of Artificial Sequence: Synthetic coding sequence"
  source 1..1437: mol_type = other RNA
atgccccgcaggggatattctaagccagggagctggggtagcttttgggccatgctgacccttgtggggctcgtgacccacgctgctcaaagggccgatgtgggaggcgaagccgctggaacgagcattaaccatagccaggccgtactacaacgcctacaggaactgctacgccaaggaaacgcttcagatgttgttctgagagtgcaggctgccgggaccgacgaggtcagagtctttcatgcccaccgcttacttctgggtctgcatagcgagctatttctcgaactcctctcaaaccagtccgaagccgtgctccaggagccacaggactgcgctgctgtatttgataagtttatccgttacctgtactgtggggagcttacggtgcttctgacccaggccatcccacttcaccgactagctactaagtacggagtgtcctcccttcagcgcggcgtagccgattatatgcgggcccatcttgcaggcggggccggacctgctgtgggttggtaccattatgctgtgggcactggagatgaagccctgagagagagctgcctgcagttcttagcgtggaacctgagcgctgtggcagcctctaccgaatggggtgccgtctcccccgaacttctctggcaacttcttcagaggtcggatctcgtgctgcaggatgagctcgaactttttcatgcactcgaagcctggcttggtcgagcaagaccaccacccgctgttgcagaacgggcgctgcgcgcaatacgatacccgatgatccctcccgcccagctcttccaactccaggcccgcagcgctgccctggcccgccacggtcctgccgtcgccgatctgctgctgcaggcctaccaattccatgccgcttctcccctccattatgccaagttcttcgatgttaatggctcagctttcttacccagaaactatttggcacctgcctggggggctccatgggtcatcaacaatcctgcaagagatgacagatctacaagctttcagacacaactgggcccctcaggccacgacgcggggcgccgggttacgtggaatgtcctgttttctccccgctggctgccagtaagtctccgacctgtatacgctgatgctgcagggacagcgctgccagctgcccggcctgaagacgggagacctcggctcgtcgtcacccccgcctccagtggcggcgacgctgctggagtttcttttcagaaaaccgtgctcgtgggcgcacgtcagcaaggtcgactgcttgtgcgccacgcttactcgttccaccaaagtagcgaagaggctggcgattttttggcacacgctgacctacagcgcagaaactcagagtacttagtagagaacgctttgcacctgcatttgattgtgaagcccgtataccataccctcattcgaaccccaaagtag

SEQ ID NO: 12468 - RNA, 477 nt, synthetic construct
  misc_feature 1..477: note = source = /note="Description of Artificial Sequence: Synthetic coding sequence"
  source 1..477: mol_type = other RNA
atgtgttgcccgggagggcattacacactcattttgcggagaggcaatcgttttcgacgagagaagcgtcctgctaaagtcaccggcgcacagaccgaagtacagctcgcgccccccttaccacgcggtagggctcgcagatcgccatggtcagtacccattagtctttccattgataggctggagttcgatctgttataccccgccatcaagggtgacacaatccaactttacttgggcgccaaactgctggactcgcagggcaaggtcactaaatggttcaataactccgctgcttcacttactatgccaacgctcgataacatccccttctcattaatcgtatctcaggacgtagttaaagcagcagtcgcagccgtgttatccccagaagagttcatggtgctgttagattctgtgctgccagagagcgcacatcgcctgaagtcttctataggtctgattaacgaaaagtag

SEQ ID NO: 12469 - RNA, 771 nt, synthetic construct
  misc_feature 1..771: note = source = /note="Description of Artificial Sequence: Synthetic coding sequence"
  source 1..771: mol_type = other RNA
atgtttcagacaggcggcctaattgtgttctatggcctgttggcccagacaatggcccagttcggagggcttcctgtacccctcgaccagacgctgcctcttaacgttaacccagctctccccctgtctcccactgggctcgcgggttccttaacaaatgccttatccaacggtctgctaagcggcggcttactgggaatcctcgaaaatctgcctctgctggacattttgaagcccggcggcggcacaagcggtggacttttgggcggcctcttgggaaaggtaacatcagtcattcccggcttgaacaacattattgatatcaaggtgacagacccccagttgttggaactcgggctggtgcaaagtcctgacgggcacaggctctacgtcacaatccccctgggtatcaagctgcaagtcaatactccgcttgttggggcatcacttcttcggttagccgtgaaactagatattacagcagaaatccttgccgttcgagataaacaagaacgaatccatctggttttgggagactgtactcacagcccgggcagcctgcagatatctcttctagatggacttggtcccctgcccattcagggactgctggattccctgaccgggatcttaaacaaggtgctgccagaacttgtccaggggaatgtgtgccctctcgtcaacgaggtattacgtggcctagatatcaccctcgtgcatgatattgtgaacatgctcatccatggtctccagtttgtgattaaagtttag

SEQ ID NO: 12470 - RNA, 771 nt, synthetic construct
  misc_feature 1..771: note = source = /note="Description of Artificial Sequence: Synthetic coding sequence"
  source 1..771: mol_type = other RNA
atgtttcaaacagggggtttgatcgtcttttacggcctactagcacagactatggctcagtttggtggtttgcccgtacctctagatcagactctgcccttgaacgttaaccccgccctcccactgtcacccactggcctggccggctccctgacgaatgccctttcaaacggactcttgtctggcggactcctggggatcctggagaacctcccactgctcgacatactcaaaccagggggcggtacttctggcggcctcctgggggggttattaggaaaggtaaccagtgtaatccccggcctcaacaacataatagacattaaggtgaccgacccacagctcctggagttaggcttggtgcagagccccgatggccacagactgtatgttacaatcccccttggtattaaactgcaggtgaatacccctcttgtgggggctagtcttctccgactcgccgtgaagttggatatcaccgccgaaattcttgccgttcgagataaacaggaaaggattcatttggtacttggtgactgtactcatagcccagggagcttgcaaattagccttttagacgggctgggaccactgccaatccagggcttacttgactctctgacaggtattctcaataaagtgctgccagaactggtacagggcaacgtttgtcctttagttaatgaggtattgcgcggcctcgatattacactggtacacgatatcgtcaatatgttaatccacggcctgcaatttgtaatcaaggtctag

SEQ ID NO: 12471 - RNA, 657 nt, synthetic construct
  misc_feature 1..657: note = source = /note="Description of Artificial Sequence: Synthetic coding sequence"
  source 1..657: mol_type = other RNA
atgatgtgccctttgtggagactcctgatctttctgggactgctggcccttccattggcccctcacaaacaaccgtggccaggacttgctcaggcacatcgcgataacaagtctacgctggcccgtattatcgcccaaggcttaattaaacataatgctgaatccaggatccagaatatacacttcggcgacaggctcaacgccagcgcacaggtggctccaggtctggtagggtggctaataagtggtcgaaagcaccaacagcagcaagagtcacggtccttcgacaacaatattgtcaaaatgtgcgcccacatgtccatcgttgtggaattctggctggaaaaagatgagttcggacgtcgcgacctggtgattggtaagtgtgatgccgaaccctcaagtgtgcatgtggctatcttaaccgaggcaattccgcccaaaatgaaccagtttctgtataacttaaaagagaatcttcaaaaagtgctgccgcatatggtcgagagtcaggtttgtccgctgattggagaaattctgggccaactcgacgtgaagctgttgaagtctttaatcgaacaagaggccgcccatgagcccacacaccacgaaacctcccaacccagtgcctgtcaagcgggcgaatcaccaagctag

SEQ ID NO: 12472 - RNA, 765 nt, synthetic construct
  misc_feature 1..765: note = source = /note="Description of Artificial Sequence: Synthetic coding sequence"
  source 1..765: mol_type = other RNA
atgatgtgtcccttatggagactgttaatatttctcgggcttctcgccctcccactcgccccacacaagcagccatggccaggcttagcacaggcccaccgggacaacaagagcacacttgcccgtatcattgcccagggtctgataaagcataatgcggagagcaggatccaaaatattcactttggcgatagactgaatgcttccgctcaggtcgctccgggtttggtagggtggctcatcagtggccggaaacaccagcagcagcaggagtcatctatcaatataacgaatatccagcttgattgtggcggcattcaaatatccttccacaaagagtggtttagcgccaatatcagtttagaatttgaccttgaacttcgaccaagctttgataacaatatagttaaaatgtgtgctcacatgtcaattgttgtggaattctggctagagaaagacgagtttgggcgccgagacttggtgataggcaaatgcgacgctgaacccagttctgtgcatgtcgctatcctgacagaagcaatcccccccaagatgaatcagttcctgtataacctgaaggagaacctgcaaaaagtactgccacacatggtagaatcccaggtctgccccctaattggtgagatcctaggccagttggacgtgaagcttcttaaatctctgattgaacaggaggccgcacacgagcctacgcatcacgaaacctctcagccctccgcctgtcaggctggcgagtcacccagttag

SEQ ID NO: 12473 - RNA, 1635 nt, synthetic construct
  misc_feature 1..1635: note = source = /note="Description of Artificial Sequence: Synthetic coding sequence"
  source 1..1635: mol_type = other RNA
atgaaaatttcaatgatcaattacaagtctctcctggctttgcttttcattttggcttcgtggataatattcaccgtattccaaaactcgaccaaagtatggagcgcactaaacctgagtatttccctccactactggaacaattcaaccaagtctcttttccccaaaacccccctgatcagtttgaaacccctcaccgagacggaactgaggattaaagaaataatcgagaaattagatcagcagataccaccaagacccttcactcatgtgaataccacaacaagcgctacccactctactgctactattttgaaccctagagacacctactgcaggggagatcagctacatatcttgttggaggttcgtgatcacctgggtcgtaggaaacagtatgggggcgacttcctccgcgcccgcatgtccagccctgcccttatggcaggggcaagcggtaaagtcacggactttaacaatgggacttacttggttagctttacccttttctgggaggggcaagtcagcctctctctactgctcatacatccctctgagggtgtgtcggccctgtggagcgcacgcaatcaaggttacgaccgtgtcatcttcactggtcaatttgtcaacggcacaagtcaggttcattcggaatgcggactcattttaaacactaacgctgaattgtgtcagtacctcgacaacagagatcaagagggtttctattgcgtgagacctcaacacatgccttgcgccgcactgactcacatgtatagcaagaataagaaggtgtcttatttaagcaagcaagagaaatcattgttcgaacggtcaaacgtgggcgtggaaataatggaaaagtttaatacaattagtgtgagcaagtgcaataaggaaaccgtcgctatgaaggaaaaatgtaagttcggcatgacaagcacaattccatcgggacacgtctggaggaatacctggaaccccgtgagctgtagcttggcaacagtgaaaatgaaggagtgcctgcgtggcaagttgatatatctcatgggtgactcaacaattagacagtggatggagtacttcaaggctagtataaataccctcaaatccgtagacttgcatgagagcggcaaacttcagcatcaattggcagtcgacctggaccgtaacatcaacattcagtggcagaagtattgctaccccttaatcgggtccatgacatactcagtgaaagagatggaataccttaccagagcaattgacagaaccggaggcgaaaagaataccgttatagtgatcagcctcgggcaacatttccgtccgtttccgattgatgtcttcatcagacgagcgcttaatgtccacaaggcaattcagcacctgctcttaagatctccagatacaatggtcataatcaaaactgaaaacataagagaaatgtacaatgatgctgaacggttcagcgactttcatggatacatacagtacctgattataaaagacatttttcaggatttatctgtttctataatagatgcgtgggatatcactatcgcgtacggaacaaataacgttcaccctccccagcatgtggtgggaaaccaaataaacattctgttgaattacatctgttag

SEQ ID NO: 12474 - RNA, 1845 nt, synthetic construct
  misc_feature 1..1845: note = source = /note="Description of Artificial Sequence: Synthetic coding sequence"
  source 1..1845: mol_type = other RNA
atgtggatggcatggtgtgtcgcagctctctctgttgtggccgtgtgcgggacaagccatgaaaccaacactgtgcttcgagtcaccaaggacgtgttgtcaaatgcgatctccgggatgcttcagcagagcgacgctctccattcggcactccgcgaagtccccctgggagttggcgacatcccctataatgactttcatgtgcggggcccccccccggtgtatacaaatggaaagaaactggacgggatataccagtatggccacattgagacgaacgacaacaccgcccagctcgggggtaagtacagatatggagaaatcctggagtccgagggctccattcgtgatttgcgaaacagcgggtaccggtccgcagaaaatgcttacggaggccacagaggtttaggaagataccgcgcagctcctgttggacgcctccacaggagagagttgcagcctggcgagataccccccggcgtggcaacgggagccgttgggcccggcgggcttttgggcactggggggatgcttgcagccgatggcattctcgcaggtcagggagggctgctcggcggcggaggtcttctgggagacggcggacttctagggggtggcggcgtgttgggcgtgttgggcgaaggggggatcctcagtactgtccagggaattacaggcctgcgtatcgtggaactgacactgccaagagtttcggtgcgcctgctgcccggcgtaggagtttacctcagtctgtacacaagggtggcaatcaacggcaaaagtcttattgggtttcttgacattgccgtcgaagtgaatattactgctaaggttcgcctgactatggatcggacgggctaccctaggctagtgatcgagcgatgcgatactctgcttggtggtatcaaggtgaagcttctgaggggcctactgcctaacttggtagacaatctcgttaaccgcgttttagctgatgttctgccagatttactttgtccaattgtagacgtcgtgctgggccttgtcaacgaccagctgggattagttgactctctgattcccctagggatcctgggctctgtacagtacacattcagctccctgcctctggtgactggagagttcctggagctggacctgaatacactcgttggcgaagccggcgggggactgatcgactatcccttgggctggccagccgtgtccccaaagccgatgccggagttaccccctatgggagataataccaagagccagctggctatgtcagcgaattttcttggctctgttctaaccttacttcaaaaacagcatgcattggacctcgatatcacgaacggaatgttcgaagaacttcccccgctgacaaccgcaaccttgggcgccctcatccccaaggtgtttcaacagtaccccgagtcttgccctctgattatccggatccaggtgttaaaccccccatctgtcatgctccagaaggacaaggccctcgtcaaagtgctggctacagcggaggttatggtaagccaaccaaaggacctggaaacaaccatatgtctcatagatgtggacaccgagttcttagctagcttcagtaccgaaggagataaactgatgattgatgcaaagctggaaaaaacatctttgaatctgagaactagcaacgtcgggaattttgacatcgggctcatggaggttctcgtggaaaagatctttgatctggcgtttatgcccgcaatgaacgcagttttgggaagtggggtacctttaccaaaaatattgaatatcgacttcagcaacgccgacattgacgttctggaggatctgttagtcttgagcgcctag

SEQ ID NO: 12475 - RNA, 1431 nt, synthetic construct
  misc_feature 1..1431: note = source = /note="Description of Artificial Sequence: Synthetic coding sequence"
  source 1..1431: mol_type = other RNA
atgcaacctgtcatgctagccctctggagccttttgctgctgtggggcctagcgaccccctgtcaggagctgctggaaacggtgggaaccctggctaggatcgataaggacgagctgggaaaggccatccagaattctttagttggagagcccattttgcagaacgtgctcggatctgtcacggccgtcaatcgcggtttgttagggagtggaggtctgctaggtggcggcggtctgcttggccacggcggcgtattcggcgtagttgaagaactgtcgggtctgaaaattgaagaactgactctgccaaaagtgctgttgaagctactcccaggcttcggcgttcaactgagtttgcacacgaaggtcggcatgcactgctcaggccctttgggcggcctcctgcagctggccgctgaggtaaacgtgacatcacgcgtggctttagctgtctcatcgcgaggcaccccaatcctgatccttaagagatgcagtaccttgttgggccacatcagcctattctccggactgcttccaactcctctcttcggtgtggtagagcaaatgctgttcaaagtgctcccaggcttgctgtgccctgttgtcgactcagtgcttggagtcgtcaatgaactgctcggtgctgtgctggggttagtctccctcggggccctgggcagtgtggagttctccctagccacattaccactgatttctaaccagtatattgagctcgatattaacccgattgtgaagagcgtcgccggcgatataatcgactttcccaagtccagagcacctgcgaaagtacctcccaaaaaggatcatacaagccaagttatggtccccctttatctgtttaacacaaccttcggattgctccagaccaacggagccctggatatggatataactcccgagctggtcccctccgacgtgccgctgactaccacggacctcgctgccctcctccctgaagcccttggtaagttacctttacatcagcagttgttgcttttccttagagtaagagaagcgcctacagtcaccctccacaataaaaaagcacttgtgtccctcccagctaacattcatgtcctattttacgtgccgaagggaacacctgagagcttgttcgaactcaacagcgtcatgacggttcgggcgcaactggcaccaagtgcaacgaaactgcacataagcttgtccttggaacgcctgtccgtcaaggtggcttcaagctttacacacgccttcgatggcagtcgcctagaagaatggctcagccatgtcgtcggggcggtgtatgctccaaagctcaacgtggccctggacgtgggaattcccctgccaaaagtgcttaacatcaatttcagtaattccgtgctggaaatcgttgagaatgccgtggttctcacagtggccagttag

SEQ ID NO: 12476 - RNA, 585 nt, synthetic construct
  misc_feature 1..585: note = source = /note="Description of Artificial Sequence: Synthetic coding sequence"
  source 1..585: mol_type = other RNA
atgcaggatgcccccctaagttgtttatccccaactaagtggtcctctgtatcatcagccgattcgaccgagaagtcagcctccggggcaggcacaaggaacctgccttttcagttttgcctcagacaagccttgagaatgaaagccgctggcattctcacactcatcggctgtctggttactggagccgaaagcaagatttataccagatgcaaactggctaaaatcttctcacgtgctggacttgacaattactggggattctcattgggcaattggatctgtatggcttactatgagtcaggctacaacacgacggcgcagactgtactcgacgatggatctatagactacggcatatttcaaattaactccttcgcttggtgtcgcagaggcaaactgaaggagaataatcattgccacgtcgcttgctccgctctgattactgacgatctaactgatgcaattatatgtgcaagaaagattgtgaaagagacgcaggggatgaactattggcaggggtggaaaaagcattgcgaagggcgcgatctttcagagtggaaaaaaggctgtgaagtttcctag

SEQ ID NO: 12477 - RNA, 1266 nt, synthetic construct
  misc_feature 1..1266: note = source = /note="Description of Artificial Sequence: Synthetic coding sequence"
  source 1..1266: mol_type = other RNA
atgggttttttgagcccaatctacgtaatattctttttctttggggtaaaggtgcactgccagtacgaaacataccagtgggatgaggattatgaccaggagcccgacgacgactatcagacgggtttcccctttcggcaaaacgtagactatggggtgccttttcaccagtacactttgggctgcgtctctgagtgcttttgccccacaaatttcccctctagcatgtactgtgacaatcgaaaactgaagacgatacccaacatccccatgcacatccaacagctttacctgcagtttaatgaaatagaggctgttaccgccaactcatttataaatgcaacccacctgaaagagatcaatctcagccacaacaaaattaagtcccaaaaaatagattacggcgtttttgcaaagctccctaacttgctccagctccaccttgagcacaacaacttggaagaatttccgttcccgctcccaaagtctctagaaagactcttgctagggtataatgaaatctctaagctgcagactaacgctatggacggcttggtgaatcttacaatgcttgacctgtgttataactacctccacgactccctcctaaaggacaaaatcttcgccaagatggaaaaactgatgcaactaaatttatgcagcaataggctggaatcgatgccacccggactgccttcctccctcatgtatctctcacttgaaaacaactctatctcatctataccagaaaaatatttcgataagctgccaaaactgcacacattgagaatgagccacaataagctgcaagatatcccgtataacatatttaacctcccaaacatcgtcgagttgagtgttggccataataagctgaagcaagccttctatattcctagaaatctggaacatctttaccttcagaacaacgagatcgaaaagatgaatcttactgttatgtgcccgtcaatcgatcccttgcactaccatcacctaacatacattcgggttgatcagaacaaacttaaggaacctatttcttcatacatctttttctgctttcctcacatccatacgatctactacggggaacagcgctcgacaaacggccaaactattcaactcaagacacaggtatttaggcgttttccagacgatgacgatgagtctgaagaccatgacgaccctgacaatgctcacgagagtcccgagcaagaaggggctgaggggcacttcgacctgcactattatgagaaccaagagtag

SEQ ID NO: 12478 - RNA, 252 nt, synthetic construct
  misc_feature 1..252: note = source = /note="Description of Artificial Sequence: Synthetic coding sequence"
  source 1..252: mol_type = other RNA
atgctatgttgttgtcccctcgctgatgctcttcttattttcctcgaaaccggatcttgtttccagcccggtcaacaatccgagacgcttagccaaaaacagaataaaacaaacaacaaaaagtgggctggcggagccggatgtagacccttcagactctggtgggtaggaaggtcccgcggcgccggggttcagctgtattcaactaagaaagggtggatactgagagggaagggcggtacagaggcctag

SEQ ID NO: 12479 - RNA, 2559 nt, synthetic construct
  misc_feature 1..2559: note = source = /note="Description of Artificial Sequence: Synthetic coding sequence"
  source 1..2559: mol_type = other RNA
atgctgcctactgaggtaccacaaagtcacccagggccaagcgcccttcttttgctgcaacttctgctccctccgacaagcgcgttcttccctaacatctggagcctcctggccgcccctggatcgattacacaccaagatctcacagaggaagccgcactgaatgtaacgcttcagctgttcctggagcagccaccaccaggcagaccacccttgcgcttagaagacttcttagggcgcacactgctggcagacgacctctttgcggcctactttgggcctggcagcagcagaagattcagagctgctttaggtgaggtatcccgcgccaatgccgcacaggattttctcccaacaagccgtaacgacccagatctgcattttgacgccgagagattggggcaaggcagagctaggctagtgggagctttaagagagactgtcgtcgcggcccgcgcccttgaccacaccctggctagacaaagacttggagctgcattgcatgctttgcaggatttttattctcatagtaactgggtggagctgggagaacagcagccacatccccatctcctttggccaaggcaggagctgcaaaatctggcccaagtagcagacccaacttgtagcgactgcgaggaattaagttgtcccagaaactggctgggctttactctgctgacctctgggtacttcggcactcatcctccaaaaccccccggaaagtgttcccacggaggccacttcgacagaagctcttcacagccccctcgcggcgggatcaataaagatagcaccagccccggattctcccctcaccacatgctgcacctgcaggcagcgaaactagctcttcttgccagtatacaagccttctctttactccggtcaaggctgggcgaccgggacttttcgagattgctggatatcacccccgcttcaagcctaagcttcgttcttgatacaaccgggtcaatgggagaagagattaatgctgccaagatccaggcgcgtcacctggtggagcaacgccgcgggagtcctatggaaccagtgcactacgtcctcgtgccatttcacgaccccgggtttggccccgtttttacaacctctgatccggattcgttttggcagcaactcaacgagatccacgcacttggaggaggggacgagccagagatgtgtctgtctgccttacagctagccttgcttcataccccaccactgtcagatatcttcgtcttcactgatgcgagccccaaggatgccttccttactaaccaggtagaatcgctgacgcaggagcggagatgtcgcgttacatttttggttacggaggacacctcacgcgtgcaaggtcgggctaggcgggagatcctcagccctctacggtttgaaccctacaaggctgtggctttagcttccggaggcgaggtgatctttaccaaagaccagcatattagggatgtggctgcaattgtcggtgagtctatggcggctttagtaacccttccgctcgacccacccgttgtggtacctggacagccccttgtcttcagtgttgatggcttgctccagaaaataactgtcagaatccatggggatatctcttcgttttggatcaagaatccagctggcgtgtcccaaggccaggaagagggcggcggacccttggggcacacccgtcgctttgggcaattttggatggtgactatggatgatcctccccaaacagggacctgggagatccaggtgactgctgaggacacaccgggggtccgtgtccaggcacagacctctctcgatttcctattccatttcggcatacccatggaggacggtccccacccagggctttaccctctgacccaacctgtggccggcctccagacccagcttctagtggaagttactggcctgggctcccgcgccaacccaggggaccctcagccacatttctctcatgtgatcttgagaggagtgcccgaaggcgccgagctgggacaggttccactcgaacccgtggggcctcctgaacgagggctgctggctgcatctctgagccccactttactgtccacccctagacccttctcactcgagctcatcgggcaagatgctgccggccggaggcttcacagagccgccccacagcctagtaccgtggtgcccgtcctgctggagctgtctgggccctcaggatttctggctcctggctctaaggtgcccctcagcctacggattgcttctttctctgggcctcaggatcttgatctgagaacattcgtaaatccatcattcagtttaacttccaatctatcccgagctcacttggagctgaacgagtcggcatggggccggctttggctcgaggtacccgattcagcggcacccgatagcgtcgtcatggttactgtcacagcagggggacgggaagcaaatcccgtccccccgacccacgcattcctgcgcctcctggtgtcggccccggcaccacaggtcagaaaccactattttccatcccagggacccgcccatcacccataccggttgatctag

SEQ ID NO: 12480 - RNA, 2676 nt, synthetic construct
  misc_feature 1..2676: note = source = /note="Description of Artificial Sequence: Synthetic coding sequence"
  source 1..2676: mol_type = other RNA
atgttacctacagaagttccacagtcccaccccgggccttcagcacttttgctcctgcagctactgctcccacccacatcggcattctttccaaacatatggagtttattagccgcgccagggtccatcacccatcaggatcttaccgaagaggccgctttaaatgtaacactccagttatttttagaacagccgcctcctggacggccgccccttagattggaggatttcctcggacgcacactgcttgctgatgatttgtttgccgcgtactttggacctggttctagcaggcggttccgcgctgccctgggggaggtgtcccgtgcaaatgctgcccaagattttctgcccaccagtcgcaatgatcccgacctacattttgatgcagaaaggctcggacaaggccgcgcaagactcgttggggcattacgagaaacagtcgtggcagctcgggctctggatcacaccctggcaaggcagcgtctgggtgcggctcttcacgcactacaagatttctattcacactccaattgggttgaactcggggaacagcagccacacccccatctgctgtggccccgacaagagctgcagaatttggctcaggtggccgacccaacatgctccgattgcgaagaactgtcctgccctcgcaactggctggggttcactttgctcactagcgggtatttcgggactcatccccccaaaccccccgggaaatgctcacatggggggcacttcgacaggtcctcatcccagcctccacgcggagggatcaataaagacagcactagtccaggcttttcaccacaccatatgcttcatttgcaagctgcgaaattagccctcctggcgtccatacaggcattctcactcctccgctccagacttggcgaccgggactttagtagactgctcgatattacccctgcatcatcactgagttttgtgctcgatacaaccggctctatgggggaggaaatcaacgcggccaagatccaggccaggcaccttgtagagcaacgccgcggaagcccaatggaacctgtgcactatgtgcttgtgccattccacgatcccggcttcggaccagtctttacaacctctgaccccgactcattttggcaacagcttaacgagatccacgctctcggcggtggtgacgagcccgagatgtgcttatctgcgttgcagcttgcactgttgcataccccacccctgagcgacatctttgtgttcaccgatgcctctccaaaggacgcctttttaaccaatcaggtcgagagccttacacaggagaggcgttgcagagtgacttttcttgttaccgaagatacaagccgagtgcagggccgggcccggcgcgagattctgagtcctctgcgctttgaaccttacaaggccgtcgcgctggcctctggaggcgaggtgatctttacaaaggaccaacacattagggatgttgccgcgatcgttggcgagagcatggctgcactcgtgaccttacctctcgacccacccgtggtggtcccaggacaacctttggtgttctcagttgacggattattacagaaaattacggttcggattcatggcgacatttctagcttttggattaagaatcctgccggcgtcagtcagggccaagaggagggcggggggccccttggtcacacccggagattcggccaattttggatggtgacaatggatgatcctcctcaaaccggcacgtgggagattcaggtgacggcagaggacactccaggtgtgcgtgtgcaagcacagaccagcttagacttcctgtttcatttcggaattcctatggaggacggacctcaccccggtctgtaccctctgacacagccagtggcaggattacagactcagctcctggttgaagttacggggctagggagccgagctaatccaggcgacccccagcctcatttttcacatgttatcctgcgcggagtgcctgaaggcgctgagttaggacaagtgcccctcgagcccgtggggccccccgagcgcggtctgctggctgcctcattgagtccaaccctgctttctacaccacgccctttctccctggagttaatcggccaggatgccgccggcaggaggctgcacagggctgcccctcagcctagcactgtggtacccgtactcctcgagctgtcagggccatcaggattcctcgctcctggctcaaaagttcctctgtccctcagaattgcctcattttccggccctcaggacttggacctacgcaccttcgtcaatccatcattttccttgactagtaatctgtccagggcccacttggagctgaatgagtccgcgtgggggcggctttggctggaggtccctgattcagccgctcctgactctgtggtcatggtaactgttacagcaggggggcgtgaagcaaatcctgtcccgcccactcatgctttccttaggctgctggtctctgctccagccccacaggaccggcacacaacccccaccggaagctctgacccaatcctgaccacagcaactcctgccttctcccccttcaccctcgtgactcagggaagggccggagccggacttgctgctggaagcccatggtggggtaccgtgggcggggtgctcttactgctgggccttgcaagttggtag

SEQ ID NO: 12481 - RNA, 552 nt, synthetic construct
  misc_feature 1..552: note = source = /note="Description of Artificial Sequence: Synthetic coding sequence"
  source 1..552: mol_type = other RNA
atggtccgaatctggactacaataatgattgttttaattctcctactgcgaattggaccaaacaagcccagtctgtcaggtcgccaggctccagctcaggctcaaacatcagatctcgtgccttccctgtttcctttagggctgtgggcccccgggttttgcacctggagctcacctgatgaagacaaacgtccacgaaaacctgttcctggcacaggcaatcgggactccgggacacgtagaagacttcaggatgctaccgaacaagaccctcgacctgggaatgacgttgcctcagctgaaacggccgggcctccatccccctccggcattagagcccaggaccgggcccctagacatcgccgtgcccctcccgccaggatgccagtggcgcccgcaccaagcgctgacggcgagcctttacaagagcagggagggggactgtttcatcgaacaagaagcgtttacaatggccttgagttgaatacctggatgaaggtagaaaggctctttgtggagaagtttcaccaatctttctctttggacaactag

SEQ ID NO: 12482 - RNA, 444 nt, synthetic construct
  misc_feature 1..444: note = source = /note="Description of Artificial Sequence: Synthetic coding sequence"
  source 1..444: mol_type = other RNA
atggcaggccccgccggcagccaatctctgggcccattatgctttcacagctccccgcaagccctatacacagttctcctgattgtgctggtgatgatgagcttggtgtttggaaaattcgtccctgtgaactgggaacccccccagcccctgccctttcctaaatacttgagatgctacagatgcctactcgaaacaaaagagctcggctgtttactaggctctgacatatgtctgacacccgccggttcctcttgcatcacactacacaagaagaattcatccgggtctgatgtgatggtgtcagattgtcgcagtaaggagcagatgtctgactgcagtaacacacgaacatcccccgtcagcggattctggatatttagccagtattgttttctggacttctgtaatgacccacagaacagaggtctgtatactccttag

SEQ ID NO: 12483 - RNA, 447 nt, synthetic construct
  misc_feature 1..447: note = source = /note="Description of Artificial Sequence: Synthetic coding sequence"
  source 1..447: mol_type = other RNA
atgcaaactttccccgtcgctggggccttagacccagctattcttgacacttctagcccccaagctctgtacacggtgctgttaatagtccttgttatgatgtcccttgtgtttggtaagttcgtgcctgtaaactgggagcccccacaacctctgccctttcctaagtatctccgctgttaccggtgcctgcttgagaccaaagagttaggatgtctgttaggcagcgacatttgcctcactccagccgggtcaagctgtatcaccttacacaagaagaatagctctgggtcagacgtaatggtttctgactgcagaagtaaggaacagatgagcgactgctcaaacacccgcacatcaccggtttcaggtttttggatcttctctcagtactgttttctcgatttctgtaacgacccacagaaccgagggctgtataccccatag

SEQ ID NO: 12484 - RNA, 606 nt, synthetic construct
  misc_feature 1..606: note = source = /note="Description of Artificial Sequence: Synthetic coding sequence"
  source 1..606: mol_type = other RNA
atgaaggtccacatgttagtgggagtactggtgatggtcggattcaccgtcgggaaggtgccagtccctgatattcgcacatgccacttctgtttagtcgaggacccaagcgtcggatgcatttccggatcagaaaaatgcaccatctccagctcctctctgtgtatggtaatcaccatttattatgacgtaaaagtgcggttcatcgtgcgaggttgtgggcagtacatttcttacagatgccaggagaagagaaatacctattttgctgagtattggtaccaggctcaatgttgtcagtacgactattgtaattcatggtcatcaccccagttgcagtctagtctgcccgagcctcatgatcgtccacttgccctgcctctgtctgactctcagatccaatggttctaccaggcacttaatctctcgttacctctaccaaattttcatgccgggaccgaaccagacggcctcgaccctatggtaaccctttccctcaatctcgggctgtccttcgctgagttacgtagaatgtaccttttcctgaatagttctggactgctggtgctgcctcaggccgggctgttgactccgcacccgtcttag

SEQ ID NO: 12485 - RNA, 345 nt, synthetic construct
  misc_feature 1..345: note = source = /note="Description of Artificial Sequence: Synthetic coding sequence"
  source 1..345: mol_type = other RNA
atgctcggaggggaggaagcaaggccaaacagctggccatggcaggtgagtttacagtacagcagcaatgggcagtggtaccatacatgcggagggtcactaattgctaatagttgggtattaacggcagctcattgtatcagacagattattaaggcacacaaggtcttgcagaggtgctccttgattcttttttttgtgagggatctttgttcttctcaactggaactgactggggtgtctgctgggagcagcggcatttatcgagtgatgcttgggcagcataacctgtacgtcgccgaatcgggtagtcttgccgtgtcagtgagtaagatcgtcgtatag

SEQ ID NO: 12486 - RNA, 810 nt, synthetic construct
  misc_feature 1..810: note = source = /note="Description of Artificial Sequence: Synthetic coding sequence"
  source 1..810: mol_type = other RNA
atgatccgtaccttgcttttgagtacattagtggccggtgcgttgtcctgtggggtgtcaacatatgcgcctgatatgtcaaggatgctgggaggggaggaggctcgacccaattcatggccttggcaagtatctctgcaatactcttcaaatgggcagtggtatcatacttgcggcggttccttgatcgcgaactcatgggtccttaccgctgctcactgcatctcctcgagcggcatctaccgggtgatgctgggtcaacacaatctctatgttgcagagagcgggagcttggcagtaagtgtgtccaagattgttgtccacaaagattggaattctgatcaggtttcaaagggaaacgacattgccctactcaaactggcaaatcccgtctctctcaccgataaaatccaacttgcctgcctgcctcccgccggcactatcttacccaacaactacccatgttatgtaacgggctggggacgactgcagacaaacggcgccctgccagacgacttaaaacagggccagctactggtagtggactacgccacatgctccagcagtggctggtggggaagcaccgttaagacaaatatgatttgcgccggtggtgatggggttatttgtacttgtaatggagattccggcggccccctgaattgccaggcgagcgacggccgttgggaggtgcatggcattggatctctgaccagtgtcctggggtgtaattactactataaaccttcgattttcacccgcgtctctaactacaatgattggattaactcggtgattgctaataactag

SEQ ID NO: 12487 - RNA, 567 nt, synthetic construct
  misc_feature 1..567: note = source = /note="Description of Artificial Sequence: Synthetic coding sequence"
  source 1..567: mol_type = other RNA
atgttccaccaaatctgggccgcattactttatttctatggcatcatcctcaattccatataccagtgtcccgagcattcacagctgactaccctaggagtggacggtaaggagtttcccgaagttcatctaggacagtggtactttatcgctggcgcagctccaaccaaagaggaattggcaacttttgaccctgtggataacattgtatttaatatggcagccgggagcgcacccatgcagttacatttaagggctacgatccggatgaaggacggcttatgcgtccccagaaagtggatctatcaccttactgagggcagtaccgacctccgaactgagggaagacctgacatgaaaactgagctcttcagctcgagctgccctggcggaattatgcttaacgaaacaggccagggatatcagcgcttcctgctgtacaataggtccccccacccccctgagaagtgcgtagaggaatttaaaagcttgacttcatgcctcgactctaaagcattcctgctaacccccagaaaccaggaagcctgtgagcttagcaacaactag

SEQ ID NO: 12488 - RNA, 390 nt, synthetic construct
  misc_feature 1..390: note = source = /note="Description of Artificial Sequence: Synthetic coding sequence"
  source 1..390: mol_type = other RNA
atggcagctgggtctgcccctatgcagctccatctgcgcgccactatcaggatgaaggacggactgtgtgtgccaagaaaatggatataccatctcacagaaggctcaacggatctacgcaccgaaggacgtccagacatgaaaaccgaactttttagcagtagctgccctggagggattatgctcaatgagacaggccaggggtatcagcgattcttattatacaacagatcaccccatccacctgaaaagtgcgtcgaagaattcaaaagcctgacttcttgtcttgattctaaggcttttctcttaactccaagaaaccaggggaaaggacttaaatctcataagaccggtctggggttgacaaagtcgagcggcgtgaccggctag

SEQ ID NO: 12489 - RNA, 351 nt, synthetic construct
  misc_feature 1..351: note = source = /note="Description of Artificial Sequence: Synthetic coding sequence"
  source 1..351: mol_type = other RNA
atggctgccggatccgcaccaatgcaactacacttgcgcgctacaattcggatgaaagacggtctttgcgtgcctagaaaatggatctaccatctcacagagggaagtaccgatttacgaacagaaggccgacctgacatgaagaccgaactattttcctcatcatgccccggagggattatgctaaatgagaccggtcagggctaccagcgcttcctcctgtataaccgctctcctcaccctcctgaaaagtgcgtagaggaatttaagtccctcacatcttgcctcgatagcaaggcttttcttctgacacctcgaaaccaagaagcatgtgagctgtccaataattag

SEQ ID NO: 12490 - RNA, 435 nt, synthetic construct
  misc_feature 1..435: note = source = /note="Description of Artificial Sequence: Synthetic coding sequence"
  source 1..435: mol_type = other RNA
atgattagaacgcttctgctcagtactctcgtggctggcgctttgagctgcggcgacccaacataccctccatatgtgacccgggtggtaggcggtgaggaagctagacccaattcttggccatggcaagtgtccctccagtactcttctaacggcaaatggtatcatacctgcggaggcagcttaatcgcaaactcgtgggtcttgaccgcggcacactgcatatcacagagcatggtccagtgtgctcacaaggtgcttcaaagatgtagcctaatcctgttttttgtaagggacctgtgttcctcacagctggaactgacaggggtgtcagccggctcaagccggacataccgtgtgggtcttggacgccacaatttgtacgtcgcagaatcaggttccctggcggtctcagtgagtaagatcgtggtatag

SEQ ID NO: 12491 - RNA, 204 nt, synthetic construct
  misc_feature 1..204: note = source = /note="Description of Artificial Sequence: Synthetic coding sequence"
  source 1..204: mol_type = other RNA
atgaaacttctgttgctgactttgacagtcttactccttctatcccagctgacgccaggtggaactcagagatgctggaatctttacgggaagtgtagatatcgttgttcaaaaaaggagagagtgtacgtgtattgcattaataataaaatgtgttgtgtcaagccaaaatatcagcctaaggagagatggtggcccttttag

SEQ ID NO: 12492 - RNA, 231 nt, synthetic construct
  misc_feature 1..231: note = source = /note="Description of Artificial Sequence: Synthetic coding sequence"
  source 1..231: mol_type = other RNA
atgaagctcctattattgctattaacggtcaccctgcttttggctcaggtgacaccagtcatgaaatgttgggggaagtccggaagatgcagaaccacttgtaaagaatccgaggtgtactatatcctgtgtaagacagaggcgaagtgttgtgtcgatcccaagtatgtgcccgtaaaacccaaattaactgataccaacacctcattggaaagcacttctgccgtttag

SEQ ID NO: 12493 - RNA, 267 nt, synthetic construct
  misc_feature 1..267: note = source = /note="Description of Artificial Sequence: Synthetic coding sequence"
  source 1..267: mol_type = other RNA
atgaagttactctacctgttcctggccatactgctggctatcgaggagccagtgatctccgtagaatgttggatggatggccactgccgacttctgtgcaaagatggtgaagactctattatccgttgcagaaatagaaagcgatgttgcgtgccctctcgatacctgaccatccagcccgtcaccattcatggtattctcggctggaccaccccacaaatgtccaccaccgcgccaaaaatgaagactaacattaccaatagatag

SEQ ID NO: 12494 - RNA, 255 nt, synthetic construct
  misc_feature 1..255: note = source = /note="Description of Artificial Sequence: Synthetic coding sequence"
  source 1..255: mol_type = other RNA
atgaagcttctttatctgtttttggccatactcctagccatagaggaaccagtgatctcgggaaaaaggcacattctacgctgtatgggaaactcaggcatttgccgagcctcttgcaaaaaaaacgaacagccatacctctattgtagaaattgccaatcctgttgtctgcaatcatacatgcgaatatcaatttcgggtaaagaggagaacactgactggtcctacgagaaacaatggcccaggctcccctag

SEQ ID NO: 12495 - RNA, 2631 nt, synthetic construct
  misc_feature 1..2631: note = source = /note="Description of Artificial Sequence: Synthetic coding sequence"
  source 1..2631: mol_type = other RNA
atgggccccgaagcgctatccagtctgcttcttcttctgcttgtagcctccggggatgccgatatgaagggccactttgacccggcgaagtgtcggtacgccttgggcatgcaagaccgcacaatcccagactcagacattagtgccagctcaagttggtccgatagcactgccgcaaggcacagtagacttgaaagttccgacggcgatggcgcatggtgccccgctggaagtgtgttccctaaggaagaggaatatttacaagtcgacttgcaaagattacatttagtcgcattggtgggcacccagggtagacacgctggcggcctcggcaaggaattctcaaggtcctaccggctccggtattctagggacggtagacgttggatgggttggaaagacaggtggggacaggaggtgattagcggaaacgaagacccagagggtgtggtactgaaagatctcggtccacctatggtggcacgactggttcgtttctatcctagggctgatagggtgatgtccgtttgtctgcgcgtcgaactgtacggttgtctgtggcgagatggtctcctgtcatatacggcgccagtcgggcaaacaatgtatttatccgaagcagtgtatctgaacgattctacctacgatggccacacggtaggaggcctgcagtacggagggctgggacagttggccgacggtgtggtgggcctggacgacttccgcaagtcacaagaactgagagtgtggcccggatacgattacgtcgggtggtccaatcacagtttttcttccggatatgtagagatggaattcgaatttgaccgattgcgggctttccaggcgatgcaggtgcattgtaataacatgcacacactgggagctaggctcccggggggagtggaatgtagattccgtcgggggcctgcaatggcttgggaaggagagcccatgagacacaatctgggtggaaacctgggggaccctagggcccgagctgtctcagtccccttgggtggaagggtcgccagattcctccagtgcagattcttattcgccggcccgtggctgctgttctcagagataagttttatttctgatgtggtcaacaactcttctcccgccttggggggcacattccctcccgcaccatggtggcccccaggaccacctccgacaaatttctctagtttggagctggagccgaggggtcagcagccagttgcaaaagccgagggttccccgacagctatcttaattggctgcctggttgcgatcatcctgcttctgctgctgattatagccctgatgctctggcggctccactggaggagactgctgagcaaagcggagcggcgcgtcctcgaggaggaactgaccgtgcatctgtccgtgcccggagataccatcctcattaacaatagacctggaccaagagagccaccaccttatcaggaacctcgaccgcggggtaaccccccacattccgctccttgtgttcctaacggctctgcatattccggagactatatggaacccgaaaagcctggcgcccccctgcttccacctccccctcagaactccgtgccacattacgccgaggctgacattgtcacactccagggcgtgactggaggtaacacttacgccgttccagctctgccacctggtgccgttggagacgggccgccgcgcgtggatttcccccgttctaggctgcgattcaaggaaaaactgggagagggccaattcggagaggtgcatctgtgtgaggtagattctccccaggacctggtttcacttgattttccccttaatgttagaaaaggccatccactgttagtcgcagtgaagattctgcggccagacgcaacaaaaaacgcacggaacgatttcctgaaagaagtcaaaattatgtcccggctgaaagatccgaatatcataagactccttggggtatgcgttcaggacgacccactctgtatgatcaccgactacatggagaacggagacctgaatcaatttttatccgcccatcagttggaggacaaggccgccgaaggagctccgggcgatggccaggccgcgcaggggccaaccatctcttatccaatgttgttgcacgttgccgctcagatcgcctcagggatgcggtacctagctacgctaaatttcgtgcaccgcgacttagcaactagaaattgcttagtaggggaaaatttcacgattaagattgctgattttgggatgagccgcaatttatacgccggagattattatagagtgcagggacgcgcggtgcttcctatacgttggatggcttgggaatgcatcctgatgggtaaatttacaactgctagtgacgtgtgggcgttcggcgtcaccttatgggaggtgttaatgttgtgccgggctcagccatttggacaacttactgacgaacaggtcatcgaaaatgctggtgagttcttccgagaccaaggaagacaggtttatttgagtagacctccagcatgcccacagggactgtacgagttgatgcttagatgctggtcacgtgagagtgagcagcgccccccttttagccaattgcatcgctttctagccgaggacgcccttaatacggtctag

SEQ ID NO: 12496 - RNA, 2742 nt, synthetic construct
  misc_feature 1..2742: note = source = /note="Description of Artificial Sequence: Synthetic coding sequence"
  source 1..2742: mol_type = other RNA
atgggacccgaggctttgtcgtccttacttttactcttgcttgtagctagcggtgatgcagatatgaaaggccatttcgaccccgccaaatgcagatatgcgcttgggatgcaagatcggactattcctgattctgacatatcagcttcctcctcttggtccgactccactgcagcaaggcattctcgcctcgaaagttcagatggcgacggcgcttggtgcccagccggcagcgtcttcccgaaagaagaggaatatctgcaagtggacctgcagagactgcacctggtagcactggtgggaacacaggggcgccatgccggcggtctgggtaaagaattctcaaggagctaccggctacgctatagtagggatggaaggcgctggatggggtggaaagaccgctggggtcaggaagtgatctctgggaatgaggaccccgaaggggtcgtcttgaaggatctgggcccacccatggtggcacggctggtgcgattctatcctcgtgctgatcgcgttatgtccgtttgcctacgcgtcgaactgtatggatgcctatggcgggatggattgctcagctacactgccccagtagggcaaaccatgtatctttccgaagcagtgtatctgaatgatagtacatatgacggtcacaccgtcgggggtctgcaatatgggggacttggacagttggcagacggtgtcgtggggctggacgatttcagaaaaagtcaagaactgcgcgtatggcctggctacgattacgttggctggagcaaccactccttctcttcgggctatgtcgaaatggagtttgagtttgaccgactccgtgcctttcaagccatgcaggttcactgtaacaacatgcataccctgggggctcgccttccaggcggggtggaatgcaggttcaggcgcggccctgcgatggcctgggaaggtgaacccatgagacataacttgggcgggaacttgggtgatccccgggcgcgagccgtgtcagtcccgcttggagggcgagtggcccgttttctccagtgtcgcttcctgttcgcgggaccctggctgcttttctccgaaatttctttcatctctgacgtggtcaataactcctctcctgctctaggcgggacttttccacctgctccttggtggccacccgggccccccccgaccaacttcagctctctggaactcgagccaagagggcaacagcccgtcgcgaaagctgaggggtcccctactgcaattttaattggatgtcttgttgccattatactgttgttactgctaatcattgctctaatgctgtggcgcctgcattggcggcgcctcctctctaaggcagagaggcgtgtgctcgaagaggagctgacagtacatctatccgtcccaggagacacaatacttataaataatcgaccaggcccacgtgagccccctccttaccaggaaccaagaccaagagggaatccaccccattccgccccttgcgtgcctaacggatctgctctgttgttaagcaatccagcatataggctgctcttggctacttatgccagaccgcccaggggacccggcccccctacccccgcatgggcgaagccgaccaatactcaggcatactcaggagactacatggaacctgaaaaacccggggctccactgctgccccctcccccacagaactccgtccctcactacgccgaagccgatatcgtcactttgcaaggcgtaactggcggtaacacgtacgccgtgccagcgctgcctccgggcgccgtgggcgatggaccccctagagtggatttcccccggtccagactgcggttcaaagaaaaactgggagaagggcaatttggagaagtccacctgtgcgaggtagactcaccacaggatcttgtcagcttggatttcccactgaacgtcaggaagggccatcctctgctcgtggcagtcaaaatcttacgccccgacgcgaccaaaaacgcacgaaacgacttccttaaggaggtcaagatcatgagccggctcaaggatccaaatattattaggctgttgggtgtgtgtgtgcaggacgatcccctgtgcatgattacagactacatggaaaacggcgatttaaatcagttcctttcagcccaccagctggaagacaaagcggcggaaggagcacccggcgacggacaggccgcccagggccccacaatcagctaccctatgctgcttcatgtcgctgcacagatagcatccggaatgcgatatctcgcgaccctcaacttcgtccatagggaccttgccacccgaaattgcttagtcggggagaatttcactattaaaattgctgacttcggaatgtcaagaaacctctacgcaggcgactattatagagtgcagggacgggccgtactgccaatacgttggatggcctgggagtgcatcctcatgggtaagtttaccacggcttcagatgtgtgggcttttggggtaacactctgggaagtcttaatgctgtgtagagctcagccttttgggcagctgaccgacgaacaggtgattgagaatgctggcgagttcttccgggaccaggggcggcaggtgtatttaagccgacctcccgcatgcccgcaaggcctttacgagcttatgttgagatgctggagtcgggaatcagaacagcgaccacccttctcacagcttcatcggtttctcgctgaggatgcccttaatactgtgtag

SEQ ID NO: 12497 - RNA, 2631 nt, synthetic construct
  misc_feature 1..2631: note = source = /note="Description of Artificial Sequence: Synthetic coding sequence"
  source 1..2631: mol_type = other RNA
atgggtcccgaggcactgtcctcactgctcttacttttgcttgtggcatcaggggacgctgatatgaaggggcatttcgaccctgccaagtgcaggtatgcgttggggatgcaagaccgtaccatacccgactctgacatctcggctagctccagttggagtgactcaaccgcagcccgacactcacgactggagagttccgatggcgatggcgcatggtgccccgccgggtcagtcttccccaaggaggaagaatacctgcaagttgacctgcagcggttacatttggtagcactagtgggcactcagggccggcacgctggcggactcggcaaagaattctctcgatcctaccgtctgcggtactctcgcgacgggcgtagatggatgggctggaaggaccggtggggacaagaggtgattagtggcaacgaggatccagaaggcgttgtcctgaaagatctcggccctccaatggtggcacgcttggttcggttctatccacgcgccgatagggtgatgagtgtatgcctgcgagtcgagttatacggatgcctgtggagggatggccttctcagctacacagcacctgttgggcagacaatgtacctgtccgaggcggtttacctgaacgattctacctatgatggacatacggtgggaggccttcaatacggaggactcggacagctggctgatggtgtggtcggcctggatgatttccggaagtcccaggaacttcgagtgtggccaggttacgactatgtgggttggtctaaccactcttttagctcgggctacgtcgaaatggagttcgagttcgatcggctcagagccttccaggcaatgcaggtgcactgcaacaatatgcacaccctaggggctagacttccaggcggcgtcgagtgcagatttcgccgcgggcctgccatggcatgggagggtgagcccatgcggcacaatctgggtggcaaccttggagatccacgagctcgggccgtgtccgtgcccctcggcggacgagtggcgcggttcctccagtgcaggttcttgtttgcaggcccctggctgctgttctccgagatttcctttatctccgacgttgtgaacaattcaagtcctgctttgggagggaccttcccccccgcaccatggtggccgccaggaccccccccgacaaattttagttcattggaactggaacctcgcgggcagcagccagtggcaaaggccgaaggcagccccacagcgattctaatcggatgtctggtcgcaatcatcctcctgcttctccttatcattgccctcatgttatggagactccactggcgaaggctactgtccaaggcagagcgaagagtccttgaagaagaactaacagtacacctgagcgtgcccggtgatactatactcataaacaaccgccctggcccccgggaaccccccccttaccaagaaccgcgccctcggggaaatcctccacacagcgctccgtgcgtgccgaacggaagcgcttacagcggcgactacatggaaccagagaagccaggcgcccctctgctgcccccccccccacagaacagcgttccgcactacgccgaggccgacatcgtcaccctccaaggggtcaccggaggtaacacctacgcagtcccagcactaccccctggcgcagtgggagatggacctccacgagtcgacttccctagatctagactgcggttcaaagaaaaacttggcgaaggtcagtttggagaagtgcatctatgtgaggtcgactccccccaggacttggtatctctcgacttccccctcaacgttcggaaaggccaccccctgctggtggctgtcaagatcctacgtcccgatgcaactaagaacgcaagaaatgacttcttgaaggaagtaaagataatgtcccgactgaaggatcctaatatcatcaggctcttaggcgtctgcgtgcaggacgacccactgtgtatgattaccgactatatggaaaacggcgaccttaatcagtttctgtcagcccaccagcttgaggacaaagcggctgagggagctcccggagacggacaggctgcccaaggccctacaatctcctaccccatgctactgcacgtggccgcacagattgcgagcggaatgcgttatcttgcaacactaaactttgttcatagagacctggctactcggaactgcctcgtaggggaaaacttcacgattaaaatcgccgattttggcatgtcaagaaacctctacgccggcgattattaccgggtccaaggcagggcggttctacccatcagatggatggcgtgggaatgtattctgatgggaaagttcaccacggcctcagatgtatgggcctttggcgtgacattatgggaggtgttgatgctttgccgggctcagccatttggtcaattgactgatgaacaggtgattgaaaacgctggggagttcttccgagaccaaggaagacaagtgtatctaagcagacctcctgcatgcccgcagggcctctatgaactgatgttacgatgttggagcagagagtccgagcagcggccgccgtttagccagcttcaccggttccttgcagaagacgcactgaatactgtctag

SEQ ID NO: 12498 - RNA, 2631 nt, synthetic construct
  misc_feature 1..2631: note = source = /note="Description of Artificial Sequence: Synthetic coding sequence"
  source 1..2631: mol_type = other RNA
atgggccccgaggcgctgtcttctctgctattgttgctgctggtcgcatctggagacgcagacatgaaaggacatttcgatcctgctaagtgccggtatgccctcggaatgcaggatcgcactataccggactcagacatttctgcatcatccagttggtcagattccaccgctgctcgacatagcagactggagagcagtgatggagacggcgcttggtgtccagcaggctctgtgttccctaaggaggaggaatacttacaggtcgatctacaacgcttacacctggtggcactggtcggaacacaaggacgacacgccggggggctcggcaaggaattctcccggtcttatcgcctgcggtactcgcgtgatggtagaaggtggatgggctggaaggataggtggggccaagaagtgatatctggcaacgaagatccagaaggcgtggtactgaaagatttgggaccgccgatggtagctcgactggtgagattctacccaagagccgaccgtgttatgtcagtttgcctccgggtggagctatacgggtgcctgtggagggacggtctattgagctacaccgctcccgttggccagaccatgtacctttcagaggcagtctatctcaacgattccacctacgacggacacaccgtcggtggcctccagtacggcggattgggacagctcgcggacggcgtagtaggcctggacgactttcggaaatcacaagagcttagagtttggcccggctacgactacgtgggatggtcaaatcattccttctcaagcggctacgtggaaatggagttcgagttcgaccggctacgagccttccaggccatgcaggttcactgcaacaacatgcacacactgggggctcgtttacctggaggtgttgagtgtcgattcaggcgtggtcccgccatggcttgggagggagagcccatgagacacaaccttggcgggaacctcggagatccccgtgcccgggcagtgagcgtgcccctgggcggacgcgtggctcgtttccttcaatgtaggttcctattcgccggaccgtggctgttattttcagagatctctttcatttcggatgtggtgaataattccagcccagcccttggcgggacttttccccctgccccttggtggcctcccggccccccgcctaccaatttctcatctctggaactggagcccagaggacaacagcccgtagctaaagccgagggaagccctaccgcaatacttatcggctgcctcgttgcaatcattctcttgctcctgctgattatcgctcttatgctctggagactgcactggaggcgattgctgagcaaggcagagcggcgcgtcctggaagaggaacttactgttcacctaagtgtccctggcgatacaatcctgataaacaaccggccaggccctagggagcctccaccttatcaggaacccagaccacgtggcaatcccccacattctgccccatgcgtaccaaatgggtctgcctattccggcgactatatggaaccagagaagcctggtgcacccctgctgcctccgcccccacagaacagtgtgccccattacgctgaagccgacatcgtgacattgcagggggtgacaggcggcaatacctacgctgttcctgcacttcctcccggagccgtgggagatggtccacccagagtcgattttcctcggtcacgcctgcgattcaaagagaagcttggcgaaggacagtttggagaagtgcacctgtgcgaggtggactcaccccaagacttagtgtccctggattttccgcttaatgtgcgcaaagggcaccccctgctcgtggccgtgaaaatcttgcggcccgatgccactaagaatgctagaaacgacttcctgaaggaagttaagatcatgagtcgactgaaggaccccaacataatcaggctcttgggagtttgcgtgcaagacgatccattatgcatgatcactgattatatggaaaatggcgacctgaaccaatttctgtctgcccaccaactcgaagacaaagcagccgagggcgctcccggcgacggtcaagccgctcagggaccaaccattagctaccctatgctcctccacgtggcagcgcagattgccagcggaatgcgttacctcgcaaccctgaattttgttcacagagacctcgcaactagaaactgccttgtgggagagaatttcaccattaagattgctgatttcggaatgagccgcaacttatatgctggagattactatcgcgtccaggggcgagccgtattgcccatcaggtggatggcatgggagtgcatcttaatgggcaagttcactaccgccagcgatgtgtgggctttcggagtgaccctatgggaagttctaatgttgtgtcgagcacagccatttgggcaactgaccgacgagcaagtgattgagaatgccggcgagttcttccgagaccaggggcgccaggtgtatcttagccgcccacctgcctgtccccagggtttatacgagctaatgctcaggtgctggtccagagagtcagagcagcgccctccctttagtcagctgcatcggtttctcgctgaggacgcactgaacacagtgtag

SEQ ID NO: 12499 - RNA, 2760 nt, synthetic construct
  misc_feature 1..2760: note = source = /note="Description of Artificial Sequence: Synthetic coding sequence"
  source 1..2760: mol_type = other RNA
atgggtccggaagctctgtcgtccctcctccttctactgttagtggcttctggagatgccgatatgaaaggccatttcgatcccgcaaaatgtaggtacgcgctcggcatgcaggatcggacaatccctgacagtgatatcagtgccagttcatcatggagcgatagtacagcagcaaggcactcccggctagagtcatcagatggcgatggcgcctggtgccctgctgggtcggtgttcccgaaggaagaagaatacctacaggtggatttgcagagacttcaccttgtcgctttggtcggaacacagggtcggcacgccggaggacttggcaaggaattttcccggtcctatcggctacgctattcccgggatggccggaggtggatgggatggaaagatcggtggggacaggaagtgatctctggcaatgaagatcctgagggagtggtcctaaaagacctgggaccaccaatggtggctcggctcgttaggttttatccccgcgcagaccgggtaatgtctgtctgcctgcgagtggagctttacggctgcctctggcgcgatggcctgctgagctacacagcccctgtcgggcaaacgatgtacctgagcgaagccgtttacctgaatgactctacctacgacggccacacagtggggggcctgcagtatggcgggctgggccaactcgcagatggggtggtcgggctcgatgatttccgtaagagtcaggagttgcgcgtttggcctggttacgactatgtggggtggtccaatcactctttttcttctgggtatgtggaaatggagtttgagtttgatagactgcgggccttccaggccatgcaggtacattgcaataatatgcacaccctcggtgcccgacttccagggggagtggagtgcaggtttagacgtggccctgctatggcatgggagggcgaacccatgcgacataatttggggggaaacctgggagatccaagagctcgcgcagtgtcggtgcccctggggggccgggtggccaggtttttgcagtgtcggttcctcttcgctgggccgtggttgctcttttccgaaatcagcttcatctccgatgttgtgaataattcgagccccgcactcggaggcacgttccctcctgccccttggtggccaccaggacctccaccgacaaatttctctagtctcgagttggaacctcgcggccagcaacctgtcgctaaggccgaaggcagcccgaccgccatccttatcggttgtcttgtagccatcattctgctgctcctgctgatcatcgctcttatgctctggagactgcactggcgcagattgctatccaaggctgaacggagagttttagaggaggaattgacagtccatttatccgtgcctggtgataccattctgatcaataaccggccaggtccgcgggaaccccccccgtaccaggagccccgaccaaggggcaatcctccccacagtgccccgtgcgtacccaatgggtccgcattgctgctctcaaatcccgcctatcgattgcttctcgctacttatgcaaggccccctcggggtccaggcccacctactcccgcctgggccaagcccacgaatacacaagcttacagtggcgactatatggagccggagaagccaggcgcgcctctcctgcctccccctccacagaattccgtccctcattacgccgaggcagacatcgtcacactgcagggagtgaccggcggcaatacctatgcagtacccgcgctgcctcctggagccgtgggcgatggacctccccgagttgattttcccaggagtaggctgaggtttaaagagaagctgggcgaaggacaattcggggaagtgcatctgtgcgaagtcgacagcccacaagatcttgtcagccttgactttcctctcaatgtacgtaaaggtcatccccttctcgttgcagtgaaaatccttaggccagatgcaacgaagaatgccagtttctcactgttttcccgaaacgactttctgaaagaggttaaaattatgtctaggttgaaggaccccaatattatcagattattgggagtctgtgtgcaggatgatcccctttgcatgataacagattacatggaaaacggagacctaaaccagtttctgagcgcgcaccagctggaggataaagccgctgagggagccccgggagatggccaggccgctcaaggccccacaatctcctaccctatgttgctgcatgtggctgctcagatcgccagtgggatgaggtacctagcgacactcaatttcgtacaccgggacctcgctacgaggaactgtctcgtaggcgagaatttcacaatcaaaatcgcagacttcggcatgagtaggaatctgtacgccggggactattatagggtccaggggcgggcagtccttccaatcagatggatggcctgggagtgtattttaatgggcaagtttactacagcctcagacgtctgggcattcggcgttaccctatgggaagtactcatgctgtgcagggcacagccatttggccagctgaccgatgaacaggtgatcgagaacgccggagaatttttccgagatcagggccggcaggtgtatctcagtaggcccccggcttgcccacagggcttgtatgagctaatgttacgctgctggagcagagaatcagagcagcgccctcccttcagccaactgcaccggtttctggcggaagatgctctcaacactgtttag

SEQ ID NO: 12500 - RNA, 1041 nt, synthetic construct
  misc_feature 1..1041: note = source = /note="Description of Artificial Sequence: Synthetic coding sequence"
  source 1..1041: mol_type = other RNA
atgctgaaaaagccactttctgcggtaacctggttatgtattttcatcgttgcgttcgtttcccaccctgcatggctccagaaactgagtaagcacaagacccccgcgcagccgcaactgaaggccgctaattgttgtgaggaggtaaaggagctcaaagcccaggtggccaacttatcctcccttctcagcgaactcaataagaagcaagaacgtgattgggtttcagtcgtgatgcaagttatggaactggagtcaaacagtaagcgaatggaatcccgtctgactgatgcagagtccaagtattctgagatgaacaaccaaattgacatcatgcagttgcaagcggctcagaccgtgactcagacaagtgcagatgccatttatgactgcagttccctctatcagaaaaattaccggatcagcggagtgtataagttacctccagatgattttttagggtcccctgaacttgaagtattctgtgacatggagacctcagggggcggctggaccatcattcaacgcaggaaatccggactcgtctctttttaccgcgattggaagcagtacaaacagggctttggctccatccggggggatttctggctcggtaacgaacatattcacaggctgtctcggcagccaacacgactacgggtggagatggaagactgggaaggcaacctacgttacgccgaatactcacattttgtcctgggtaacgagctgaactcctaccgactttttttagggaattacacgggcaatgtcggcaatgacgctttgcaataccacaataatacagcgttttccactaaagataaggacaacgacaactgcttggataaatgtgcccagcttaggaagggagggtactggtataattgttgtactgatagcaatctgaacggggtgtactatcgactgggcgagcacaataaacacctggatggaattacgtggtatggttggcacggaagtacctacagtctgaaaagggtggagatgaagataaggcccgaagactttaaaccctag

SEQ ID NO: 12501 - RNA, 1056 nt, synthetic construct
  misc_feature 1..1056: note = source = /note="Description of Artificial Sequence: Synthetic coding sequence"
  source 1..1056: mol_type = other RNA
atgaagggaagagcagtttcttttgatccacttgcctgtcagggactcaacgcatccccgggaagcctcacaagcccattgcgcagaattcggtccctgactggccgcgaagtgctgacacctttcccaggactcggcactgctgccgcacccgcccagggaggagcacatttgaagcctcacagcctcgttttgccgatcacagccctgccacctcccccactcgccttacgagggcgtcaagcgaccagtaaacttccaccttttctgagcagtccgttccccccttctttgtgtccctgggtgccagaccccggattcaaagagactgctttcctttacgccgtgagctcggcggcacttactcacactctggcccgcgcgtgcagtgccggcagaatggaacgctgtacatgtgatgactcccccgggcttgagtccaggcaggcatggcaatggggagtgtgtggcgacaacctgaagtattccaccaaattcttgtctaatttcctggggagcaagcgagggaataaggacctgagagcccgagccgacgcacacaacacccacgtcgggattaaggcagtgaaatctgggctacgcacaacctgcaagtgccacggcgtaagtgggagttgtgctgttagaacttgttggaaacagttgtctccgtttcgcgagaccggccaggtactcaagctacggtacgacagtgccgttaaggtttcatccgccactaatgaggctctgggacggctcgaactgtgggcacccgctagacaaggaagcttgacaaagggccttgccccacgcagcggggacctggtgtacatggaagactcaccgtccttctgcaggccttccaaatactcacccggcaccgctggcagagtatgttccagggaagcctcatgcagttcactgtgttgtgggcggggatatgatacccaatctagactagttgcattttcctgccactgccaggttcagtggtgttgctacgttgagtgccagcaatgcgtccaggaagagttggtctacacttgtaaacactag

SEQ ID NO: 12502 - RNA, 462 nt, synthetic construct
  misc_feature 1..462: note = source = /note="Description of Artificial Sequence: Synthetic coding sequence"
  source 1..462: mol_type = other RNA
atgaaacatcttaggccccagttcccccttattttggctatctattgcttttgcatgctccagatcccctcttccggcttcccccagcccctcgcagacccttccgatggactcgatatcgtccagttggaacagctagcatactgcctgagtcaatgggcccctctgagcagacagcccaaagacaatcaagatatatacaaacgattcctattccactatagccgtactcaggaggctacacacccagttaagacaggctttcctcctgtacaccctctgatgcacttggcggctaaactggccaaccgacggatgaaaaggatcctgcagcgtggttccggcaccgcagctgtcgactttacaaaaaaggaccatacagcaacatgggggcgacccttctttctctttagacctcgtaacggtcggaacattgaagatgaggcccaaattcaatggtag

SEQ ID NO: 12503 - RNA, 765 nt, synthetic construct
  misc_feature 1..765: note = source = /note="Description of Artificial Sequence: Synthetic coding sequence"
  source 1..765: mol_type = other RNA
atggccgctgcaagtgcaggcgccacccggctgcttctcctgctgctgatggcagtggcggccccaagcagggcgagggggtcagggtgtcgcgcagggacgggcgctcgtggggcgggtgccgaggggcgcgagggtgaggcctgcggcactgtggggctactgctcgagcattctttcgagattgacgattctgcgaacttccgaaaaagaggaagtctgttgtggaaccaacaagatggtacactcagtttatctcagcggcagctatccgaggaagagcgagggcgattgcgggacgtggcagcactgaacggcctttaccgcgtgcggatacctagacggccaggggcgctcgacggcctcgaagccggcggctacgtgtcaagttttgtgcctgcttgcagtctcgtggaaagtcatcttagtgatcagctgactctgcacgttgatgtggccggcaacgtggtcggtgtgtcagtggttactcatcctggcggttgccggggccacgaggtcgaggacgtggacctagaattattcaacacttccgttcagttacaaccccctacgaccgccccaggacccgaaacagctgcctttatagaacggcttgaaatggaacaagcacagaaagcaaaaaacccacaggaacagaaatcattttttgcgaaatactggcatattattttaggcggcgcagtcttgctcacagctctcaggcccgcagcccccgggccagctccaccaccacaagaggcgtag

SEQ ID NO: 12504 - RNA, 810 nt, synthetic construct
  misc_feature 1..810: note = source = /note="Description of Artificial Sequence: Synthetic coding sequence"
  source 1..810: mol_type = other RNA
atggcagccgctagcgcaggtgctacccggctgttactgctgctcctgatggcggttgctgcgcctagtcgcgccaggggcagcggctgccgtgctgggacaggggcccgtggcgctggagccgaaggaagagagggagaggcatgtggcactgttggcctgttattggaacatagttttgagatagacgatagcgccaatttccggaagcgcggctccttattatggaaccaacaggacgggacattgagcctgtcacaacgtcaattgtctgaggaggagagagggaggcttagagacgtggctgcattgaacgggctgtacagggtgcggatacctaggcgcccaggggcgttggacggattggaggccgggggatatgtgtccagcttcgtacccgcctgctcactggtcgaatcccacttgtctgatcagctcaccctgcatgtagatgtggccggaaatgtcgtcggagtttcggtcgtcactcatcccgggggctgccggggccatgaggttgaagacgtcgacttggagctctttaacactagcgtgcagctgcaaccgcccacgaccgcgccaggccccgaaaccgcagcattcattgaacgtcttgagatggagcaagctcagaaggcaaagaacccccaagagcagaagtcattttttgccaaatactggatgtacatcatccctgtggttctctttttaatgatgtccggggcccccgatacaggaggccagggaggtggcggtggaggaggtggtgggggaggatccgggcggtgctgcgttccccctagtctgtag

SEQ ID NO: 12505 - RNA, 480 nt, synthetic construct
  misc_feature 1..480: note = source = /note="Description of Artificial Sequence: Synthetic coding sequence"
  source 1..480: mol_type = other RNA
atgtcttccccacagcgccgaaaagctatgccatgggccctttccctcttgcttatgggatttcaacttcttgtcacctatgcgtggtgttctgaggaagaaatggggggcaacaataagatagtccaggatcccatgttcctggccaccgtggagttcgccctgaatacctttaatgtgcaatcaaaagaagagcacgcttatcgactccttcgagttctgtcatcatggagagaggattcaatggatcgcaaatggcggggaaagatggtattctctatgaacctgcagctacggcagacggtgtgtagaaaatttgaggatgatatcgacaattgccctttccaagagagcctcgaacttaataatgtgcggcaaggaataagcttccctcaggtgcacagttgcggatgctgcatgggctgcggcgtcgggacaggtgcggcggataaggcaatacctcgagacaaaggaaaatag

SEQ ID NO: 12506 - RNA, 1737 nt, synthetic construct
  misc_feature 1..1737: note = source = /note="Description of Artificial Sequence: Synthetic coding sequence"
  source 1..1737: mol_type = other RNA
atgttacttctcctcctgctggcccccctgttccttcgcccacccggcgccggcggggcacagacacccaacgccacgtctgaagggtgtcagatcatccaccctccatgggaaggtgggatccgatatcgcggccttacgagagaccaggtgaaagctatcaattttctccccgttgattacgaaattgagtatgtatgtagaggcgagagagaagttgtcggcccgaaggtgcgcaagtgcctagcaaatgggtcttggaccgacatggacacaccatctcgatgtgtgcgcatatgttccaagagttatcttactctggagaatggcaaagtgttcctaacaggcggagatctccccgctctcgatggagccagagtggactttagatgtgacccggactttcatctcgttggctcttccagatcaatctgctctcaagggcagtggtcgacgcccaagccccactgtcaggttaacaggacccctcacagtgagagacgggctgtgtatatcggcgccctgttcccgatgtccggcggctggccaggaggacaggcgtgtcagccagcggttgaaatggcactcgaagacgtaaatagccgccgcgacatcttacccgattacgaactgaaattgatccatcatgattccaaatgtgacccgggccaggctacaaagtacctgtacgaactcctctataacgatcccatcaagataatcctgatgccagggtgcagcagtgtatctactcttgtggcagaagccgcacggatgtggaaccttatcgtgctgtcgtatggctcttcctcccccgctctctctaacaggcagaggttcccaactttcttcaggactcacccatccgccaccctgcataatcccaccagagtgaaactatttgagaagtggggctggaaaaagatcgctaccatccaacagacgacagaggtattcacctcaacccttgacgacttagaagagcgggtgaaggaggctgggatagagattacattccggcagtccttttttagtgacccagccgtcccagtaaaaaatctgaagaggcaagatgctaggattatagtcgggttgttctacgagactgaagctagaaaagtattttgtgaagtctataaggagcgactgtttggtaagaaatatgtttggtttctgattggatggtacgctgataactggttcaaaatctacgacccaagcataaactgtaccgtcgatgaaatgacagaggccgtcgagggacatattactaccgaaattgtaatgctaaatccagcgaacacccgcagcatttccaacatgacgagccaagagtttgtagagaaactgactaagaggcttaaaaggcaccctgaggaaacgggcggcttccaggaagctccacttgcctacgacgctatttgggcgctcgccctggctctgaataaaacatccggagggggcggtagaagcggggtgaggctggaggattttaattacaacaaccagactatcacggaccaaatttaccgtgccatgaacagctcctcatttgagggcgtgagcggtcacgtggtttttgatgctagcggcagccgaatggcatggaccctcattgaacagttgcagggaggcagctataaaaaaatcggctactatgacagtacgaaagacgatctttcctggagtaaaacggacaaatggatagtgataagcagaacacattccccaacctag

SEQ ID NO: 12507 - RNA, 444 nt, synthetic construct
  misc_feature 1..444: note = source = /note="Description of Artificial Sequence: Synthetic coding sequence"
  source 1..444: mol_type = other RNA
atgctaggcctcccttggaaaggaggtttatcttgggcacttttactgcttctcctgggttcccagatattacttatctacgcatggcattttcacgaacagagagactgtgatgagcacaacgtaatggcccgctatctcccagccactgtggaatttgccgtccacacatttaatcagcagagtaaggactactatgcatatcgcctcggacacattctgaatagctggaaagagcaagtagagtcgaagactgtgttcagtatggagctgctgctcggaagaactagatgcggcaaatttgaagatgatatcgacaattgtcacttccaggagagcaccgagctcaataatacctttacctgcttcttcacaatctcaacgcggccatggatgacccagttttccttactcaacaaaacatgcctggaaggattccattag

SEQ ID NO: 12508 - RNA, 444 nt, synthetic construct
  misc_feature 1..444: note = source = /note="Description of Artificial Sequence: Synthetic coding sequence"
  source 1..444: mol_type = other RNA
atgtggtccttacccccatcccgagctctgagctgtgccccgctcctgctactctttagctttcagtttctggtaacctacgcctggcggtttcaagaagaagaagaatggaatgatcagaaacagattgccgtgtatctgccacctacgctcgaattcgccgtgtacacctttaacaagcaatcaaaggactggtatgcatacaaattagtccccgtcttagcgtcctggaaggaacaggggtacgataaaatgacattctctatgaacctacaactgggaagaaccatgtgtggcaagttcgaggacgatattgacaattgtccatttcaagagtcaccagaactgaataacacctgcacttgctttttcacaattggcattgaaccttggcggacccggtttgacctgtggaataaaacctgttccggcggacactcttag

SEQ ID NO: 12509 - RNA, 2535 nt, synthetic construct
  misc_feature 1..2535: note = source = /note="Description of Artificial Sequence: Synthetic coding sequence"
  source 1..2535: mol_type = other RNA
atgggcccgggagccccttttgctcgcgtcggttggccactgccattactggtggtgatggcagcaggagtagcgccagtctgggcctctcactcaccacacctaccgagacctcactcaagagtgccccctcacccgtcttccgagaggagggccgtctatatcggcgccctattccctatgagcggggggtggcctggtggtcaggcctgccagccggcggtagagatggccctcgaagatgttaattcacgacgtgatatccttcccgattacgagcttaagttaatacaccacgatagtaaatgcgatcccggccaagcaactaagtatctgtatgagctgttatacaatgaccccattaagatcattctgatgcccgggtgcagctccgtgtccacgcttgtggccgaagccgctagaatgtggaacctcatcgttctgagctacggtagcagctcccccgccctgtctaacaggcagagatttccgaccttcttcagaacccacccttctgctacgttgcacaatcctaccagagtcaaactgttcgagaagtgggggtggaagaaaattgctactatccaacagacgaccgaagtgtttactagtacactcgacgacctggaggaacgcgttaaggaagccggaattgagataactttcagacagtctttctttagcgaccctgccgtgcccgtcaagaatcttaaaagacaggatgctcgtattatcgtgggcctgttttacgagacggaggcacgcaaagtcttttgtgaagtgtataaggagaggctctttggcaaaaaatatgtctggtttcttattggctggtatgctgataattggtttaaaatttacgacccctcaattaactgcaccgtagatgaaatgactgaagcagtggaagggcacataaccaccgagatcgtgatgctgaatcccgcaaacacacggtcgattagcaatatgactagccaggaattcgtggaaaagctgaccaagcgcttgaagcgtcaccctgaagaaacaggcgggttccaagaggcccccttagcatacgacgccatctgggccctggccctggctcttaacaagacctccggaggagggggacgctcaggggtgcggttagaggactttaactataacaatcagacaataaccgatcaaatctatcgagcaatgaactcctcttccttcgagggagtctccggccatgtcgtgtttgatgccagtggatcgcgcatggcatggactttaatagagcagctacagggcggaagttataagaaaatcggctattacgattcaaccaaggacgaccttagctggtctaaaacagataaatggatcggcggcagcccaccagcggaccagactcttgtaataaagacttttcggttcttaagtcagaagctttttatttctgtgtcagtgctgagctctctcggaatcgttctcgctgttgtctgcctttcattcaatatttacaactcacacgtccggtacattcagaactctcagcctaatcttaacaacttgacagcagtgggatgctccctggccttggccgctgtgtttcctctggggcttgacggatatcacatcggcagaaatcagtttccttttgtgtgccaagccagactctggctcctcggacttgggttttccctgggatatggatctatgtttacaaagatttggtgggttcatacagtgttcacaaagaaggaggaaaagaaggaatggcgaaaaaccctagaaccatggaagttatatgccaccgtgggactgctagtgggcatggacgtgctcacactggcgatttggcaaattgtggacccattacacagaactattgagacattcgcaaaggaagagcccaaggaggatattgacgtgagtatccttccccagcttgagcattgtagcagcagaaagatgaacacttggttgggcatcttctacgggtacaaaggactgctgctcctgcttggcatcttcctggcttatgaaactaaatcagttagcaccgagaagatcaatgatcatagagcagtgggcatggccatttataacgtcgccgttctttgtctgataacggcacctgtgaccatgatattaagcagccaacaagacgccgccttcgctttcgcatcattagccatagtcttcagttcttatatcacattggtggtgctctttgtgcctaaaatgagacggcttatcacaaggggcgagtggcagtccgaggcgcaggatacaatgaagactggctcttcgactaataacaacgaggaagagaagtcccggctgcttgagaaagaaaacagagaactggagaaaattattgcagaaaaggaggaaagagtgagcgaattacggcatcagttacaatctcggcagcagcttcgcagtcgcaggcaccctcctacccctcctgagccttccggcggactgccgcgcggtcctcctgagcctccagaccgtttaagttgtgacgggtcacgcgtacacctgttgtataaatag

SEQ ID NO: 12510 - RNA, 2700 nt, synthetic construct
  misc_feature 1..2700: note = source = /note="Description of Artificial Sequence: Synthetic coding sequence"
  source 1..2700: mol_type = other RNA
atgctcctcctgttgctcctggcaccactgttcctgcgtccccccggcgcagggggagctcaaacgcccaacgcaacttcggaggggtgccaaataatccatccgccttgggagggcggaattagataccggggcttgacccgcgatcaggtaaaagccattaacttcctgcccgtggactatgagattgagtatgtttgtcgtggggaacgtgaggtcgtgggtcccaaagtcagaaagtgtctggctaatggctcttggaccgacatggacacaccatctagatgcgtcaaccgtaccccacattctgagcgaagggcagtctatatcggcgccctgtttccaatgtcaggaggatggccaggggggcaggcttgccagcctgctgttgagatggctctcgaggatgtcaactccagacgagatatcctgccggattacgagctgaaactgatccatcacgattctaagtgcgaccccggtcaggctactaaatatctgtatgaactgttgtacaacgaccccataaaaataatcctcatgccaggttgttcatctgtgtcaacgctcgtcgcggaggccgccaggatgtggaacctcatagtgctatcctatggctcaagctccccggctttaagcaatcgacagaggttcccaacatttttcagaacacacccctcggcgaccctgcacaaccctacccgcgtgaaactgtttgagaaatggggttggaaaaaaattgcaaccatccagcaaaccaccgaggtgtttacatcaacactcgatgatctcgaagaacgagtgaaggaggctggcattgagatcacattcaggcaaagttttttttcagacccggcggtgcccgtgaagaacctgaagcggcaggacgcaagaattattgtgggactcttctacgagaccgaggctagaaaagtgttttgtgaagtgtacaaggagcgcttgtttggaaagaagtacgtgtggtttttgatcgggtggtatgctgacaattggtttaagatctatgatccatcaattaattgtactgtggatgagatgacagaagcggtggagggtcatattacaactgaaattgttatgctcaaccccgccaacaccaggagcatctcaaacatgacctctcaggaatttgtagagaaactcactaagcgactgaaacgccatccagaagaaaccggaggcttccaggaggccccactcgcctacgatgcgatatgggcacttgctctggccttaaataagacaagtggtggcggcggcagaagcggtgtccggttagaggatttcaattacaataatcaaaccatcactgaccagatctacagagcgatgaattcgtcttcgttcgaaggagtgagcggacatgtcgtctttgatgcctctggctccagaatggcatggactttgatagagcagttgcaaggcgggtcctacaaaaagattggttactacgatagcaccaaagacgatctatcctggtccaaaacagataaatggatcggaggaagtccccctgctgaccaaacattagtgattaagacattccggtttctttcccagaaactcttcatttcggtgtcagttctgtcttctctcggtattgtgttggccgtggtatgcttatcctttaacatctacaatagtcacgttcggtatatacaaaattctcagccaaatctgaacaatctgaccgccgtcggctgctcactcgccctggccgccgtcttccccttggggctcgatggctatcacatcggcagaaaccaattccctttcgtgtgtcaagctagattgtggctgttgggactggggttttccttggggtacggctccatgttcacaaaaatctggtgggtccataccgtgttcacgaaaaaggaggagaagaaggaatggagaaagacactcgaaccttggaagctgtacgcaaccgttggtctgctggtaggaatggacgtgttgaccctggccatttggcagatcgtggatccgctacatagaaccatcgagaccttcgccaaagaagaaccaaaggaggatattgatgtttcaattctgccgcagttggaacactgtagctcccgtaaaatgaacacgtggctcggaattttttacggctacaaagggctgttgttactgctgggtatctttctggcttatgagaccaaaagcgtgagtacggagaagataaacgaccaccgagccgtcggaatggccatttataatgtagctgtgctttgcctaatcaccgctcccgtaaccatgattctgtcctctcagcaagatgcagccttcgctttcgcctcactggctatagtctttagttcatacattacactagtagtgctgttcgtgcccaaaatgagaagacttataacacggggcgaatggcagtctgaagcccaggataccatgaagactggatctagcaccaacaacaatgaggaggagaaatccagattgcttgaaaaggaaaatagggagctggagaaaataattgctgagaaggaagagcgggttagcgagttacgccaccagctgcagagtaggcagcagctacggtccaggaggcacccccccacccctccggaaccctccggcggattgccacgcggccccccagagccccccgatagactgtcatgcgacggatctagagtgcatctcctgtacaagtag

SEQ ID NO: 12511 - RNA, 2886 nt, synthetic construct
  misc_feature 1..2886: note = source = /note="Description of Artificial Sequence: Synthetic coding sequence"
  source 1..2886: mol_type = other RNA
atgctgctcctgctcctactagcaccactctttctgcgtcctccaggagccggaggcgcacagacacctaacgccacatccgaaggttgccaaatcatccacccaccgtgggaggggggaattcgctacaggggactgacccgggatcaagtgaaggcaatcaactttctgcccgttgactatgagatcgaatatgtctgtcggggcgagcgcgaagtggttggaccaaaggttaggaagtgccttgctaacggttcctggacggatatggacactccatcacgctgtgtgcggatctgctctaagagttatttgacactcgagaatggtaaagttttcttaacggggggcgacctcccggccttagatggcgcgcgggtggacttccgatgtgaccctgattttcacctggttggaagcagccgcagtatatgtagccagggacagtggagcacccccaaaccacactgccaggtgaaccgcacccctcacagcgagaggagggcggtgtatattggagcccttttccctatgtcaggcggatggcccgggggacaagcctgccagcctgctgtggagatggctttagaggacgtgaactcccgaagagacatcctgcctgattacgagcttaaattaatccaccacgatagcaaatgcgatcctggccaggccaccaagtatctatatgagctgctgtataatgatcccataaaaatcatactcatgccaggctgttcttcagtttcaacactggttgctgaagcagctagaatgtggaatctgatagtgcttagctatggaagctctagtcccgctctaagtaatcgccagaggttccccactttcttccgcactcacccaagcgcaaccctccataacccaacccgcgtcaagctcttcgaaaaatggggatggaaaaaaatcgcgacaattcagcagactactgaggttttcacctcaacacttgatgatctggaggagcgagtcaaagaagccggtatcgagataacctttcgtcagagtttctttagcgaccctgcagttcctgtcaaaaacttgaaacgtcaggacgcgcgcattatcgtgggcttattttatgagaccgaagcaagaaaggtgttctgcgaggtgtacaaagaacgactgtttggtaagaagtatgtgtggttcctgataggatggtatgctgacaactggtttaaaatttacgatccttctatcaactgtacagtcgatgaaatgacagaagccgtggaagggcatatcacaacagaaatcgtgatgctaaatccagctaacactaggagcatcagtaacatgactagtcaagagttcgtggagaaactcacaaagcgattgaaacggcaccccgaggagacaggaggattccaggaggcccctttagcatatgacgctatttgggccctggccttggctttgaacaaaaccagcggcgggggcgggcggtccggagtgaggttggaagatttcaattataacaaccagactatcaccgatcagatatatcgggctatgaacagtagcagttttgaaggtgtcagcggccacgtcgtgtttgatgcatctggatcccgcatggcctggactttgattgaacaactccaggggggctcttacaaaaagatcggctactatgattccactaaggacgatctgtcatggtctaagaccgacaagtggatcgggggttctccccctgcggatcaaactttagtcatcaagacctttagattcctctcacagaaacttttcatttcagtatccgtgctatcgagccttgggatagttctggccgtggtgtgcctgagtttcaacatctacaactcccacgtccggtacatccaaaatagtcagccgaacctgaataatttaaccgccgtcggttgttcactggctctggctgcggttttcccactgggtctggacggctaccacatcggaagaaatcagtttcctttcgtgtgccaggcccgtctttggctcctaggcctgggattttccttagggtacggctctatgttcaccaaaatctggtgggtgcataccgtgtttacaaaaaaagaggaaaaaaaagagtggagaaaaacacttgaaccttggaagctgtacgccactgttgggctgctagtgggaatggacgtgctgacactggccatttggcagattgtggatccactgcaccgcacaatcgagacttttgccaaggaagaacctaaggaggacattgacgtgtccatcctcccgcagctcgaacactgtagcagcaggaagatgaacacttggctgggcatcttttatgggtacaaagggctgctgctgcttctgggcatcttccttgcctacgaaaccaaaagcgtcagcacggaaaagatcaatgaccacagggccgttggcatggctatctacaacgtcgccgttttgtgcctgatcaccgcccccgtcacaatgatcctttcatcgcagcaagacgccgcgttcgcattcgcatcactcgccatcgtgttcagttcatacataacactggtggttctcttcgtccctaagatgcggaggttgattacgagaggggaatggcagtccgaagcacaggacacgatgaaaactggcagtagtaccaataataatgaagaagaaaaaagccgcctgctagagaaagaaaatagagagctcgagaagatcatcgcagaaaaagaggagcgcgttagtgagttgcgacaccagctccagtcccggcaacaattacgcagcagacgccaccctccaacccctccggaaccttccggtggcttacctcggggaccaccagaacctcctgatagactatcttgcgatggatctagggtccacttactctataaatag

SEQ ID NO: 12512 - RNA, 882 nt, synthetic construct
  misc_feature 1..882: note = source = /note="Description of Artificial Sequence: Synthetic coding sequence"
  source 1..882: mol_type = other RNA
atgaacaatttgtccttttctgaactctgctgtctgttttgctgccctccatgtcccggtaaaatagcaagtaaactagctttcctccccccggatccaacttacacccttatgtgcgacgaatccggttcgcggtggaccctccaccttagcgaacgagcagattggcagtactcctcaagggaaaaggacgctattgaatgctttatgactaggactagtaagggaaaccgtattgcctgcatgttcgttaggtgcagccctaacgcaaaatacactctgctgttctctcacgggaatgcggtcgacttgggacaaatgagtagtttctatattggtctgggctctagaataaactgcaacatttttagttatgactacagcggctatggcgcctccagcgggaagccaacggaaaaaaatctttacgcagatattgaagcggcttggctggccctgcgcacacgatatggtattaggccagaaaacgtcatcatctatggacagagcatcggaactgttccctccgtcgaccttgctgcaagatacgaatccgcggccgtgatcctccatagtcccttaacatccggcatgcgcgttgccttcccggacacaaaaaagacttactgctttgatgcatttccgaatatcgataaaatctcaaagatcacttcccccgtgctaatcatccacggtacagaggacgaagtcatagacttttcacacggattagccctctttgaacggtgtcaaaggcccgtggagcctttgtgggtagagggagcaggacacaatgacgtggaactgtatggccagtatctggaacggctcaaacagttcgtatcccaggagttggttcaaaagcataaagagggaaagtag

SEQ ID NO: 12513 - RNA, 1155 nt, synthetic construct
  misc_feature 1..1155: note = source = /note="Description of Artificial Sequence: Synthetic coding sequence"
  source 1..1155: mol_type = other RNA
atgtggtatgtcagcactcgcggagttgcccccagagtgaactttgaaggtgctcttttttctggctatgcccctgacggtggcctgttcatgcccgaagaactcccccaactcgaccgcggcacattatgtcagtggtcaactctatcgtaccctggtctcgtcaaggagctgtgcgcactgtttattggctccgaacttctccctaaagacgagctgaacgacttgattgatcgcgctttctcccgatttagacatcgcgaagtagtacacctgagccggcttaggaacggcctaaacgttctggagctttggcatggcgtgacttatgcattcaaggaccttagtctctcatgcacaacgcaattcctgcagtacttcctcgagaaaagagagaagcacgttaccgtcgtcgtgggcacatctggagatacggggagcgcggctattgagtccgtccagggtgccaaaaacatggacattatcgttctgctgccaaaaggacactgcactaaaattcaggaacttcaaatgactaccgtgctgaaacaaaacgttcatgtcttcggcgtcgaaggcaattctgatgaactcgatgaaccgataaaaaccgtcttcgccgatgtcgccttcgtaaagaaacacaacttaatgagtcttaactctatcaactggagtagagttctcgtccaaatggctcaccatttctttgcctattttcaatgtaccccctctctggacacacacccactaccgctggtggaggtagtggtacccaccggtgctgcaggaaacctggctgctggctacattgcccagaaaattggtctgccaattagactcgttgtggcagtgaatcgcaatgacattatacatcgcacggtgcaacagggcgatttctctctctctgaggcggtcaaatccaccttggcctccgctatggacatccaagtaccttacaatatggaaagggtgttttggttactcagcggttccgactcccaggtaaccagggccctcatggagcaatttgaacgaacccaatccgtgaatttgcctaaggagttgcactcaaaacacagccctgtgctccctcgtccctgtctgtgctcccaggtgcctggcagctgtccgggatgctggcccgacccctag

SEQ ID NO: 12514 - RNA, 2889 nt, synthetic construct
  misc_feature 1..2889: note = source = /note="Description of Artificial Sequence: Synthetic coding sequence"
  source 1..2889: mol_type = other RNA
atgttgcgtcgaccagctccggctctcgcccctgccgccagactgctgttagcaggcctgctctgcggagggggtgtctgggctgcccgcgtgaataagcataagccttggctcgaaccaacgtatcacggcattgtcacagagaatgataataccgtcctccttgaccctccacttatcgcactagacaaagacgcgccacttaggtttgcagagtcctttgaagtcaccgttacgaaagagggggagatatgtggattcaagatccacggccagaacgttccattcgatgctgtggtcgtggacaagagtaccggagaaggtgtgattagatctaaagaaaagttagattgtgagctccagaaagactacagcttcaccatccaagcgtatgactgtggcaagggcccagatggtactaatgtgaagaagtcccacaaggcaactgtgcatatccaggttaacgatgtgaacgaatacgccccagtttttaaggaaaagtcttataaagcaactgtcatagaggggaagcagtatgactctatcctccgagtggaagccgtggatgctgactgctccccgcagttcagccagatatgcagttatgaaatcatcaccccagatgtccctttcactgttgataaagatggttacattaagaatacagagaagttgaactatggtaaagaacaccaatataaactcactgtcacagcctatgattgcgggaagaagcgggctactgaggatgtgcttgtgaagatcagtattaagcctacgtgtacaccagggtggcagggctggaataaccgcattgagtatgaacccggcacaggagcactggcggtttttcctaatatccaccttgaaacatgcgacgagcctgtggcctcagttcaggcaactgtggagttagagacttcccacattgggaagggatgcgatcgtgatacttacagtgaaaagtctctgcatagattatgtggggctgctgcaggcaccgcagaactcctgcccagcccatcaggatctctaaactggaccatgggcttacctaccgataatggccacgactccgaccaggtctttgaattcaacggcacccaggccgtcaggatcccggacggcgtggtcagtgtgagcccaaaggaaccctttaccatttctgtctggatgagacatgggccattcggacgtaaaaaagagaccatcttatgttcttccgataagactgatatgaaccgtcaccattatagtctttacgtccatggttgccggctgatattcctttttagacaggaccctagcgaagaaaaaaagtacagaccggctgaattccactggaagctcaatcaggtgtgcgatgaagagtggcatcactacgtgctcaacgtcgaattcccctccgtcacattatatgttgatggaacaagccacgaacctttctccgtgactgaggattatccccttcacccatcaaaaattgagacgcagctcgtcgtaggagcttgttggcaagggggcgatcttcatatgacacagttcttcaggggtaatctggcagggctaaccctcagaagcggcaagttggctgataaaaaggtgatcgattgcctgtatacatgcaaagagggccttgacctgcaagtgctcgaagactctggccgcggagtacagattcaggctcacccaagtcagctggtgctaaccctggaaggagaagatctgggtgaactggacaaggccatgcagcacatttcttacctcaattcacgccagtttcccacacctggtataagacggctgaagatcacctcaacaataaaatgcttcaatgaagccacttgcatttctgtgccacccgttgacgggtatgttatggtgctccagccggaggaaccaaaaatttccttgagcggggtccatcacttcgctagggcagcgagcgagttcgagtccagcgaaggcgtgttcttatttccagaactgcgcataatctcaacaatcactcgcgaagtcgaaccagaaggggatggagccgaagaccccactgtacaggagtccctcgtttccgaagagattgttcacgacttagatacctgcgaagtaacggtcgagggcgaagagctgaaccacgagcaggagtccctggaggttgatatggcacgcttacagcagaagggcattgaagtcagcagcagcgaacttggcatgacctttacaggggtagacaccatggctagttacgaggaggtactccatcttcttaggtatcgcaactggcatgcccgcagccttcttgatcgtaaatttaaactaatctgtagtgaacttaacggccggtatatcagcaacgaatttaaagtggaggtgaacgtgatacacactgccaaccccatggagcatgcaaaccacatggcagcccagccacagtttgtacaccccgaacacaggtcgttcgtagatctcagcggacataatcttgccaaccctcatccatttgctgtggtgccatcaacagccacggttgtgatcgtggtttgcgtctcctttctggtcttcatgattatcctgggggtcttcaggatccgagccgcccaccgccggactatgcgagatcaagacaccggtaaggaaaacgagatggactgggacgactcagcattgactatcaccgtgaatcccatggaaacatatgaagatcagcattcatcagaagaagaggaggaggaggaagaggaggaggagtccgaggacggggaagaggaagatgacattacatccgccgagtctgaaagctccgaggaagaagagggggagcagggagacccccagaacgcgacacgccaacaacagttagaatgggatgactctactttaagttattag

SEQ ID NO: 12515 - RNA, 2946 nt, synthetic construct
  misc_feature 1..2946: note = source = /note="Description of Artificial Sequence: Synthetic coding sequence"
  source 1..2946: mol_type = other RNA
atgctcaggagacctgcacccgcactggcccccgcggcacgacttctgttagcaggtctgttatgcggaggaggagtttgggccgcgagggttaacaagcataaaccatggctagagccgacctaccacggaatcgtcacagaaaacgataatacagtgctgctggaccccccactgattgcccttgacaaggatgcacctctgaggtttgctgagagcttcgaggtgactgtgaccaaagagggagagatatgtggatttaaaatacacggacagaacgtccctttcgatgcagtcgtggtcgataagtcaaccggcgagggggtgatccggagcaaagagaagctggattgtgagttgcagaaggattattccttcacaatacaggcttacgactgcgggaaggggcccgacggtaccaatgttaagaagtctcacaaagcaacagtccacatccaagtgaacgacgttaatgagtatgccccggtgtttaaggaaaaatcatataaagctaccgtgatcgagggaaagcagtacgacagcattttgcgagtagaagccgtcgacgctgattgctccccgcagttctctcagatttgtagttatgaaatcattacgcctgatgtgcctttcacggtggacaaggacggatacattaagaataccgagaagctgaactacgggaaagaacaccaatacaaattgacggtgactgcgtatgactgcggcaagaagcgggccacagaggatgtgctggtcaaaatttctatcaagccaacctgtacccctgggtggcaggggtggaacaaccgtatcgaatatgagcctggtaccggagcactcgccgtgtttccgaacattcatcttgagacctgtgatgagcctgttgcttccgtgcaggccaccgtcgaactcgagacatcgcacattggaaaaggttgtgacagagacacatactcagagaaatcattacacagactttgtggcgccgcggcaggcaccgccgagctgctaccatcaccttcgggcagccttaattggacaatggggctgcctacagacaacggacacgacagcgatcaggtgtttgagtttaatgggacacaggcagtgagaatacccgacggggtggtttccgtttcccctaaagagccctttaccatttctgtctggatgagacacggcccattcggaaggaagaaggagaccattctgtgtagcagtgacaaaacagacatgaatcgacaccactattcgttatatgtgcatggttgccgacttatatttctgttcaggcaggatcccagcgaggagaagaagtacagaccagcggaatttcactggaagctcaaccaagtatgcgacgaggagtggcaccattatgtcctcaatgttgagtttccaagcgttaccctgtacgttgatggcacttctcatgagccgttttccgtcaccgaggactacccacttcacccatccaagatcgaaactcaactggtcgtcggagcgtgttggcaggaattttctggcgtcgaaaatgataacgagaccgaaccagtcacagttgccagtgcagggggagacctgcacatgactcagttctttcgggggaatctcgccggactgaccctacgaagcggcaaactcgccgacaagaaagtgattgactgtctgtacacctgcaaagaaggcctggatttacaggtccttgaagattccggcaggggagtgcagattcaggcccatccttcccagctcgtgctgaccctggaaggcgaggatcttggggagcttgacaaggccatgcagcacatctcctatctcaactcacgccagtttcctacacccggaattcgtcggcttaagataacttcaacaatcaaatgtttcaacgaggctacatgcatctcggtcccacccgtggatggctatgtgatggttctgcagcctgaagagcctaaaatctcgctctccggcgtgcatcacttcgcaagagcggcatcagagtttgagtccagcgagggagttttcctctttcctgaactgagaataatcagcactatcactcgtgaggtggagcccgagggcgatggcgccgaggaccccactgtccaagagtccttggtgtccgaagagatagtccacgatttagacacctgtgaggtcactgtggaaggagaggaattaaatcatgagcaggaatctcttgaggtggacatggctagactgcagcagaaaggaattgaggtgtcgagctccgagttgggtatgaccttcacaggggttgataccatggcaagctatgaagaagttttacatctattgaggtatcggaattggcacgcacgctctcttctggaccgaaaatttaagctgatctgttccgaacttaacggacgctatatctctaacgagttcaaggtggaggtaaacgtgatccacaccgctaaccctatggagcatgccaaccacatggccgcacaaccccaattcgtacaccccgagcatcggtccttcgtggatctttcggggcataatctcgcaaaccctcatcccttcgctgtagtaccaagtaccgctaccgtcgttatcgttgtctgcgtttcgtttctggtgttcatgattattctcggcgtattccggattagagctgcccaccgcaggacaatgcgcgatcaagataccggaaaggaaaacgagatggattgggacgactccgcactgacgattactgtgaaccctatggaaacttacgaagatcaacatagtagcgaagaggaggaggaggaggaggaggaggaagagtccgaagacggggaggaggaagatgacattacatccgcagagagtgagtcaagcgaagaagaggaaggcgagcagggggaccctcagaatgcaacgagacagcaacagcttgaatgggacgactccactctgtcctactag

SEQ ID NO: 12516 - RNA, 678 nt, synthetic construct
  misc_feature 1..678: note = source = /note="Description of Artificial Sequence: Synthetic coding sequence"
  source 1..678: mol_type = other RNA
atgagcgggtgctcaaaaaggtgcaagctcggcttcgttaaattcgcccagactatttttaaactgattaccggcacactatcaaaagacaagattgaagacgaactcgaaatgactatggtgtgccatagacccgaagggctggagcagctggaggcccaaacaaactttaccaaaagggaacttcaggtgttgtatagaggattcaaaaacgaatgcccatctggggtggtcaacgaggacaccttcaaacaaatctatgcccagtttttcccacatggcgatgcgtcaacctacgctcactatctatttaacgcgtttgacacaactcagaccggaagtgtcaaattcgaggattttgtaactgcactaagtattttgctgcgggggacagtacatgagaagctccgttggactttcaatctgtacgatatcaacaaagatgggtatattaacaaggaagagatgatggacattgtcaaagcaatctatgatatgatggggaaatatacatatccagtcctgaaagaagatactcctagacagcacgttgacgtgttttttcaaaaaatggataagaacaaggacggaatcgtgactctcgacgagttccttgagagctgccaggaagatgacaatatcatgcgatcactgcaactattccagaatgttatgtag

SEQ ID NO: 12517 - RNA, 420 nt, synthetic construct
  misc_feature 1..420: note = source = /note="Description of Artificial Sequence: Synthetic coding sequence"
  source 1..420: mol_type = other RNA
atgtataagttggcctcatgttgcctgttgttcataggctttctgaaccctttactgtctctgcctctcttggatagtagagaaatctctttccagctgtccgccccccacgaagatgctcgcctcacccctgaagagctcgaacgcgcatccctcctgcagattttacccgagatgcttggtgcagagcgaggggatattctccggaaagccgattcttcaacaaacattttcaatcctcgcggcaacctgcggaaattccaggatttctcaggacaggaccctaatatactgctaagccacttacttgccagaatatggaaaccctataagaaacaacgccgaaaactaagacaggacctacggctctggaagaaggagccaggactccgcatctttaaaaattacgtttgggtgtag

SEQ ID NO: 12518 - RNA, 879 nt, synthetic construct
  misc_feature 1..879: note = source = /note="Description of Artificial Sequence: Synthetic coding sequence"
  source 1..879: mol_type = other RNA
atggaggtgacggccgtggcgactcagggcggttatggctcgtcagactgggtgacctcatatctgttaatgttttctgatggaggtcggaactggaaacagtatagaagagaggagtcaatctgggggttcccggggaatacgaatgccgattcagtcgtacactaccgcctgcagccacctttcgaagctaggtttctccggttcctcccactggcatggaaccctcgaggacgaatcgggatgaggatagaagtgtacggatgcgcttataaatcagaagtggtctattttgacgggcagagcgccttactgtatagactggataagaagcccctcaaacccatcagagacgtcatctctctcaagtttaaggctatgcagtctaatggaatactgctgcatagggaaggccaacatggcaaccatattacactggaactcattaaaggaaagctagtcttcttcctgaattctggaaacgctaaactgccttcaaccatagcccctgtgactttaaccctagggtctcttcttgacgatcagcactggcattccgttctgatcgaattgcttgacacccaggtaaattttactgtggataagcatacccaccatttccaagcaaaaggcgactcgtcctatctggacttgaactttgaaattagctttggcggcattccgacacctggccgctcacgcgcattccgcaggaagtctttccatggttgcttagagaacctctattataacggcgtcgacgtgaccgaacttgcaaaaaaacacaagccccagattctcatgatggaacttgcccacgggcttcaggatcagaacttaaagatctcactgacagtgtgtcaccagacaactcagtag

SEQ ID NO: 12519 - RNA, 783 nt, synthetic construct
  misc_feature 1..783: note = source = /note="Description of Artificial Sequence: Synthetic coding sequence"
  source 1..783: mol_type = other RNA
atgaagacaagtgatgggttcacactaaacgccgaatcttatgtctccttcaccaccaagctggatatacccactgccgcaaagtacgaatatggtgtgcccctgcaaacaagcgactccttcctgcggttccctagttccctcacaagcagtctgtgcactgacaacaacccggctgccttccttgtgaaccaggctgtgaagtgcactcgaaaaataaacctggagcagtgcgaagagatcgaggccctctccatggccttttactcatcgcctgagatactgagagtgcctgattcaagaaagaaagtacctataaccgtccagtctatcgtcatccaatctttgaacaagactcttacacgacgcgaggacacagacgtactccagccgactttagtcaatgccgggcacttctccctatgcgtaaatgtcgtcctggaggtcaagtactccttgacatatactgacgccggcgaagtcaccaaagccgacctgtccttcgttcttgggacagtttcgtccgtggttgtgccgctgcaacagaaatttgagatccattttctccagacagactggtcatcccctgtttcagctcgctccactgaaggagaggagccagccgtgggacctggcctcccccgtttacgcggacctttttggaagtttcctggacctggtcacgctggcctgggtgcccacccattgcatcatccagtcatccagcaggagggcttcttgcccgcccctcgcggtttcggatatagaagtgaagttgattag

SEQ ID NO: 12520 - RNA, 3624 nt, synthetic construct
  misc_feature 1..3624: note = source = /note="Description of Artificial Sequence: Synthetic coding sequence"
  source 1..3624: mol_type = other RNA
atggctagcgtagcgtgggctgtgttaaaggtgctgctgctgctgccaacacagacctggtctcctgttggggcaggaaaccctcccgactgcgacgcccctctggcatccgccctgcctcggtcttctttttcatcctcatctgagctttcctcatctcatggccccgggttctcccgtcttaaccgccgagacggtgctgggggctggacacctctggtcagcaacaagtatcagtggctgcagattgatctgggcgagagaatggaagtgaccgcagtagcaacacagggcggctacgggtcatccgactgggttactagttacctgttgatgttttcagacggcgggcgaaattggaagcaatacaggcgggaggaaagcatctggggtttcccagggaatacaaacgccgacagcgtagtacattacagattacagccacctttcgaagcgcgatttttaagattcttgcccctggcatggaatccaagaggtcgcatcgggatgaggatcgaggtttatgggtgcgcgtataagtctgaggtagtctacttcgacgggcagtccgccttgctgtacagactcgataagaagcccctgaagcccataagagatgtgataagcctgaaatttaaagccatgcagtcaaatggcattctgctccatagagagggtcaacacggtaatcacataacactggaactgataaaaggaaagttggtgttcttcctcaattcagggaacgcaaagcttccgtccacaattgctcctgtaacactcacactgggctccttactcgacgatcaacattggcattctgttctgatagagttacttgacacccaggtgaactttactgtcgacaagcacactcatcactttcaggctaaaggcgattctagttacttggacctaaactttgagattagcttcggcggaatccccacacccgggaggagtagagcattccggcgcaaaagcttccacggatgtcttgagaacctttattataatggtgtagatgtgactgaattagcaaaaaaacacaaaccacagattcttatgatggggaatgtgtcattcagctgtcctcaacctcaaacggtgcccgtcacgtttctgtcctctcgcagctacctggccctgcctggcaacagcggtgaggataaggtctcagtcacatttcagtttcgcacttggaatcgggcagggcatttgctgttcggggagctccgccggggtagcgggtccttcgttcttttcctcaaagacggaaagcttaaattgtccttattccaacctgggcaatcaccccgaaatgtcacggctggtgctggtttgaacgacgggcagtggcactccgtaagcttttctgccaagtggtcccacatgaatgtggtagtggatgacgacacggccgtgcagccgttagtggccgtgctgatcgactctggagacacatattacttcgggggctgtctcgataatagcagtggatctggatgcaaaagtcccctcggtggattccaggggtgcttgaggctgataacaataggggacaaagctgtcgatcccattctcgtacagcaaggggcactggggtcctttcgggacctgcaaatcgacagctgtggtatcacggacaggtgcttgccctcctactgtgaacatgggggagaatgcagccagagctgggacaccttttcatgtgattgtctggggacaggctatacaggagaaacatgccactcgtctctgtacgagcaaagctgcgaggcgcataagcacaggggcaacccttcagggttgtactatatagacgccgatgggtcagggccattaggcccttttctggtgtactgcaacatgacggacgctgcctggacagtggtgcagcacggcggtcccgatgctgtaacactgagaggcgcccccagcggacatcctaggagcgcagtctcctttgcctacgcagcaggtgccggccagttacgatcagccgttaatctggctgaacggtgcgagcagaggctggcgttaagatgcggtacagcgagacggccggattcacgcgacgggaccccattgagctggtgggtcggaagaaccaacgagacgcacacgtcttggggcggctctttacctgatgctcagaagtgtacatgcggactggaaggtaattgcatcgactcgcaatactattgcaactgcgacgcaggtagaaatgagtggacttcagacacaatcgtgctgagtcagaaggaacacctgcctgtcacccaaatcgtcatgactgacgctggaagaccgcattccgaagccgcttacactcttggacccttgctatgcaggggcgatcagagtttttggaattcagcctcctttaatacagagacgtcttacctgcatttcccggccttccacggcgaacttacggctgacgtctgcttcttttttaaaacgactgtttcaagcggcgtatttatggagaatctggggatcactgattttattagaatcgaactccgcgcaccaaccgaagtaacattttcctttgatgtcggtaatggcccatgcgaggtgacggtgcaatccccaacaccttttaacgacaatcagtggcatcatgtccgggcggaacgcaatgttaaaggagcaagccttcaggttgaccagctcccgcagaaaatgcagcccgccccggccgatgggcacgtaagactccaactgaatagccagctcttcatcgagatcagcgcctatttcgctacaggctcatccatgacataccatttccaggagcactacacgcttagcgagaattcctcaagcctcgtcagctcactccatcgtgatgtgactcttactagagaaatgattacattgagcttcaggaccacccgaaccccctcactgttgctttacgtgtcgagcttttacgaagaatatttatccgtcatattggcaaataacggaagcctccagatccgatacaaactggaccgtcaccagaatcctgacgcctttaccttcgatttcaaaaatatggccgacgggcagctccaccaggtgaagataaatcgagaagaggccgtcgtcatggtggaagtgaaccagagtaccaaaaaacaagtgatcctgtccagcggaactgagtttaacgccgtcaaaagcctgatactgggaaaggtcctggaggccgccggagcagatcccgatacacggcgggccgctacctcaggttttacaggttgcctatccgcagtccgattcgggcgtgccgcacctcttaaggccgccctacgaccaagcggtccgagcagagttactgtgagggggcatgtagcacctatggctcgttgcgccgcaggtgctgcttcaggatccccggctcgcgagctggctccaaggcttgccggtggagcgggacgcagtgggcctgccgacgaaggcgaaccacttgtgaatgctgatcggcgcgacagtgccgtgattgggggagtgatcgctgttgtaatcttcattttgttgtgtatcacagctatcgcgatcagaatttaccagcagaggaagctgcggaaggaaaacgaatccaaggtgagcaaaaaagaggagtgctag

SEQ ID NO: 12521 - RNA, 2238 nt, synthetic construct
  misc_feature 1..2238: note = source = /note="Description of Artificial Sequence: Synthetic coding sequence"
  source 1..2238: mol_type = other RNA
atggcctccgtagcctgggctgtattaaaagtgctcttgcttctacctactcagacctggtcacctgtaggcgctggaaaccctcccgactgcgatgccccgctcgcgtcagcactgccgcggtcaagctttagctccagctctgaactctcctcctcccacggacccggattctctcgcctgaatcgacgcgatggagcgggtggctggactcccctcgtatcaaataaataccaatggttacagatcgacctaggagaaaggatggaggtgactgcagtagcgacgcaggggggctacggaagtagtgattgggtgaccagctatttacttatgttcagcgatggagggagaaattggaagcaataccgccgagaggagtccatctggggtttccctgggaacacaaacgccgacagcgtggtgcactacagactgcaaccgccctttgaggctagattcctgagattcctgcctttggcatggaaccccagaggtcgaattgggatgcgaattgaggtgtatggatgtgcatataaaagcgaggttgtctatttcgacggacagtccgccctgttgtatagacttgataaaaagccccttaagccgatccgggacgtgatctccctgaagttcaaggcgatgcagtcaaatggcattcttctgcatagggaagggcagcacgggaatcacatcaccctcgagttgatcaaaggaaagcttgtattttttctgaattctgggaatgctaaactcccctccaccatcgccccagtcacacttacactgggtagtcttctggacgaccagcattggcactccgtcctgattgagctgctggatacccaagtcaattttaccgttgacaaacacacccatcattttcaggcaaagggagactcatcctacctggatctgaattttgagatctcttttggaggaattccaacccccggacggagtcgcgctttccgacgaaaatcctttcatggctgccttgagaacctgtattacaacggagtcgacgtgactgagcttgctaagaaacacaaacctcagatactgatgatgggcaatgttagcttctcctgtccacagcctcagacagtgccggttacctttctgtcttctcgttcttatctcgccctacctgggaattcaggtgaggataaagtttccgttacgtttcagttcagaacttggaacagggcgggacacctcctcttcggtgaattgagacggggctccgggtcctttgtgctttttctcaaggacgggaaacttaagctctctctgttccaacccgggcaaagtcccagaaacgtaacagctggcgccgggctgaatgatggtcagtggcactccgtaagcttttccgccaagtggagccatatgaacgtggttgttgacgacgataccgctgttcagccactggtggcagtcctgatcgacagcggggacacgtactactttggcggatgtctggacaacagttctggcagcgggtgtaagagccctctcggcgggttccaggggtgccttcgattgattaccataggcgacaaagccgttgaccctattctggtgcagcaaggagcactgggtagctttagggacctacagatcgattcatgcgggattaccgaccgctgtctccctagctactgtgaacacggcggagaatgctcccagtcctgggacacgttctcctgtgactgtctgggcacaggctatactggggagacgtgccattcttcactgtacgagcaatcttgcgaagcacataagcaccgcgggaacccgtccgggctttattatatcgacgcggatggctctggccccctgggccctttccttgtgtactgcaatatgactgatgccgcatggacagtggtgcaacacggcggtcccgacgccgtaacgctccgaggagcaccctccggacacccgagatccgccgtatcttttgcttacgcggccggggctgggcaactcagatcagccgttaatctcgccgaaagatgcgaacagagacttgcactccgttgcggcacagcgagacgtcccgattccagagacggtactccactttcatggtgggtggggagaaccaacgagactcataccagctggggcgggtccctaccagatgcgcaaaagtgcacatgtggcctagagggcaattgtattgatagccaatactactgcaattgtgacgccgggcggaacgagtggtag

SEQ ID NO: 12522 - RNA, 549 nt, synthetic construct
  misc_feature 1..549: note = source = /note="Description of Artificial Sequence: Synthetic coding sequence"
  source 1..549: mol_type = other RNA
atggagccgcaactgggacctgaagctgctgcacttcgacccggctggttagcccttctcctctgggtgtcagccctgtcatgctctttctcactgcccgcgagcagtttaagttctcttgtacctcaagtgcgcacatcctacaactttggcaggaccttcctcggactggataaatgtaatgcttgcattggcacctcaatctgtaaaaaattctttaaggaggaaatacgatccgacaactggctggcctcccatctaggcctccctcccgactcccttctctcataccccgccaattattctgacgattccaaaatttggcgtcctgtggaaatcttcagacttgtgagcaagtaccaaaatgaaataagcgatcgtagaatttgtgcctccgcttccgcacccaagacctgctccattgaaagggtgttgaggaaaaccgagcgatttcagaaatggctccaggccaaaagactgacgccagatttagttcaagactgtcaccagggacaaagggaactcaaattcctgtgcatgctcaggtag

SEQ ID NO: 12523 - RNA, 282 nt, synthetic construct
  misc_feature 1..282: note = source = /note="Description of Artificial Sequence: Synthetic coding sequence"
  source 1..282: mol_type = other RNA
atggattcattacgcaaaatgctcattagcgttgccatgctgggcgcaggcgccggagtcggctacgcacttctagtgattgtgactccaggagaaaggaggaaacaggaaatgcttaaggagatgccattgcaggacccaagatctagagaggaggcagctcggacccagcagctattactagcaactctccaagaggccgccaccacacaagagaacgtggcctggcgaaaaaattggatggtgggcggtgagggaggcgctggtggtcgatcgccctag

SEQ ID NO: 12524 - RNA, 387 nt, synthetic construct
  misc_feature 1..387: note = source = /note="Description of Artificial Sequence: Synthetic coding sequence"
  source 1..387: mol_type = other RNA
atgggaaaatctgcttccaaacagtttcacaacgaagtattaaaagcacataatgaatacagacagaaacacggtgtgccacctcttaagctctgcaaaaatctaaatcgcgaggcgcaacaatatagcgaagcactggcgtccacccgaattctcaaacactcccccgagagcagcaggggacagtgcggagagaatctcgcctgggcgtcatacgaccaaacgggacatttcactgctatggtgtggaaaaatacgaagaaaatgggggttggcaaagcatccgcctctgacggcagctccttcgttgttgcaagatattttcctgccggtaacgtggtgaatgagggatttttcgaggagaatgtgctccctccaaaaaaatag

SEQ ID NO: 12525 - RNA, 465 nt, synthetic construct
  misc_feature 1..465: note = source = /note="Description of Artificial Sequence: Synthetic coding sequence"
  source 1..465: mol_type = other RNA
atgggaaaatcagcaagtaagcagttccacaatgaggtgctgaaagcccacaatgaataccgccaaaaacacggtgtccctcccctaaagctttgtaagaacctcaatcgcgaggctcagcaatactccgaagcactcgcttctacaaggatcctaaaacattcccccgaatcttcgcgcggacagtgtggcgaaaatcttgcttgggcctcctatgaccaaactggaaaggaggtggctgatagatggtattccgagatcaaaaattataacttccaacagccagggttcacctccggaactggtcacttcaccgccatggtttggaagaatacaaaaaagatgggtgttggcaaggcgtcagcctccgatggcagttcctttgtagttgccaggtactttcctgctgggaatgtcgttaacgagggcttttttgaggagaacgtcctgcccccgaaaaaatag

SEQ ID NO: 12526 - RNA, 831 nt, synthetic construct
  misc_feature 1..831: note = source = /note="Description of Artificial Sequence: Synthetic coding sequence"
  source 1..831: mol_type = other RNA
atggacagctctcgtgagccaacacttggacgacttgatgcagcaggcttctggcaagtgtggcagcgcttcgacgccgatgagaagggctatatcgaagagaaagaactggatgccttctttctccatatgcttatgaaactcggcactgatgataccgtaatgaaggcaaacctgcacaaagtgaagcaacagttcatgaccacccaggacgcttccaaggacggacgaataaggatgaaggagctggctggcatgtttttgagcgaagacgagaattttctgcttcttttccgccgggaaaatcctctagattcctctgtagagtttatgcagatttggcgcaaatatgatgctgacagctcagggttcatatccgctgcagagctgcgcaactttctaagggacctttttcttcatcataaaaaggcgatttctgaggctaaattagaggaatatacagggacgatgatgaagatttttgaccggaacaaagacggtaggctcgatctgaatgatttagctcggattctggctttacaggagaactttctgctgcagttcaaaatggacgcttgctccactgaggagaggaaacgagattttgagaagatttttgcatattacgacgtttcaaaaacaggcgctcttgaaggtccagaggtggacggctttgtgaaagacatgatggagctcgttcagccatctatttccggcgtcgatctcgacaagttcagagagatattactgcgccattgtgatgtcaacaaagatggtaagattcagaagtccgagcttgcactgtgcctcggcctgaaaatcaatccctag

SEQ ID NO: 12527 - RNA, 216 nt, synthetic construct
  misc_feature 1..216: note = source = /note="Description of Artificial Sequence: Synthetic coding sequence"
  source 1..216: mol_type = other RNA
atgcccgccggtgtgccaatgagcacatatttgaaaatgttcgccgccagccttttagcaatgtgcgcgggcgcagaagtggtccacagatactaccgcccagatttgaccattccagaaattcctcctaaacggggcgaactgaagacagagctgctgggcctaaaagaaagaaaacataagcctcaagtttctcagcaggaagaactgaaatag

SEQ ID NO: 12528 - RNA, 1287 nt, synthetic construct
  misc_feature 1..1287: note = source = /note="Description of Artificial Sequence: Synthetic coding sequence"
  source 1..1287: mol_type = other RNA
atgaagccgatgctcaaggatttctccaacctcctgctggtagtcttgtgcgattacgtcctgggagaagcggaatatttattgttgagagaaccaggacatgtcgcactctcgaatgatacagtctatgtagattttcaatactttgatggcgctaatggcacactgagaaatgtctccgtgttacttttggaggctaatacaaaccaaactgtgaccacaaaatatctgctgacgaaccaatctcagggcactctgaaattcgaatgtttttacttcaaggaagccggtgactactggttcactatgacacccgaagccacagacaatagcacccctttcccctggtgggagaaatctgcgtttttgaaggttgagtggccagtctttcatgttgacctgaatagaagtgcaaaggcagccgagggaacgtttcaagtgggcctgttcactagccagcctctttgcccgtttcccgtggataagcctaatattgtggtggatgtcatctttacgaattccttacccgaggcccgcagaaattctcgacaaccgctggagatacgtacaagcaaacgcaccgagctcgcacaggggcagtgggtggaattcggctgcgccccactgggaccggaagcttatgtgacagtggtgctgaagctgctgggtcgcgactctgtgataacttcaaccggcccgatcgatctcgctcagaagtttggttataaacttgttatggtcccagaacttacatgcgaatcaggggtggaagtcaccgtcctccccccgccctgtacctttgtccagggcgttgtgaccgtttttaaagaagcaccgagataccccggaaaaagaaccatccacctggcagaaaacagcctacccttgggagagagacgaaccatttttaattgtactctgtttgatatggggaaaaataaatactgttttgacttcggcatcagcagccgtagtcactttagtgccaaagaagaatgtatgttgatacagagaaatacagagacatggggcttatggcagccttggtctcagtgcagcgccacgtgtggcgatggtgtgcgagagcgaagacgggtctgtcttacttctttcccctctagtcccgtgtgtccaggaatgagtctagaggccagtttgtgctctcttgaggagtgtgctggcagattcagatcgtgctgtcctggatggtcagctatggtgcgcagtcgactcacgaactccgcctccagggtgcaagctattcttctgcctcagcctctggcttag

SEQ ID NO: 12529 - RNA, 312 nt, synthetic construct
  misc_feature 1..312: note = source = /note="Description of Artificial Sequence: Synthetic coding sequence"
  source 1..312: mol_type = other RNA
atgaagctctgtgttactgtgttgtcgttactcgtgctggttgctgccttttgttcactggcactctctgcgcccatgggctctgaccccccaaccgcgtgctgtttctcttatactgctcgcaaactcccccgaaatttcgttgtggattattatgagacctcatccctgtgttcgcagcccgccgtggtgtaccgagaatccgcctcttccgctgcccccggtagaattccctccaccagggcggctccccacggaccttggtcgggccgtgggaggtgtctcccccaagctcgagataaagctagatag

SEQ ID NO: 12530 - RNA, 279 nt, synthetic construct
  misc_feature 1..279: note = source = /note="Description of Artificial Sequence: Synthetic coding sequence"
  source 1..279: mol_type = other RNA
atgaaactgtgtgtcactgttctgtctctgctggttctcgtagctgcattttgttctctggcactgtcagccccaatggggtcagatcctcctacggcttgctgcttctcctacactgcacgcaaactcccacgaaatttcgtcgttgattattatgaaacctcaagcctctgttcacagcctgccgtcccctgggatagtaaccttggtaagcaggtctgcgcagatccttctgaatcatgggtccaggaatatgtgtatgatcttgaactgaattag

SEQ ID NO: 12531 - RNA, 282 nt, synthetic construct
  misc_feature 1..282: note = source = /note="Description of Artificial Sequence: Synthetic coding sequence"
  source 1..282: mol_type = other RNA
atgcaagtgtccacagccgctctcgcagttcttctgtgcactatggcactatgtaatcaggtcctgtctgcacccctggcagccgacactcctacagcatgctgcttttcctacacttcaaggcagattcctcagaactttatcgccgattacttcgagacttcttcacagtgttcaaaacccagtgtcatttttctcaccaagagagggcgacaggtttgtgccgatccttcagaagaatgggtgcagaaatacgtgtcagatctggaactcagcgcatag

SEQ ID NO: 12532 - RNA, 1869 nt, synthetic construct
  misc_feature 1..1869: note = source = /note="Description of Artificial Sequence: Synthetic coding sequence"
  source 1..1869: mol_type = other RNA
atggggaaaagcgaaggccccgtaggtatggtagaatccgccgggagagcaggccagaagaggcccggatttttagagggtggcttgcttctgctgcttctgctggtgaccgccgctcttgtcgccctgggggtcctctacgcagatcgccggggaaagcagctgccgcggctcgcatcccgactatgctttctgcaggaggaacgaacattcgtgaaacgcaaacctagaggcattccagaagcacaggaagtatcagaggtgtgtacaactcctgggtgcgtcatcgctgcagcccggatcctgcagaacatggacccaacaactgagccctgcgacgatttctaccagttcgcgtgtgggggctggctgcgccggcatgttatcccggaaacaaatagccgctacagcatttttgatgttttaagagatgaactggaggtcattctcaaggttgagctcgaaacacagcttgccaaagcaacagtacctcaagaggagagacatgatgtcattgcactttatcacagaatgggcttggaggaactgcagtcccagtttggactcaagggatttaattggacactgttcattcagactgtgctgagttctgttaaaattaagctgctgcccgacgaagaagtggttgtatacggaattccatacctgcaaaacctagagaatatcatcgacacttattctgccagaacaatccaaaactatcttgtgtggaggctggtgttggatagaattggctccctgtcccagcgattcaaggataccagagtgaattacaggaaagccctcttcggcacgatggtggaggaggttagatggcgggagtgcgtgggctacgtcaattccaatatggaaaatgctgtgggctccctttacgttagggaagccttccccggagatagtaaatccatggttcgggagctcatcgacaaggtgcgcactgtattcgttgagacgttggatgagctcggatggatggacgaagaatctaagaagaaggcacaggagaaggcaatgtccattagagagcagatcggacatccagattatattttagaggagatgaaccgacgcctggacgaagagtacagtaatttgaacttttctgaagatttatactttgagaatagtctgcagaacctgaaagtcggtgctcagaggtcgctgaggaagctgcgcgagaaagttgatccaaatctgtggataatcggtgcagctgtcgtcaacgctttttactcacccaacaggaatcagattgtgttccctgcaggaatactccaaccgccattcttttctaaggagcagccccaagccctcaacttcggcgggattggtatggtcattggccatgagattacgcacggtttcgacgacaacgggaggaatttcgacaaaaatggtaatatgatggactggtggtctaatttctcgactcagcatttcagggagcagtccgagtgcatgatctatcaatatggcaactattcatgggatctggcagatgagcagaacgtcaacggttttaacacgctcggcgaaaacatcgctgataacgggggcgtccggcaggcctacaaagcctatctaaagtggatggccgagggtgggaaagaccaacagttaccaggactggatctgacccatgaacaactctttttcattaactacgcccaggtctggtgcggcagctatcgacccgagtttgctatacagtccattaagactgatgtccactctcccctgaagtaccgcgttctggggtcccttcagaaccttgcagcctttgctgacactttccactgtgcgagaggcaccccgatgcatcctaaagaaagatgtcgggtttggtag

SEQ ID NO: 12533 - RNA, 2340 nt, synthetic construct
  misc_feature 1..2340: note = source = /note="Description of Artificial Sequence: Synthetic coding sequence"
  source 1..2340: mol_type = other RNA
atgggaaagtccgaaggacccgtgggtatggtcgagagcgcaggacgcgctggacagaaaagacctggattcttggagggaggtctgctcctcttgctcctactggtgacagccgcccttgtggccctcggagtgttatacgccgacaggcggggtaaacaactcccaagacttgctagccgtctttgcttcctccaggaagagaggactttcgttaaacgcaagccgaggggcattccagaggcccaagaagtatcggaagtgtgcaccactcccgggtgtgtgatcgccgcagcacgtatacttcagaacatggaccccacaacagagccctgtgacgatttttaccagtttgcctgtggaggatggctgcggcgccacgtgattcctgagacaaatagccgctactcaatctttgacgtgctgcgggacgagctcgaggtgattctgaaagcagtactggaaaactctaccgcaaaagatcgccccgccgtggaaaaggcgcgtactctgtataggagttgtatgaaccagagcgtcattgagaaacgcggaagccagcccttactagatattctggaagtggttggaggatggcccgtggccatggacagatggaacgaaaccgtggggctggagtgggaactggaaaggcagctagcgctcatgaattcacaattcaaccgccgagtgctcatcgacctgttcatttggaatgacgatcaaaacagctcacggcacatcatttacatcgatcagccgacgctgggcatgccatctcgtgaatattactttaatggcggatcaaatcgaaaagtgagggaggcatacctccagttcatggtgagtgttgccacacttctcagagaggatgccaacttacccagagacagctgcctggtccaagaggacatggtacaagtcctggagctcgagacacagctcgctaaggccaccgtccctcaggaagaacggcacgacgtcattgctctctatcaccgcatggggcttgaagaactgcagtcccaatttggactcaagggtttcaactggacactgtttatccagaccgtcctctcctccgttaagataaagttgttgccggacgaagaagtggtggtttacgggataccgtatttacagaatctggaaaatataatcgatacctattcagctagaaccatccaaaattatttggtttggaggctagtgctcgatagaatcgggtcgctttcacagagattcaaggacacacgggtgaactaccgcaaagccctgtttggtacaatggtggaagaggttcgctggcgagaatgcgttggatatgtgaactcaaatatggagaatgcagtcggctccctttacgtccgcgaagcattccctggtgacagtaagagcatggtacgagagctaatagacaaggtgcggacggtattcgtggagacactggatgaattgggctggatggacgaggagtctaagaaaaaggcacaggagaaggcaatgagcatccgggaacagatcggccaccccgattacatcctggaggaaatgaaccgtaggctggacgaggagtattctaatctgaattttagcgaggatctgtactttgagaatagcctgcagaatctcaaggtgggggcacaacgcagcttgagaaaattaagggaaaaagtcgacccgaatttatggattatcggagctgctgtcgtgaacgccttttattccccaaatcgcaaccagattgtctttcccgcgggtattttgcaacccccttttttttctaaagagcagcctcaggcactgaattttggaggcatcggtatggtcattggacacgagatcacccacggttttgacgacaacggcagaaacttcgataaaaacggaaacatgatggactggtggtctaatttttctacccagcacttccgtgagcaaagcgagtgcatgatttatcagtacggtaactactcttgggatctggccgacgagcagaacgtgaacggatttaatacactgggagaaaacatcgccgacaacggcggggttcgacaagcgtataaggcttatttgaagtggatggcagagggaggaaaagatcagcagttacccggcctggacctaacccatgaacagctattttttattaattatgctcaagtgtggtgcggctcctatcgtccagaatttgccattcagagcataaagacagacgtgcactctccacttaagtatagagtacttggttcccttcagaacctcgctgcatttgctgatacatttcattgtgcccgggggactccaatgcacccaaaggagcgatgcagggtgtggtag

SEQ ID NO: 12534 - RNA, 258 nt, synthetic construct
  misc_feature 1..258: note = source = /note="Description of Artificial Sequence: Synthetic coding sequence"
  source 1..258: mol_type = other RNA
atgtctgttcacatgcccgccatgaagatctgcgagaaactgaaaaaactggatagccaaatctgcgagctgaagtatgagaagacactggacctggcgtccgtcgacctgaggaagatgcgtgtcgcagaattaaaacaaattcttcactcttggggagaggagtgcagagcctgtgcagaaaaaaccgactatgtaaacctcatacaagagctagctcccaagtacgccgccacacatcctaagaccgagttatag

SEQ ID NO: 12535 - RNA, 657 nt, synthetic construct
  misc_feature 1..657: note = source = /note="Description of Artificial Sequence: Synthetic coding sequence"
  source 1..657: mol_type = other RNA
atgggaagagtgtttctgaccggcgagaaagccaatagtatcctgaagaggtacccaagagccaacgggttttttgaagaaattcgacagggcaatatcgaacgggaatgtaaagaggagttctgcactttcgaggaagcaagggaggcattcgagaataatgagaagacgaaagaattctggtcaacatacaccaaagcccaacagggcgaatcaaatagaggaagcgactggtttcagttctatctcactttcccgcttattttcggcctatttatcatccttcttgtgatctttctaatctggcgatgcttcctccgaaacaaaactaggagacagaccgtgacagaaggacatatccccttcccgcagcacctgaacattataactcctccacccccacctgacgaagtattcgacagttcaggcctgagccctggcttcttaggctatgtcgtaggccggtccgattccgtaagtacccggctgagtaactgcgacccacccccaacctatgaggaggctactggacaggtaaacctccagaggagtgagacggagccacacttagacccccctcctgaatatgaagacatagttaactccaattccgcctcagcaattcctatggtcccagttgtgacaacaatcaaatag

SEQ ID NO: 12536 - RNA, 1365 nt, synthetic construct
  misc_feature 1..1365: note = source = /note="Description of Artificial Sequence: Synthetic coding sequence"
  source 1..1365: mol_type = other RNA
atggccagaccaaataaattcctcctttggttctgttgcttcgcatggctctgtttccccatctccttaggctcccaggcatcagggggtgaggcacaaattgctgcaagtgcagagctggaaagtggcgccatgccatggtctctgctgcaacacatcgatgagagggaccgcgccggtctcctccccgctttgttcaaagtgctgtcagtgggcaggggcggctctcccaggctgcagcccgattcccgggctctgcactatatgaaaaagctatacaaaacatacgccaccaaagaaggtatacctaagtcaaataggtctcacttgtacaacacggtgcgtctgttcaccccttgcacgcggcataaacaggccccaggggatcaggtgaccggaatattaccttccgtggaacttcttttcaacctggataggatcacaaccgtcgagcacctcctcaaatctgtgttattgtataacatcaataattccgtgtccttcagctccgcggtcaagtgcgtgtgtaacctgatgattaaagagcctaagtcttcctctcgcactctgggacgtgccccctatagttttacttttaacagtcaatttgagttcggtaaaaagcacaagtggattcaaatcgacgttactagtctacttcaacccctcgtcgcgtctaataagaggtcaatccacatgtccataaatttcacttgcatgaaagaccaattggaacatccttccgcacaaaacggcctgttcaacatgactctcgtaagcccctcattgatactctacttgaatgacacctcagcccaagcatatcatagttggtactctctccactacaagcggagacctagccaaggcccagaccaagaaaggagcttgtcggcataccctgttggtgaagaggcagccgaagacggtagaagttctcatcacaggcacaggcgaggccaggaaacagtgtccagcgagctgaaaaagccactgggtcccgcgagttttaacctcagtgagtacttccgtcagttcctccttccccagaacgagtgtgaactccacgacttccgtctctccttcagtcagctcaagtgggacaattggattgtggcaccacataggtataatcccagatactgcaagggcgactgtcctcgcgcagtgggacaccggtacggcagtcctgtgcacaccatggtgcaaaatattatctacgaaaagctggactcgagtgtgcctcgcccaagctgtgtacctgccaagtactctccattatctgttcttacgatagaaccagatggctctattgcttataaagaatatgaggatatgattgcaaccaaatgcacctgcaggtag

SEQ ID NO: 12537 - RNA, 417 nt, synthetic construct
  misc_feature 1..417: note = source = /note="Description of Artificial Sequence: Synthetic coding sequence"
  source 1..417: mol_type = other RNA
atgacttggcgccaagccgttctgctgtcgtgcttctccgcagtcgtattactgtcaatgttgagggaaggtacttccgtgtccgtgggaaccatgcagatggcaggcgaggaggcctccgaggacgccaaacagaagattttcatgcaggaatcagacgccagcaatttcctcaaaagaagaggtaaacggtccccaaagtcaagagatgaagtgaacgtggaaaatcgacaaaaactgcgagtggacgagctacgaagagaatattacgaggagcagcggaacgagttcgaaaatttcgtcgaggaacagaacgatgagcaggaggagagatcacgtgaggcagtcgagcagtggagacagtggcattatgatgggttgcacccaagctacttatataacagacatcatacgtag

SEQ ID NO: 12538 - RNA, 729 nt, synthetic construct
  misc_feature 1..729: note = source = /note="Description of Artificial Sequence: Synthetic coding sequence"
  source 1..729: mol_type = other RNA
atggctttaaagaacaagttctcatgcttgtggatcctggggttgtgtctggtcgctaccacttcatccaagatcccttcaatcacggaccctcatttcatcgacaattgtatagaggctcacaacgaatggaggggaaaggtcaatccacccgccgccgacatgaagtatatgatttgggataagggactggcgaagatggcaaaagcatgggccaaccagtgtaagtttgagcataatgactgcctcgacaaaagttacaaatgctacgctgcattcgaatatgtgggcgagaatatttggttgggaggtatcaaatccttcacgccacgccacgcaatcacagcttggtataatgagacccagttttatgactttgactcactctcctgctcaagagtatgtggacactatacgcagctggtctgggctaattccttctacgtgggatgcgcagtggccatgtgcccaaaccttggcggagcctcaactgctattttcgtctgtaattatggaccagccggtaatttcgcaaacatgcctccttatgtgagaggagagtcttgttcactctgttccaaggaagaaaagtgcgtcaaaaatttgtgtaggactccccagctgattattccaaaccaaaacccctttttaaagcctactggtcgcgccccgcaacaaaccgcctttaacccatttagcctaggctttttactgctgaggattttttag

SEQ ID NO: 12539 - RNA, 813 nt, synthetic construct
  misc_feature 1..813: note = source = /note="Description of Artificial Sequence: Synthetic coding sequence"
  source 1..813: mol_type = other RNA
atgttaaggcagctcctcttagccgctctctgtctcgccgggcctcctgctcctgctcgagcttgtcaactgccctcagagtggcgccccctgagcgagggatgccgcgctgagcttgccgaaaccattgtgtacgcacgtgttctcgcgctgcaccccgaggctcccggcctgtacaaccacttaccctggcagtaccatgccggtcaaggcggattgttttactctgccgaagtcgaaatgctatgtgatcaggcttggggttcaatgctcgaagttcctgctgggtccagactgaatcttacgggtctggggtatttctcatgccattcccatacagtggtgcaggattatagttacttttttttcctcagaatggacgaaaattacaacctcctccctcatggcgtcaatttccaagacgcgatctttccagacacccaggaaaaccggcgtatgttcagctctctgttccagttctccaattgttcgcaaggtcaacaactcgccacattctcttctgactgggagattcaggaagattctaggcttatgtgttcatctgtccaaaaggccctcttcgaggaggaggatcacgttaagaagctccagcaaaaagtggccacactggaaaagcgcaaccggcagctgcgagaaagggtgaagaaagtcaaacgcagcctgaggcaggcaagaaagaagggcaggcatctagaacttgccaatcagaagctgtctgagaaactcgccgcgggagccctgccccatattaacgcccgggggccagtgagaccaccatacctccgagggtag

SEQ ID NO: 12540 - RNA, 438 nt, synthetic construct
  misc_feature 1..438: note = source = /note="Description of Artificial Sequence: Synthetic coding sequence"
  source 1..438: mol_type = other RNA
atggatgaaaactacaacctgctcccacacggcgtgaatttccaggacgcaatttttcccgatactcaggaaaacaggagaatgttttcctccttgttccagttctcaaactgttcccaaggacagcagttagccacgttctcatcggactgggagatacaggaagattcacgcctgatgtgttcatccgtccagaaggcattgtttgaagaggaggatcatgtgaagaaattacaacagaaggtcgccacacttgagaaacggaatcgccagttaagagaaagagtcaaaaaagttaaaagatcactgcgtcaggcccgaaagaaaggtcgacacctcgagcttgcgaaccaaaagttgtccgaaaaactggcggctggtgcattgcctcacatcaatgcgaggggccccgttagacccccatatttaagagggtag

SEQ ID NO: 12541 - RNA, 1830 nt, synthetic construct
  misc_feature 1..1830: note = source = /note="Description of Artificial Sequence: Synthetic coding sequence"
  source 1..1830: mol_type = other RNA
atggaactgggttgctggacccagctgggcctgacctttctccagctgttattgatttctagcttgccacgcgagtatactgttataaatgaggcatgccccggtgccgaatggaacattatgtgtagagaatgttgtgagtatgatcagattgagtgcgtgtgtcctgggaaacgcgaagtagtgggatatacaattccttgctgtcgaaacgaagaaaatgagtgcgacagctgcctaatccacccaggctgtactatttttgaaaactgcaaatcttgtcggaatgggtcctggggaggaaccctggatgacttttacgtgaagggattctattgcgcggagtgccgagccggctggtacggaggcgactgcatgccatgcagttcttcaccgtgtttccacgacggcacatgtgttctggataaagcaggatcttacaagtgcgcttgtctcgccggttataccggtcaaagatgcgagaacctcctcgaggagaggaactgttccgatcctgggggccccgtcaacggttaccagaaaatcaccggcggacccgggctgataaatggccgccatgctaagatagggaccgttgtgtcgttcttttgcaacaattcttacgtcttatccgggaatgagaaacgcacttgccaacagaacggtgagtggtcaggtaagcagccaatctgcatcaaggcatgccgcgagcccaagatcagtgatctggtgcgccgaagggtcctccctatgcaggtgcagtcaagggagacacccttgcatcaactgtacagtgctgcatttagcaagcagaagctgcagtccgcaccaactaagaaaccagcactgccctttggagatttacccatggggtaccagcacctgcacactcaactacaatacgaatgtatcagccccttctacagacgactaggcagcagccggcgcacatgcctgaggaccggcaagtggagcggtcgagcccccagctgtatcccaatatgtggcaaaatagaaaacatcacagcccctaaaacacaaggccttaggtggccatggcaggcggccatctaccgacgcacctcgggagtgcatgatgggtcactgcataagggtgcgtggtttcttgtttgttccggtgcattggtcaacgaacgcacagtcgtggtcgcagctcactgcgtgacagatttaggcaaggtcactatgattaagaccgccgatcttaaagttgtactcgggaagttctatcgcgatgatgatcgagatgaaaagacaatacaatccctccaaatcagcgccatcatcttacaccctaattacgatcccatcctgcttgatgccgacattgctatcctgaaactgctggataaggcaagaatctcaactcgcgttcagcccatttgcctggccgcctctagagacctctcgacatcttttcaagagagccacatcaccgtcgcagggtggaacgtgctggctgacgtacggagtccaggatttaaaaacgatacactgcgctctggtgttgtctctgtggttgacagcctcctgtgcgaggaacagcacgaggatcatggtatacccgtgagtgtgactgacaacatgttttgcgcctcatgggagccaaccgccccgagcgatatttgtactgccgagacagggggcatcgctgccgtaagttttcccggtcgggcctctcccgagccaaggtggcacttgatggggctagtttcatggagttatgataaaacctgttcccataggctgagcactgcttttaccaaagtactgccctttaaagattggatcgagaggaacatgaagtag

SEQ ID NO: 12542 - RNA, 2163 nt, synthetic construct
  misc_feature 1..2163: note = source = /note="Description of Artificial Sequence: Synthetic coding sequence"
  source 1..2163: mol_type = other RNA
atggagctgggatgctggactcagcttggtctgaccttcctgcagctcctgctgatctcatccctgccccgtgaatacaccgtgattaacgaggcgtgccctggggcggaatggaatattatgtgccgtgagtgttgcgagtacgaccaaattgagtgtgtatgtccaggaaagcgtgaagtggtgggatataccattccttgctgccgtaacgaagagaacgagtgcgatagctgcctaatccatcccgggtgtaccatattcgagaactgtaaatcttgccgaaatggatcctggggcggaactctagacgacttttatgtgaaaggattctactgcgccgagtgtcgtgcgggctggtatgggggcgactgtatgcgatgcggccaagtgttgagagcacctaagggtcagatactactggagagctatccgcttaatgcacattgtgagtggactatccatgcaaaaccaggatttgtgattcagctccgcttcgtaatgctgtcattggagtttgattatatgtgtcagtatgactatgttgaagtaagggatggggataatcgggacggtcagatcattaagagggtatgtggtaatgagcgcccagcacctatccaaagcattggatcttctctccacgtgctgtttcacagtgatggcagcaaaaactttgatgggtttcacgctatatatgaggaaattacagcttgcagttcctccccgtgtttccacgatggcacatgtgtgctggataaagccgggagctacaaatgcgcatgtctagccggctacacaggccagcggtgcgaaaacttattggaggaacgcaattgttccgacccgggaggcccagtgaatggctatcagaagattacaggaggcccaggactaattaacggaagacacgctaaaatcgggaccgtggtaagctttttctgcaacaatagttacgttctgtcaggaaacgagaagcgaacctgccaacagaacggggagtggtctggaaagcagcctatttgtatcaaggcttgcagagaacccaagatctccgatctggtgcgaagacgggtgctgcctatgcaggtccagtcaagagagaccccgctgcaccagctgtattcagccgcattttccaaacagaagctccagtctgcacctactaaaaaaccagcccttccatttggcgacttgcctatgggatatcagcatctgcacacacagctacagtatgaatgtatctcacctttctatcgaaggctgggaagtagtcgaagaacatgtctgcgcactggtaagtggagtggtcgggcgccgtcatgcattcctatctgtggaaagattgaaaacatcaccgcacccaagacacagggtcttaggtggccatggcaggccgcaatttacagaaggacaagtggcgtacatgatgggagtctgcacaaaggcgcttggttcttggtgtgctcgggcgctctggttaatgaaaggaccgtggtggtcgccgcgcattgcgtgactgacctcggcaaggtgactatgattaaaaccgctgatctgaaagtagttttgggtaagttttacagggacgacgatcgtgacgagaaaactattcagtctttgcagatttctgccattatattgcacccaaattacgaccctatcctccttgacgcagatatcgcaattctgaagctattggacaaggcaagaataagcacccgtgtgcagcccatctgcttggcagctagtcgggacctgagtacctccttccaggaatctcacattaccgtggccggctggaatgtgctagccgacgtgaggagcccaggttttaagaatgacacactaaggtcaggcgttgtgtccgtcgtggactccctcctgtgcgaggaacagcacgaagatcacggcatacctgtcagcgtaacagataacatgttctgcgcttcttgggagcctaccgccccatcagacatatgtacagccgagacaggtgggattgctgccgtatcattccccggacgagcatcaccggaacccagatggcatctgatgggtttggtatcttggagctacgacaaaacctgtagccaccgactctccacagcatttacgaaagtgcttcccttcaaggactggatcgagagaaacatgaaatag

SEQ ID NO: 12543 - RNA, 1134 nt, synthetic construct
  misc_feature 1..1134: note = source = /note="Description of Artificial Sequence: Synthetic coding sequence"
  source 1..1134: mol_type = other RNA
atggaggccttactgctgggcgctggcttgctcctgggtgcttacgtgctcgtctactacaatcttgttaaagcgccaccttgcgggggaatggggaatctaaggggtcgaacggccgtggtgacaggtgccaattctgggatcggtaaaatgaccgcccttgagcttgcccgcagaggagctagggtagtccttgcctgtcggtcacaagagcgtggagaagccgcggctttcgacttgcggcaagagagcgggaataatgaggtgatctttatggccctcgacctcgcctcactcgcctcggtgagagccttcgctactgccttcctgagctccgagccgcgtctcgatatattgatccataacgccggcatttcctcctgcggtcggacaagagaggccttcaatctactactgagagtaaatcacatagggccttttcttctaactcacctgcttcttccttgcctgaaggcatgtgccccatcccgggtggttgtcgtggccagtgcagcccactgtagagggcgcctggactttaagagactcgacaggcctgtagtgggatggcgacaggaactccgcgcatacgccgataccaagcttgccaacgtactatttgctagagagcttgccaaccaacttgaggctacgggcgtcacctgctatgccgcacacccaggccccgttaattcagaactgttcttgcgacatgttccagggtggcttagaccccttctgcggcctttagcctggctcgtgcttcgggcacctcggggtggtgctcagacgccattatactgtgctttgcaggagggaatcgaaccactttcaggtcgctactttgccaattgtcacgtggaggaagtgcccccggcagcccgggatgatagggccgctcaccgcctctgggaggccagcaagcggctggccggactcggtcccggcgaagacgccgagccggacgaagatccacagtctgaagacagcgaggcacccagctccctgtccacgccccatcccgaggaacccactgtgagtcagccatacccaagcccacagagttcccctgatcttagtaagatgacccaccgcatccaagccaaggttgaacccgagattcaactgtcttag

SEQ ID NO: 12544 - RNA, 381 nt, synthetic construct
  misc_feature 1..381: note = source = /note="Description of Artificial Sequence: Synthetic coding sequence"
  source 1..381: mol_type = other RNA
atgatttcatttcacgtcatttttctgtccctggggcgtggaaagctcttcctcccagtaaacttttgttttctcaagctgaaaaactctcaagtccgaattccaaaggactttacatgcaatctgcacgtgctcttccggacggtccaaggtgaggatcggaataccatgttcagaggccactggtctatctacagtcgaaatttccccctcgcagtcgtacctgcttatgtcacagaagacggaaagaacacctcgcatagagcctccggccagttttgcaacgcactgtctcagggcgaaattccaagttccttacagctggtaaatagttacgctttggagcccaggaccgatatgccatgtaatttcctcacatag

SEQ ID NO: 12545 - RNA, 876 nt, synthetic construct
  misc_feature 1..876: note = source = /note="Description of Artificial Sequence: Synthetic coding sequence"
  source 1..876: mol_type = other RNA
atggcagttacactgagcctgctgctcggggggcgtgtctgcgccgcagtgactaggtgcgggttcgccacgaggggcgtagccggccctggccccatcggccgagaacctgaccccgattctgattgggagccagaggagcgcgaattgcaagaggtggaatctaccctgaaacgccagaaacaggccattagatttcagaaaatacgcagacagatggaggcaccgggtgccccaccccggaccctcacctgggaggctatggaacagatccgctatctgcacgaggagttcccagagtcttggtctgtgccgaggctggctgaaggctttgacgtgagcaccgacgtgattcgccgcgtgctaaaaagcaaatttcttccgacacttgaacagaagttgaaacaagatcagaaggtgctgaagaaggctgggctggcacattcactccaacaccttcggggaagcggaaacactagcaagctgctcccagcaggacattccgtttcaggctccctcctcatgcccggacacgaagcatcatccaaagatcctaaccactctacagccctgaaggtcatcgaatccgacacacaccgtaccaatacgcctagaaggagaaaaggtcgaaacaaagagatccaggatctggaagaaagttttgttccagttgccgcgcctctagggcatccaagagagttacaaaagtacagctctgatagtgagtcaccccgagggaccggatctggagccctaccatcagggcaaaaactagaggaactgaaggcagaagagccagataatttcagcagtaaggtggtgcaacgtgggagagaattcttcgattccaatggcaattttctgtaccgaatctag

SEQ ID NO: 12546 - RNA, 2541 nt, synthetic construct
  misc_feature 1..2541: note = source = /note="Description of Artificial Sequence: Synthetic coding sequence"
  source 1..2541: mol_type = other RNA
atgttcaagtgctggtccgtggtcctggtgcttggattcatttttttggaatccgaagggagacccacgaaggagggcggatacggactgaaatcctatcagccacttatgcgcctacggcacaaggagaaaaaccaggagtcatcacgcgtgaaagggttcatgatccaggatgggccttttgggtcatgtgagaacaagtattgcggtctgggaagacattgcgtgacctccagagaaaccggccaggcagaatgtgcatgtatggacttatgtaagcggcactataaaccagtttgtggatcagatggcgagttctacgagaaccactgcgaggttcatcgtgccgcgtgccttaaaaagcaaaaaatcaccatcgtgcacaacgaggactgtttcttcaagggcgacaagtgtaagacaacagaatatagtaagatgaagaatatgttgttagaccttcaaaaccaaaagtatattatgcaagaaaacgaaaatcccaacggcgacgatattagtaggaagaagcttttggtcgatcagatgtttaagtactttgacgcagacagtaatgggttggtggacatcaatgagctgacacaggtgatcaagcaggaggagctgggtaaagacctttttgattgcactctgtatgtgctccttaaatatgatgattttaatgccgacaagcatctagctctcgaggaattttaccgggcttttcaggttatacagctttctctgccagaagatcagaaactgtcaattactgcagctactgtcggacagagcgctgttctgtcttgcgctatacaaggaactctaagacctcctatcatctggaaacgtaataatataattttgaataatctcgaccttgaagatattaacgactttggagacgatggcagtctctacattaccaaagtgaccacgacacacgttggtaactatacttgctatgctgacggctatgagcaggtatatcagactcacattttccaggtgaacgtacctcccgtgatccgcgtctacccagaaagtcaggcccgcgagccgggtgtcacagccagcttacgctgccatgctgagggaattccaaaaccacagctgggctggttgaagaatggcatcgacatcacacctaagctcagcaaacagctcactttgcaagccaacgggagcgaggtgcatatctctaatgtcagatatgaggataccggagcctacacctgcatcgctaaaaatgaagctggcgttgacgaggacatctcttcattattcgtcgaggattccgcgagaaagacactggcgaacattctttggcgcgaggagggcctcggcatcggaaatatgttttatgtcttttatgaggatggcatcaaagtgattcagcctattgagtgcgagtttcagagacatattaaaccttctgaaaaactgcttggttttcaggacgaagtctgccctaaagcggagggcgacgaggtgcagagatgcgtgtgggcctctgccgtcaacgttaaagataagttcatttacgtggcccagccaacactggaccgtgtgctgatcgtggacgtgcagagccagaaggtcgtgcaggccgtgagcaccgacccggtccccgtgaagcttcattacgataaatcacacgaccaagtctgggttctgtcttgggggacattagagaaaacttcacccaccctccaggtcatcaccctggcctctgggaacgtgccacaccatacgattcatacacagcctgtggggaagcagtttgatcgggtggacgatttctttataccaaccactaccctcattattactcacatgagatttgggttcatactgcataaggatgaggccgctctgcagaagatcgatctggaaaccatgtcatacattaagaccattaaccttaaagattacaagtgcgttccccagtcactggcgtatactcatctagggggttactatttcatcggttgcaagccagactcaacaggggcagtatcacctcaagtaatggtcgatggggttacagattcagtgattggttttaatagcgacgtgaccgggacgccatatgtatctcctgacggacactacctggtaagcatcaatgatgtcaaagggcttgtcagagtgcaatatattactataagaggcgagatacaggaagcattcgatatttacacgaacttacacatttcggacctcgcatttcagccaagtttcactgaagctcaccaatataatatctatgggtcaagcagtacacagacagatgtgttattcgtcgagctctcctctggcaaggtgaaaatgatcaagtccctgaaggagcctctcaaagctgaggaatggccatggaacagaaagaaccgtcaaatccaggattcaggcttattcgggcagtacttgatgacaccttcaaaggactctctcttcattttggacgggcggctgaacaaactgaactgtgagataacagaagtggagaaaggaaatacggtaatctgggttggagatgcatag

SEQ ID NO: 12547 - RNA, 291 nt, synthetic construct
  misc_feature 1..291: note = source = /note="Description of Artificial Sequence: Synthetic coding sequence"
  source 1..291: mol_type = other RNA
atgagagtcacttctgccacctgcgccttactgctggccttgatctgttctgtgcaattaggcgatgcatgtctcgatatcgataagctcctggctaatgtggtatttgacgtgtctcaggatctgctgaaagaggaattagcccgctataaccccagtcctctcacagaagagtcctttctgaatgttcaacaatgctttgctaacgtgtctgtgaccgagagattcgcacattccgtggtgatcaaaaagatccttcagtcgaatgactgtattgaggctgccttctag

SEQ ID NO: 12548 - RNA, 1971 nt, synthetic construct
  misc_feature 1..1971: note = source = /note="Description of Artificial Sequence: Synthetic coding sequence"
  source 1..1971: mol_type = other RNA
atgagaactgtcgtgctgactatgaaagcctctgtgattgaaatgttcctcgtgctccttgtaaccggagtacactccaacaaagaaactgccaagaaaataaagcgacctaaatttacagtgccacagatcaattgcgatgtaaaagccggcaagatcattgatcccgagtttattgtgaaatgtcccgcaggttgccaggacccaaaataccacgtgtatggcacggacgtgtacgcatcttatagctcggtgtgtggagcagcagtccattccggtgtgctggacaattctggggggaagatcttagtccggaaagtcgccggccagtctggctataagggttcatattcaaatggagtccagagtctgtcactcccgcgctggagggagagctttattgttcttgagtccaaacccaaaaagggcgtaacttatccatctgccctcacgtattcctcgagtaagtcccctgcagcccaagctggtgaaaccacaaaggcctaccaaagacctccaattcccggaacaaccgctcaacccgttacactgatgcagctccttgccgtcaccgttgccgtggcaactcctactactctccccagaccatctccttcggccgcgagcactacttcgatcccccgccctcaatcggtcggccaccggtcccaagagatggatctgtggtctactgccacttatactagttcccagaaccgcccacgagcggaccccggactcgtgcccaaggaggaactttccacccaaagtctggagccagtgagcctgggagaccccaattgcaagattgacttgtcgtttctcattgatggatccacttcgatcggtaaacggagattccgaatccagaagcaactgctggcagatgtggcccaagcgctcgatatcggtccagccggccccctaatgggcgtggttcagtatggcgacaacccagccacccactttaacctgaaaacccatactaattcacgtgatttgaaaacagctatcgaaaagataacccagcgggggggcctgagcaacgtggggcgcgcaatttcctttgttactaagaacttcttttcaaaagccaacggcaatcgctccggagcaccgaatgtggttgttgttatggttgatggatggccaaccgacaaagtggaggaggccagcaggcttgctagagaatcaggaataaatattttttttatcacgatagagggagcggcggagaatgaaaagcaatacgtcgtggaaccgaacttcgctaataaagctgtctgtagaacaaatgggttttactccctgcacgttcagtcatggttcggattacacaaaactctgcaacccttggtcaaaagagtttgcgacacagatcggctcgcttgttcaaaaacatgccttaactcagccgacatcggctttgtcatcgatgggtcatcatcagtcggcacgggtaacttccgtaccgtccttcagttcgtgaccaacttgaccaaagagtttgaaatctcggatacggatacccgaatcggggctgtgcaatacacctacgaacaaagattggagtttggtttcgacaaatattcgtctaagccagatatcttaaacgccatcaagagagtgggatactggagcggcggaacatcaactggggccgcaataaactttgcccttgagcagctctttaagaaatcgaagcctaacaagagaaagttgatgattctgataacagacgggcgttcttacgacgatgtgaggattcccgccatggccgcacatctcaagggcgtgattacctacgccatcggagttgcgtgggccgctcaggaagagcttgaagtcatagctacacacccggctcgtgaccatagctttttcgttgacgagtttgataacctgcaccagtacgtgccaagaatcatccagaacatctgtaccgaatttaactcacagccacgtaattag

SEQ ID NO: 12549 - RNA, 2082 nt, synthetic construct
  misc_feature 1..2082: note = source = /note="Description of Artificial Sequence: Synthetic coding sequence"
  source 1..2082: mol_type = other RNA
atgaggaccgtcgtcctgactatgaaagcaagcgtgatagaaatgtttctggtcctccttgtgactggagtgcatagcaataaagaaacagcaaaaaagattaagcgaccaaagtttaccgtgcctcagatcaactgcgacgttaaagcaggcaagatcattgacccagaattcattgttaagtgtcccgcgggctgtcaggaccctaaatatcatgtctacgggacagacgtgtacgctagctattcatctgtgtgcggtgctgcagtgcacagtggagttctggataactcaggaggtaagatcctggtgcggaaggtcgcaggacagtccggatacaaaggtagttacagtaacggagtgcagagtttgtcactcccgaggtggagagaaagtttcatcgtgctcgaatccaagcccaaaaagggtgtgacatacccttctgccctgacctatagcagctccaagtcaccagccgcacaagctggggagactactaaagcttaccaaaggccacccattccaggcacaactgctcagcccgtaactctgatgcagctgctagcagtgacagtcgctgtggctactccaacaactctcccgcgaccctctcctagcgccgcttcaaccacgtcaatacctcgaccgcagtcagtgggtcacagatcccaggaaatggacctttggagcactgcaacctatacttcaagccagaatcggcctcgggccgatccaggtatacagaggcaggatcctagcggtgccgcctttcagaaacctgttggtgccgatgtgagtttgggggagatggatagctggaagcctggcagcgtcttactggatgaggggcttgtgcctaaagaggaactctctacccaaagccttgagcccgtgtcactcggtgatcctaattgtaaaatcgatctaagtttcctgatcgacggtagtactagcattggtaaaagacggttcagaatccagaaacaactgctcgcagacgtggcccaggctctagacattggcccagctggaccattgatgggggtcgtccaatacggcgacaatcctgcaactcactttaatctcaaaacgcatacaaactcacgagacttgaagacagccattgagaagatcacacaacgcggcggactgtccaatgtcggtcgggccatctccttcgtaacaaaaaactttttttctaaagccaatggaaaccgaagtggtgcacctaatgtcgtcgttgtcatggtcgatggctggcccaccgataaggtagaggaggcttcacgcttggctcgggaatccgggatcaatatcttcttcataactatcgaaggagccgccgaaaacgaaaagcagtatgtggtggaacccaactttgctaacaaagccgtgtgccgcactaacgggttctactcactccacgtgcagagctggttcgggctccataagacactgcaacctctggtgaagagggtgtgcgacacagatcggttggcttgttcaaagacgtgtctgaactctgcggacattggatttgtgatcgacggctcatcaagcgtgggcaccggcaactttcgcaccgtcctacaatttgtcaccaatctgaccaaagagttcgagatcagcgacacagacacgagaataggggccgtgcagtacacctatgagcaaagactagaattcgggttcgacaagtactcttccaagcctgacattctcaatgctattaagagagtcggctactggagtgggggcacctcaaccggtgcagccattaacttcgcgctggagcagttgttcaagaaaagcaaacccaataaaaggaagctcatgatccttatcacagatggcagatcttatgacgatgtccggatacctgcaatggcagcccaccttaaaggcgttattacttacgctatcggagtggcttgggcagcccaggaagagctcgaggtgattgctactcatccagctagagatcactcattcttcgtcgacgagttcgacaacctacaccagtacgttcccagaatcattcaaaacatttgtacagagttcaacagccagccaagaaattag

SEQ ID NO: 12550 - RNA, 555 nt, synthetic construct
  misc_feature 1..555: note = source = /note="Description of Artificial Sequence: Synthetic coding sequence"
  source 1..555: mol_type = other RNA
atgttctgtctgctgcacctttgcttttacctcgctaacttcgctagcagcatcaaacggacgcatgctgtgaatggctgttgtggactacaaatgatcgccctctgggcacaaagctctggtaacgccgatgcgcgagttgaagagatcctcgcgggcgaggaacggagactggccgcgcttttagggtcacagggaatgcgcttctgggtgtgccttgccgcctgtcgcgcgatgtggggactagctgctaggaggggacgagccgaagactctagtagctcaccagtggacgcgagcaagtttccctggcgtgggggtcagcatagaacaacgatgatgccgtgtttgctccgcgtaggagtgtttcgaccctgtcatgtgagacctactggggacccatcctgcgatgtacagccaccgagattggggttcagtagagtgcccgatacccaagtggccttctacggcagcggccactgggaccctaccccatttagtgtgcattcctgtttttttaatttccaagttcgcaaaattatcttccttttatag

SEQ ID NO: 12551 - RNA, 864 nt, synthetic construct
  misc_feature 1..864: note = source = /note="Description of Artificial Sequence: Synthetic coding sequence"
  source 1..864: mol_type = other RNA
atgactagtgctgcccattactaccccaaactgatgagcatcatgggcaacgttctgcgctttcttccagcgtttgttaggatgaaacagctaattgaagaaggttacgtcggtgaaccgttggtgtgtgaagtgcaagtacacggcgggagcctgctagggaagaagtacaactggagctgcgacgacttaatggggggcggtggattgcatagcgttggtacctacattattgatctgcttacattcctgaccggccaaaaagccgtcaaggtgcatgggcttctgaagacgttcgtcaagcagacagatcacattaagggcatacgacagattacctctgatgatttctgtacatttcagatggttctggaggggggggtatgctgcaccgtgaccctgaattttaacgtgccaggagaattcaaacaggacgttaccgtggtaggatctgccggaagattgttagccgtgggaaccgacctttatggacagcgcaactcagcccctgaacaggaactcctggtgcaggatgccacccctgtcagcaatagccttctacccgagaaggcattcagcgatatcccttccccttatctgcgaggaaccataaaaatgatgcaagcagtcagacaagcattccaggaccaggatgaccgcagaacgtgggatggaaggcctttgacaatggccgcaacatttgatgattgtctatacgctttatgtgtagtggacacgatcaaacgtagctcccagacgggagagtggcagaacattgctataatgaccgaagaacccgaactctcaccagcatatcttatctctgaggctatgagaaggagccggatgtcactttattgttag

SEQ ID NO: 12552 - RNA, 1173 nt, synthetic construct
  misc_feature 1..1173: note = source = /note="Description of Artificial Sequence: Synthetic coding sequence"
  source 1..1173: mol_type = other RNA
atgctgccaggtgtcggcgtgttcggtacctctctgaccgccagggtcataattcctctgctgaaggacgagggttttgcggttaaggccctgtggggtcgcacacaggaagaggccgaagaactggcaaaggaaatgtcggtcccgttctacacttcaaggatcgatgaggttctgcttcaccaagacgtggacttagtatgcattaacttgcctccaccactgacacgacagattgccgtgaaaactcttggaattgggaagaacgtgatctgtgatagaactgcaactcctctggacgcatttagaatgacatccgctgcgcactactaccccaaactgatgtccattatgggaaatgtccttcggttcctgcctgccttcgtacggatgaagcagctcattgaagaggggtacgtgggagaaccgctggtgtgcgaggtacaagtccatggcgggtccctgctgggcaagaaatataattggtcatgcgatgacttgatgggcggcggaggcctccattctgtgggaacctatatcattgatctgcttacgtttctgactggccagaaggctgtcaaggtgcacggactgctgaagacctttgtcaagcaaactgaccacatcaagggcatccgacagattacatccgacgatttttgcacctttcagatggtcctcgagggaggagtgtgttgcaccgtcacactgaatttcaacgtgcccggagagtttaagcaagatgtgaccgtggtgggctcggctggacgactacttgctgtgggcaccgatctgtatggtcagagaaactccgcccccgaacaagagctgttggtacaagacgcaacccccgtctccaattctctgctgccagaaaaagcgtttagcgacatcccctccccttacctgagaggaactattaagatgatgcaagcggtccgccaggccttccaggatcaagacgacagaaggacttgggacggcagaccactgacaatggccgctacattcgacgactgcctgtacgccctgtgtgtggttgacacaatcaaacgctcatcacagacaggtgagtggcaaaatattgcaataatgactgaagagcccgagctgtctcccgcttatttaattagtgaggctatgcggaggagtcgcatgagcctctactgctag

SEQ ID NO: 12553 - RNA, 5718 nt, synthetic construct
  misc_feature 1..5718: note = source = /note="Description of Artificial Sequence: Synthetic coding sequence"
  source 1..5718: mol_type = other RNA
atgcagtctcggctcctgcttcttggggctcccggggggcacggcggccccgcttcacgcaggatgcgcctccttctgcgccaggtggtccagcgtcgaccaggcggcgataggcagaggccagaggtgagattactgcacgcaggcagcggcgcagatactggggacacggtcaatatcggggacgtatcttataagctaaaaatccccaagaaccctgagctcgtgccccagaattatataagcgactcactggcacagagcgtagtgcaacatctgaggtggattatgcagaaggacctactggggcaggacgtgttcctgatcggtcctccagggccactaaggaggtccattgcaatgcagtaccttgagttgacgaagcgcgaagtggaatacatcgccctaagtcgcgataccaccgaaacagacttgaagcaacgccgagaaatccgcgctggcacagcattctacatagatcagtgtgccgtgcgggctgcaaccgagggaaggaccctgatactcgaagggcttgaaaaagctgaacgaaacgtgctgccagtcctcaataatctcttggaaaatcgagaaatgcagcttgaggacggccgatttttaatgtctgccgaacgatacgacaaactattacgcgaccacacaaaaaaggaactcgacagctggaaaatagtccgagtgagtgaaaacttcagagtcatcgcgctcggcctacccgtaccgcggtacagtggaaaccctctggaccctccccttcgttctaggttccaagcccgggatatctattacctgccattcaaagaccagctgaaactgctgtacagtataggtgctaacgtgtctgcagaaaaagttagccaactgctgtcattcgccaccaccttgtgcagtcaggaaagcagcaccctgggattacctgattttccactggacagtctagctgccgcagttcaaatcctcgactcgtttcctatgatgcctatcaaacatgcaatacaatggttgtacccctattcgatccttctaggacacgagggcaagatggccgtggagggtgttctgaaacgcttcgagttgcaggactccggatcctccttgttacctaaagagattgtcaaggttgaaaagatgatggagaaccatgtatcacaggccagtgtgactatccgcatagcagacaaagaggttacgatcaaggtaccagccggtacaagactgcttagccagccttgcgctagtgatcgttttatacagacgctgagtcataaacagttgcaggccgagatgatgcaaagccacatggttaaagacatatgtctcataggcggtaagggttgtggcaaaacggtgatcgcaaagaactttgctgatacactgggttacaatatcgagcctattatgctatatcaggatatgactgctcgcgacctgttgcaacaacggtatacactgcctaacggcgacacagcgtggcggagttctccccttgtgaatgctgccttggaggggaagctcgtgttgctggatggcatccaccgtgtcaatgcgggaacgctcgccgtgctgcagagacttatccacgatcgggagctctccctttacgatggaagtcgcctgttaagagaagaccggtacatgcgcctaaaagaagaattacagttgtctgatgaacagcttcaaaagcgaagtatatttcctatccacccttcttttaggattattgctcttgctgaacccccagtgatcgggtcgacggctcaccagtggctgggacccgaatttctcactatgttcttctttcattacatgaaacccctggttaaaagtgaggaaattcaggtgatcaaggagaaggtccccaacgtacctcaggaagctttggataagctgttgtcttttacacacaagcttcgcgaaacccaggaccctacagcccagagcctggccgctagcctgagcacccgtcagctgctgaggatcagcagaaggctgtctcagtaccctaatgaaaacctgcactccgctgtaaccaaggcttgcctgagccgctttcttccctctctagcaaggagcgcattagaaaagaaccttgccgatgctacaattgaaattaacaccgatgacaatctggaacccgagctcaaggattacaagtgtgaggtaacgagcgggacactgcgaattggcgcggtgagtgcgccaatatataatgcccacgagaaaatgaaagtgccggatgtgttattttacgacaatattcaacatgtaatcgtcatggaggacatgctcaaagactttctcctcggcgagcatttgttattagtcggaaatcaaggtgttggcaaaaataagattgtcgaccggttcctccacctgctgaacaggccaagagaatatatccaattacaccgcgacacaactgtacagacactgacattgcaaccaagtgtgaaggatgggttgattgtatatgaggattcccctctcgttaaagcagttaaactgggacacatcctggtggtggatgaggcagataaggcccccaccaacgtgacatgcatcctcaagaccctcgtggaaaatggagagatgatcctggccgatggccggaggatcgtcgctaacagcgccaacgtcaacggccgcgaaaacgtagtggtcatccaccctgactttcggatgatcgttctggccaataggcctggcttcccttttcttggtaacgactttttcggcaccctaggtgatatattttcctgccacgccgtggataacccaaagccgcactctgaactggagatgctgagacagtatggaccaaacgttccagaacccatcttacagaaactggtagccgccttcggagagctacgctcattggctgatcagggcataatcaattacccttattcaaccagggaggttgtaaatatagtaaagcacctccagaaatttccgacagagggcctatcttccgtcgtgaggaatgttttcgacttcgacagctacaataacgatatgcgagagattctgatcaatacactgcacaaatatggaatccccatcggggctaaacccacttctgtgcagctggcaaaggagcttaccctgccagaacaaactttcatgggctactggacaatcggtcaagcaagaagcggtatgcaaaaacttctctgtccggtcgagacccaccatatcgacatcaaagggcccgcacttattaatatccaagagtacccgatcgagcggcacgaagagagatcacttaacttcaccgaggaatgcgcttcatggaggatcccgctcgacgaaataaacatcatttgtgacatcgccacatcacacgagaacgaacaaaatacattatatgtcgtcacctgcaatcctgcctccctgtatttcatgaatatgactggcaagtcaggatttttcgtggacttctttgacattttcccccggaccgctaatggggtttggcatccatttgtgacagtggccccactcgggagccccctgaaggggcaggtcgtcctccacgagcagcaatcaaacgtcatcctattactggatacaacgggcagagccttgcaccgattgatcctgccctcagagaaatttacaagcaagaagcccttttggtggaacaaagaggaggcagagacatataaaatgtgcaaggaatttagtcataagaactggttggtgttttataaagaaaagggtaattccctcaccgtcctcgatgtgctggaaggtcgcacccacaccatcagtctgccaatcaatttaaaaactgtgttcctggtggcagaggacaaatggttactcgttgagagtaagactaaccagaagtatttgttaactaagcccgcgcacattgaatccgagggatctggagtgtgtcagctgtacgttctgaaagaggaaccaccatcaacaggcttcggtgtaactcaggaaaccgagttctcaatacctcataaaatctcttcagaccaactgtcaagtgagcacctctcctcagccgttgaacagaagattgctagccccaatagaatactctctgatgagaagaactacgccaccatcgttgtaggtttccctgatcttatgagcccaagcgaggtctactcctggaagcggccatcttctcttcacaagcgcagcgggactgacaccagcttctaccgcggcaagaagaagcgggggacgccgaagcagagcaattgcgtcactctgttagatacaaatcaggtcgtgcggatcttaccaccaggcgaggtgccactgaaggatatctatccaaaagacgtaacaccaccacagacaagtggctatattgaagtgactgacctgcaatcgaaaaaacttagatacattccgattccgcggtccgaatccctgagcccgtacaccacctggctctcaaccattagcgacaccgatgctctgttggcggaatgggataagtcaggagtggtcacagtagatatgggggggcacattagattatgggaaacagggctcgagcgactgcagcgtagccttatggaatggagaaacatgatcggccaggacgacaggaacatgcaaattactattaaccgcgattctggcgaggatgtgagctctcccaagcacggcaaggaagaccctgacaacatgccccatgtgggaggtaacacatgggctggcggcacagggggccgggataccgcagggcttggaggcaaagggggcccatataggctggatgccggtcacaccgtgtaccaagtctcacaagccgaaaaggatgctgtccccgaggaggtgaaacgagctgcccgagaaatgggacagcgagcctttcagcagaggctcaaggaaatacagatgtctgagtacgatgctgcaacctatgagaggttttccggcgccgtcaggaggcaggtacattctttgcgcatcattctcgacaacctccaggctaagggcaaggaaaggcaatggttacgtcaccaggccacaggagagctggacgacgccaaaatcattgacgggcttactggcgagaaagccatttacaaacggaggggggagctggaaccccagctcggctcgccacaacagaaaccaaaaagattgagactggtggtggacgtcagcggtagcatgtaccgctttaaccgcatggacggtcgcctggaacgtactatggaagccgtgtgcatggtcatggaggcctttgaaaattatgaagaaaagttccaatacgacattgtcggacactccggagatgggtataacataggcctcgtgcccatgaacaagattcccaaagacaacaagcagcgcctggaaattctgaagacaatgcatgcgcattcgcaattttgtatgagcggagaccatacgctagagggcactgaacacgctattaaagaaatcgttaaggaggaggccgacgaatacttcgtgatcgtactctcagacgccaacttaagccggtacggcatccatccagcaaagtttgcccaaatcttaacaagagatcctcaggtgaacgcttttgccattttcattgggagcctgggcgatcaggcaacacgattgcagcggacactgccagcgggccgatcctttgtcgctatggacactaaggacatcccgcaaatcctacagcagatcttcacgagcactatgctgagtagcgtctag

SEQ ID NO: 12554 - RNA, 561 nt, synthetic construct
  misc_feature 1..561: note = source = /note="Description of Artificial Sequence: Synthetic coding sequence"
  source 1..561: mol_type = other RNA
atggaagccttaccccttttagccgccacaaccccagatcatggccgccacaggagactgctactgctcccactgctactatttctcttgcccgccggcgccgtgcaaggatgggagacagaggagcgccctcgcacgcgcgaggaagagtgtcacttttacgcaggtggccaggtataccctggcgaagccagcagggtaagcgtcgctgatcactcccttcacctgagcaaagccaaaatctccaaacctgccccttactgggagggcacagcagtgattgacggcgaattcaaggagctgaaactgaccgattacagaggaaaatacctggtgttctttttctatcccctggatttcactttcgtgtgtcccacagaaattatcgcattcggggatcgccttgaagaattcaggagcataaacacagaagtcgtagcatgttccgttgacagtcaatttacgcacctcgcctggtctgtatcctacacatatattcggcgcaagaagcgaatggacttgctcctcaagcatgggcaaataactctggatatgatttag

SEQ ID NO: 12555 - RNA, 816 nt, synthetic construct
  misc_feature 1..816: note = source = /note="Description of Artificial Sequence: Synthetic coding sequence"
  source 1..816: mol_type = other RNA
atggaagctttgcccttgcttgccgccactactccagatcacggccggcaccgtcgactattgcttttgcctctccttctctttctactgccagccggtgccgtgcagggatgggaaacggaagagcgtcccaggactcgtgaggaagaatgccacttctatgccggtggtcaagtctacccaggggaagcctcacgggtgtctgtagccgatcactctctgcacctatcaaaagccaagatctcaaagcccgccccctattgggaggggacggcagtgattgacggagagtttaaagaactgaagcttacagactatcgagggaagtacttggtttttttcttctaccccttagattttacatttgtgtgcccaaccgaaatcattgcttttggcgatcgattggaggagttccgtagcattaataccgaggtagttgcatgtagtgtggattcccagttcactcacctagcctggatcaatacacctcgtagacaggggggcctcggacccataagaattcccctcctcagcgacctaacccatcagattagcaaggactacggagtatacttagaggactcaggccacacactacgcggcctattcatcattgatgataaggggatcctgagacaaataacacttaacgatctgccagtcggaaggtccgttgatgagacactccgattggtgcaagcttttcaatataccgataagcatggagaggtgtgcccagccgggtggaagccagggtctgaaacgataattccagatccagccggcaaactaaaatactttgacaaattgaactag

SEQ ID NO: 12556 - RNA, 558 nt, synthetic construct
  misc_feature 1..558: note = source = /note="Description of Artificial Sequence: Synthetic coding sequence"
  source 1..558: mol_type = other RNA
atggaccaccgcagtagactgaggggcacaggcctgaaccgtatcccaggaacacagagcagggccccaagggtgcctctcccatttcacgtccagcaggaagctagagagggtgaggactgggaaagggagcctcctagacagagaccacctatctacgagccacccgaatctgaggaactgccagataacgtgatggtatcgaaacccgcgccttactgggaaggtacagccgtcattgacggtgaatttaaggaattgaagctcacagactaccgggggaagtatctcgtattttttttctaccctctagactttacatttgtgtgccccactgaaatcatagcttttggggataggctggaagaattccgctcaattaataccgaggtggtggcttgcagtgttgatagccaatttacccacctcgcttggattaacacacctcgccgacaaggaggactggggcctatccgtattcccctactaagtgatctgacccaccagatcagcaaagattacggcgtgtatttggaggatagtggacacactttgtag

SEQ ID NO: 12557 - RNA, 843 nt, synthetic construct
  misc_feature 1..843: note = source = /note="Description of Artificial Sequence: Synthetic coding sequence"
  source 1..843: mol_type = other RNA
atggcacgcttttgggtttgtgtggccggtgccggatttttcctcgcgttcctcgtgctgcactccaggttttgcggatctcctgtgctgcgaaactttactttcgctgtgtcttggcggacggaaaaaatcctgtataggctggacgttggatggcctaagcatccagaatacttcacaggcacaacattttgcgtggctgtagactccctaaatggactcgtctacattggacagcgcggcgataacatcccaaagatccttgtctttaccgaagacgggtattttctgagggcttggaattatacagttgacacgccccacggcattttcgccgcctccacattgtacgaacaatctgtctggattacggatgtgggatctgactttatgattttgtggcttcacggggagaatgggactggacctgctaaattcaacatccctcactcagtaaccctcgactctgctggacgcgtttgggttgcggatcggggaaacaagagaatacaagtttttgacaaggacactggtgagtggctcggcgcgtggaacaattgttttacagaagagggcccaagttcggtccgcttcacgcccgatggtaagtatctaatcgtagcgcagctgaacctgagccggctgtctgtcgtcgcggcccctccagtcggtagcattggcgagtgctccgtgatcagtaccattcagttggcagaccaggtgcttcctcatctcctcgaggtggatagaaaaaccggagcggtatacgtggccgagatcggagccaagcaggtgcaaaagtatgttcccctgaatagttatgttccctcctttggatcttag

SEQ ID NO: 12558 - RNA, 1044 nt, synthetic construct
  misc_feature 1..1044: note = source = /note="Description of Artificial Sequence: Synthetic coding sequence"
  source 1..1044: mol_type = other RNA
atggcccgtttttgggtttgtgtcgctggtgctggtttttttctcgcctttctggttttgcatagcagattctgtggttctcctgtcttgcgcaattttaccttcgccgtgtcctggcgcactgagaaaattctctacaggctagacgtcggatggcctaagcaccccgaatactttaccggaaccactttctgcgttgctgtggactcactcaacggtctggtgtatataggtcaacgcggggataacattcctaaaattctggtgtttaccgaggacggatacttcctaagagcttggaactacacagttgacacaccgcacggcattttcgcggcttccactttgtatgaacagtccgtctggattaccgacgtgggtagcggctttttcggacacacggttaaaaagtatagctccttcggggatctggtccaggtgctggggacaccagggaaaaaaggaaccagtctgaatcctttacagttcgacaatcctgccgaactgtatgtggaggacacaggggatatatacatagtggacggtgatgggggcctgaataataggctaattaaattgtctcaagatttcatgattctttggttgcatggcgaaaacgggacgggaccagccaagtttaacatacctcacagtgtgacacttgattccgccggccgtgtatgggtcgctgaccggggtaataagaggatccaggtgtttgataaagatacaggagagtggctcggtgcttggaacaactgtttcacagaagaaggaccctctagcgtgcggttcacaccagacggaaaatatttaatcgttgcgcagcttaatctctccagacttagcgtggtggcagcacctcctgtcggtagcattggcgagtgctcagtgattagtaccatacagttagcagaccaggtgctcccacatctgctcgaagtcgatcgcaagaccggcgccgtttacgttgccgagatcggcgccaaacaggtgcaaaaatatgtgccactgaactcatatgtgccaagctttggtagctag

SEQ ID NO: 12559 - RNA, 1707 nt, synthetic construct
  misc_feature 1..1707: note = source = /note="Description of Artificial Sequence: Synthetic coding sequence"
  source 1..1707: mol_type = other RNA
atggtcctgctgcattggtgtctcttgtggctgctgtttcccctctcttcccggacacagaaacttcctactagggacgaagagttgtttcagatgcagattagagacaaggcatttttccacgattctagcgtgattcccgatggggccgaaatctcaagttacctgtttagggacaccccgaagaggtatttcttcgtggtcgaggaggacaacactcccctatctgtaactgtgactccctgtgacgccccacttgaatggaaactatcactccaagagctgcctgaagatagatccggtgagggcagtggcgatctggaaccccttgaacagcagaagcagcagattattaatgaggagggtacagaactatttagttacaagggcaatgacgtggaatacttcatctcctcctcatcccccagtgggctctaccagctggacttactgtctaccgaaaaagatacgcacttcaaggtgtacgccaccaccacaccagagagcgaccaaccatacccagaactgccatacgatccaagagtagacgttactagtctgggaagaacaacggttacactcgcctggaaaccttcacccaccgcctctctgctgaaacagccaatccagtattgcgttgtcatcaataaggagcataattttaaaagcttgtgcgcagttgaagccaagttgagtgccgatgatgctttcatgatggctccaaagcccggactggatttttcccccttcgacttcgcccacttcggcttcccctctgataattctggtaaagagcgttcgttccaagcaaagccaagccccaagctaggtagacacgtgtattcaaggccaaaagtggatatccagaagatctgcataggcaacaagaatattttcaccgtatctgatcttaagcccgatactcaatattacttcgacgtcttcgttgtgaatatcaactctaacatgtcgacagcttatgtgggaactttcgcccgaactaaagaggaggccaaacagaagacagtcgagctgaaggatggaaaaataacggatgtatttgttaagcgcaagggtgctaaattcctgcggttcgcacctgtctcctcacaccagaaggtcaccttttttattcattcttgtttggatgcagtgcaaatccaggtgaggagggatggcaagctgttactcagccagaacgtggaaggcatacagcaattccaactgagaggcaaacccaaggccaaatacttagtgagactaaaggggaataagaagggcgcctcaatgcttaagattctggctaccaccaggcctacaaaacaaagtttcccttcactgcccgaggataccagaatcaaagcattcgacaagctccgcacttgcagttcagccacggttgcatggcttggcactcaggaaagaaacaagttctgcatctacaaaaaagaggtggacgacaattacaacgaggatcagaaaaagagagaacagaatcagtgcctcggccccgacatccgcaaaaaaagcgaaaaggtgttatgcaagtacttccatagccagaacctgcaaaaggcggtcactaccgaaactataaaaggcctacagccaggcaaaagttacctgctggatgtgtacgtcattggccacgggggacattccgtgaagtaccagagtaaggtggtaaagaccagaaagttttgttag

SEQ ID NO: 12560 - RNA, 489 nt, synthetic construct
  misc_feature 1..489: note = source = /note="Description of Artificial Sequence: Synthetic coding sequence"
  source 1..489: mol_type = other RNA
atgaaaggttttactgccacgctttttctatggacactaatctttccttcttgcagcggaggaggcggcggaaaggcctggcccacccacgtcgtatgttccgacagcggtctggaagtcctttaccaatcctgtgatccgctccaggattttggctttagcgtcgagaagtgtagcaagcagcttaagtccaacatcaatatcagatttggcataatcctgagagaggacattaaggaactgttcctggatctagccctcatgtcccagggaagcagtgtccttaattttagctacccaatctgtgaagcagctctacccaaattctccttttgtgggagacgaaaaggtgaacaaatttactacgcaggacccgtcaataacccagagttcacaatcccccagggagagtaccaagtgctccttgagctctatactgaaaagaggtcaacagtggcctgcgcaaacgcaactattatgtgctcatag

SEQ ID NO: 12561 - RNA, 1698 nt, synthetic construct
  misc_feature 1..1698: note = source = /note="Description of Artificial Sequence: Synthetic coding sequence"
  source 1..1698: mol_type = other RNA
atggatttcctactggctttagtgctcgtatccagcctttatttgcaggcggcagcggagttcgacggcaggtggcccagacagatcgtgtcgagtatcggactctgccgctacggaggccggattgattgttgttggggctgggctcgtcagtcttggggccagtgccagcccgtctgtcagccgagatgcaaacatggagaatgtattggtcccaacaaatgtaaatgtcaccccggatacgctggaaaaacctgcaaccaggatctgaacgagtgcggattgaaaccaagaccctgtaaacacagatgtatgaacacctatggaagttataaatgctattgcctcaacggttacatgctcatgcctgacgggtcttgtagctctgctctgacatgcagtatggctaactgtcagtacggatgcgatgtggtcaaaggacagattagatgtcaatgtccgagccccggcctgcagctagctcctgatggaagaacctgcgtcgatgtagacgaatgtgcaacaggaagggcgtcctgtccccgctttcgccagtgcgtcaacacctttggatcgtatatctgcaagtgccataaaggctttgaccttatgtacatcggggggaaatatcagtgtcacgatatcgacgagtgttctctgggccagtaccagtgcagttctttcgcccggtgctacaacatccggggatcttacaagtgtaaatgcaaagagggataccagggggatgggttgacttgcgtatatattcccaaggtgatgatcgagcctagtggccccatccatgtcccaaagggtaacggtactattctgaaaggcgatactgggaacaacaattggattcctgacgtgggctctacgtggtggcctcccaaaacaccatacattcctcctatcataacgaaccgtcccacatctaaacccacgacaaggcccacccctaaaccaacacccatccccacaccccctcccccaccacccttacccacggaactgcgtacgcctcttcctccaactactcccgaacgcccaactactgggctgacgaccattgctcctgctgcgagcactccgccgggcggtattacggttgacaacagagttcaaacagacccacagaaacctagaggtgacgtgttcattccgcggcagccctctaatgaccttttcgaaatctttgagatcgaaagaggcgtgtctgctgatgacgaggccaaggacgatccaggtgtgctcgtacattcatgtaacttcgaccacggcctgtgtggctggattagggagaaggataacgaccttcattgggaacccatccgtgaccctgctggcgggcagtatctgacggtaagtgccgccaaggccccaggtggaaaagccgcacgtctcgtgctgccactcgggcgattgatgcacagtggggacctctgcttaagttttcgacacaaggtgactggcttgcacagtggaacactgcaggtgtttgttagaaagcacggtgctcatggagcagctttgtggggacggaacggtggacacgggtggcggcaaacccaaatcacactgaggggagctgacataaagagcgtcgtcttcaaaggcgagaagcggcgggggcacaccggggaaatcggccttgacgacgtaagtctgaaaaaggggcactgctcagaagagaggtag

SEQ ID NO: 12562 - RNA, 1413 nt, synthetic construct
  misc_feature 1..1413: note = source = /note="Description of Artificial Sequence: Synthetic coding sequence"
  source 1..1413: mol_type = other RNA
atgaagagatcggtcgcagtctggctgctggtgggcctgagtctgggtgtgcctcagtttggtaagggagacatatgcgacccaaatccttgcgagaatggcggcatatgtttgccgggtcttgccgatggatccttttcttgcgaatgcccagatggttttactgatccaaactgtagctccgttgtcgaagtgggcccctgcactcccaacccttgtcataatggaggcacatgcgaaattagcgaagcttacagaggggacacatttattggctacgtctgcaagtgtccccgaggtttcaatggaatccattgtcagcacaatatcaacgaatgcgaagtcgaaccctgtaaaaatggtggcatatgtacggatctagtagctaattattcgtgtgagtgccctggagaatttatgggccgaaattgccaatacaaatgtagtggccctctgggcatagagggcggtattataagcaaccaacaaattacagcttcgagcacacacagggcactgttcggtttgcagaagtggtatccctactacgcaagactcaacaaaaaaggcctgataaatgcttggacagccgccgagaatgacaggtggccttggatacaaataaatctgcagaggaaaatgagggtaactggagtcattacccagggagctaagcgcataggaagccccgaatacatcaaatcttataagatagcctacagcaacgatgggaaaacttgggctatgtacaaagtgaagggcacaaatgaggatatggtctttcgagggaatatcgataataacactccatatgccaatagctttaccccccctattaaggcccagtatgtgcggttgtatcctcaggtttgtagacggcattgtactctgcgtatggagctgttggggtgtgagttatccggctgtagcgagcctcttggcatgaaatctggtcacatccaagattaccaaattaccgcatcttccatattccggaccctgaacatggatatgtttacctgggagccccgtaaggcaagactcgacaaacaagggaaagtaaatgcatggaccagtgggcacaatgaccaatctcaatggctacaggttgatctattggtccccaccaaggttacggggattattacacagggggcaaaagactttgggcacgtgcagtttgtgggtagctataagctggcatactcaaatgacggcgaacattggactgtctaccaagatgaaaagcagcgcaaggataaagtgttccaagggaattttgataatgatacacacagaaagaatgttatcgatccaccaatttatgcccgacatattagaattctgccttggagctggtatgggagaattacgctacgctccgaactgctgggttgcaccgaggaggaatag

SEQ ID NO: 12563 - RNA, 1254 nt, synthetic construct
  misc_feature 1..1254: note = source = /note="Description of Artificial Sequence: Synthetic coding sequence"
  source 1..1254: mol_type = other RNA
atggccagctacctttatggggttttgttcgctgtgggactgtgcgccccgatctattgtgtgtcccccgcaaacgctccatctgcttatcctcgtccatcttcgaccaaatccacaccggctagccaggtctactcgctgaacactgacttcgcatttcgcctatatcggcgcctcgtgttagagactccttctcaaaacattttcttctctcccgtgagcgtttcaacctctctggcaatgctgtccttaggcgcccattcagtgaccaagacccagatcctccaggggctcgggtttaatctgacccataccccagaatcagccatccatcagggatttcagcacctggttcacagcctgactgtgccttctaaggacctgacgcttaaaatgggcagcgccctttttgtgaagaaggaactacaactgcaggccaatttcctgggaaacgttaagcgcctgtacgaggcggaagtgttctctactgatttttctaacccctcaatcgctcaagctcgtatcaatagccacgtgaaaaagaagacacagggtaaggtcgtcgatatcatacagggcttggatctgcttactgcaatggtgctcgtgaatcatatcttcttcaaggcaaaatgggagaaacctttccatccagaatatacaaggaagaactttccttttctggttggcgaacaggtcacagtgcacgtgccgatgatgcaccagaaagagcagttcgcttttggggtggatacagagttaaattgctttgttctgcaaatggattataaaggggacgccgtcgccttctttgtgctgccgtccaaaggcaaaatgcgccaactcgaacaggccctgagcgcacgcacgctccgtaagtggagccattccctgcaaaagagatggatcgaagttttcattccaagattctctatctcagcttcgtataatctagaaaccatcctgcctaaaatgggaatccagaacgtgtttgataaaaacgcagatttttccggaatagcaaagcgggattcactgcaggtttcaaaagcaacacataaggcagtgcttgacgtgtcggaggagggaacagaagcaactgctgctaccacaacaaaatttatagtccgtagcaaggatgggcccagctactttacagtgtcatttaatagaacatttctaatgatgattactaataaggcgactgatgggatactgttcctcggaaaggtcgagaacccaactaaaagttag

SEQ ID NO: 12564 - RNA, 486 nt, synthetic construct
  misc_feature 1..486: note = source = /note="Description of Artificial Sequence: Synthetic coding sequence"
  source 1..486: mol_type = other RNA
atgcttatgcccgtgcacttcctactcttgcttctcctactccttggaggacctcgtacaggcttacctcacaaattttataaagccaaacccatttttagttgcctgaacactgccttgtcagaggctgagaagggccaatgggaagacgctagcttgctgagcaaaagaagcttccattacctgagaagccgagatgccagcagtggcgaggaggaagaagggaaagagaaaaagactttccccataagtggcgctcggggaggagcacgcggaacccggtaccgatatgtatctcaagcgcaacctagagggaaacccagacaagatactgctaagtctcctcaccggaccaagtttaccctatcccttgatgtccccaccaatatcatgaacctccttttcaatatcgctaaggcaaagaacctgagggcccaggccgcagccaacgcacacttgatggcacaaatcggtagaaagaagtag

SEQ ID NO: 12565 - RNA, 2091 nt, synthetic construct
  misc_feature 1..2091: note = source = /note="Description of Artificial Sequence: Synthetic coding sequence"
  source 1..2091: mol_type = other RNA
atggcgatggcccgactgggaagttggctgggtgaggcacagtggctggcgctggtgagcctgttcgtggccgcactggctacggttgggctgtacctggcccaatgggcattggctcgcgctcgccctcaaccacagcggagggctgtggaaccaggggaggggccacggcccggctcagacgccttgctgagttggattctcacgcttggttcctggcgctctcagtggcaggcagcttgggtcaccgctttgaatgaagaggctgagcgcaaaggtggacctcctttcttgagcttcgaagaagaccccaggcagcaggccctggagctcgtggtgcaggaagtgtcatctgtgctcagatccgccgaagaaaaggtggtggtttgtcacgttgtcggccaggccattcaattcctcgttagcgagacacccgccctaggagctggctgtagattgtacgacatgcggctctcaccatttcacctgcagctcgagttccacatgaaagagaaaagggaagatctgcagatctcctggagttttattagcgtgcctgaaatggcagtgaacatacagccaaaggccctaggcgaggatcaggtggccgagacctcagccatgtccgatgtcctcaaagacatcctgaagcacttggcgggctccgcctcaccttcagtggtcctcatcaccaaacccacaacagtgaaggaagcccagaacttgcagtgcgctgcctctacggcccaggagtcctgtccccctaaacctccaagagcgcacgaactgaaactgctagtccgcaatatccatgtcctcctcctaagcgagcccggagccagtggccatattaacgctgtgtgtgtggtgcaactcaacgatcctgttcagaggttttcgtcaaccctgacaaagaataccccggatctgatgtgggaggaggagtttacatttgaactcaacgccaagagtaaagagcttcacctccaaatctcagaagccggacgctcctctgaaggcctactggcaaccgcgacagtgcctcttgatttgtttaagaagcagcccagcggcccacagtcattcacccttacaagtggttcagcttgcggttcctctgtgctcggcagtgtgacagcggagttctcgtatatggagcccggagaactaaagtcatggccaatcccgccgcctgtgcccgccgccaagattgaaaaagatcgcacggtgatgccatgcggtactgttgtaacaactgttaccgccgtaaaaaccaagcccagagtcgacgtaggacgggcctccccgctgagttccgacagtcccgttaagacccctatcaaagtgaaggtgatagagaaggacatctccgtacaggcaatcgcttgtaggagtgccccagtgtcaaaaactctgtccagctctgatacagaactgctggtgctcaatggctcagacccggttgctgaagttgcaatacgccagctttccgagagttctaaacttaaactcaagagcccacgcaaaaagtctacaattataatatctggtatttccaagacctcactgtcacaggatcacgatgcagcactgatgcaaggatacacagccagtgtggatagtacccaccaggaagatgcaccatcccatccagagcgcgcagctgcaagcgccccacccgaggaagcagagagcgcccaggcgtcactggcccctaaacctcaggaagatgaactggattcttgggatttagagaaggaaccccaagctgcagcctggagcagccaagtccttctggatcccgacggagatgagttaagcgagtcatccatgagcgtgctcgagcccggtaccgcaaaaaagcacaaagggggaattctgcgaaagggggcaaaactctttttccgccggcgccatcaacaaaaagacccgggaatgtcccagtctcacaacgatttggtgttcctcgaacagcctgaaggatcgcgacgtaagggcatcacattgaccagaatccttaacaagaaacttttaagcagacatagaaataaaaatacaatgaacggcgcccccgtagaaccatgcacctag

SEQ ID NO: 12566 - RNA, 669 nt, synthetic construct
  misc_feature 1..669: note = source = /note="Description of Artificial Sequence: Synthetic coding sequence"
  source 1..669: mol_type = other RNA
atgccggcatcttcccccttcctcctcgcaccgaaaggtccacctggaaatatggggggacccgtgcgtgagcctgcgctcagtgtcgccctgtggcttagttggggcgccgctctgggggcagttgcctgtgcaatggccttactgacccagcagactgagttgcagagcctgaggagagaagttagtcgacttcagggaaccggcggccctagccagaacggcgaaggttatccctggcagtccctgcccgagcagcactccgtactgcacttggtgcccatcaacgccacctccaaggacgactcagacgtaacagaggtgatgtggcagcccgccttacggagaggacggggtttgcaggcgcagggctacggtgtaagaatacaggacgcaggcgtctatctgttgtacagtcaagtcctcttccaggatgtcacgtttaccatgggtcaggtagtctctagggagggccagggcagacaagaaaccctctttcgctgcattcgctcgatgcctagccaccctgacagagcgtataactcctgctactcagctggcgtgttccacctgcatcaaggggatattctgtctgttatcatcccacgcgcccgggcgaaactcaacctcagccctcatggtacttttttagggtttgtgaaactttag

SEQ ID NO: 12567 - RNA, 2205 nt, synthetic construct
  misc_feature 1..2205: note = source = /note="Description of Artificial Sequence: Synthetic coding sequence"
  source 1..2205: mol_type = other RNA
atgtggggcctgttactggcattagcggcgttcgccccagccgtcggacccgccctcggagcccctagaaatagcgttttgggcttagctcagcccggcacaacgaaggtgccagggagcacccctgcactgcatagttctcctgcacaaccaccagccgagaccgcaaatgggacctccgagcagcatgtgagaatcagggttatcaagaaaaagaaagtcatcatgaaaaaaagaaaaaaactgacattgaccagacccacccctctggtcacagctggacccctcgttaccccgacacccgcgggaaccctagatcctgctgaaaagcaggaaactggttgtcctcctctcggtctggagtctctgagggtgtccgacagcagactggaagccagcagcagtcagagcttcggcctcggaccccacagggggcggctgaacattcagagcggcctcgaagacggcgacctgtatgacggagcatggtgtgccgaagagcaggatgccgacccttggttccaggtggatgccggtcatccgacacgcttctcaggggttattacacagggtcgcaattccgtgtggagatacgactgggtgacatcctacaaggtgcagtttagcaacgatagtcgtacatggtgggggtctcggaatcattcatcaggcatggatgccgtgttccccgctaactccgaccccgagacacctgtgttaaatctgttgccagagccacaggtggcgcgctttatacgactcctgccacaaacatggctgcagggaggagcaccatgtttgcgggccgaaatcctcgcctgtcccgtatccgatccaaatgatctgtttctcgaagcgcctgccagcggatctagtgaccccctcgactttcaacatcataactataaagctatgagaaaattgatgaaacaagtccaggagcagtgtcctaatatcacgcgcatctacagcatcggtaagtcataccagggtctgaagctttacgtcatggagatgtcagacaaaccgggggagcatgagctgggagaacctgaagtcagatacgtggccgggatgcacggtaacgaagccttgggcagagaactgctcctcctgcttatgcagtttctttgccacgaatttctccgaggaaaccctcgggtgactcgcctcttgagcgagatgcggatccatctgctcccttccatgaatcccgatggatatgagattgcgtatcaccggggtagcgagctcgtagggtgggccgaagggcggtggaacaaccaatcaatcgacttgaaccacaatttcgccgatctgaacacgcctctgtgggaagctcaggacgatggaaaagtcccccatattgttcccaatcaccatttgcccctaccaacatactacacacttcctaacgcaacagtcgcgccagagacacgcgccgtcatcaagtggatgaagaggattccattcgtcttatctgcaaacctacatggtggagagctcgttgtcagctacccattcgatatgacccggacaccttgggccgctagagagctcacaccgactcccgacgatgcagtgttccgatggttatctaccgtgtatgcaggatccaacctcgcaatgcaagatacaagccgccggccgtgccactctcaagacttctccgttcacgggaacattattaacggcgccgactggcacactgtgcccggctccatgaacgacttttcctacctacacaccaactgcttcgaagtgacagttgagttaagctgtgataagttcccccacgaaaatgaactgcctcaggaatgggaaaataacaaagatgcactcctgacctacctcgaacaggtgcgcatgggaatagcaggtgtggtcagggataaagatacggagctgggaatcgccgatgctgttattgcagtcgacggcatcaaccatgatgtgacaaccgcatggggcggagattactggagactgctcacacctggtgattatatggtgactgcatcagcggaaggctaccatagcgttacccgaaattgtcgtgtgacgtttgaagaaggcccatttccttgcaacttcgtgttaacaaaaacgcccaagcagcgcctcagggagttactcgctgccggagcaaaggttccgccggacctaaggagacggttggaacgattaaggggacaaaaggattag

SEQ ID NO: 12568 - RNA, 759 nt, synthetic construct
  misc_feature 1..759: note = source = /note="Description of Artificial Sequence: Synthetic coding sequence"
  source 1..759: mol_type = other RNA
atgcgggccccgctcttacctcccgccccggtcgtcctgagcctactgatcctgggttccggtcactacgccgccggccttgatcttaatgacacctacagcggaaagcgggagccctttagcggcgaccactccgccgatggcttcgaagtcacatcaagatccgaaatgagttccggatctgaaatctcccccgtgagtgagatgccctcttccagtgaaccatcgagcggggcggattacgactatagcgaagaatacgataatgaaccgcagatccctgggtacatagtagacgactcagtgcgtgttgaacaggtagtaaagccaccccagaacaaaactgaatccgagaacacatcagataaacccaagcggaaaaaaaagggcggaaagaacggcaaaaataggaggaatcggaaaaagaaaaacccctgcaacgccgagtttcagaacttctgtatccatggagaatgcaagtatattgaacatcttgaagcagtgacctgtaaatgccagcaagagtattttggggagcgctgtggagaaaaatcaatgaaaactcacagcatgatcgacagcagtctctcaaagatcgctctagccgcgattgcagcttttatgtctgctgtaatcttaactgccgtcgccgtaattacagtccagctacggaggcagtatgtccgtaaatacgaaggggaagctgaggaaagaaagaagctgagacaagagaatggaaatgttcacgcaatcgcctag

SEQ ID NO: 12569 - RNA, 8487 nt, synthetic construct
  misc_feature 1..8487: note = source = /note="Description of Artificial Sequence: Synthetic coding sequence"
  source 1..8487: mol_type = other RNA
atgccaaagagggctcactggggagcgctgagcgttgtacttatcctactgtggggtcaccctcgtgttgctctggcatgtccccatccgtgtgcttgctacgttcctagcgaagtgcactgtactttccgatcgctcgcttcagtccctgccggaatagctaagcacgtcgaacggattaacctgggcttcaactccatacaagctctgtccgaaacatcgttcgctgggctcacaaagctggagctacttatgattcacggaaatgagatcccctcgatccctgacggcgccctgcgcgacctgtcgagtcttcaagttttcaaattctcctataacaaactgagggtcattacgggtcaaacacttcaggggctctctaacttaatgcggttgcacatcgaccacaacaagatcgaattcattcatccccaagcgttcaacggtcttaccagtctcagacttctccacctagaagggaatttgctgcaccagttgcatccgtccactttttctacattcacctttttggactattttaggctatccacaatccgccatctgtacctggcagagaatatggttagaacactcccggcatctatgctgcgtaacatgccacttctggaaaatctctacttgcagggtaacccatggacctgcgactgtgaaatgaggtggttccttgagtgggatgcaaagtctagggggattctaaagtgtaagaaagacaaagcgtatgagggaggccagctgtgcgcaatgtgcttctctccaaagaaactgtataagcacgagatacataagctcaaggatatgacctgcctcaaacccagtatcgaatctccgctgcgacagaatcggtcaaggagtatcgaggaagaacaggaacaggaggaggacggcggatcccagttaatccttgaaaagttccaactcccgcagtggagcattagcctcaatatgaccgatgaacacggcaacatggtgaatttagtctgcgacatcaagaagcctatggacgtttacaagatccacctcaatcagaccgacccacccgatatcgacattaacgccactgtggccctagacttcgagtgtccaatgacccgagaaaactacgagaagctttggaaattgatcgcctactactccgaggtgcctgtcaagctgcaccgcgaactgatgttgtcaaaagatccacgggtgtcatatcagtatcgacaggacgctgatgaagaggccctgtactatacaggcgtcagggcgcagatcctggccgaacccgaatgggtgatgcagcccagtatcgacatccagctcaatcgtcggcagagcaccgccaaaaaagttctcctgagctactatacccaatattcacagactatatcaactaaggacacacgccaggccaggggtcgatcttgggtgatgatcgaaccttctggcgcggtccagagggatcagactgtgctcgaggggggaccttgccaactcagctgtaacgttaaggcctcagaatccccaagtattttctgggttctgcctgacggctccatccttaaggcccctatggatgacccagattctaaattctcaattctttcctcagggtggctgcggatcaagtccatggagccttccgacagtggattatatcagtgtatcgcccaggtacgcgatgaaatggaccgaatggtgtaccgggtactggtgcaatcaccctcaacgcaaccagccgaaaaggacacagtcactataggaaagaatccaggcgaaagcgtcactctgccatgcaacgcactggcgatcccagaagcccacctcagttggatcctacccaaccgaagaattattaatgatttggctaacacgtctcacgtgtacatgctaccgaatggtactctgagcatccccaaggtgcaggtcagcgactcaggttattacaggtgtgtcgccgtcaatcaacagggtgccgaccattttactgtgggtatcaccgtaaccaagaaaggatctggcctacctagcaaaaggggcaggaggccaggtgcaaaggcattgagccgagtgcgggaggacatcgtggaggatgagggcggaagcggaatgggtgatgaagaaaatacatcacgcaggctcttgcaccctaaagaccaggaggtcttcctgaagacaaaggacgacgccatcaatggcgataagaaggcgaagaagggaaggagaaaactgaagctctggaagcactctgaaaaagagcccgagacgaatgtcgcagaaggtaggcgcgtgtttgagtctcggcgcaggatcaatatggctaataagcagatcaatccagaacgttgggccgatatcctcgccaaggtcagggggaagaacctgcctaaggggaccgaagttccaccccttatcaagaccacttcgccgccatcactttctctcgaagtcacccctccttttccagcgatttctccgccatccgcctcccccgtgcagacagtgaccagtgccgaggagtcatcggcagatgtgcccctgctgggtgaggaggaacacgttctggggacgatcagttcagctagcatgggcctagaacacaaccataatggtgtgattctcgtggagcccgaagtcactagcaccccacttgaggaagttgtagacgacctcagtgagaaaacagaggagataacatcgacagagggggacctgaagggaaccgccgcaccgaccctcatcagtgaaccctacgaaccaagccccaccttgcacacactggatactgtctacgaaaagcctacgcatgaggaaaccgccacagagggttggagcgccgccgatgtcgggtctagccctgagcctacatcatctgagtatgagccgcccctcgatgcagtgtctttagctgagtctgagcctatgcaatattttgacccggatttagagactaaatcccagcccgacgaggataagatgaaagaagataccttcgcacatctgactccgaccccaaccatatgggtgaacgactctagcacctctcagctgttcgaggactccactatcggagagcctggcgtgcctggtcaatcacacctccagggtcttaccgacaacatccacttggtcaaatcatcactgtcaacacaggacacacttttgattaaaaaaggtatgaaagaaatgagtcagacgttgcaggggggaaacatgctggaaggcgaccccactcattctcgcagctctgagtcggaaggtcaggagtccaagtcgattactcttcctgacagcacactgggtatcatgagttctatgagccctgtgaagaagccagccgagacaacagttggtaccttattggataaggataccactaccgccacaacaacacctcgccagaaggtggccccatcaagcaccatgtctacacatccttctaggaggagacctaacggtcggaggcggctgcgcccgaacaaatttaggcaccggcacaagcaaacaccaccaaccacttttgctccgtctgagacatttagtacgcagcccactcaagctcctgacatcaagatctcctcgcaggtggaaagctccctagttccaacagcctgggtggacaatacagtaaacacgcccaagcagctggagatggagaaaaatgcggagcctacgtctaagggcaccccaaggcgaaaacatggtaagcgccccaacaagcataggtacaccccttcaacagtgtcgagccgcgcatccggttccaaaccgtcaccgagcccagaaaacaagcatagaaatattgtcacaccatcaagcgagaccatcctgctgccacgaactgtgagcctcaagaccgaaggaccttatgattctttagactatatgactacaactcggaagatctacagttcctatcctaaggtccaggaaacacttcctgtgacctacaagcctacctctgatggtaaagaaattaaagatgatgtagctaccaacgtcgataaacacaagtcagatatcctggtgactggcgaatccataacaaatgccatccctacctcacgcagtttggtttcgacaatgggcgagtttaaagaggagtcctcaccagtggggttcccaggcacccccacatggaacccttcacgaaccgctcagcctggtcgcctccagacaggcatcccagtgactacctcgggggagaacctcactgaccctcccctactgaaggagctggaggatgttgactttacttctgaatttctttctagcctgacagtttctacaccgttccaccaggaggaagctggctcatcaaccacacttagttcaatcaaggtcgaggtcgcttcatcacaggccgagacaacgaccctggatcaggatcacctggaaacaaccgttgccattctgctttccgagacacgtccacagaaccacactcctaccgctgctcgcatgaaggaaccggccagcagttccccttcaaccatactgatgagcctgggtcagaccaccaccactaaacccgcactccccagccctagaatctcacaggcaagtcgcgactctaaagaaaatgttttcctcaactatgtgggaaatccagaaacggaggcaacacccgtgaacaatgaaggaacgcagcatatgtcgggacccaatgagctctcaacaccttcatcagaccaggacgcattcaacttatctactaagttagaactggagaaacaggtgtttgggtcaagaagcttgcctagaggtcctgactctcaacgacaagacggacgggtgcatgctagccaccagctgacacgcgttccagctaaaccaatccttcctacagctaccgttcggttgcctgaaatgtccacccagtcggccagtcggtatttcgtaacctcacagagccccaggcactggaccaacaagcctgaaatcactacctatcccagcggcgctctgcccgaaaacaaacagtttactacgccccgcctgagtagtaccacaattccacttcccctgcacatgagtaaaccatccatcccgagtaaattcaccgaccggcggaccgatcaatttaacggctactcgaaagttttcggtaataacaacatcccagaggcacggaatccagttggcaagccgccatctcctcgaatcccacactattcaaatggtagacttccctttttcactaacaagaccctcagtttcccacaactgggtgtaacgcggaggcctcagatacctactagtcctgcgcctgttatgagagagagaaaagtaattccaggcagctacaatcgtattcacagtcactccacctttcacttagacttcggacccccggcccctcctctgcttcatacacctcaaacaacagggtccccatccactaatcttcagaacattccgatggtgagttccacccaatcttctatatccttcatcactagttccgtccagagcagcggctctttccaccaaagctctagtaaattttttgctggtggaccgccagctagtaaattttggtcccttggagaaaaaccacagatccttacaaagtctccacagactgtgtccgtaactgccgaaaccgacaccgtgttcccctgtgaagctaccgggaaacccaaaccattcgtaacctggacaaaggtcagcactggcgcactgatgacacccaatacgagaatacaacgctttgaggttctgaagaatggtacactagtgattaggaaagtacaagtccaagataggggccagtatatgtgcactgcgtccaatctgcacggcctggataggatggtggtgctactcagcgtgactgttcagcagccccaaatactggcatcccattaccaggatgtcaccgtgtatctgggcgataccatagccatggagtgcctggcaaaaggcacccccgcgcctcaaatcagctggatctttccagaccggcgggtgtggcaaactgtgtcccctgtagagggtcgtattactttgcatgagaaccgcacactctctatcaaagaggcatcgttcagcgatcggggcgtgtacaaatgcgttgcttccaacgccgctggagccgattcactggcaatcagactgcatgtggccgccctgccacctgtcattcaccaggaaaagctggagaacatctcattaccacctggcctgagcatacacatacactgcacagcaaaggctgcgccgctgcctagcgttcgatgggtattgggcgatgggacacagatacggccatctcagttcctgcacggcaatctgtttgtctttcctaacgggaccctgtacattcgcaatctcgctcctaaagactctggacgctatgaatgtgtggcggctaatctggtcggctccgcccggaggaccgtacaattgaatgttcagagagccgctgccaacgcgcgcatcacaggcaccagcccacgcaggacagatgtgaggtatggaggtacccttaaacttgattgctcagcctccggggatccttggcctcgaattctctggcgcttgccaagtaagcgcatgatagatgccctgttttccttcgactcgcggatcaaagtgtttgccaatggaactctggtcgtcaagtcagtaacagataaagacgccggggattacctctgcgtggcccgaaacaaggttggggacgattacgtcgtgctgaaggtggatgtcgtgatgaaacctgcgaaaatcgagcacaaagaggagaacgatcataaagtgttttatggaggtgatctcaaagttgattgtgtcgctaccggtctaccaaacccggaaataagctggtcactgccggacggatccctcgtcaacagcttcatgcagagtgacgactcaggaggtagaaccaagcgttacgtcgtttttaacaatggtaccctatactttaacgaggtgggtatgagggaggagggcgattacacatgcttcgccgagaatcaggtcggaaaggacgaaatgcgagtcagagtgaaagtggtgactgctccagcaactattcgaaataagacatatctcgctgttcaggtgccttatggtgatgtggtgactgtggcctgcgaggctaagggagaacccatgccaaaagtgacttggctgtcaccaacaaacaaagttattcctacaagtagtgaaaagtaccagatttaccaggatggaacgctcctgatccagaaagcccagcggagcgactcaggtaattatacatgcctggtgaggaattctgctggggaggatagaaagacggtctggatacacgtgaatgtgcagccacctaaaataaacggcaaccccaaccctatcactaccgttcgcgagattgccgccggcgggtcacgcaagctcattgactgtaaggcggagggcatcccaacaccccgcgtactgtgggcattcccagagggcgtcgtactccctgccccatactatgggaatagaatcactgttcacggcaatggaagcctggatattcgcagcctaagaaagagcgactctgttcagttggtgtgcatggcaaggaatgagggcggtgaggcgaggctgatccttcagttgaccgtgctcgagccgatggaaaaaccaatcttccacgatcctatctccgaaaagatcacagctatggccggacatactatttccttgaactgtagcgccgccggtacaccgacaccttcccttgtctgggtcctacctaatggaaccgatctccagtcagggcaacagttgcagaggttctatcataaagcagacggtatgctccacatcagtggactgagctctgtggacgctggggcctacagatgtgttgcccgcaacgcagccggccatacggagagattggtaagtttaaaggtgggactgaagcctgaagcaaataagcaataccataatttggtctcgattattaatggcgaaactttgaagctgccctgtactccccccggagcagggcaggggcgcttttcgtggactcttcccaacggtatgcacttagagggtccacagactttagggcgtgtgtcgctgctggataacggcacactgacagtcagagaagcatcagtgttcgaccggggtacttacgtctgcagaatggaaacggagtacggaccctctgttactagcattccagtgatcgtaatcgcttaccctccacgtatcacttctgagcccactcccgttatatacactaggcccggaaacaccgttaagcttaattgcatggccatggggatcccgaaggccgatattacatgggagttaccagataaatctcatcttaaagctggcgtacaggctcgactttacgggaatcggtttttgcaccctcagggcagcctaacaatccagcacgccacacagagagacgcagggttctataaatgcatggcaaagaacattttagggtccgacagcaaaaccacttacatccacgtattctag

SEQ ID NO: 12570 - RNA, 3330 nt, synthetic construct
  misc_feature 1..3330: note = source = /note="Description of Artificial Sequence: Synthetic coding sequence"
  source 1..3330: mol_type = other RNA
atgaggctgctgttgttggtaccactgctgcttgcccccgccccgggaagcagcgctcctaaggtcagaagacaatctgatacctggggaccctggtcccagtggtccccttgttcgagaacctgtggcggtggtgtgtcgtttagagaacgcccttgctattcacagcgacgcgacgggggatcttcgtgtgttggacccgcccgctcgcaccgctcctgcaggacagagagttgcccagatggagcgcgagacttccgggccgagcagtgtgccgaatttgacggcgcagaattccagggaaggcggtatcggtggctcccttactactcagcacccaataaatgtgagttaaattgcatccctaaaggcgaaaatttctactacaagcacagagaagccgttgtggatggcactccatgtgaacctgggaaaagagatgtgtgtgtcgacggctcatgccgcgttgtcggctgtgatcacgagctcgattcctctaaacaggaagacaaatgccttcgatgtggcggcgacggtaccacatgttaccctgtcgctggaacattcgacgctaatgatctgagtagagggtacaaccagatacttattgtacctatgggtgctacttccattctgattgacgaagcagctgcatcccggaatttcctggcagtgaaaaacgtcagaggcgaatactatttgaatggacactggacgatcgaggccgcacgggccctccctgcagcctcaactatcctccactacgagcgcggcgcagaaggagatctcgcccccgaacggctgcacgcccggggccccacttcggagcctctggtgatagaactgataagccaagagccaaaccctggggttcactatgaatatcacctacctttgagacggccttctcccggtttttcctggtctcacggttcctggagcgattgcagtgctgagtgcggcgggggacatcagtccaggctcgtgttttgcacaatcgaccacgaagcctatcctgaccatatgtgccagagacagcccagacccgcagaccgacgttcatgtaatctgcatccttgtccagaaacaaagcgctggaaagccggaccatgggccccgtgctccgccagctgtggaggaggaagtcaatcacgcagcgtttactgcatttcctccgatggggcaggcattcaggaggccgtagaagaggctgagtgtgctggcttgcccgggaagcctccagctattcaggcttgcaacctgcagcggtgtgctgcctggtctcccgaaccttggggggaatgctctgtttcctgcggagtgggtgtacgaaagcgtagcgttacatgtaggggagagcgcggttctctacttcatacagctgcctgtagtcttgaagacaggcctccattaaccgaaccttgtgtgcacgaagattgccccctgctgagcgaccaggcctggcatgtgggaacatggggactctgttcgaaatcatgctcaagtggaacaagaagaagacaggtgatatgcgccattggtcccccctcacactgtggctcactgcagcattccaagccagttgatgtggaaccatgtaacactcaaccatgccacttaccccaggaggttcccagcatgcaagatgtccacaccccagcctcaaacccctggatgccactgggaccccaggagtctcccgctagcgactctagaggtcagtggtgggcggctcaggagcatccaagcgccaggggcgatcatagaggcgagcggggcgatccaagaggtgatcaggggacgcacctgtccgcacttggtcctgctccctctctgcagcagccaccataccaacagccgctgcggtccggctctggtcctcacgattgcaggcatagtcctcatggttgctgccctgacgggcataccgcctccctcggtccccagtggcagggctgtccaggcgcgccttgccagcagtcgaggtacggctgttgcccagaccgtgtgagtgttgctgaaggcccacaccacgctggatgtacaaaatcatacggaggggattcgaccggcggcatgcctcgcagccgggctgtggcttctacagtccataacacccaccagcctcaggcccaacagaatgagccttccgagtgtcgaggctcccaattcggttgctgttatgacaacgtggctaccgcagctggtcccttgggtgaagggtgtgtcggacaacctagtcacgcatatcccgtgagatgtctgttgccctctgcccacggcagctgtgcggattgggctgctcgctggtattttgtcgccagtgtaggacaatgtaaccgcttctggtacggaggttgtcacgggaacgcgaacaatttcgcctctgaacaggagtgcatgagcagttgccagggatccctccatggaccccgcaggccccagcccggtgctagtggcaggagcacccacactgatgggggcggcagtagtccagccggtgagcaagaaccatcccagcatagaactggtgctgctgtgcagcgaaaaccatggcctagtggaggtctctggagacaggatcagcagccagggccaggcgaggcaccccatactcaggcattcggcgaatggccttggggccaggagctcggctccagggcgccaggcctgggaggggacgcgggcagtccggctccacccttccactcatcatcatatcgcatttcactggccggtgtcgaaccctccctggtgcaagcagcccttggtcagctggtgcgactgtcctgctctgatgacaccgccccagagagtcaggctgcctggcaaaaggatgggcaaccaattagtagtgatcgacatcgcctgcaattcgatggctccctgataatccaccctcttcaggcggaggatgccggcacttacagttgcggtagtactagaccagggagagattcccagaagattcagctgcgtatcattggcggagacatggccgtcctttctgaagcagagttaagtagattcccacagcctcgtgaccctgcacaggactttggacaagccggagccgcagggcccctgggggccatcccttccagtcatccccaacccgctaacaggctccggctggatcagaaccagccaagggtagttgatgctagcccagggcagcgcatccggatgacctgtcgcgctgaggggtttccccctcctgcaattgagtggcagagggatgggcagcccgtcagtagtccttccactcacaggcctgctcagggaccctggcaggggctgcgacgtcctgctagagctggtcagctgtag

SEQ ID NO: 12571 - RNA, 405 nt, synthetic construct
  misc_feature 1..405: note = source = /note="Description of Artificial Sequence: Synthetic coding sequence"
  source 1..405: mol_type = other RNA
atgaaaagtgtactcctgcttaccacactactggtaccggctcatttggttgcagcctggagtaacaattacgccgtagattgccctcagcattgcgattccagtgagtgtaaaagctccccaagatgcaaacgcaccgtgttggatgactgcggttgttgtcgtgtttgcgccgccggacgcggggagacctgttatagaacggtcagcggtatggatggaatgaaatgcggccccggactgagatgccagccttcaaatggcgaagaccccttcggcgaagaatttggcatttgcaaagaacatgatatggcctctggtgacggcaatatcgtgagagaagaggtggttaaagaaaatgcggccgggagtcccgttatgcgaaaatggcttaatccccgatag

SEQ ID NO: 12572 - RNA, 555 nt, synthetic construct
  misc_feature 1..555: note = source = /note="Description of Artificial Sequence: Synthetic coding sequence"
  source 1..555: mol_type = other RNA
atgaaatcagtgctgctgctaaccacactgctggtgccagcacacttagtagccgcctggagcaataattatgctgtcgattgcccccaacactgtgacagcagtgagtgcaaatccagcccccggtgtaaacggactgtattggacgattgtggatgttgtagggtttgcgctgccggccgcggagagacatgttaccggacagtaagcggaatggatgggatgaaatgtgggcctggattacggtgtcagccctctaacggcgaagatcccttcggggaggaattcggcatctgcaaagattgcccttatggaacctttggcatggactgtcgggaaacatgtaactgccagtctggaatttgtgacagaggcactggtaaatgcttgaaatttccctttttccagtattctgtgactaaatcatcaaataggtttgtttcattaacagaacatgatatggcatctggtgacggtaacattgtgagagaggaggttgttaaagagaatgctgctggctcacccgtcatgcggaaatggctgaatccccgttag

SEQ ID NO: 12573 - RNA, 597 nt, synthetic construct
  misc_feature 1..597: note = source = /note="Description of Artificial Sequence: Synthetic coding sequence"
  source 1..597: mol_type = other RNA
atgccaattcccgcctcgcctctgcatccaccactaccgtcactgctcttgtacctattgcttgagttggccggggtcacacatgtttttcacgttcagcaaacagaaatgagtcaaactgtcagcacaggggagtccattattcttagttgcagcgtccccaatacactgcctaacggccccgttctgtggttcaaagggaccggccccaatcgcaagctcatatacaactttaaacaaggcaatttccctagggtgaaagagattggcgataccacaaagcccggtaacactgacttctccactaggatcagggaaatctcactggctgacgccggaacctattactgtgtgaaattcattaaggggcgcgccattaaggagtaccagtctgggagaggaacccaggtctttgtaaccgccgaacagaacccccggccccccaagaaccgccccgccgggagagccggctctagagctcaccacgacgcacatacctgtctgagcgctctgcccgagcgaaactccacaaactactttgttcagccctgttgttgtctgcgtcttctgggcttaacaggcttgctcagtaagtag

SEQ ID NO: 12574 - RNA, 594 nt, synthetic construct
  misc_feature 1..594: note = source = /note="Description of Artificial Sequence: Synthetic coding sequence"
  source 1..594: mol_type = other RNA
atgcccatacctgcctccccactccatccccctcttccgtcgttattactctatctgttacttgagttagctggggtgacacacgtctttcacgttcagcagacagagatgtcccagaccgtgtctactggcgagagcataatcctttcatgctcagtacccaacactctcccaaatggacccgtgctgtggtttaaaggaaccggccccaatagaaaactgatctacaatttcaaacaaggaaatttccctagggtgaaggagataggagataccactaaacccgggaatacagatttcagcacacgcatcagggagatcagcctggctgacgctggcacttactactgcgtcaaatttattaaaggacgagccattaaggaatatcagagcggtcgcggaacccaggtgtttgtgacagagcagaacccccggccccctaaaaacaggcctgctggcagagcaggatccagggcacatcatgacgctcatacttgcctaagcgctcttccagaaagaaacagtactaactatttcgtccagccttgttgctgtctccgccttctggggctgactggcctgttaagcaaatag

SEQ ID NO: 12575 - RNA, 1563 nt, synthetic construct
  misc_feature 1..1563: note = source = /note="Description of Artificial Sequence: Synthetic coding sequence"
  source 1..1563: mol_type = other RNA
atgactacggatgatacagaggtacccgctatgacactcgccccaggtcatgcagcactcgaaacacaaacactcagtgctgaaacatctagtcgtgcaagtacccccgccgggcccataccagaggctgagaccagaggggccaagcgtatctctccagcccgcgagacccgctcttttaccaagactagccctaatttcatggtcctgatcgctaccagcgtcgagacatccgccgcctcagggagtcctgagggtgcaggcatgactacagtccagactatcacaggaagcgatccaagagaagcgatcttcgacaccctctgcactgatgacatcagcgaggaggcaaaaactctgacaatggacatcctgacgctcgcgcacaccagtactgaggctaaagggctatcatcagagtcttcagcttcatcagacggcccccaccctgttatcactcctagccgggcctccgaatccagcgccagttccgatggaccacacccagtcatcactccctctcgcgcgtcagaaagtagcgcttcctccgacggcccccatccagtcattaccccctccagagccagcgagagctcggctagctcagacgggccacaccctgtaatcactccaagttggagccctggttccgatgtcacactgctcgctgaagcactcgtcacggtgaccaacattgaggtgatcaactgtagcattaccgagatagaaaccactacttcttcaatacccggcgctagcgacaccgacttgatccctacagagggggttaaagcctctagcacatcagacccccccgccctcccagactcaaccaatactaagccccacatcaccgaggtgactgcatctgccgagactctcagcactgccgggactactgaatctgccgcacccgacgctacaatcggaacacccttgcccactaactccactatcgagagggaggtgaccgctcctggggctaccacactgagtggggccttagccacaggaaatcctttagaggaaacaagtgcactttctgttgagactccaagctacgtcaaagtctctggtgcagctccagtgtccattgaagcaggctccgcagtcggaaagaccacctccttcgcaggcagcagtgccagcagctactcacctcttgaggcggccctgaaaaactttacaccaagcgagacactcaccaccgacattgccaccaagggtcctttcccaacttccagagacccccttcctagcgtgcctcccactactaccaactcctctcggggaactaactccacactggcaaaaatcaccacaagtgcgaaaaccaccatgaagccaccaactgccacccccaccactgctcggactcggcccactacagacgtgtccgccggcgagaacggcggtttccttctactgcggctgtccgtcgcctcccctgaagacctgaccgacccgagggttgccgaaaggctgatgcagcagctgcatcgtgagcttcacgcccatgccccccatttccaggtttcgctgctgagggtgagaagaggatag

SEQ ID NO: 12576 - RNA, 600 nt, synthetic construct
  misc_feature 1..600: note = source = /note="Description of Artificial Sequence: Synthetic coding sequence"
  source 1..600: mol_type = other RNA
atgctctggaggcaactcatatattggcagctccttgcgcttttctttttacctttttgtctctgtcaggatgagtatatggagtccccacagacaggcggccttcccccggactgtagtaagtgttgccaccacgggaataacggaaataacggcgccactggtcacaagggagaaaagggttatcccggtatcccacctgagcttcaaattgcttttatggctagcctcgcgacgcacttcagtaaccagaacagtgggatcattttttcatcggtcgaaacaaatattggaaatttctttgacgttatgactggacgcttcggcgcacccgtctccggagtgtatttttttactttctccatgatgaaacacgaagacgtagaagaggtgtatgtatatcttatgcacaatggaaatactgtgttttcaatgtactcctatgagatgaaggggaagtctgacacatcaagcaaccacgccgtactcaagctggcaaaaggagacgaggtgtggctgcgtatgggaaatggggccctccacggtgaccatcagaggtttagtactttcgccggattcctgctgttcgaaactaagtag

SEQ ID NO: 12577 - RNA, 960 nt, synthetic construct
  misc_feature 1..960: note = source = /note="Description of Artificial Sequence: Synthetic coding sequence"
  source 1..960: mol_type = other RNA
atgctctggcgccaactcatctattggcagctactggcccttttctttctgccattctgcctgtgtcaggacgaatacatggaagtgtcaggaagaactaacaaagtcgtggccaggatcgttcagagccaccagcagacgggtaggtctggttctaggagagagaaggtgcgggaacggtcccacccgaagaccggcacagtcgataacaacacctctactgatcttaaatccctcaggcctgatgagctgccccaccccgaggtcgatgatctcgcacaaatcaccacattttggggacagagcccccagacagggggattgcctccggactgttctaagtgctgtcatggggattattcgtttaggggctatcagggcccacctggaccgcctggaccacctgggatccctgggaatcatggcaacaacggtaataatggagccacgggacatgaaggtgcaaagggagaaaagggggataaaggggacttgggacccagaggagagagaggacaacatggcccaaaaggcgagaaagggtaccccgggatccccccagaactgcaaattgcctttatggctagcctggctacacatttttccaatcagaactccgggattatattttcttccgtagaaaccaacattggcaactttttcgatgtgatgacgggcagattcggcgcccctgtgtctggcgtgtattttttcaccttttccatgatgaagcacgaggacgttgaggaagtctacgtgtatctgatgcataacggcaacacagtctttagcatgtattcatacgagatgaaaggcaagtccgatacatcatcaaatcatgctgtcctgaaactggccaagggtgatgaggtttggctgagaatgggcaacggggctcttcacggggatcaccaaaggttctctacatttgcaggttttttactgttcgagacaaagtag

SEQ ID NO: 12578 - RNA, 855 nt, synthetic construct
  misc_feature 1..855: note = source = /note="Description of Artificial Sequence: Synthetic coding sequence"
  source 1..855: mol_type = other RNA
atgactaagtcatctctccggccactgcagaaacaaagcccccagacgggaggactgccacctgattgctccaaatgctgtcacggcgattactcatttagggggtatcaaggccctccaggtccgcctggaccgccagggatcccaggaaatcacggaaataacgggaataacggggccactggacatgagggcgctaagggcgaaaagggtgataagggagatcttggacctcgcggggaacgaggccaacacggacctaagggcgagaaaggatatccaggcatccctcccgaactgcagatcgcattcatggccagtctcgccacacacttctcaaatcagaactcaggtatcattttctcctccgtggaaacgaacatcggcaatttctttgacgttatgacaggacggttcggcgcccccgtctctggcgtgtattttttcaccttctcgatgatgaagcatgaggacgtggaggaggtctatgtgtatctaatgcataacggtaataccgtgttcagtatgtattcctacgaaatgaagggtaaatctgacacatcatcaaatcacgcagtgctaaagctggcgaaaggcgacgaagtgtggctacgaatggggaacggagctctgcacggcgaccatcaacgattctcgaccttcgctggatttctgttatttgagactaaatgccacggagagacccctgccggacctagggacagtgccgcgggaaaaagtaaggcatacctgtgtcaggcagaatggatctggcccgtccggaaacttctgccagtctcatggccacgttatcaattgtttggcttcgtgaggtggaaagaacaacacatctag

SEQ ID NO: 12579 - RNA, 234 nt, synthetic construct
  misc_feature 1..234: note = source = /note="Description of Artificial Sequence: Synthetic coding sequence"
  source 1..234: mol_type = other RNA
atggctacaagatccgtgctcctcgctttagttgttcttaacctgctgttctacgtgcccccagggcgatccggaccaaacgtttacattcagaaaatctttgcctcatgctggaggctgcagggcacatgtcgacctaagtgcctgaaaaatgaacagtataggattctctgcgacaccattcatctgtgctgtgtcaacccaaagtacctgcctattttgactgggaaatag

SEQ ID NO: 12580 - RNA, 237 nt, synthetic construct
  misc_feature 1..237: note = source = /note="Description of Artificial Sequence: Synthetic coding sequence"
  source 1..237: mol_type = other RNA
atgaacctctgcttatctgctcttctgttttttctcgtcattcttttgccgtccggaaagggcatgttcggtaacgatggtgtgaaggtccgcacttgtacttctcagaaagccgtgtgttttttcggatgccctcccgggtatcggtggatagcattttgccataacatcctgtcttgttgtaaaaacatgacccggttccagccacctcaagccaaagacccctgggtgcattag

SEQ ID NO: 12581 - RNA, 627 nt, synthetic construct
  misc_feature 1..627: note = source = /note="Description of Artificial Sequence: Synthetic coding sequence"
  source 1..627: mol_type = other RNA
atgggggcacagggggcccaagaatctattaaagctatgtggagggtcccaggaactacgagaaggcccgtcaccggggaatccccgggtatgcacagaccagaggcaatgttactactacttacactagccttattgggaggccccacctgggctggtaaaatgtacggccctggaggcggcaaatatttttccactactgaagattacgaccatgagattaccgggctccgtgtctccgtgggtctgctgttggtgaaaagcgttcaagtgaaactgggtgatagttgggacgttaagcttggagcactcgggggaaatactcaagaagtcactctgcaacccggcgaatacataaccaaggtgttcgttgcttttcaggcctttctcaggggcatggtgatgtacacctccaaggacagatatttctacttcggcaagctggacggacagatatcttctgcctacccatcacaggagggccaagtgcttgtgggaatttatggacagtaccagctgcttggcattaaatccatcggatttgagtggaattaccccttagaagaacccactaccgaacctccagtgaaccttacctacagcgctaactcccctgtcggccgttag

SEQ ID NO: 12582 - RNA, 288 nt, synthetic construct
  misc_feature 1..288: note = source = /note="Description of Artificial Sequence: Synthetic coding sequence"
  source 1..288: mol_type = other RNA
atgaaattcctcctcctcgtgttggcagcgttaggcttcctcactcaggttatcccagctagtgccggtggctcaaaatgcgtgtccaatactcccggctactgtcggacctgttgccattggggggaaactgccctgttcatgtgcaacgccagtcgtaaatgctgcatttcttactcatttctgcctaagccagacctgccacagttgatcgggaaccactggcagagccggcggagaaacacacagagaaaagacaagaaacaacaaacaaccgttacgagctag

SEQ ID NO: 12583 - RNA, 339 nt, synthetic construct
  misc_feature 1..339: note = source = /note="Description of Artificial Sequence: Synthetic coding sequence"
  source 1..339: mol_type = other RNA
atgtttgtgctcttatacgttacctctttcgccatctgtgcatcaggtcaacccagaggcaaccaactcaagggagaaaattactctcctaggtacatctgttcgattcctggattacccggccccccaggtccacccggagcgaatggatccccaggaccacatggtcgaattggcctacccggtcgagatggtagagacggccgcaaaggggagaaaggggaaaaaggcacagcagggttacgaggaaaaacaggcccactcggactggcaggcgaaaagggggaccagggagagactggcaaaaaaggacctatagggccggaaggggagaagtag

SEQ ID NO: 12584 - RNA, 300 nt, synthetic construct
  misc_feature 1..300: note = source = /note="Description of Artificial Sequence: Synthetic coding sequence"
  source 1..300: mol_type = other RNA
atgggcctttttatgattattgccatccttttgttccaaaagcccacagtcactgaacaactcaaaaaatgctggaacaattacgtgcaaggacattgtcgtaaaatctgtcgtgtgaacgaagtgcctgaagcactttgcgaaaatgggcgatactgttgtctgaatatcaaagagttggaagcttgcaaaaagataacaaagccccccagacctaagcccgctactctcgcgctcaccctccaagactacgttaccattattgaaaactttccgagccttaaaacccaatccacatag

SEQ ID NO: 12585 - RNA, 336 nt, synthetic construct
  misc_feature 1..336: note = source = /note="Description of Artificial Sequence: Synthetic coding sequence"
  source 1..336: mol_type = other RNA
atgaagtctctgttatttaccctcgcggtgttcatgctcctggctcagctagtctccggcaactggtacgtaaaaaagtgtctgaatgacgttggtatatgtaaaaagaaatgtaagccagaggaaatgcatgtcaaaaacggctgggctatgtgcggtaaacagagagattgctgcgtgccggccgaccgacgtgccaattatcccgtattctgtgtccagaccaagaccacccgaatctcaaccgtaaccgctaccaccgctaccactaccctgatgatgactacagctagtatgtcttccatggccccaactccagtatcaccaactggatag

SEQ ID NO: 12586 - RNA, 1698 nt, synthetic construct
  misc_feature 1..1698: note = source = /note="Description of Artificial Sequence: Synthetic coding sequence"
  source 1..1698: mol_type = other RNA
atggaagacagcgatagcgcagccaaacagctgggcctggccgaagcagctgctgtggcagctgccgcagccgtggccgcggccgctgcagctgccgccggtggcgaagccgaggaaccagtgctgtccagggacgaggacagcgaggaagatgcagattctgaagctgagcgagagaccccacgggttacagccgtggccgtaatggccgccgaaccaggccacatggatatgggcgcggaggctctgcctggacctgacgaagccgctgccgccgccgcttttgctgaagtgacgaccgtcacagtcgccaacgtaggagctgcagctgacaacgtatttacaacctcagtggccaatgctgcaagcatcagtggacacgttctttctggcaggaccgccctacagattggcgattcccttaacactgaaaaggccacccttatcgtggtccatacggatggtagtattgtagaaacaaccggcctaaagggaccagccgcccctctcacccccggtcctcagtctccacccacaccccttgcccctggtcaggaaaaaggcgggaccaagtataactgggatccctccgtatatgatagcgaactaccagtccgatgcagaaatatctccggaacactgtacaaaaatagactcgggtcagggggacgcggccgatgtataaagcagggcgaaaattggtatagtccaaccgagttcgaagcaatggcaggcagggctagctcaaaggactggaagcgcagcattaggtacgcaggcagacctctgcagtgcttgatccaggacggtatcctgaatccccacgccgcctcatgcacctgcgccgcatgttgcgacgacatgaccttgtccggaccagtcaggttgttcgtgccatacaaaaggcgaaagaaagaaaacgagctgcccactacccctgtgaaaaaagatagtcccaaaaacattactctgctacctgctacggcagcaacaacatttactgtgacaccatccgggcagattaccacctccggcgctctcaccttcgaccgcgcttccaccgtggaggctacagcagtgatttccgaaagccctgcgcaaggcgatgtgtttgccggagccaccgtgcaagaggcaagcgtgcaacccccttgtagagccagccaccctgaacctcattaccctgggtatcaggactcatgtcagattgcccctttcccagaagccgcactgcccaccagtcaccccaaaattgtgttgacctctctgccagcgcttgctgtcccaccaccaacacccacaaaggcagcccccccagccctagtcaacggtctcgaactatcggaaccccgatcttggctctatctggaggaaatggtgaattcccttttaaataccgcgcagcagctgaagacgctctttgaacaggccaagcatgccagcacatacagagaggcggccacgaatcaggctaaaattcatgctgatgcagaacgaaaagaacaaagctgtgtgaattgtggacgggaggctatgagcgagtgcacaggttgtcataaagttaattactgtagcaccttttgtcaaaggaaagactggaaggaccatcagcacatttgcggccagagcgcagcagtgacagtgcaggccgacgaagtccacgtcgcagagtccgttatggaaaaggtaactgtgtag

SEQ ID NO: 12587 - RNA, 471 nt, synthetic construct
  misc_feature 1..471: note = source = /note="Description of Artificial Sequence: Synthetic coding sequence"
  source 1..471: mol_type = other RNA
atgaacattcttatgctgacctttatcatctgtggcctcctaacccgcgttacaaaagggagcttcgagcctcagaaatgttggaagaataatgtcggacattgccgaagaagatgcctggacaccgagcgctatatcctgctgtgtagaaacaaactgagttgctgtatttctatcatctctcacgagtacacaagacgaccggcctttccggtgattcatctggaggacatcaccctcgactatagtgacgttgattcttttaccggtagccccgtttccatgctgaacgacctcattacattcgatacgaccaagtttggcgagaccatgacaccagagactaacacccctgaaacaacaatgccaccttctgaggcaactacccccgagacgaccatgccaccatccgagactgctacctcagagacaatgcccccccccagtcagacggccctgacacacaactag

SEQ ID NO: 12588 - RNA, 837 nt, synthetic construct
  misc_feature 1..837: note = source = /note="Description of Artificial Sequence: Synthetic coding sequence"
  source 1..837: mol_type = other RNA
atgggtggaccaagggcgttgctcgctgccctttgggctttagaggccgctgggaccgctgccctgcggatcggagcttttaacatccagtcctttggcgattcaaaagtctccgatcccgcctgcggctccatcatcgcgaaaattttagctggatacgacttagccctggtgcaggaagtacgtgaccccgacctgagtgccgtgagcgccctgatggagcagattaactctgtttccgagcatgaatatagcttcgtcagttcccaacctctgggacgggatcaatataaggaaatgtatttgtttgtgtacagaaaagacgccgttagcgtggttgatacgtatctgtatcctgaccccgaggatgtgttttccagggaacctttcgtcgttaaattttctgccccaggcactgcacagaacctggtgctgattcccctccatgccgcaccccatcaggccgttgccgaaattgatgcactgtatgacgtatatctcgacgtgatcgacaaatggggcaccgatgacatgctgttccttggcgactttaacgccgactgttcctatgtaagagcccaggattgggcggctattaggctgaggagtagtgaggtcttcaaatggttgatcccagattcagcagatacaacagtcggcaatagcgactgtgcctatgacaggatagtggcatgcggagctcgactccgccgctccctcaagcctcaatcagcaacagttcacgatttccaggaggaatttggtctggatcaaactcaagcactcgcaatctctgaccactttcccgtagaggtaaccttaaagttccaccgctag

SEQ ID NO: 12589 - RNA, 3039 nt, synthetic construct
  misc_feature 1..3039: note = source = /note="Description of Artificial Sequence: Synthetic coding sequence"
  source 1..3039: mol_type = other RNA
atggcagaggctgcacttgaggctgttaggagcgaactcagggaatttcctgcggccgcgagagagctgtgtgttccactggcggtgccctacttagacaagccacccacgcctctccacttttacagggactgggtgtgtcctaacagaccatgcatcattcgaaacgctttgcagcactggccggcacttcagaaatggtctctcccttatttccgcgctaccgtggggagtactgaagtgtctgtggcagtcacacccgacggctacgccgacgccgttagaggcgatagattcatgatgccagccgaacgacgcctgcccctcagttttgtgctggatgtgttagaggggcgtgcacagcacccgggggtgctgtatgtgcagaaacagtgcagcaacctcccatctgagcttccgcaactgctccccgatctcgaaagccacgtgccatgggcttccgaagctctgggcaagatgcccgatgccgtcaatttctggcttggcgaggccgccgccgtaacctctctccacaaggatcattatgaaaatctgtactgcgtggtctccggtgagaaacactttctcttccaccccccatctgataggccctttataccttatgaactttacacacctgccacttaccagttgactgaggagggcacattcaaggtagtggacgaagaggctatggaaaaagcagaagtgtctagaacttgtttgctgacggttcgcgtgctccaggctcacaggcttccgagcaaagatctggtgacccccagcgactgctatgtgactctttggttgcccacagcctgttcccacaggctccaaactaggactgttaagaatagttcttccccagtgtggaatcagagtttccactttagaatacatcgtcagctgaaaaatgtgatggagctcaaagtgttcgatcaggacctggttacaggcgacgatccagttctaagcgtgctgtttgatgcaggaacattgcgcgccggcgagtttagaagagagtcattttcactatctcctcagggcgagggtcggttagaggtggaattccgactgcagtccctggccgacaggggcgaatggctggtgtcaaacggggtgctggtcgcacgggaactctcttgcctacacgtccagctggaggaaactggcgaccagaaatctagtgagcatagggtacagcttgtcgtcccaggttcttgtgaaggaccgcaagaggccagcgtcggcactgggacatttcggtttcactgtccagcatgttgggagcaagaactttccattcgactccaggacgcccctgaggagcagctgaaagcaccactgtcggctctgccatctggccaagtggtgagattggtgtttcccacctcgcaggagcccttaatgagagttgaacttaagaaagaggccggacttagggaactggccgtacgactgggtttcggcccttgtgcggaggaacaggcctttctgtcccgaaggaagcaagtggtagcggcggccctgaggcaagcccttcaacttgacggcgacttgcaggaggacgagattcctgtcgtggccatcatggcgacagggggcggaatcagagctatgacttcattgtacggacagctcgccgggctgaaggagctggggttgctggactgcgtcagttacattactggtgcttccggtagcacatgggcactcgcaaacttgtacgaggacccggaatggtctcagaaggacctggcaggccccactgagctactgaaaacgcaggtgacgaaaaacaaactaggcgtactggccccttcacagcttcaaagataccgacaagaactcgccgaacgcgccaggctcggttatccgtcttgctttaccaacctctgggcactgatcaacgaagccttactgcacgacgaaccgcacgaccacaagttatccgaccaaagggaggcactatcacatggccaaaaccccctgccaatctactgtgccttaaacacgaaaggccaaagcttaacaacgtttgagttcggtgagtggtgcgaattctcgccttatgaagttggtttccctaagtacggtgcttttatcccctcggagctgttcggctccgagtttttcatggggcagcttatgaagcggttgcctgaatcccgcatctgcttcctggaaggaatatggtcaaacctgtacgccgcgaatctgcaggactcactctattgggctagcgagccgtcacagttctgggatagatgggtgaggaatcaagccaatctggataaagagcaggtgcctctattaaagatcgaagaacccccctccacggctggcagaatagctgaattttttactgatttactcacttggcgtcctttggcccaggccacacacaacttcctacgggggttgcattttcacaaagactattttcaacatcctcacttctcaacatggaaggcaaccacacttgacgggctgcccaaccagctgaccccctcagagccccacttatgtctgttagacgtgggctatcttatcaacacatcttgccttcctctgctgcagccaacgcgcgacgtagacttgattttgtcactggattataacttgcatggcgcatttcagcagctgcagttactcggaaggttctgccaagaacagggcattccttttccccccatcagccctagcccagaggaacagttacagccaagggaatgtcacacttttagcgatccaacctgtcccggagcccctgcagttttacatttcccccttgttagtgactctttcagggaatattccgcgcccggtgtaaggcgaacacccgaagaggccgcagccggtgaggtgaatctgagctcttccgatagcccctaccactataccaaggtcacctacagccaggaagatgtggacaaacttctgcacctgactcattataacgtgtgcaataaccaggaacaactgctagaggctctgagacaggcagtgcagcggcggagacaaagaaggccccactag

SEQ ID NO: 12590 - RNA, 1548 nt, synthetic construct
  misc_feature 1..1548: note = source = /note="Description of Artificial Sequence: Synthetic coding sequence"
  source 1..1548: mol_type = other RNA
atggcttggccgtactttcttgattgtcaccgatacttcacacgggaggacgaaggatgctacgatccactggaaaaactgcgaggcggtctggaagctgacgaggctcttcctagcggcctgccaccaacctttatccgcttctctcaccattcatacgctcagatggtgcgagtactgagacgcacagcctcaagatgtgcgcatgtggcacgcacatacagcattggtagaagctttgacggcagggaattattagttattgagttcagctctcgtcctggccagcacgaactgatggaacctgaggtcaaactgattggcaacatccatgggaacgaagttgccggccgggagatgttgatctatctggcccaatatctttgctccgagtacctgctgggaaacccgcggatccagcgtttgttgaacaccaccaggattcacttactaccttctatgaaccccgatggatatgaagtcgccgccgcggagggggcggggtataatgggtggacgagtggccgccagaatgcccagaacttggatctcaaccgcaattttcctgatctaaccagcgaatactaccgcctagccgaaactcgaggagcacggtctgatcacatcccgattccacagcactactggtggggaaaggttgcccccgaaaccaaggccataatgaaatggatgcaaaccattcctttcgtgctttcagctagcctgcatgggggggacctagttgtatcctaccccttcgatttctccaaacacccccaggaagaaaagatgttttcacccactcccgacgagaagatgtttaagctgctgagccgggcgtatgcggatgtgcatccaatgatgatggatagaagcgaaaatcggtgcggcggaaacttcttgaagagaggatctataatcaatggcgccgactggtactctttcaccggaggcatgtccgattttaactatctccataccaactgttttgagatcactgtagagctgggatgcgtaaaattccctccagaagaggctctctacatcctgtggcagcataataaagagtccctgttaaattttgtcgagaccgtgcatcgaggcataaagggtgtggtcaccgataagttcggaaagcctgtgaagaacgctcgcataagtgttaagggtatcagacatgacataactactgctcctgatggggactactggcggctgttgcctcccgggatccacatcgtgatagcacaggcccccggttatgccaaggttatcaaaaaggtgataattcctgcccgtatgaagcgagcaggcagggtggactttatactgcagccgttaggtatggggccaaagaattttattcatggcctgcgtcgcacaggcccacatgacccgttgggcggggccagctccctgggtgaagctacagagcccgaccctcttcgcgccagacgccaaccgtccgccgatggttccaagccatggtggtggagctactttacatcccttagcactcatcgaccacgctggctgctcaagtactag

SEQ ID NO: 12591 - RNA, 285 nt, synthetic construct
  misc_feature 1..285: note = source = /note="Description of Artificial Sequence: Synthetic coding sequence"
  source 1..285: mol_type = other RNA
atgcgcaccctcgccatcctcgccgccattctcctcgtggccttacaggcccaagcggagcccttacaggcacgtgcagatgaagtggccgcagctcctgaacagatcgccgcagacattcccgaggtcgtggtctcactggcatgggatgaaagtcttgcaccaaaacacccgggctctagaaaaaacatggcgtgctactgcagaattcctgcctgtattgccggcgaacgacggtacgggacgtgtatataccaaggcaggctgtgggcgttctgttgttag

SEQ ID NO: 12592 - RNA, 420 nt, synthetic construct
  misc_feature 1..420: note = source = /note="Description of Artificial Sequence: Synthetic coding sequence"
  source 1..420: mol_type = other RNA
atgggaaacccaggtggcgtcggctccgaacgtatgagagtggcccgaaggacgagaaacgtctgtcgttgccccagagccgcgggccctggcgtccctgaacccagagctgccccgctcccccttctcgctatggctcccccccccgcctgtagatctccgatgtcaccaccccctccacctctgttgctgctactcctcagcttggctttactgggcgcccgcgccagagccgaacccgccggatccgccgtacccgcccagtcccgcccctgtgtagactgccatgcatttgagttcatgcagcgagcactccaggacctcagaaaaacagcctgcagtctcgacgcccgcacagagaccttattgctgcaagccgaacgtcgggcgctatgtgcgtgctggcctgcaggccactag

SEQ ID NO: 12593 - RNA, 471 nt, synthetic construct
  misc_feature 1..471: note = source = /note="Description of Artificial Sequence: Synthetic coding sequence"
  source 1..471: mol_type = other RNA
atggcccccgccgtgactagacttctgttcttacagctcgtgctgggaccaacccttgtaatggacataaagatgcagatcggttctaggaatttctacaccctgagtatcgattatccccgcgtaaactatccaaaggggttccgcggttattgtaatgggctcatgtcctatatgcgcggaaaaatgcaaaacagcgactgcccgaaaatccattatgtgatacatgctccttggaaagcgatccagaagttttgtaaatactccgactccttttgtgaaaactataacgagtattgtacactgacacaagattctctgcccatcaccgtctgctccctttcacatcagcagccacctacctcttgctactataactcaacattaaccaaccagaaactatatttactatgctcaagaaagtatgaagcagatccgatcggtatcgccggcctgtatagcgggatctag

SEQ ID NO: 12594 - RNA, 444 nt, synthetic construct
  misc_feature 1..444: note = source = /note="Description of Artificial Sequence: Synthetic coding sequence"
  source 1..444: mol_type = other RNA
atgatcattatggtaattatctttctcgtgttacttttttgggaaaacgaagtgaacgatgaagccgtgatgagcacattggaacatttgcacgtggattacccgcaaaacgatgtgccagtccccgctagatactgcaaccacatgataattcaacgcgtgattcgagagcccgaccatacctgcaagaaagaacacgtctttatccatgagcgtccaaggaaaatcaatggcatttgtatctcaccgaagaaagtagcatgccagaacctgtctgcaattttttgtttccagagcgagactaaatttaagatgacagtgtgtcagctgatagaaggcacaaggtatcctgcctgtcgctatcactacagtcctacggagggctttgtcctggtcacctgtgacgacctgcggccggactcattcctgggctacgttaaatag

SEQ ID NO: 12595 - RNA, 453 nt, synthetic construct
  misc_feature 1..453: note = source = /note="Description of Artificial Sequence: Synthetic coding sequence"
  source 1..453: mol_type = other RNA
atgagattcatggccggccccgccggatcccaatctctcggacctctttgcttccattcttcaccccaagccctgtacacggtgctgcttatagtgcttgtcatgatgtctttagtatttgggaagtttgttcccgttaactgggaaccacctcaaccactccctttccctaaatatctgcgatgctacagatgcctgctcgagaccaaagaacttggatgcctgctgggttccgacatctgcctcacacccgcgggcagctcatgcattactttgcacaaaaagaactcctcaggttcagacgtgatggtctccgactgtaggagcaaggagcaaatgtctgactgttccaataccaggacaagccctgtctctggattctggattttctcccaatactgttttttagacttttgtaatgatcctcagaatagaggactgtacactccatag

SEQ ID NO: 12596 - RNA, 2742 nt, synthetic construct
  misc_feature 1..2742: note = source = /note="Description of Artificial Sequence: Synthetic coding sequence"
  source 1..2742: mol_type = other RNA
atgggacccgaagccctatctagtctgctacttctcctcctcgtggcaagtggggatgcagatatgaagggccatttcgatccagctaagtgtagatatgcactgggcatgcaggataggacaatccccgattctgacatatctgcctcatccagctggtctgacagcaccgctgctagacattctagattggagtcctcagatggagatggcgcctggtgcccagcaggttccgtctttcctaaagaggaagagtatctgcaagtggatctccagaggttacatctggttgccctggtcggcacccagggtaggcacgccggcgggctagggaaggagttctcaagaagttatagactgagatattcacgggacggcaggcgatggatgggctggaaggatagatggggacaggaggtaatttcaggcaacgaggaccccgaaggcgtggtactcaaggacttagggccacccatggtggctcggctggtgagattctaccctcgggccgaccgcgtaatgagcgtctgtctaagagtggaattgtacggatgtctgtggagggacggactgctttcatataccgcccctgtgggacagaccatgtatctcagcgaggccgtgtatttaaacgatagcacgtatgatggacatactgtgggaggacttcagtacggtggtctgggtcaactggccgacggtgtggttggcctcgacgactttagaaaatcccaagagctgagagtgtggcctgggtacgattatgtgggttggagtaaccattctttttcaagcggctacgtggagatggagttcgaattcgatagactgcgggcttttcaggccatgcaggttcactgcaataatatgcataccctgggcgcccgtcttccaggaggtgtggaatgtagattccggcgcggcccagcgatggcctgggagggggagcctatgcgccataatctgggtggcaatctgggcgacccgcgcgctcgcgccgtgagtgtgcctctcggcggacgtgtggcccggttcctgcaatgtcgctttctgtttgctgggccctggctcctgtttagcgagatctcattcatcagcgacgtggtaaacaattcatccccggcattaggcggaacatttcctcctgccccttggtggccaccaggcccaccacctacaaatttcagttcactggagctcgaaccaagggggcaacagccagttgccaaagcagaaggcagccccacagcaatcttgatcgggtgtctggtggccatcattcttctcctgcttctgatcatcgcactcatgttatggcgcttgcattggaggcgtctgctgtcgaaggctgaaagaagagttttggaggaggagttgactgtgcacctctccgtacctggcgataccatactcattaataaccgcccagggcctagagagccccctccctaccaggagcctcggccacgggggaacccccctcattctgcaccctgtgttccaaacggaagcgccctcctgttatcaaatccggcctaccggctactattagccacctatgcaagaccacccaggggaccaggtccccctacgccagcatgggctaagcccacgaacactcaagcatattctggcgactatatggagcctgagaagccaggcgcacccctgctgcctcccccacctcagaactccgtgccccattatgccgaagccgatatcgtgaccctgcaaggagtcaccgggggtaatacctatgctgtgcccgctctccctcctggagctgtcggagatggaccaccccgggtggactttccacggtcccggcttaggttcaaagaaaaattaggcgaagggcagtttggcgaagttcatttatgtgaagttgactctcctcaagatcttgtctctctggatttcccactaaacgtgcgaaaaggacaccccctactcgtagctgttaagatcctgaggcctgacgctaccaagaacgcccgcaacgactttctcaaagaggttaaaatcatgtccaggctgaaggatcccaatattatacggcttctcggggtttgcgtgcaggacgatcctctgtgtatgatcaccgactacatggaaaacggggatcttaaccagttcctcagcgctcaccagctggaagacaaggctgctgagggagcccctggggacggacaagccgctcagggtccgaccatctcgtaccccatgctactacacgtggcagcacagatcgcatcaggtatgcgttacctggctaccctcaacttcgttcaccgcgacctcgctacacgcaattgccttgtcggagagaattttacaattaagatcgccgatttcggcatgtctagaaatttgtatgccggagactattacagagtgcagggtagagcagtcctgccgatccggtggatggcttgggaatgcatcctcatgggcaaattcactacggcctccgacgtgtgggcctttggtgtgacattgtgggaggtccttatgctctgtcgcgcacagccctttggtcagctgactgacgaacaggtaattgaaaatgccggagagttttttagagaccagggccgccaagtgtaccttagccggcctccagcgtgcccgcagggactgtatgagcttatgctgcggtgttggagtagggaaagtgaacagagaccaccattcagccagttacatcgtttcttggccgaggacgcattgaacacagtatag

SEQ ID NO: 12597 - RNA, 453 nt, synthetic construct
  misc_feature 1..453: note = source = /note="Description of Artificial Sequence: Synthetic coding sequence"
  source 1..453: mol_type = other RNA
atgcggtttatggcgggcccagccggctcccagtccttagggcccctgtgctttcatagctctccccaggccctgtacacagtgctgctgatcgtgttagttatgatgtctttagtgttcggtaaatttgtaccagtcaactgggaaccacctcagccgctcccttttcccaagtatctgcggtgctacagatgtctgttagagacaaaggaactgggttgcctcctcggctccgatatctgtctgactcctgctggcagttcctgtatcactctgcacaagaaaaacagttccggctctgacgttatggtgtccgattgcagatcaaaagaacaaatgtccgattgctctaacacacgcacctcaccagtgtcaggattttggatcttttctcagtattgcttcttagacttttgtaacgatccacaaaataggggcttgtacactccgtag

SEQ ID NO: 12598 - RNA, 567 nt, synthetic construct
  misc_feature 1..567: note = source = /note="Description of Artificial Sequence: Synthetic coding sequence"
  source 1..567: mol_type = other RNA
atgtttcaccaaatatgggccgctctgctttatttttacgggatcatactgaattccatttatcagtgtcctgagcactcacagctgaccactctgggagtcgatggtaaagagttcccagaagtgcatctcggccagtggtactttatcgctggtgctgctccaactaaagaagagctggccaccttcgacccagtggacaatatcgtctttaacatggccgcaggcagcgcaccaatgcaactccacttgagagctacaattcggatgaaagatggattatgcgtgccccggaaatggatttaccacctgaccgagggctctaccgatctgagaaccgagggcagaccagatatgaaaacagaattgttctcatccagctgtccgggcgggatcatgttgaacgaaaccggccagggctaccaacgctttctactttacaaccgatccccccaccctcccgagaagtgcgtggaagagttcaaatccctgacgagttgccttgatagcaaagcttttctgttgacacctcgcaaccaagaggcctgcgaactttccaataattag

SEQ ID NO: 12599 - RNA, 2535 nt, synthetic construct
  misc_feature 1..2535: note = source = /note="Description of Artificial Sequence: Synthetic coding sequence"
  source 1..2535: mol_type = other RNA
atgggtccaggcgcaccttttgcaagagtgggatggccactgccactcctcgttgtcatggcagctggcgttgcacccgtatgggcttcacattctcctcacctgcctaggccacatagtcgagttcctccccacccttcttcagagcgaagagctgtttatatcggtgcactctttccgatgagtggcggctggcctggggggcaggcctgccagcccgccgtcgagatggctttagaggacgttaattcaagaagagatattctgcccgactacgagctgaaacttatccatcacgatagtaagtgcgatccgggccaggcgacaaagtacctctatgaactgctctacaatgaccctattaagattattctgatgcctgggtgcagtagtgtgtctactctggtggctgaggcagcacgcatgtggaaccttatagttctcagctatggaagttcctcccccgccctcagcaatcggcagagatttcccacattctttaggacacaccccagcgctacactccataatcctacacgggttaagctatttgaaaagtggggctggaaaaaaatagcgacaatccaacagaccactgaggtattcacatccactctagatgaccttgaagagcgagtaaaagaggccggcattgaaattacgtttaggcagtcttttttttctgatcccgcggtgccggtgaaaaacctgaaaaggcaggatgcccgaattatcgtgggactcttttatgaaaccgaagcccggaaagtgttctgcgaggtttacaaggagagactgttcggaaaaaaatacgtatggttccttatcggatggtatgccgacaattggtttaagatatacgacccgtcgatcaattgcactgtggacgagatgactgaagcagtggagggccacattaccacggagatcgttatgctcaatcctgcgaacacgcgatcaatctcaaacatgacatcccaagaattcgtggaaaagttgaccaagagacttaagcgccatcccgaggagaccggtggtttccaagaagcacctctggcctatgacgctatctgggctctcgccctggctctcaacaagacgtctgggggaggaggtcgcagtggcgtgcgcctcgaagattttaattataacaaccagacaattacagaccagatctaccgagctatgaattcctcttccttcgaaggcgtgagtggccacgtggtgtttgatgcgtcaggaagtcgtatggcatggaccctgatcgaacagctccagggggggagctacaagaagatcggatactatgactcaactaaggacgacctgagctggtcaaagacagataagtggattggagggagcccacctgccgaccagactctggttatcaagacatttaggtttctcagccagaaactcttcatctccgtctcagtgctttcttctcttggcatcgtgctcgccgtggtgtgcctctccttcaatatttacaactcccatgttcgatacattcaaaacagccagccaaatctgaataaccttaccgcggtggggtgttctctggccttagccgccgtgtttccactgggccttgacggataccatattggcagaaaccagtttccctttgtttgccaggctcgtctatggctactgggtctcggcttctccctgggttatggctcaatgtttaccaaaatttggtgggtacatacagtttttacaaaaaaggaagaaaagaaggagtggagaaaaacactggagccttggaaactgtacgccacagtgggcctgttggtgggcatggacgtgctcactctcgccatctggcaaattgtggatcctcttcataggacaatagaaaccttcgcgaaggaggagcccaaggaggacatcgatgtaagcattctcccacagctggagcattgttcaagtcgcaaaatgaatacgtggctggggatattctacggctacaagggcctgttattgctcctgggtattttcctcgcatacgaaacaaagtccgtatccaccgaaaaaatcaatgatcatcgagcggtgggtatggctatttacaacgtggctgttctctgtctgatcacagctcctgtcaccatgatcctgagctcccagcaggatgccgcgtttgccttcgctagtttggcaatagtcttctcatcatatattaccctggtagtgctgttcgtgcctaaaatgcgccggctgatcacgcgcggtgaatggcagagcgaagcacaagacactatgaagacaggttcttccacaaacaacaatgaggaggaaaaaagcaggctgttagagaaagagaacagagagttggagaaaattatcgcagagaaagaagaaagagtaagcgagttgagacaccagctccaatctaggcagcagttgcggtcccggaggcatccgccaacaccccctgagcctagtggtggtctcccccgtgggccacctgagcccccagacagactcagctgcgacggaagtagagtccatttgctgtataaatag

SEQ ID NO: 12600 - RNA, 237 nt, synthetic construct
  misc_feature 1..237: note = source = /note="Description of Artificial Sequence: Synthetic coding sequence"
  source 1..237: mol_type = other RNA
atgggcagcggactgcccctcgtcctcctgttgaccctgcttgggagctctcacggcacaggtcccggtatgacactgcaacttaagctgaaggagtcctttttaaccaatagttcttacgaaagcagctttctcgagctacttgaaaaactgtgtctgttgttacatctaccctcaggaacatccgtaactctccaccacgccagaagccaacaccacgtggtctgcaatacatag

SEQ ID NO: 12601 - RNA, 2700 nt, synthetic construct
  misc_feature 1..2700: note = source = /note="Description of Artificial Sequence: Synthetic coding sequence"
  source 1..2700: mol_type = other RNA
atgctattactcctccttctcgctcccttatttttgaggccacccggtgccggcggagcccagacaccgaacgccacttccgagggatgtcagatcattcaccccccctgggaagggggaatccgttataggggcctcactcgagaccaggttaaagcgattaattttctgcctgtggactatgaaatcgagtatgtctgtagaggggaacgcgaggtggtgggccctaaagtacggaagtgccttgcaaacggcagctggacagatatggatacccctagccgatgcgtgaatagaacgccacacagtgaacggcgggccgtatacatcggtgctttgttcccgatgtccggcggttggccaggaggccaagcctgtcagccggccgtggaaatggccttggaggatgtcaatagtcggcgcgatattctcccagactacgaattaaaactgatccatcacgatagcaaatgcgatcccggccaggccacaaaatacctgtatgaactcctgtacaacgacccaataaaaataattctcatgccaggatgctcctccgtctcaacgctcgtggcggaggcagcacggatgtggaatctgattgtcctcagctacggctcctcctcccctgccttaagtaaccgccagcggttccctacctttttcaggactcaccctagtgctacactgcataatccaactagagtcaagttgtttgagaagtggggatggaagaagatagctacgattcaacagacgacagaagtgtttactagcactcttgacgatctggaggagcgagtgaaagaagctgggatcgagatcacatttcgccagtctttcttcagcgatcctgccgtgcctgtgaagaatctcaaacgccaggacgcccgcattatcgtggggctgttttacgagaccgaagctagaaaggtattttgcgaagtctacaaagagcggctctttggaaagaaatatgtgtggtttctgatcggctggtacgccgacaactggttcaaaatttacgacccatcaattaactgtactgttgacgaaatgactgaggcagtcgaagggcatattacaaccgagattgtgatgctgaatcccgctaatactcgtagcatttcaaatatgaccagtcaagaatttgtagagaagttaacgaagcgacttaagcggcacccagaagaaacgggtggcttccaggaggcacctcttgcttatgatgccatatgggcactcgcactcgctttaaacaagacctccggaggaggcggcagatccggcgtgaggctcgaagatttcaattataacaaccaaaccatcacagaccagatctatagagccatgaattcaagctccttcgaaggcgtctctggacacgtcgtgtttgacgcctcggggtcacggatggcctggacactgatagagcagttacaggggggctcttacaagaaaattggatactacgactctaccaaggacgatctcagttggagtaaaaccgataagtggataggggggagccctccggcggaccagactcttgtgatcaaaacctttagatttctgagccagaaactgttcatctcagtgtcagtgctaagcagcttgggcatagtgctcgcagtggtgtgcctctcttttaatatctataattctcacgtcagatatatccagaacagccagccaaatctgaacaaccttactgccgtaggctgtagtctggcccttgccgccgtgtttccacttggactggatggttaccacattggaaggaatcagtttccatttgtatgccaagcgaggctgtggttgctcggactgggtttctccctggggtacggatccatgttcaccaaaatctggtgggtccataccgtgttcactaaaaaggaggaaaaaaaggaatggcgaaagaccctcgaaccatggaaactgtacgcaacagtgggacttttagtgggcatggacgttttgactttggctatctggcaaattgttgacccccttcaccgaacgattgaaacctttgccaaagaggagcccaaagaggatattgatgtgagcatcttaccccaactggaacactgcagttcacggaaaatgaacacttggctgggaatcttttacggttataaagggctgctccttttattaggcatctttttagcttacgagaccaaatctgtttcaacggagaagatcaacgaccaccgggcagtgggcatggctatttacaatgtcgccgtattgtgccttatcactgcacccgtcactatgattttgtctagccagcaagatgctgccttcgcctttgcatccttagcgatagtgttttcatcctatatcacccttgtggtcctctttgtgcccaaaatgagaaggttaatcactcgcggggagtggcaatcagaggcgcaggacactatgaagaccggctcaagcactaacaataatgaagaagaaaaatctcgactgctggaaaaggaaaatcgcgagcttgagaaaattattgctgaaaaagaggagcgagtcagtgagttacgccaccagctccagtccagacaacaactgcgatctcggagacaccctcccaccccacctgagcccagcggcggcctgccaaggggtccaccggagcctcccgataggcttagttgcgacggatccagggttcatctgctgtacaaatag

SEQ ID NO: 12602 - RNA, 2886 nt, synthetic construct
  misc_feature 1..2886: note = source = /note="Description of Artificial Sequence: Synthetic coding sequence"
  source 1..2886: mol_type = other RNA
atgctacttttactcctactggctcccttattcctgcgcccgcccggggccggaggtgcccagacgcccaacgccacttctgagggttgtcagataatacatccgccatgggaaggaggcattcggtacaggggtctgacacgcgatcaggttaaagccatcaattttctccccgtagattatgaaattgagtatgtgtgccgcggcgaaagagaggtcgttggtcctaaagttcggaaatgtctggcgaatggctcttggactgacatggatactccgagcagatgcgttcggatctgtagtaagagctacctcaccctggagaacggaaaagttttcctgactgggggtgaccttcctgcactggatggcgcacgggtcgacttcaggtgtgatcctgattttcacctggtcggcagttccaggtccatttgttctcaaggccagtggtctaccccgaaaccccattgtcaggttaaccggacgcctcacagcgaaagaagggctgtgtacattggcgccctgttccctatgagtggcggctggccgggagggcaggcatgccagcctgccgtggaaatggccctggaagacgtaaacagccgacgggatatactccccgattatgaattgaaactgatccatcatgactccaaatgcgatcccggccaggcaaccaaatacttatatgagttgctctataacgatcctattaaaatcatccttatgcccggatgttcatctgtgtccacccttgtcgccgaagcagcacggatgtggaacctcatagttctcagctatggatctagcagtcctgcacttagcaatagacagcggtttcccacattcttccgcactcaccctagcgccacgctccacaacccaactagggtcaaactgttcgagaagtggggttggaagaagatcgcaactatccaacagacaactgaggtgttcacctctacattagacgatctggaagagcgcgtgaaagaagctgggatagagattacctttcgccagagcttcttcagcgacccagccgtccccgtgaaaaatctgaaacgacaggatgctcggatcattgtgggtctgttctatgaaactgaggctcggaaagttttttgcgaagtgtacaaggagagactatttgggaagaagtatgtctggttcttaatcggctggtatgcagataactggtttaagatttacgaccccagcattaattgcactgtcgatgagatgaccgaggccgtggagggtcatatcactacggagatcgtcatgctgaacccagccaatacaaggagtattagcaatatgaccagccaggagtttgttgagaagcttacgaagagattaaaacggcaccccgaggagacgggggggttccaggaagcgcctttggcatatgatgctatctgggcattagccttagcactgaacaaaacctccgggggaggtggcaggtccggagttcgccttgaggacttcaactacaacaaccagaccatcacagaccagatttatcgcgctatgaactcttccagtttcgaaggcgtgtcaggacatgtcgtgttcgatgcttcggggagcaggatggcctggactctaattgagcaactgcagggaggctcctacaagaagattgggtactacgattctaccaaggacgatttgtcatggtcgaagactgataaatggatcggaggatctcctcctgcggatcagaccctggtcatcaaaacctttcgctttctctcccagaaactgtttatctccgtctcagtgctgagctctttaggaattgttctcgctgttgtgtgcctgtcattcaacatttacaattctcatgtaaggtacattcaaaattcccagcccaacttgaacaaccttacggccgtgggttgttcgctcgccctcgccgcagtgttcccactgggactcgatgggtaccatatcggcagaaaccagtttccttttgtctgccaggccaggctttggttgctaggcctgggattctccctcgggtatgggtcaatgttcaccaagatctggtgggtgcatacagtgtttacaaagaaggaggagaagaaagagtggcgaaaaacccttgaaccatggaaactctacgccaccgtaggcctcctagtggggatggacgtgctgaccttggctatctggcaaatcgtggatccacttcacagaacgatcgagacgttcgctaaggaagagccgaaagaagacatcgatgtttccatactaccacaacttgagcactgttccagccggaaaatgaacacatggcttggtatattctacgggtataaagggctactgttgctccttggaatctttcttgcatacgaaacaaagtccgtttccaccgaaaagattaacgatcatcgagccgttggcatggccatatacaacgttgctgtgctctgcctgattaccgcccccgtgactatgatcttgtcatcccagcaggacgcagcatttgcgttcgcatccctcgctattgtcttctcatcatatataactttagtggtgttatttgtgcctaaaatgcgaagacttatcactcgtggagaatggcagtctgaagcccaagatactatgaagaccggaagttcgacaaataacaatgaggaagaaaagagccggcttcttgaaaaagaaaatagagagttagagaaaatcattgctgagaaagaggaacgcgtatcagagctgagacaccaattgcagtctaggcagcaactccgcagtagaagacatcctccaacaccgcccgagccatccggcggtctgcctcgagggcctcccgaaccacccgacaggctgagctgcgacgggtccagggtccatcttctctataaatag

SEQ ID NO: 12603 - RNA, 2535 nt, synthetic construct
  misc_feature 1..2535: note = source = /note="Description of Artificial Sequence: Synthetic coding sequence"
  source 1..2535: mol_type = other RNA
atgggaccaggggccccattcgcccgcgtgggttggcccctccccctactcgtcgtcatggcggctggagtggctccagtatgggccagccacagtccccacctcccaaggcctcatagtagagtacccccccacccatcctccgaacgccgggccgtctacatcggcgctctgttccctatgtcgggaggatggccagggggacaagcgtgtcaacccgccgtagagatggccctcgaggatgtcaattctaggagagatattctacctgactatgaactcaaactgatccatcacgacagcaaatgtgatccgggacaggctactaaatatctctatgagctcctttataatgacccgatcaaaattattctgatgcctggatgctcctccgtgtccacgcttgtagcagaagccgctagaatgtggaacctcatagtgctcagctatggctcaagtagccccgcactgagcaatcgacaaaggttccccaccttcttcagaactcatccatcagcaacactgcataaccccaccagggtgaaacttttcgagaagtggggctggaaaaaaattgcgaccatccagcagactaccgaggtttttacgtcgactcttgatgacctggaagagagggtcaaagaagcgggtattgaaatcacctttagacaatctttctttagtgaccccgccgttccggtcaagaacctcaagcgacaggatgcccgaataattgtaggcctgttctacgagacagaggcaaggaaggttttttgcgaagtttataaagaaagactgtttggaaaaaagtacgtatggttcttgattggatggtacgcagataattggttcaaaatctatgacccctccatcaattgcaccgttgacgaaatgactgaggccgttgagggacacatcacaacagagatcgttatgctaaaccctgctaacactcgcagcatttcaaatatgacctcccaagaattcgtggagaaactgacaaaaagactcaagcgtcatcctgaagaaacaggggggttccaggaagcaccactggcctacgatgccatctgggctctcgcactggcacttaataaaacctcaggcgggggaggaaggtctggcgtacgcctggaagattttaactacaataatcaaacgattacagaccaaatttatcgcgcaatgaatagctccagtttcgagggcgtgtcaggccacgttgtattcgatgcttctggcagcaggatggcatggacactgatcgaacagcttcagggtggatcttataaaaagatcggatattacgacagtaccaaggacgacctgtcctggagcaaaacagacaaatggatcggcggatccccgcctgcagatcaaacccttgtcatcaagacatttaggtttctatcacaaaagctgttcatctccgtgtctgtcttgtcgagcctgggaatagtactagcagtagtttgtctgtcttttaatatctataactctcatgtgcgttatatccaaaactcacaacctaacctgaacaacttaaccgcggtcgggtgctctttggctcttgctgcagtgttccccctcgggctggacggttatcatatcgggagaaatcagttcccttttgtgtgccaagcccgtttatggttgttaggcttgggcttctctctaggttatggatcaatgtttaccaagatctggtgggtgcacactgtgtttacaaaaaaggaggagaaaaaggagtggagaaaaaccttggagccatggaagctttacgccaccgtgggtttgctcgttggaatggatgtgttgaccttggccatctggcagatcgtcgaccccctgcacagaaccattgaaacgttcgctaaagaggagccgaaggaggatattgacgtgagcatactgccacagcttgaacattgcagctccagaaagatgaacacatggctcggcatcttctacggatataaaggtctcctgctcctactgggcatatttctggcttatgaaaccaaatctgtatccacagagaagataaatgaccatagggccgtgggcatggctatttataacgtggcggtgctgtgccttatcaccgcccccgttaccatgatcctgagctcccagcaggacgccgcgttcgccttcgcctcactcgccattgtcttctcctcctatatcaccctcgtggtcctgttcgtccccaagatgaggagactaattaccagaggagagtggcagagcgaagcccaagataccatgaaaactggcagttctaccaacaacaatgaagaagaaaaatccaggctactggagaaggaaaatagggaactggaaaagataatcgcggagaaagaagagcgggttagtgagctgcgtcatcagctgcaaagtcggcagcagttaaggtcacggcgacatccgcctaccccacctgaaccttctgggggtctgccaagaggcccacccgaaccaccagatagactttcctgcgatggatccagagtgcacctactttataagtag

SEQ ID NO: 12604 - RNA, 2535 nt, synthetic construct
  misc_feature 1..2535: note = source = /note="Description of Artificial Sequence: Synthetic coding sequence"
  source 1..2535: mol_type = other RNA
atggggcctggtgccccctttgcccgcgtgggctggccacttcccctgcttgtcgtaatggccgccggcgtagctcccgtctgggccagtcactctcctcacctgcccaggccgcacagtcgtgttccaccccatccctccagtgaacgtcgcgcagtatacataggagctttatttccgatgagcggcgggtggcccggaggacaggcatgtcagccagctgttgaaatggcacttgaggacgtcaatagcagaagagatatcctacccgactacgagctgaaactgatccaccatgacagtaagtgtgatcccgggcaggcaacgaagtatctgtatgagcttttgtataacgaccccataaaaataatactcatgccgggctgttcctccgtaagcacactagtggcggaggcagctaggatgtggaatcttatcgtcctgagttatggttcttctagccctgcgctctcaaaccgccagagatttcctacattttttcggactcacccaagcgctacattgcacaatcctacgcgtgttaaactctttgagaaatggggctggaaaaagatcgcaacgatccagcagaccaccgaggtgtttacctcaacgctggacgacctggaggagcgtgtcaaggaagcaggcatcgagattacctttcgccagagctttttcagcgatccagcagttccggtgaaaaacctgaagcggcaggatgcccgaattatagtgggactcttttacgagactgaggcgcggaaggtattttgcgaggtttataaggagcgtctgttcggaaagaagtatgtgtggttcctgatcggttggtatgctgataactggtttaagatatatgaccccagtatcaactgtacggtggatgaaatgaccgaagcggtcgaagggcatataaccactgagattgtcatgctcaaccctgcaaacactcgcagtattagtaatatgaccagccaggaattcgtggagaaactgactaaaagactgaaaagacacccagaagagactggcggctttcaagaagcacccctggcttacgacgccatctgggccctggccctggcactgaacaaaacaagcggcggaggcggtaggagcggggtcagactggaggatttcaactataataatcaaacaatcaccgatcaaatctatcgggctatgaatagtagttctttcgagggcgttagcgggcacgtcgtatttgacgctagtgggtctagaatggcatggacacttatcgagcagttacaggggggatcctataagaaaatcggatactatgatagcacaaaggatgacttgtcctggtcaaagaccgacaagtggatcggcggctcaccccctgctgatcagaccctggtcatcaaaactttcaggtttttgagtcaaaaactctttatctccgttagtgtgctatcgagcctgggcatcgtactggcagtcgtctgcctgagttttaacatctacaattcacatgtgagatacatccaaaactcgcagccgaatctgaacaacctcacagctgtcggctgttctcttgccttggccgctgtatttcctctgggtttggatggctaccacatcggacgcaaccagtttccatttgtctgccaggcccgtttgtggctgctggggctgggcttctcattaggttacggatctatgtttacaaaaatttggtgggttcatactgtgttcacaaagaaggaggagaagaaagagtggagaaaaacactggaaccctggaagttatatgcgaccgtgggattactggtagggatggacgtgctgacactggctatttggcaaattgttgacccactgcatagaacaatcgagacattcgcaaaagaggagcccaaagaagatatagacgtcagcatacttccacagctggagcactgcagttctcgcaagatgaatacatggctgggcatcttctacggttacaaaggccttctgttgctgctcggtattttcctggcgtatgaaaccaaatccgtttctacagaaaagatcaatgatcatagggccgtgggcatggcgatctataatgtggctgtgttgtgtctgattactgcgcccgtcaccatgatcttgtcgagtcaacaggatgccgcctttgcttttgcgtctcttgcaattgtgttttctagttatatcactttagtcgtgctgttcgtgcccaaaatgcgccggctaataacccggggtgaatggcagagcgaagcccaggacactatgaaaacaggctctagtacaaacaacaatgaggaggagaaaagcagactgctcgaaaaggaaaaccgcgaactggagaaaattatcgccgagaaggaggaaagggtttcggagctccggcatcagttgcagagccggcagcagttgagaagccggcgccatcccccaactccacccgagccgagcggaggactgccccgcgggccaccggagccacctgatcgcctgtcatgtgacggaagccgcgtccacctcctgtacaagtag

SEQ ID NO: 12605 - RNA, 2700 nt, synthetic construct
  misc_feature 1..2700: note = source = /note="Description of Artificial Sequence: Synthetic coding sequence"
  source 1..2700: mol_type = other RNA
atgcttttgctccttcttctcgctccactatttctcaggccgcccggagcaggaggtgcgcagacacccaacgccacttccgaagggtgccagattatccatccaccgtgggaaggaggaatacgctatagaggcctgaccagagaccaggtgaaagccataaatttcctcccagtagattatgaaatagagtatgtctgccgcggtgaacgtgaggtcgtgggaccaaaggtccgcaagtgtctcgctaatggatcctggacggacatggatacaccatctagatgcgtgaacagaaccccccatagcgaacgcagagcagtttatattggcgcgcttttccccatgtcgggcgggtggcctgggggccaggcctgtcaacctgccgtggagatggctttggaggacgtcaacagccgcagagatatcctaccagactatgaacttaagctcatccaccacgacagcaagtgcgatccaggacaagcaacaaagtatttatatgagctcttgtacaatgatccgattaaaattatacttatgcccggttgcagcagcgtcagcacccttgttgcagaggccgcccggatgtggaacttgatagttctgtcttatgggtcaagctctcccgcattaagcaaccgccagcgattccccactttttttcgcactcatccaagtgccacattgcataaccccacccgcgttaaattgtttgaaaagtggggctggaagaagattgccacgatccagcagactacagaagtgttcacaagcacactggacgacttggaagagcgagttaaagaggccggcatcgagattacatttagacaatcgttcttctccgacccagccgtccctgtgaagaatctgaaacgtcaagacgctcggattattgtcggcctgttctacgaaactgaggcacgaaaggtgttttgcgaggtttacaaggagagattattcggtaagaagtatgtgtggttccttattgggtggtacgccgataactggttcaaaatttacgatccaagcattaattgtacagtggacgagatgacagaggctgtggagggccacattactacggagattgtgatgctgaaccctgccaacacccgcagcatctccaatatgactagtcaggagttcgtcgagaagctgacgaagagactgaaaaggcatcctgaggagaccgggggatttcaggaagcgcccctcgcatacgacgctatctgggcccttgccctcgccctgaataaaactagcggggggggcggtcgctctggcgtccgcttagaagacttcaactacaacaatcaaactattaccgaccagatttatcgagccatgaactccagtagttttgagggcgttagtggccacgttgtctttgatgcatccggatcacgcatggcttggactctgatcgaacagttacaggggggttcatataagaaaatcgggtattatgactccaccaaagacgacctgtcatggtcaaagacagacaagtggatagggggctctccccccgcagaccaaacactggtcatcaaaacctttcgatttctcagccaaaagctgtttatttcggtctccgtgctgtcttcgctcggcatcgtgctcgcagtcgtatgcctttcgttcaacatatataattcccacgtgcggtacattcaaaatagtcagcctaatttgaataatttgactgccgtcggatgttctctggcgttagccgccgtgttccccctggggctcgacggctatcacattgggagaaaccaattcccattcgtgtgtcaggcacggctgtggctactcggccttggattcagcctcggctatggtagcatgttcacgaaaatatggtgggtgcatacagttttcacaaagaaagaggaaaagaaagagtggagaaagacgcttgaaccctggaagctgtacgctaccgtggggctgcttgttgggatggacgtgctgacccttgccatctggcagatcgtggacccccttcacagaactatcgaaaccttcgccaaggaggagccaaaagaagatatagatgtctctattctgccccagcttgagcactgtagtagcaggaaaatgaacacttggctagggatcttttatggctacaaaggactgcttttgctgctcggaatctttctggcatacgagaccaagtccgtatcaacagaaaagatcaatgaccatagggccgtaggaatggccatttacaacgtcgccgttctgtgccttataacagcccccgtgactatgattctgtcatctcagcaggacgcagcttttgcctttgcctcacttgctatagttttttccagctatattacccttgtggtcctgttcgttccgaagatgcggcgtctaattactcgcggtgagtggcagtcagaggcccaggataccatgaaaacaggctcgtccactaataataacgaagaggagaagtcgcggctcctcgagaaagagaatcgggagctggaaaaaatcatcgctgagaaggaggaacgggtttctgaactgcgccaccagttgcaatcaagacaacaattacgttcaaggagacatcctcccacaccccctgaaccctcaggtggactcccacggggccctcctgaaccaccagataggctgagttgtgatggcagtagggttcatctgctctataaatag

SEQ ID NO: 12606 - RNA, 2886 nt, synthetic construct
  misc_feature 1..2886: note = source = /note="Description of Artificial Sequence: Synthetic coding sequence"
  source 1..2886: mol_type = other RNA
atgttgctcttactgcttctggcccccctgtttctgcgcccccccggagccggcggagctcaaactcccaacgctacgagcgaaggctgtcaaatcatccaccccccctgggaaggcggtattcggtatcgaggcttaacgagggatcaagtgaaggccatcaactttctgccagtggattacgagatcgaatatgtgtgtcggggcgaacgagaggtcgttggtccgaaggttcgaaagtgtcttgcaaatggcagttggacagatatggatacacccagcaggtgtgtgaggatctgttcaaaaagctacctcacacttgagaatggcaaggtgttcctgacagggggtgaccttcctgctctggacggagctagggtagattttcggtgcgacccagatttccacctggtggggtcctccaggtctatctgcagccaaggacagtggtctacgcctaaaccccactgtcaagtgaacagaacaccacattccgagcgacgggccgtgtacatcggagctttatttccaatgagcggaggatggcccggcgggcaagcatgtcaacccgctgtcgagatggctcttgaagatgttaattcaagacgcgacatcttgcctgattacgagctaaagttgatacatcacgattcaaaatgtgatcctggccaagccaccaagtacctgtacgaattactttataacgatcctattaagataatcctgatgccagggtgtagctcagtgagcacactggttgccgaggcggctcgaatgtggaacctgatcgttttatcttatggtagctcaagccctgccctcagcaatcgacagcggtttcctacttttttcaggacccatccatcggctacacttcataatcctacaagagttaaactgtttgagaagtggggctggaaaaagatcgctaccatccagcagactaccgaagtcttcactagcaccctggacgacctggaggagcgcgtgaaagaggccggtatcgagatcactttccgacagagctttttctcagaccccgcagtgcccgtgaagaatctgaaaaggcaggacgctcgaataatagtgggcctgttttacgaaacagaggcgaggaaggtgttctgcgaagtgtacaaggagcgcctgtttggcaagaaatatgtttggttccttatcgggtggtatgcagataattggtttaagatatatgaccccagcatcaactgtactgtagacgaaatgactgaagcagtggagggacacatcacaaccgagattgtgatgcttaatcccgcgaatactagaagtatctcaaatatgacctcccaggagttcgtggagaaactgactaaacgtttaaaacgccatccagaggagacgggcggctttcaggaagctccattagcctatgacgccatttgggctctcgcgcttgccctaaacaagacttctggcggcggggggaggtccggagtaaggttggaagatttcaattataacaatcagactatcaccgatcagatctaccgcgccatgaatagctctagtttcgagggcgtgtccggccatgtagtcttcgatgcatcaggatcccggatggcatggactctgattgagcaacttcagggcggttcatacaaaaaaattggctactacgattctactaaggatgacttaagttggtcaaaaactgacaagtggatcggcggcagtcctccagccgaccagactctggttattaagacctttcggttcctgtcacagaagttgttcatctccgtttccgtgctgtcctctctcggcatcgtcctggccgtcgtgtgcctcagctttaatatctataattcccacgtcagatatatccagaactcgcaacctaatctcaataacctgaccgcagtgggatgcagtctggcacttgcagccgtgtttcccttaggacttgatggataccacatcggcagaaaccagtttccattcgtgtgtcaggctaggttgtggttattgggactcggcttctccctgggatatggctcaatgtttactaaaatttggtgggtccacactgtttttactaagaaagaagagaagaaggaatggaggaagacgctggaaccctggaagctgtatgccactgtgggattattggtgggtatggatgtcctcactctggccatttggcagatagtcgatcctttacaccggacgattgagacctttgccaaagaggaacctaaggaagatattgatgtgagcatcctgccccagctggaacattgctccagcaggaagatgaatacatggttaggtatcttctatggttataaagggttgctgttgctgctcggaatttttctggcctatgaaacaaagagtgtcagtactgagaaaattaatgaccacagagccgtgggcatggccatctataacgtcgcggtcctatgcctaatcaccgccccagttactatgatcctcagcagtcagcaagatgccgcctttgcattcgcaagtctggcaatagtgttctcttcatatatcacactggttgttttatttgtgcccaaaatgaggaggctgattacccgcggtgaatggcaaagtgaagcacaggacaccatgaaaaccggcagctctactaacaataacgaagaagagaaatcccggctattagagaaagagaatagagagttagagaagatcatcgcggagaaggaagaacgggtgagcgagctgcgccatcagctgcagtctagacagcagttacgctctagacgccatccccccacaccacctgagccaagcggcggcctccctagaggaccgcctgaaccccccgatcgtctaagttgtgatggaagtcgggtacacctactttataaatag

SEQ ID NO: 12607 - RNA, 2535 nt, synthetic construct
  misc_feature 1..2535: note = source = /note="Description of Artificial Sequence: Synthetic coding sequence"
  source 1..2535: mol_type = other RNA
atggggcctggggcacctttcgcacgtgtgggttggccattgccactgctcgtggtcatggccgcaggagtcgccccagtttgggcatcccattcccctcaccttccccgcccacattctcgcgtccccccacacccatccagtgagcgccgcgccgtctacattggcgccttgttccccatgagcggcggctggcctggcggccaggcgtgccagccagcagttgagatggctttggaagacgtgaatagccggagagacattctgcctgattatgaactcaagctaatccatcacgacagtaagtgtgaccctgggcaggcaaccaaatacctttacgaattgttatataatgatccaattaagattatcctgatgccaggatgcagctctgtcagtacgttagtagctgaagccgccagaatgtggaatctgatagtactttcatacggatcaagcagtcccgcactgtcaaacaggcagcggttccctacattctttagaactcacccctctgctaccctccacaaccctactcgtgtgaaactattcgagaagtggggatggaagaaaattgctacaatacagcagaccacagaggtctttaccagcaccctcgacgacctggaagagcgtgttaaggaggccggaatcgagataactttccgccagtccttttttagcgatcccgcggtacctgttaagaatctcaagcgccaggacgcgaggatcattgtcggcctcttttacgaaactgaagcccgcaaagtcttttgtgaggtttacaaggaaagactgttcggaaagaagtacgtttggtttttaattggctggtatgcagataattggttcaagatttatgacccaagcataaattgcacggtggacgaaatgacagaagccgtggaaggccatatcactacagagatcgttatgctgaatcctgccaacactcggagcataagtaacatgacatcacaagagttcgtggagaagcttacaaagagactgaaacgccaccctgaagaaaccggcggctttcaagaggctcccctcgcttatgatgcaatttgggcactcgcgcttgcacttaacaaaacatccggtgggggcggtagaagtggggtgaggctggaagacttcaactacaacaatcagactatcaccgaccagatctatcgggccatgaacagctcgtcattcgagggggtttcaggccacgtcgtcttcgacgcctccgggtcccggatggcctggacactcattgagcaactgcagggaggtagctacaagaaaattggatactacgattccactaaggatgatttgtcctggtcgaaaacggacaagtggattggcggcagcccgcccgcggaccaaacactggtcattaagacttttcgattcctctcacagaaactgttcatctctgtgtccgttctgtcctctctcggcatcgtgctggcagtggtctgtctatcattcaatatttacaactcccatgtccgctacatacagaactcccagcctaacttaaataacttgactgccgtggggtgttcgctagccctcgcagccgttttccccctgggattggatggataccatattggaagaaatcaattcccctttgtttgccaggcccggttatggttgttgggcctggggttttcactgggctatgggtccatgttcaccaagatatggtgggtgcatactgtgttcaccaagaaagaagaaaagaaagaatggcgcaaaacactcgagccatggaagctttatgccactgtcggcctgctggtgggaatggatgtgttaactctggcaatttggcagatcgtggaccctctgcaccggactattgaaacctttgccaaagaggagccgaaggaagacatcgacgtctcaatactcccccagttggaacattgctccagcaggaaaatgaatacctggctaggaattttttatgggtataaaggtttactgctgttgctgggaattttcctggcatacgagaccaagtccgtctcaactgagaaaatcaacgatcatagagccgtggggatggccatatataacgtagcggtgctgtgtctcataaccgctcctgtgactatgatactgtcgtcccaacaggatgctgcctttgcgttcgcaagcctagcaattgttttcagttcttacatcacactcgttgtcctgttcgtgcccaagatgcggcgacttattacccgtggggagtggcagtccgaagctcaagacacgatgaagaccggctctagcaccaataacaatgaagaggaaaagagtcggctgcttgaaaaggaaaaccgggaattggagaagatcatcgccgagaaggaagaacgggtttccgagctccggcaccagttgcaatcacgtcaacagcttcgctctagacggcacccaccaactccacccgaaccctccggggggctccctagagggccccctgaacctcccgatcggctatcatgtgatggatctcgggtccatctactgtacaaatag

SEQ ID NO: 12608 - RNA, 3090 nt, synthetic construct
  misc_feature 1..3090: note = source = /note="Description of Artificial Sequence: Synthetic coding sequence"
  source 1..3090: mol_type = other RNA
atgcccccgacaaagagtgtgtctgagcctgtcccttttgaaacagaagcaccatccatgacaatagttcccactacagacattgaacccgtgactgttagaacagaggccacagtgactacactggctccaaagaccagccagcgcaccaggactagacgtcctaggccaaaacataaaacaactccaagacctgaaacactgcaaactaaactggatttcgggcccatcactcccgggactagtagcgctcccacgacaaccactaagcggactcggcgcccccaccctaaacccaaaactacaccccatcctgaagtaccgcagaccaagctcgtccctgccacgatcctggagcccgtgcttcgcaccgaagcttccgggactactgccgtgcctgctactatcttcgagcccgtaagtcctattaaggaagcccctgggactacgtttgttccagtaacagacctcgaacctgtaacgtttagaactgaaattcccgccacaacacttgcaactaagacatccaaaaggacaagacctccccggcctaggccaaaaacaacgccctctcctcaagctcctgagaccaagcccgttcctgctacagtccttgagcccgtcactcttcggcccgaggcgagtacaacactggcatcaaaaacaagtcagcgcacacgacgaccgcgacttaggacgaaaactacaccgcgcccagaggctcctgagagcaaaccagttcctacagctgaactcaagccagtgactcttcggactgagacatgggtgaccacacaggcccctaagacttcacagagaacaaggcggccccgtccgaagacaaaaactaccccttctccagaggtgcctcaaacaaagcttgttccaagcaccgatttagaacccggaacccttcggacagaagcgccaaaaactatggttgtgactaccgtgttagaaccagatacattccgcaccaagttccccgaaaccaccctcgccccaaagactcagcgaaccagaagaccaagaccaaggcctaaaaccacttcctccccagaggttcctcaaaataaatctgtgagtgtgacgggatttgagcccgttgttcatagcacagacgcacccgggaccacctttgctttaacagaattgcagactcttattctcaagcccgtgacaagtcccagcctcgaaatgactgagagccagccggttagcgatgtattggaaagtgtaacactctctaccgagagccctaaggagaccatcgcccctgccaaaacggattatgtttaccctaccgccaaggctcccttgtggccggaggagcctaaaaccgaagttgtggaatcaatcacgtacgtgtcagaacctcccgagactacactcgagacaagtccgctcccgagccagtctatcactctgccctcccctgatgagccacagaccgagcccgccccaaaacagacgccaagggctccgccaaagcccaaaacaagtcccagaccacggattccccaaacacagcccgttccaaaggtcccacagcgagtgaccgccaaacccaagacctccccctctcccgaagtgtcttacacaacaccagctccgaaagacgtactcctgccgcataagccatatccagaggtctcgcagtccgagcccgctccactggaaactagagggattccttttatccctatgatttcacccagccccagccaggaggaactacagaccactctcgaggaaaccgatcagtctacacaggaacccttcacaactaagattccacgcacaaccgagctggctaagaccacccaagcccctcacaggttctatactaccgtcagaccaagaacttctgataaaccacacattagacctggagtgaaacaggccccacgtccctcaggagcagacagaaatgtgtccgttgatagcacgcatccaactaagaaacccggcacaaggagacccccactacctcctcgccccacacatccccggcgcaagcctctgccccctaacaacgttacaggtaagcccggcagcgcaggcatcataagcagcggccccataacgaccccacctctgagatccactcctcgccccactggaacgcctctcgagcggattgaaaccgacataaaacagcctacagtgcccgcttcaggcgaagaactagagaatattaccgacttttcctcaagccctaccagagagacagacccactaggaaaaccacgctttaaaggcccgcatgttcgctatattcagaaaccggataattccccatgtagcattactgatagcgttaaacgattccctaaggaggaggcaactgaaggaaacgccacctcccccccccagaaccccccaactaatcttacagtcgtaacagtggaaggatgtccctccttcgtgatcctggattgggagaagcctctgaatgatacggtgacagaatacgaggtgatatctcgggagaatggctcattttcaggcaagaataagagcatccagatgacgaaccaaacgttcagcacggtggaaaatctaaagcctaacacatcatacgagttccaagtcaaaccaaagaacccattgggcgagggacctgtgagtaacactgtggccttctccactgaatccgctgatcctagagtgagcgagccagttagcgcagggcgcgacgccatctggactgagcgtcctttcaacagtgacagttacagcgagtgcaaaggaaagcagtacgtgaaaagaacttggtacaagaaattcgtcggggttcagctgtgtaactccctcagatacaagatttatttgagcgattcattgacggggaagttttataacattggagatcagcggggccacggcgaagatcattgccagttcgtggactcgttccttgacggcagaactgggcaacagctaacaagcgaccagctgcctattaaagagggttatttccgcgccgtgaggcaggagcccgtgcagtttggcgagattggcggacatactcagatcaactacgtacaatggtatgagtgcggcacgacaattccaggaaagtggtag

SEQ ID NO: 12609 - RNA, 2355 nt, synthetic construct
  misc_feature 1..2355: note = source = /note="Description of Artificial Sequence: Synthetic coding sequence"
  source 1..2355: mol_type = other RNA
atgaccattgtaccgacaacagatatcgagcccgtgacagtacgcacggaagctacagtaactaccctcgccccgaaaacgagccaacgtacccggacccgccgtcctcggcccaaacacaagacaactcccagacctgagacactccaaactaaactggacttcggaccaattaccccaggcacaagttctgcgcctacaactacaacaaaacggacacgaaggcctcatcccaaacccaagaccacccctcaccccgaagttccgcagaccaagttagcgccgaaggtgcctcaaagaacccatcgaccgcacccgaagccaaagactactttgtctcccgaggaactgcagacagaactggttccagttaccgatctcgagcctgtcaccttccgcaccgagatccccgcgacaacactggcgactaagactagtaagcgtacgcggcctcccagaccccgcccaaaaaccacgccctcaccccaggcccctgaaaccaaacctgtgcccgcaaccgtacttgaaccagtcactctccgtcccgaggcttctaccaccctcgcctctaagacctcacagagaacacgccgcccccggctgagaacaaaaactacgccgagaccagaagctcccgagagcaagccagctccaaaacagaccccaagggccccgccaaagcctaagacctcccctaggccgcgcattccccaaactcagcccgtccctaaggtaccccagagagtcacagctaagcctaagacatctccgtcgcctgaggtctcgtatactacacccgcccccaaggatgtgttactgccacacaagccctatcctgaggtctcccagagcgaacccgctccgttggagacgagaggcatccccttcattccaatgattagcccgtcgccctctcaggaagagctccagactaccctggaggaaacagatcagagcactcaggagccttttactacgaagatccccagaaccactgaattggccaagactacccaggcccctcatcgattctatactacagtaagacctcgcacctcagataaaccgcacatcaggcccgtgttaaatagaaccacaactcgaccaactaggcccaagcccagcggaatgccatcaggcaacggcgtcgggacaggcgtgaagcaggctccaaggccttccggggcagaccggaacgtttccgtggattcaacccatcctacaaaaaaacccgggaccagaagaccaccactgccacctagacctactcatccacggagaaagcccttaccacctaataacgtgaccggaaagccaggatccgcgggcattatctcatcaggacctatcactactcctcctttgcgatccacaccgcgccccaccgggaccccattggaaaggatcgagaccgacatcaaacaaccaacagtgcccgctagcggcgaagagctcgaaaacataacagatttttctagcagtcccaccagagagaccgatcccctaggtaaacctaggtttaaggggccacatgtgaggtatattcaaaagccagataattccccatgctctattaccgattctgttaagcggtttcccaaagaggaggctactgagggaaatgccacttcccctccccagaatcccccaaccaacctgaccgtggtgaccgtggaaggatgtccgtcatttgttatactagactgggaaaagcctttgaacgacaccgtgactgaatatgaggtaataagtcgggagaatgggagtttctcaggtaaaaacaagagcatccaaatgaccaatcagacattttcgaccgttgaaaacctcaagcctaatacatcctacgagtttcaagtcaagcccaagaaccccctcggcgaaggacccgtgagtaacacggtggcattcagtacagaatcagcagatccccgggtgtctgaacctgtgagcgcagggcgggatgccatctggaccgaaagaccattcaactcagattcttattccgaatgcaaagggaaacaatacgtgaagcgcacctggtataaaaaatttgtaggcgttcaattgtgcaactctttaagatataaaatctatttatccgactcgctgaccggaaagttttacaatatcggagaccagagagggcatggagaagatcactgtcagtttgtggactccttccttgatggtcgaacagggcagcaactgacatcagatcagcttcctatcaaagaggggtacttcagggctgtacgtcaggagcccgtgcagtttggcgagatcggaggtcacactcagatcaattacgttcagtggtatgaatgcggaacaacaatccctgggaagtggtag

SEQ ID NO: 12610 - RNA, 1584 nt, synthetic construct
  misc_feature 1..1584: note = source = /note="Description of Artificial Sequence: Synthetic coding sequence"
  source 1..1584: mol_type = other RNA
atgctaatgctcttcgtctttggtgtgctgctgcacgaagtgagcctctctggccagaacgaggccccacccaacacccatagcatccccggcgagcccttgtacaattatgcctcaattcgtctccctgaagagcacatccccttttttctccacaataatcgccacattgccacagtctgtcggaaagattcactgtgtccatacaagaaacacttggagaagctgaagtactgttggggatacgaaaaaagttgcaagcccgagtttcggttcggctatccggtttgcagctatgtggacatgggctggactgacacactggaatccgcggaggatatcttttggaagcaagctgacttcgggtacgctagagagcgcctagaagagatgcacgttctctgccaacccaaagaaacttccgacagctctctggtgtgctcccgatacctgcagtattgcagggctaccaacctgtatctggaccttcggaacatcaaaaggaaccacgacagattcaaggaagactttttccagagtggagagatcggaggccactgcaaacttgacattaggactcttacctcagagggacaacgaaaatcccctctacagtcatggttcgctgagctccaatcatatacacaactgaacttccgcccaattgaagatgctaaatgtgacatagtgatcgagaaacccacttactttatgaaattagacgccggggtgaatatgtaccatcatttctgtgacttcataaatctgtacataacgcagcacgtcaataacagcttcagcaccgacgtgtacatagtgatgtgggatacaagcagttacggctatggcgatctgttcagtgacacctggaatgcatttaccgattatgatgtcattcacctgaaaacgtacgattctaaacgagtttgtttcaaagaggctgtgttcagtctcctccctagaatgcgctatggactcttctacaacacccctctcatatctgggtgccagaatacaggactgtttcgagcatttgcacagcatgtgttgcaccgtttaaacatcacacaggaagggcccaaggatggaaaaattagagttacaattctcgctaggtctaccgaatatcggaaaatattgaatcagaatgaactggtcaatgctctaaagacagtttccacttttgaggtgcaaatcgttgactataagtaccgagaactgggctttctagaccagcttaggattacacacaacacggacattttcatcggcatgcacggggccggccttacccatcttctgtttttacctgattgggctgctgtctttgagctgtataattgcgaagacgagcgatgttacctggacctcgcaagactgaggggcgtacactacatcacttggcggcgtcagaataaagtctttccacaggataaaggtcaccatccaacgctcggggagcatcctaagtttactaactactcgtttgacgtagaggagtttatgtaccttgtattacaggcagctgatcatgtgctccaacaccccaagtggccatttaaaaagaaacacgacgaattgtag

SEQ ID NO: 12611 - RNA, 2004 nt, synthetic construct
  misc_feature 1..2004: note = source = /note="Description of Artificial Sequence: Synthetic coding sequence"
  source 1..2004: mol_type = other RNA
atgggatcttcccgcctcgccgccttgttactccccttgctcctgatcgtaatagacctgagcgactcagcagggattgggttcaggcacctgccccattggaatactagatgcccgctcgctagccacactgacgacagcttcactggctcatccgcgtacatcccttgtagaacgtggtgggccttgttctcaacgaagccctggtgtgttcgggtgtggcactgcagccgttgcctttgtcagcatctccttagcggcggttccgggctacagcgcggactgttccatttgttagttcagaagtccaaaaaatcgagtacattcaaattctacagacgccataaaatgcccgctcccgcacagagaaagctcttaccgcgccgtcatctctctgagaaatctcaccacattagtattccgagcccagacatatctcataagggactgagatctaagcgaacacaaccaagcgatccagagacatgggagagcctcccaaggcttgattctcagcgccacggcgggccggagttcagtttcgatctcttacctgaagcaagggctatccgggtgacaatcagttcaggccccgaggtctccgtcagactctgtcaccagtgggcactcgaatgcgaagaattaagctccccatacgacgtccagaagattgtatctgggggacacacagttgaactcccatatgaatttctcctgccttgtctgtgcattgaggcctcatatctgcaggaagacacggtgcgtcgcaaaaaatgcccctttcagtcctggccagaggcttacggaagcgacttctggaaatctgtgcatttcaccgattatagccagcacactcagatggtgatggcgctgaccctacgctgcccactgaaactcgaagctgcattgtgccaacgccacgactggcatacactttgtaaagacttacctaacgccaccgcccgggaaagcgatggctggtatgtactcgaaaaagtggatctccacccccagctctgtttcaagttcagcttcggcaactcatcgcacgtggaatgtccacatcagaccgggtcacttacatcctggaacgtatccatggacactcaagcccagcaactcatcctgcactttagtagcagaatgcatgcaactttcagtgctgcttggtcgcttccaggcctgggtcaagacactctcgtcccaccagtttacaccgtcagccaggctcggggctcttccccggtgtcactggatctcattataccttttctgaggccaggttgttgcgttcttgtgtggcggagcgacgttcagttcgcctggaagcatctcctatgccccgatgtgtcttatagacatttaggactactcatcctcgccctgctcgctctgttgactctgctgggcgtcgtccttgccctcacctgtcggagaccacaatctgggcccggcccagcgaggcccgttttgctgctccacgccgcagacagtgaggctcagagaagactcgtcggtgctcttgccgaactcctccgcgcagcactaggtggcgggcgggatgttattgtggacctgtgggaaggtcgacatgtggctagggtcggcccccttccttggctttgggccgctcgcacaagagtagcacgagagcagggaacagtcttgctcctttggtccggcgctgatctgaggcctgtgagcggacctgatccccgggccgcacctctgctagcattgctgcacgcggctccacggccgcttttattactggcatatttttcacggctctgtgccaaaggcgacattccccctccactgcgtgccttgcctcggtatcgacttcttagagacctgccccgtttactccgcgccctagatgctcgccctttcgccgaggctacttcatggggtaggctgggcgcccggcaacgccggcagagccggcttgagctttgtagccggctggaaagggaagctgcccgactcgccgatctgggctag

SEQ ID NO: 12612 - RNA, 1101 nt, synthetic construct
  misc_feature 1..1101: note = source = /note="Description of Artificial Sequence: Synthetic coding sequence"
  source 1..1101: mol_type = other RNA
atgccaatgatctccgtccttgggaaaatgtttttgtggcagcgagaaggcccagggggacggtggacatgtcaaactagccgccgcgttagttccgatccggcatgggccgtcgagtggattgaactgcccaggggacttagcttaagcagtctggggtctgcgaggactttgcgaggctggagtcgctcttcccgccccagcagcgtcgactcacaggacttgccggaggtgaatgttggcgacaccgtggccatgctaccaaaatcaaggagagctctgacaatccaggagatagccgcactggcgcgttcatccctgcatggtatctcccaagtagtcaaagatcacgtcactaaacccactgccatggcccaaggacgagtggcgcacctcattgagtggaaagggtggagtaagccttccgatagtccagccgccctggagagcgctttctcttcctacagcgacctgagtgaaggtgagcaggaagcaagatttgcagccggcgtggccgagcagttcgccattgctgaggcaaagttgcgagcttggtccagtgtggacggagaagactcaacagacgatagctacgatgaagatttcgcaggcggaatggatacagacatggccggacagttgccactcggcccccacctgcaggatctgtttaccggacaccgattttccaggcccgtgcgtcaaggttccgtagaacctgaaagtgactgcagccagaccgtgtctccagatacactctgttcttccctctgtagcctggaagacggcctcttaggaagccccgctagactggccagtcagctactgggcgacgaattactgctggccaaacttccaccgagcagagaatccgctttccgctcactcggtcccttagaggcacaagacagcctctataactcccccttaaccgagtcctgcttaagcccggcagaggaagagccagctccatgtaaagattgtcagcctttatgccctccattgaccgggagttgggagcgtcagcgtcaggcgtccgatttggcatcaagtggggtagttagtctggatgaggacgaggccgaaccagaagagcagtag

SEQ ID NO: 12613 - RNA, 5172 nt, synthetic construct
  misc_feature 1..5172: note = source = /note="Description of Artificial Sequence: Synthetic coding sequence"
  source 1..5172: mol_type = other RNA
atgcagtttcagcttactctgtttctgcaccttggctggctgagttatagcaaagcccaagacgattgcaatcggggtgcgtgccatccaactacaggagatttacttgtcggtcgtaacactcagcttatggcatcgtcaacttgtggtctttcaagagctcagaaatattgtatcctgtcttacctggagggggaacaaaagtgtttcatttgcgactcccgctttccatatgatccgtacgaccaaccgaacagtcacaccattgaaaatgtcatcgttagcttcgagcctgatagagaaaaaaagtggtggcagtcagagaacggtctggaccatgtgagtatcagactcgatctcgaggccctgttccgcttttcccacctaatactcaccttcaaaacatttcggccggctgctatgcttgtggaacggagcacagattatggccacaactggaaggttttcaagtattttgccaaagactgcgctacatctttccctaacatcacaagcggacaggctcaaggtgtaggagatatcgtttgcgactctaagtattcagatatcgagcctagcaccgggggagaggtggttctgaaggtcctggatcccagctttgagatcgaaaacccttatagcccctatatccaagacctggtgaccttgacaaacctacgcataaactttaccaaacttcacactctcggggatgcacttttgggtagaaggcagaatgacagtctggataagtattactatgctttatatgaaatgatcgtgcgggggtcttgtttttgcaacggccacgcttctgagtgcaggccaatgcaaaaaatgaggggcgatgtgttctctcccccaggtatggtgcacggtcagtgtgtttgtcaacataataccgacggacctaattgtgagaggtgtaaagacttctttcaggatgccccatggaggccagctgctgacctccaggataacgcgtgccgctcctgttcctgtaattcacatagctcccgctgccacttcgacatgaccacttacctggccagcggaggtttatctggcggcgtctgtgaagattgccagcataacacagaaggtcagcactgcgacagatgccggcctcttttctaccgcgacccattgaaaacaatctcagacccgtacgcgtgcattccctgcgagtgtgacccagatggcactatttccggggggatctgcgtgtcccactccgacccagcacttggctccgtcgccggtcagtgtctgtgcaaggagaacgtcgaaggggcaaagtgcgatcagtgcaaacctaaccactacgggctgtctgctaccgatccattgggatgccagccttgcgactgcaaccctctgggctcactcccctttctcacttgtgatgtggataccgggcagtgtttgtgtctgtcttatgtcacaggcgcgcactgcgaagagtgcaccgttgggtattgggggcttggcaatcaccttcacggatgttctccatgcgattgcgatattgggggcgcgtactctaacgtctgtagtccaaagaacggacagtgtgaatgccgtccacatgtgactggaagatcctgcagcgagccagcccctgggtatttcttcgcaccactcaacttttatctatacgaagcagaggaggcaactactctgcaggggttggcaccgctggggagtgagacattcggccagtcccctgctgttcacgtggtcctgggtgagcctgtgcctgggaaccctgtcacatggacaggacctggatttgctagagtgcttccaggagctggcctgcgctttgccgttaataatataccttttccagtggactttaccatcgcaatccattatgagacccagagcgccgccgactggaccgtgcaaatcgttgtgaacccacccggaggaagtgagcactgcataccaaaaactcttcagtccaaaccccagagcttcgctctgcccgctgccaccagaatcatgctcttaccaacaccgatttgcctggagcctgatgtccagtattcaatcgacgtctacttttctcaaccactgcagggagaaagtcatgctcatagccacgtgcttgtcgattcactaggacttattccccagattaactccttggagaatttttgctcaaagcaggatcttgatgaataccagctgcacaattgcgtggagatcgcttccgccatgggcccgcaggtgctccctggtgcatgtgagcgtttaattatctccatgtctgctaagcttcacgatggggcagtggcttgcaagtgtcacccgcagggctcagtggggtcatcctgctccaggctcgggggtcagtgtcagtgcaaaccgctggtggtggggcggtgttgtgaccggtgcagtaccggcagttacgatctaggccatcacggttgccacccttgtcactgtcatccacaagggagcaaggacacagtgtgcgatcaagtcaccggtcaatgtccctgccacggcgaagtgtcaggaagacgctgtgacagatgcctcgcaggttacttcggatttccctcatgccacccctgcccctgtaatcggttcgccgaactatgtgatcccgaaacaggctcatgtttcaactgtggagggttcaccaccggacggaattgtgagagatgcatcgacggctactacgggaatccctccagcgggcagccttgccggccttgtctgtgtcctgacgacccatctagcaatcaatactttgcccacagttgttaccagaacctgtggagctccgatgtcatttgcaactgtcttcagggttacaccggcacacaatgtggtgagtgctccactggtttttatggaaacccccgaatctctggcgccccttgccagccttgcgcttgtaataataatattgacgtcactgacccagaatcttgctccagagttactggcgagtgtctgaggtgcctacacaacacccagggagcaaattgccagctgtgtaagccgggtcactacggtagcgctctgaatcagacttgtagacgatgttcgtgtcatgcctctggcgtgtcccctatggaatgtccacctggcggcggtgcttgcctgtgtgatccagttactggagcttgcccttgccttccaaacgtaacagggctggcgtgtgaccgctgtgcagatgggtactggaatttagtaccagggaggggatgtcaaagctgtgactgcgaccccagaactagccagagcagccactgtgatcaactaaccggccagtgcccttgcaagctggggtacgggggcaagcggtgcagcgaatgccaagaaaactactatggagaccctcccgggcggtgtattccgtgcgactgtaatcgcgcaggtactcagaagcccatttgcgaccctgacacaggcatgtgccgatgtcgcgaaggtgttagtggtcaacgctgcgatagatgcgcccgtgggcattcgcaggaattccctacctgcctccaatgtcacctgtgttttgaccagtgggatcatacaatatctagtctgtctaaggcagtccaggggctgatgagactcgcggcgaatatggaggataaaagagaaaccctgccagtgtgtgaggcagatttcaaggatctgagaggcaatgtgtctgaaattgaacgcatcctcaagcacccagtctttcccagtggaaaatttttaaaagttaaggattaccacgatagcgtgcgccgtcagataatgcagttgaatgagcagctaaaggccgtctatgaatttcaagatctcaaggacaccatcgaaagagccaaaaacgaggccgatctgctgcttgaagatctccaggaagaaatagacctgcagtcatccgttcttaatgcatccattgctgacagctcggaaaacattaagaagtactaccatatatctagttctgccgagaaaaagattaatgagacgagtagcaccattaacaccagcgctaatacaagaaacgatttgttgactatcttggataccctcacgtcaaagggaaatctctccctcgagagattgaaacagatcaagatacctgacatccagatcctcaacgagaaagtgtgtggagaccccggaaatgtgccctgtgtcccactaccctgcggaggcgccctgtgtaccggtcgcaaggggcaccgaaagtgccgtgggcccggatgccatggtagccttacactgagcacaaacgccctccagaaggcccaggaggcaaagtccattatccgtaacctcgacaagcaggttagagggctcaagaaccagatagagtctatcagcgagcaggcggaagttagtaagaacaacgcgctccaactgagagagaaactgggaaacataagaaaccaatctgatagcgaggaagagaatatcaacctgtttatcaaaaaggtgaagaattttctcctagaggagaacgtcccgccagaggatattgagaaggtcgccaatggggtgctcgacatccatctgccaataccctcccagaatttgacagacgagttagtgaagatccagaaacacatgcagctgtgcgaggactatagaacagatgagaacaggctgaacgaggaggccgatggagctcagaagctcctcgtgaaggccaaggctgcggagaaggctgctaatatccttctgaaccttgataagacgctgaaccagctccaacaggcccaaattactcagggcagagcaaattcaacaatcacccagctcaccgccaatattaccaagataaaaaaaaacgtgttacaggccgagaaccagactcgcgaaatgaaaagcgaattggagctcgccaagcaacgctctggcctcgaggatggcctctccctgctccagacaaagttacagcggcatcaagaccatgccgttaatgctaaggtgcaggcagaatctgctcaacaccaagccggcagtttagagaaggagttcgtcgagctgaaaaagcagtacgcgattctgcagagaaaaacaagtacaaccggactgactaaggagacactcggaaaggttaagcaattgaaggacgctgctgaaaagctggccggcgacactgaagctaaaatcaggaggattacaggctgtttccaaaatagcgctaggtag

SEQ ID NO: 12614 - RNA, 5286 nt, synthetic construct
  misc_feature 1..5286: note = source = /note="Description of Artificial Sequence: Synthetic coding sequence"
  source 1..5286: mol_type = other RNA
atgcagttccaacttacgttgtttcttcacttgggttggctgagctacagcaaagctcaggatgattgcaatagaggcgcgtgccaccctacgaccggggacctgttagtgggccggaacacgcagctgatggcttcctcaacatgtggactcagcagggctcagaaatactgcatactctcatacttagaaggtgaacagaagtgcttcatttgcgatagcagatttccatatgacccatacgatcaaccaaactctcatactatcgagaatgtaattgtgtcctttgagcccgacagggaaaagaagtggtggcagtcggagaacggtctggatcacgtttctattaggctggacctcgaagcactgttccgcttttctcacctgatcctgactttcaagacctttaggcctgcagctatgctcgtggagaggtctactgactacggacacaactggaaggtttttaaatatttcgctaaggactgcgccacatcgttcccaaacattacttccgggcaggcccagggcgtgggtgatatcgtctgcgattcaaagtattccgacatcgagccctctaccggaggtgaagtcgtgcttaaagttctagatccctcttttgagatcgagaacccatatagtccgtacatccaagacttagtgactttgacaaatctcagaatcaacttcacaaaacttcacactctcggggacgctctacttgggcgcaggcagaacgactccctagacaagtactattacgctctgtacgaaatgatcgtccgcggttcgtgcttctgtaacggccatgcctcagaatgccgaccaatgcaaaaaatgaggggcgatgtgtttagccctcccgggatggtacacggccagtgtgtgtgccagcacaataccgatggtccaaactgcgagcggtgtaaagatttcttccaggacgcgccatggcggcctgccgccgacttgcaggacaacgcctgtcgatcctgttcctgtaattcccattcatccagatgtcatttcgatatgaccacttacctggcttcaggcggactttccggaggcgtgtgcgaagattgtcagcacaacacagaaggccagcactgtgaccgctgccggcctctcttctaccgggaccctttgaagaccatcagcgacccttatgcctgtattccatgcgagtgcgacccggatggtactatttcaggtgggatttgtgtttctcatagcgaccctgcattaggatctgtggcaggccagtgtctgtgtaaggaaaatgttgaaggggcaaagtgcgatcagtgtaagcccaaccactacggcctgagcgcaaccgaccccctgggctgccagccttgtgactgtaaccccctgggatctctgcctttcctgacctgcgatgtcgacacaggacaatgcctatgtttatcatacgttacaggtgctcactgtgaagaatgtaccgtcggctactggggactgggcaaccaccttcatggttgttcgccctgcgactgtgacataggcggcgcgtacagtaatgtgtgctctcccaaaaacgggcagtgcgagtgtaggccacacgtcacaggaaggagttgctccgaacccgccccaggttatttcttcgcaccactcaacttttatctctacgaggcagaggaggccactactcttcaaggactggcacccttagggagcgaaacattcggccagtctcccgctgtacatgttgtcttgggggaacccgtacctgggaacccagtgacatggactggccccggttttgccagggtgttgcctggcgctggactgcggttcgccgtgaacaacatccctttccctgtagattttaccatagctattcactacgagacacagtctgcggctgactggactgtccagatcgttgtgaatccaccaggaggctccgagcactgcataccaaaaaccctccagtcaaaaccccaatcattcgcattgcccgctgccaccagaataatgctacttcccacacccatttgtctggaaccagatgtacagtactctatagacgtttacttttcccagcctctacaaggtgagagccacgctcattcccacgtgcttgtggactctctaggactcattccacagattaacagtctcgaaaacttctgctcaaagcaagacctggacgaatatcagctgcacaattgcgtggagatcgcatccgcgatgggccctcaggtgctacccggggcttgtgaaaggcttatcatcagtatgtctgcgaaactgcacgatggggccgtggcctgtaaatgccatccccaaggctcagtggggagtagctgtagcagactgggtggccagtgccagtgcaagcctctggttgtcggacggtgttgcgaccgctgctcaaccggaagctatgatctaggccatcacggctgtcacccttgtcactgccacccccagggttccaaggatacggtctgtgatcaggttactgggcagtgtccttgtcacggcgaagtgtctggacggagatgtgacagatgcctggcgggatactttggctttccttcatgccacccatgcccctgtaatcggttcgcagagctgtgcgatcccgagacaggttcatgctttaattgtggagggtttacaacaggccgcaattgcgagcgctgcattgacggatactatggcaatccttcctctggtcaaccctgtcgaccctgcctgtgcccagatgacccctcgtccaaccagtattttgctcacagttgttaccagaatctgtggtccagtgatgttatttgcaattgcctgcagggctacactggaactcagtgtggcgaatgctcaaccgggttttatggcaaccccagaatctcaggcgccccatgccaaccctgcgcctgcaacaacaacatcgatgttacagaccctgagtcttgtagtagggtgacaggtgaatgtctcaggtgtctgcacaacactcagggggccaattgccaactgtgtaaaccgggacactatgggtccgctctgaaccagacttgccggagatgctcttgccacgcatctggagtcagcccgatggagtgccctcctggcggaggagcttgtctatgtgatcctgtgactggggcgtgcccctgtctccctaacgtgaccgggttagcctgcgatcggtgcgccgacggatactggaacctagttccgggccggggatgccaatcgtgtgattgcgaccccagaacaagccaatcatcccattgcgatcagttaacaggtcaatgcccatgtaagctgggatatggcggcaaaaggtgctcggagtgccaggaaaattactacggcgaccctcccggccggtgcattccctgcgattgcaacagggccgggacccaaaaacccatttgcgaccccgataccggcatgtgtcggtgtagagagggtgtttccggccagagatgtgatcgttgcgcccgtggccattcccaggagttccctacttgcttgcagtgccacttatgctttgaccagtgggatcacaccatttcgagcctctccaaggcggttcaagggctgatgcggctggctgccaatatggaggacaagagggaaacactgccagtgtgtgaagcagacttcaaggacctacggggtaacgtgtccgagatcgaacgaatcctgaagcacccagtgttcccctccggcaaattcttgaaggtaaaggactatcacgattcggttcgccgccagatcatgcagctgaacgagcagcttaaggccgtctacgaattccaagacctgaaagataccatcgagagggccaagaatgaggcagacctgttactagaagatctgcaggaagagatcgacttgcagtcctcggttcttaacgcctctatcgctgacagctctgaaaatatcaaaaaatactaccatatttcctcttcagccgagaagaaaattaacgagacttccagtaccattaacacttcagccaacacacggaacgacctcctaactatcctcgacaccctgactagtaaaggcaatctaagcttggagcggttgaaacagatcaaaatacctgacattcagatcctcaacgaaaaagtctgtggggatcccggtaacgtgccgtgcgtgcctctgccgtgcgggggggcgctctgtacggggcgcaaagggcacaggaaatgcaggggacccgggtgccacggcagtttgacgctgtctacgaatgccctgcagaaagcccaggaggcaaaaagtattatccgtaatctggacaagcaggtacggggactcaaaaaccaaatcgaaagcatttcggagcaggctgaggtgtctaaaaataacgccctccaattgcgagagaaactcgggaacataagaaaccaatcagactcagaagaagaaaacattaacctgttcattaagaaagtcaaaaatttcctgctggaggaaaatgtcccaccagaagatattgagaaagtggcgaacggcgtgctcgacattcacctgccgatcccaagtcaaaacctgacagacgagctggtgaaaattcagaagcatatgcagctctgtgaggactaccggacagacgagaaccgcttgaatgaggaagccgatggggctcagaagctgctggtcaaggctaaggctgccgagaaagctgccaacattttactcaatctagataagactctcaaccagttgcaacaagctcagattacacagggtcgggccaattctaccatcacacagctgaccgcaaacatcacaaaaatcaagaagaatgttttgcaggctgagaatcagacacgcgagatgaagagtgagctggaactcgcaaaacagcgttcaggcctcgaagacggccttagcttgttgcagacaaaactccagcggcatcaggaccacgccgtcaacgctaaagtgcaggccgaatccgctcagcatcaggcgggttctctcgaaaaagaattcgtcgaactgaaaaagcagtacgctatcctccaacgcaaaacatcaactaccggactcaccaaggagacattaggaaaggttaaacagctgaaggacgcagctgaaaagcttgctggcgacaccgaggcgaagatcagaaggatcactgatctggagcgcaagatccaagaccttaacctgtcacgacaggcaaaggctgaccagctgcggatattagaggatcaggttgtcgctattaaaaatgaaattgtggaacaggagaagaagtatgcccgctgctactcttag

SEQ ID NO: 12615 - RNA, 1455 nt, synthetic construct
  misc_feature 1..1455: note = source = /note="Description of Artificial Sequence: Synthetic coding sequence"
  source 1..1455: mol_type = other RNA
atgggcgccgaggccctgcccggtcctgacgaggctgctgccgccgccgcgtttgccgaggttacaaccgtcaccgtcgcgaacgtcggtgccgccgcggataacgtgtttacgacctcggtggccaatgccgcatccattagtggacatgtgttgagtgggaggaccgccctgcaaataggtgatagccttaacactgaaaaagccactcttatcgtagtgcacactgacggaagtattgtggaaaccactggcttaaaggggccagctgcccctctgactcccggcccccaatcccctcctacacccctggcacctggacaggaaaaaggcggtacaaagtacaactgggacccctccgtgtacgattcagaattgccagtccggtgtcgtaacatttcagggacattatacaaaaataggctcggatccggaggacggggtcgatgcattaagcagggagaaaactggtactccccaaccgaatttgaagccatggccggccgcgcctcatctaaagactggaagcgaagtattaggtatgctgggaggccactgcaatgtctcattcaggatggcatcctaaatccacatgctgctagctgcacttgcgccgcttgttgcgatgatatgaccctaagtggtcctgtccgactgtttgtgccttacaagagacggaagaaggagaacgagcttcctaccacgcccgtaaagaaagattcgcccaaaaacataacgttactgcctgccactgccgccactacttttactgttaccccatcgggacaaataactactagtggcgccttgacctttgacagggctagcaccgtggaggccaccgccgtgattagcgagtcccccgctcagggagatgttttcgctggagctactgtccaagaagcctcggtgcagcctccgtgtcgggcaagccatcccgagcctcactaccccggatatcaggacagctgccagatcgccccttttcctgaagccgctctgccgaccagtcatcctaagatcgtcttgacaagcctccctgccttggccgtacccccccctacgccaacaaaagccgctccacccgcactggtaaatggactagagttgagcgaacctcggtcctggctctacctggaggagatggtgaattcactgcttaatactgcccagcagctgaaaaccctgtttgagcaggccaagcacgcctccacttaccgcgaggccgctacaaaccaggcaaaaatccatgctgatgccgagagaaaggagcagagttgcgtgaattgcggccgcgaagccatgtccgaatgcaccggatgccataaggtaaactactgcagcaccttctgccagaggaagcggtggtccctgacgatgctgacgagtctggtctctatttcttggctgcgcgctatcctgccttgccagccccccaaagttcttggtctgtag

SEQ ID NO: 12616 - RNA, 1512 nt, synthetic construct
  misc_feature 1..1512: note = source = /note="Description of Artificial Sequence: Synthetic coding sequence"
  source 1..1512: mol_type = other RNA
atgagcggggcactcctttggcctttgctgccactgctattgttacttctgagtgcaagggacggggttagggcagcacagccccaggccccgggataccttatcgcagcaccctctgtcttccgagccggtgtagaggaagtgatctcggtgactatatttaatagtccacgtgaggtgaccgtacaagcacaactggtggcacagggggaacccgtcgtgcagagccaaggtgccattctagacaaaggaactatcaaactcaaggtgccaacaggactccgcggacaagcactgctgaaagtatggggaagggggtggcaggcagaagaaggtcccctgttccataaccagacgtcagtgacagtcgacggaagaggcgccagcgtttttatccagacagataagccggtatacagaccccagcatcgagtgctcatctctatcttcaccgtgtcccccaacctccggcctgtcaacgaaaaactggaagcatacatcttggacccaagagggagcagaatgatcgagtggaggcacttgaagcccttctgctgcggcatcacaaatatgagttttccactgtcagaccaaccagttctgggcgaatggttcatttttgtggagatgcaaggtcacgcctacaacaaatccttcgaagtgcaaaaatacgtgctgccaaagttcgaattgctgatagacccacctcgctacattcaggacctggatgcatgcgaaactggcacagtacgcgccaggtacacgttcggcaaacctgtggctggcgctctaatgatcaacatgaccgtcaatggtgtgggatattactcacacgaggtaggcaggccggtgctgaggactactaaaattcttggaagtcgtgatttcgacatctgcgtgagggacatgatcccggccgacgttcccgagcattttagaggaagagtgagcatctgggccatggtgacatcagtggacggaagccagcaggtcgctttcgacgactctactccggttcaaaggcagctcgtggacattcgttactctaaggatacaaggaaacagtttaagcccggcctggcttatgtgggtaaagtcgaattgtcgtaccccgatggatccccagctgaaggcgtcacggtccagattaaggctgaattgactcccaaggataacatttacacttcagaagtggtgagccagcgcggtttagtgggctttgagatcccaagcatccccacttccgctcagcacgtttggctcgaggttttccaagagctcgaggattatgacgtgtcggactctttcggggttagtcgggaagacggacctttttggtgggctggtttaacagcccagcggcggagacgatcaagtgtattcccttggccgtggggtatcactaaggattcagggtttgctttcactgtgcgcagaggcaatgggaccggtggtgatgatagaccaagtgaacctgaaccccctgctggccgatggcccctgcaccgatag

SEQ ID NO: 12617 - RNA, 144 nt, synthetic construct
  misc_feature 1..144: note = source = /note="Description of Artificial Sequence: Synthetic coding sequence"
  source 1..144: mol_type = other RNA
atgaagttgtgtgtgaccgttctgtctttgctcgtcctcgtggcagccttctgtagtctggcgctatcagccccaaaagcttcaaaatccgctctcacacctgtctcaccagggtcacgttccacttgtatgacttggaactag

SEQ ID NO: 12618 - RNA, 861 nt, synthetic construct
  misc_feature 1..861: note = source = /note="Description of Artificial Sequence: Synthetic coding sequence"
  source 1..861: mol_type = other RNA
atggaagtgtacatcaggcatttagaaaaggtgttgcggcggtatgtgcagcgactgcagtggctcctgtccgggccagtactatgctctcgcacctggtacagacagagcatggacaggggggtgatgatgaccgcggcgagcggaagtcgacgattgttcggaaccgtgttagagtctaaagtctgtatcctgcttgatacaagcggctctatgggcccatatctgcagcaggtaaaaactgaactcgttttgttgatttgggaacaactgcgcaaatgctgcgattccttcaatttgctgagcttcgccgaatcctttcaatcgtggcaggatacactggtcgaaacaactgatgcagcatgtcatgaggccatgcagtgggtgacacatttgcaggctcagggaagtaccagcattttgcaggctctgctgaaagccttcagtttccacgacctcgagggactgtacctactgacagacggcaaacccgatacttcctgctctctcgtgctgaatgaggttcaaaaactgcgcgaaaaacgtgatgtaaaagtccacacgatctccttaaattgctccgaccgcgcggctgtggagtttctgcgcaagctggcaagtttcactgggggccgctatcactgcccagtgggggaggacacattgagtaagatccatagccttctgaccaaaggctttatcaacgagaaagacccaacgcttcccccttttgagggtgatgacctccgcatattggctcaggaaattacaaaggcccggtcatttctttggcaggcccaatcgtttcgctcacagctccagaaaaagaatgacgctgaacccaaggttaccctgtcctag

SEQ ID NO: 12619 - RNA, 3555 nt, synthetic construct
  misc_feature 1..3555: note = source = /note="Description of Artificial Sequence: Synthetic coding sequence"
  source 1..3555: mol_type = other RNA
atgaaaaagtatcggaaaatatctattgggtgcttcgctatggctacccagacctcccatgtgttccatgggcaggaaaatatgttcctggagaatcactgtatacgcagaaacaccgggagggacagcaaaaagcccctcaagcagaaaaatatgaacggtctgggacaaaatagtgataacggcctcctggtgacgcacgtgaatcagacacaggacttgcttaggttgcaaggtagtgaaacccagagctcggactgggaagacagtgaggactggctctcagctcactccctgaagtgtcaaaagctgactctggcagatctcatctcccaagggaccgaggttctcgaggagggcactaacgtggtccagaaaatttgcttttccacacagatcatcagacactttgaaagtaagcttagcgataccatagaggtgtaccaggagcgcatacagtggctgaccgaaaactctaaaaaagcattcggccttatcaaaggagcccgggtgtctattctgatcgatgtctccgcaatatctagcggccctcaaaaagaagaatttcagaaagaccttatgagtttaatcgatgagcagctcagtcacaaggaaaaactgttcgtgctgtcctttggtactaatgccggcagcctctggcccgaccccatggaggtgtctgcatctacactacaggagttgaaattgtgggtgaaaacattacagccagatgggggatcaaatctgctgcaggctctcaaaaaaatcttcactctcaagggcctcgatagcctagtggcaataatgcgtagttgcccagatcagccaagcgagattctgtcagattatatccaacaatccaccatgggccgagatcttatcattcatttcatcacatatcgctgtgatgatcaaatgccgccagccgttcttaaaaacctggccgaagccgtgcgaggatattatcactgctactctccaaaaatggaacattacacatcgcgggacatggatgagttactcgcggagatccagaaggcccaatccctgctttcgcacgtccaagcacttcagcattctagtccctgcgaggccctaacatgtacgatggaggaaatctcaacagaaatcactaatgggccactgatctcactcttgccgaaacctcctaagcatgacgccccccttactattgagttccccaatcttgataagacgagtgccgagtggcttaaggtaaacgggctgaaggctaaaaaactgtcgctgtatcaggtgctggcacccaatgccttctccccagttgaggagtttgtacctattctccaaaaaacagtgtcttctaccattcacgagaaggcgatgatccagttcgagtggcatgatggaacagtcaaaaatattcacgtggaccctccttttctgtataagtatcagcagcagttgtcacgagctatgaggatgtacgaaagacggatcgagtggctgagcctcgccagtcgccgaatttggggaacagtctgtgaaaagcgagtggttgtgcttcttgacatttcggccactaatagtatgtatatcatacacatacagcattccctcagactgctattggaggaacaactctcaaataaggactgttttaacctcattgctttcggatcgaccatcgagtcttggagaccagaaatggtcccggttagccacaataatctacagtcggcatggcggtgggctctcaatttaaggtgtcgaggcagtaggaatgtcttaagtgcactgcgcaaagcagtagaagtcgattttaaggacaaggataagcatcaaagccaaggcatttatttattcaccggaggaattcctgaccaggatatgcccaccctgagcgcatatatggctgaggcttgtggaggatgcgatcttcagttgaatgtgtgcctgttctacgtgggggaaccgaagatggataccaccccccccgctaggtatgcatcccacaccgataccgccgcagcgtacaaagaagttacaagggccgcgggtggaaggttccactggttcggcgacaccggcatttacgagtcggatgacatcaattccattatgtccgagatggagaaagcccttaactattcccagaaatgcgcatttctgatggctagtctcaagaatcactccggaaaggtgttgggcagctccgcactacctaaagagaagcccaaaactctccagttgcgttctcagcctaagaagctctgtcctcccagacccactgtgcccctgggcgcccggatgtctataaaagacgatccagatagagaaaaaagcccaccactgaagagcctcaaatggagacctctgtccagcagggtaggcatctcgccagctgccgctcagccgaccaaagagggcatgatggagttacgccggaagactaaatctcgagaggccgaaacctctcttttactattctatacagagaagggtaatgatgtagggagcgtgtacaagaagtacccccaagggagaggcctgcgtagaacgtcaagtagcattgatctgccccggaaggacacagtatgctcaagccaggagtgggtcgccaagtacggactcaagaaacttaagttggaaattagccgatgtatgggccctaactgcacccaccagaaatcggggcaaagatcagcctctgcgaagcattgtagcatcttcccttcagtcgagatccacggagtcgtgcggcacatccagtggacacctcgtgagatggaagtgtacattagacacttggaaaaagtgctgagacgatatgtccagcggctgcagtggctcctctccggcagccggaggctgtttggcaccgtcctggagagtaaagtctgcatcttgttagataccagcggttccatgggaccatatctgcaacaggtgaagacagagctcgtcttattgatctgggagcagctgcgaaaatgctgtgactcattcaatctgctctcttttgccgaatcgtttcagtcctggcaggacacgctcgtagagaccaccgatgctgcttgtcacgaggccatgcagtgggtaacccacctccaggctcagggatctacctccatattgcaggcactgctgaaggccttttcttttcatgacctagaaggactctacctactgaccgacggcaaaccagacaccagctgttccttagtcctgaacgaagtccagaaattgcgcgagaaacgggatgtgaaagtacacacaatctctctcaattgcagtgaccgcgccgcggtcgagtttttgcgcaagctggcatctttcaccggagggcggtaccactgcccagtgggcgaggatacactttcaaaaatccattccctactgaccaaggggttcatcaacgagaaagatccaacgctgcctccgtttgaaggcgacgaccttaggatccttgcacaggagatcaccaaagcacgctctttcctctggcaggcacagagtttccgatcccagctacagaagaaaaatgatgccgagcctaaggtcactctgagttag

SEQ ID NO: 12620 - RNA, 906 nt, synthetic construct
  misc_feature 1..906: note = source = /note="Description of Artificial Sequence: Synthetic coding sequence"
  source 1..906: mol_type = other RNA
atgttacccctaacaatgacggtcctcatcttgctactgctgccaactggacaggctgcccccaaagatggtgtgacccgcccagattccgaggtgcagcaccaattgttgcctaacccgtttcaacctgggcaagaacaattgggcctcttgcagagttatctgaaaggactgggacgaacagaagtgcagttggagcacctcagccgggagcaggtgctgctctatttattcgctctgcacgactacgatcagtctggccagcttgacggcctggaacttctgtctatgctaactgctgccctagcacctggcgccgcaaattcccccacaactaacccggtgatattaatcgtggacaaggttctagaaacgcaagacctgaacggggacggtctaatgacaccagctgaacttatcaacttccctggagtggcactgagacacgtggaaccaggcgagccccttgctccttcacctcaagaacctcaagccgttggtcgccagtcactgctggctaagtcacccctgagacaggagacacaggaagctccaggccccagggaagaggccaaaggccaggttgaagcccgtcgggaaagcctggaccccgtccaggaacccggaggccaagctgaggctgacggagatgtgcccggccccaggggagaagcggagggccaggcagaggcaaaaggtgatgcccctggaccacggggggaagccggcggtcaggccgaggccgagggggatgcaccaggcccacggggcgaggctggcgggcaagctgaagcacgggaaaacggggaggaggcaaaagaactgccaggtgaaaccctagagagcaaaaacacccagaacgattttgaggtgcacatagttcaggtcgaaaatgatgagatatag

SEQ ID NO: 12621 - RNA, 4722 nt, synthetic construct
  misc_feature 1..4722: note = source = /note="Description of Artificial Sequence: Synthetic coding sequence"
  source 1..4722: mol_type = other RNA
atgcgcgtgctcgcttgcctcttagccgccctggtcggcatccaagccgttgaaaggctgagactcgccgatggccctcatggttgtgcaggacgactggaggtttggcatgggggacgctggggtaccgtgtgcgacgacggctgggatttgagagacgccgctgtagcctgcagacagctgggatgcggcggggctctggccgctcccggcggtgctttcttcggcgaaggagcagggccggtctggctcagtgaattggcttgtcggggcaacgagggccagctcggcctgtgccatcaccgtgggtggaaagctcacatttgctctcacgaggaagatgctggcgttgtttgcgccgggcaaagggtagccaatagtcgcgatgactcaacctcccctcttgatggcgctccttggcctggactgctgctagagttgtctcccagcacagaagagcccttagttacccatgcaccacggcctgctggaaacccccagaacgcctcccggaaaaaatcacctaggcccaaacaggccaagagtacacgtgccccactgcttacaaccggagctccacggcaagaaagacttagactggtgtcaggcccccaccggtgcgctgggcggcttgaagtatggcacgggggacgctggggcaccgtctgcgacgacgggtgggacctcagagatgccgcggtagcctgccgagaactggggtgcggtggagcccttgccgcccccggcggcgctagatttggtccaggagcagggcccgtctggatggatgacgttgggtgcggcggaggagaacaggccctacgggattgtcctagaagcccttggggtcgttccaattgcgatcacagcgaagatgccggtttagtctgcacggggccagctccaagactgaggttggccgatggtcctcatggatgcgccggacgactggaggtgtggcacggggggcgatgggggtccgtctgcgacgacgcatgggacctgagggatgccgccgtagcttgtcgagagctgggttgtggaggggcccttgccgcaccaggtggcgcattctttggagaaggatccgggcccatcatactggacgatttgcggtgcaggggtaacgaaaccgcactgcggttttgccccgccaggccgtggggccagcacgactgtcatcacagagaggatgcaggcgctgtctgcgacgggatgcctcttgggtacgtacccccaactgcacctactgatagcaataatagcactccacgggaagccgcctctaggccccccagcactatgactagccaggctccaggcacggctggcgtaagtcctcctccagcctcccctaccgtgctctgggaaccagggcccgaagctggatccccccaactgcgtctggtggctggcccatccaagtgcagtggaagacttgaagtgtggcatgaccaaaggtggggaaccgtgtgtgacgactcctgggacatgcgggactctgcagtcgtctgccgtgaactgggatgcggcggtccccaacagcccgaccccgctgccggaaggttcggctggggcgctggtccaatctggcttgatgatgttgggtgtgtcggcaccgaggctagcctttccgattgtccagccgcaccatgggggaagcacaattgtgctcataacgaggatgttggcgtcacttgcaccggcccaccgggcctggactccatttctgatcctttctcctggtcctggatccctggcttgggccgggacagagatgcctggctccccggagagttagcgacgaagccctctgcttcagtgaccgcttctgtgctggaaaaaacaaccactaaggctccaggaaagatgcccaaaagtaccaagaagtgggtgactaagaatgctaaacggcccactacacagccacccgtgatgccaaccaccaaacactccagggcccaaagcccaccagatctgacctcgcagacgactgctgcgctgacaaccgaagcctcccggcgtcccacgagcgaattcactcgacgcccaaccacagaagctccccagagatggacaagtcataccaccgctacattgacaccacaggcccctagagagcggaccacaaaaacgatggccatgcttacaacacaggggcctcaggagatgacgtcggagagcacgattaaatccatcccacaggcctctctggagccctctgcggaaatccctgagggaagccccgaatcccctaaggaccccgctccaagcccctccgtgagtacaacaggggaaagtggcttattcagagtcaggcttgctgatgggcccaacagatgcgccgggcggctggaggtctggcatgccgggagatggggaactgtctgcgatgataattgggaccttcgggacgccaccgtagcttgttgggagctcgggtgtggcaaagtgagaccccgggtaggcaagacgcattatggccccggaacgggtcctatatggctagacgacatgggatgcaagggctccgaggcctctctctctgactgcccaagtggagcatggggtaagcataattgtgatcacgaggaggacgttggactgacctgcacgggatacactgattacgacgattatcctccatggacgtgggatccgacaagccgcgaggaccttgctaagggcacaaccacggccggggtacccggccatacgctgccatggagaaccacccggcgcccaggatctagctcacccgcaattcgacggttaccagatactggatccaaggatggttacaaacttccctggacatgggatactccaagtgggcgcggactcgccgaaggcacccccaccgccggtaagctaggccccaccctcggcgccggcacgacccgctccccgggttcaccacctacactccgagtgcatggtgataccggctcccccagaaagccctggcccgaaaggcgcccgccccgcccagccgcgacgaggacagcaccccctactcctagcccagggccatctgctagtcctgggcctccaggcccagctctcacatcggattcctctcgcgagctgacgcctcactccgccttaactagcgaggctacatcagacgcacccgacacatcgcccccaacaccagacccagctagccggaccaatcctgatttgattctcacaagccctgattttgctctaagtacccccgactcttcagtggtgcccgccctcactcctgaaccctctccaacgcccctccccacactacccaaagagctgacctctgatccttcaacccctagcgaagtgacgtccttatcaccaacatccgaacaggtgccagaatctgacacaacccctgatctcgatacaaccccttacagctccactgtctccgaatactctcgatccccggatccttcccctagccctcatcccacgacaaccccggatcccaccatggccccagatccgataacaacgctgaaccccaccgtgacccctcattttcctacaacccctcaccccactaccaccccgcaccccaccactattacacactccactatgatccccgacccaacaaccactccccagccgttcacaacaataactcacagcacgatgattcccgaccccacaacgactcctcaacccttcaccacgatgcagccaacaacaactcctcactcgaccacaccgcacccaacaactaccccccatccaactacaataacgcatagtaccatgattcccgaccccaccacaacacctcagcccttcaccacgatgcaacctaccacgatgccccatcccacaaccacccctcacccaactacaactccacatcctaccactacaccacacccaaccaccactccccatccaacaatgactcccgatccaaccaccacgccctacccaactaccactccagaccctacaaccacgcctcatcccacaaccccggatccctcttccacaccagtaatcaccacagttagtctccctacttcattgggcacagaactcagttctcccacacttgcgccaaccgtgaaaccatctctgcacccacagctcactttcacagcacctgcccctcatacctcaacttcccagattcccacgctcgagccctccccggcactggagagcagtccctcgcgcagcagtaccgcgacctcgatggaccccctgagtacagaagactttaagccgcctcggtcgcagagtccaaacctgactcccccaccgactcacactcctcactcagcttcggacctcaccgtcagccccgaccccctcctcagtccaaccgcccaccccctcgatcacccgccccttgatcctcttactttgggtcctactcccggacagtctcctggtccacacggcccatgcgttgcgcctacccccccagtaagggtcatggcctgcgaaccccctgcactggttgagctggtagccgccgtacgggatgtaggaggtcaactgcaaagattgacacaggtagtggaacaagagcggcaggagaggcaggcgttactgctgggcctgacccaactagttgaggctgccaggggtctcgggcaactaggggaggccgttaaacgcttggccgagatggcctggaccacctccatgcccgcccctaccactaccactccagaggaagaagagaggccactgagaggagacgtgtag

SEQ ID NO: 12622 - RNA, 1911 nt, synthetic construct
  misc_feature 1..1911: note = source = /note="Description of Artificial Sequence: Synthetic coding sequence"
  source 1..1911: mol_type = other RNA
atgaccacgtggtccctgaggagaaggcctgcccgcacgcttggtttactgttactggtagtcctcggttttctggtactgcggcgcttagattggtctacactcgtgcccctgaggttacgtcatcgccagttgggtctccaagctaaggggtggaattttatgctcgaagatagcacattttggattttcggcgggtctatacattacttccgggtgccccgtgagtactggagagacagattactcaaaatgaaggcttgcgggctgaacaccctgaccacctacgtgccatggaatctgcatgagcccgagagagggaagttcgacttctcggggaatcttgaccttgaagcgtttgtcctcatggctgctgaaatcgggttgtgggtgatccttcgtccagggccttatatttgtagcgagatggatctcggcggcttgcccagctggttactgcaggaccctgggatgcgcctccgcacaacttataagggctttacagaagcagtcgacctgtatttcgatcatctaatgtctcgcgtggttcctctccagtataagcggggggggcctatcatcgctgtgcaggtggaaaacgagtatggctcatacaataaagaccccgcctacatgccctatgtgaaaaaagcactcgaggacagggggatcgtagagttgctactgaccagcgataataaagacgggttatctaaagggattgttcagggagtcctggccacaattaatcttcagtcgacgcacgagttgcagctgttaaccacctttctatttaacgtgcaggggactcaacccaaaatggttatggaatattggactggctggtttgactcatgggggggcccacacaacatccttgatagctcagaagtgcttaagactgtcagtgcgattgtggatgctgggagttccatcaacttgtatatgttccatggaggcaccaatttcggatttatgaatggcgcaatgcacttccacgattacaaaagtgatgttacatcttatgattatgacgcagtcctaactgaagctggtgattatactgctaaatatatgaagctccgcgattttttcggctcgatttcggggatccctttgccacctccccccgacctgctacccaaaatgccttatgagcccttaacccctgtcctatatctcagcctgtgggatgctctcaagtacttaggggaacctatcaagtcagaaaaacccatcaatatggagaatttgcctgttaatgggggtaatggacagtcatttgggtacatattgtatgagacatctatcacttcatctgggatcctgtctggacacgtgcatgaccggggccaagtctttgtgaataccgtttccatcgggttccttgattataagacaacaaagattgcagtcccactgatccaaggctataccgtcctgagaatcctggtcgagaacaggggtcgggtcaactatggagaaaacattgacgaccagagaaaggggctgattgggaacctttaccttaatgatagccctctaaagaacttcaggatttattctctggatatgaagaagtcctttttccagaggtttggtctggacaaatggagttctctgcctgagacacccacgctgcccgcattctttctggggtccctgtcaatctctagcaccccgtgcgatacattccttaaattagagggttgggagaaaggcgtagttttcataaacggacagaatctggggcggtactggaatataggcccacagaaaacgctatacttgccaggtccgtggctgtcgagcggtataaaccaggtcatcgtattcgaggaaaccatggctggaccggctttgcagttcaccgagactccacatctaggaagaaaccagtatattaagtag

SEQ ID NO: 12623 - RNA, 2037 nt, synthetic construct
  misc_feature 1..2037: note = source = /note="Description of Artificial Sequence: Synthetic coding sequence"
  source 1..2037: mol_type = other RNA
atgcgtactgtcgtgcttactatgaaggctagtgtcattgaaatgtttctggtactgcttgtgacaggagtccactccaacaaagagactgctaaaaagattaagcgccctaaatttacggtgccccagatcaactgtgatgtgaaagcaggaaagatcatagaccccgaattcattgtgaagtgccccgccggatgccaggatccaaaatatcacgtctatggtaccgacgtttacgcctcgtacagttcagtctgtggggccgctgtccacagcggggtactggataatagtggtggcaagatcctagtgaggaaagtagctggccagtcaggttataaaggatcctactcgaacggcgtgcagtcactcagcctcccgcgctggagagagtctttcatcgtattagaatcaaaaccaaaaaagggcgtcacctacccaagtgccctgacctattcttcgagcaagagtcctgccgcccaggctggggagactactaaagcctaccagcgaccaccaatacctggaaccacagcccagccggtgactttaatgcagctgctggctgtcaccgttgctgtcgcaaccccaactaccctgcctcgcccgtctccatctgctgcatctacaacctcaatccccaggcctcagagcgttggccacaggtcccaagagatggatctctggtctactgctacatatacgagttcacagaatcgaccccgggccgacccaggcatccagaggcaagacccttccggagcggcattccagaagccagttggtgccgatgtttctcttggactggtgccaaaggaagaactgagcacccagagcctggagcctgtctccttgggagaccctaactgtaagattgaccttagttttctcatcgacggatccacctcgattggcaagcgacgtttccggatccaaaagcagctgctcgccgatgtcgcacaggccttagacatcggacccgcaggccccctgatgggagttgtgcaatacggtgataaccctgccactcatttcaacttaaaaacccacactaatagccgtgatctgaaaacagccatcgagaagatcactcagaggggcggccttagcaacgtgggaagggccatctccttcgttacaaagaactttttttccaaagccaacggcaacaggtctggagcaccaaacgtggtcgtcgtcatggtagatggatggcctaccgataaagtagaggaagctagtcgattggcacgcgagtccggaatcaatatcttctttataaccatcgaaggcgcggcagaaaatgaaaagcaatacgttgtcgaaccaaacttcgctaacaaagccgtctgcagaactaatggcttctattcgttacacgttcagtcctggttcggcctacacaagacgctgcagccgttggtgaaacgcgtgtgtgacactgacagactcgcttgtagcaaaacgtgccttaatagcgcagacattggcttcgtaattgatggcagtagcagcgtagggaccgggaatttcagaactgtcctacagtttgtgactaatctgacaaaggaatttgaaatttcggataccgatacccggattggcgctgtgcagtacacttacgagcaaaggcttgaatttggcttcgataagtactccagcaagccggacattctgaacgctattaaacgcgtcggatactggtcaggggggacctccactggcgctgcaatcaactttgcactggaacaactattcaagaaatcaaaacctaacaagcggaaactaatgattctgattaccgacggccgatcatacgacgatgttagaattccggctatggccgcacacttaaagggggtgatcacttatgccataggcgtggcttgggccgcccaagaagagcttgaagtgatcgcaactcatcctgcccgcgatcacagctttttcgtagacgagttcgacaacctgcaccagtacgtccccaggatcattcagaacatctgcactgaattcaatagccaacccagaaactag

SEQ ID NO: 12624 - RNA, 324 nt, synthetic construct
  misc_feature 1..324: note = source = /note="Description of Artificial Sequence: Synthetic coding sequence"
  source 1..324: mol_type = other RNA
tgaaccgtagctgccccatcagtttttattttcccacctagcgacgaacagttaaaaagcggcaccgcatccgtcgtttgcctgcttaataatttctaccctcgcgaagctaaagttcagtggaaggtagacaatgcgcttcagtccggcaacagccaggaatccgttaccgaacaggactcaaaagattccacctattccttatcatcgaccctcaccctcagcaaggccgattacgaaaagcacaaagtttacgcctgcgaggtgactcaccagggcctgtcttcgcctgtgaccaaaagtttcaataggggtgagtgctag

SEQ ID NO: 12625 - RNA, 366 nt, synthetic construct
  misc_feature 1..366: note = source = /note="Description of Artificial Sequence: Synthetic coding sequence"
  source 1..366: mol_type = other RNA
atggtgctccagacccaggtgtttattagccttctgttgtggatttcaggggcctacggcgatatcgtgatgacccaatcccccgactctcttgcggtctcactaggcgagcgcgcaaccattaattgcaagagttcacagtccgttttgtacagttctaataataaaaactaccttgcttggtatcagcagaagccaggacaaccaccaaaattgctcatttattgggctagcaccagagagagcggcgtgccagaccggttcagtggcagtggttccggaaccgatttcactctcacaattagttcactccaggcagaagatgtggccgtctactattgtcagcagtattactctaccccttag

SEQ ID NO: 12626 - RNA, 984 nt, synthetic construct
  misc_feature 1..984: note = source = /note="Description of Artificial Sequence: Synthetic coding sequence"
  source 1..984: mol_type = other RNA
gcatccacaaagggcccttctgtatttccactggcaccatgcagtaggtccacaagcgaatccaccgccgccttgggatgcctggtcaaggattattttcccgaacccgttacagtttcctggaactctggggccctgacatcaggcgtgcacacgttccctgccgtgttacaatcgtctggcctgtactctttgtctagcgtggtcaccgtcccgtctagtagtctgggcacgaagacctacacctgcaatgtggaccacaaaccatccaacactaaggtagataagcgcgtcgaatctaagtacggacctccatgtccctcttgcccagcaccggagtttcttgggggaccttccgtgttcttgttcccacccaagcccaaggacaccctgatgatttcaagaacacccgaggttacttgcgtcgtcgtcgacgtaagtcaggaagatcccgaagtgcagtttaactggtatgtggacggagtcgaagtacacaacgccaagacaaaacccagggaagaacagttcaactccacttatagagtcgtctctgttttgactgtgctgcaccaagactggttgaatgggaaagaatacaagtgcaaggtaagcaataaaggactgccttcctctattgaaaagacgatttcaaaagccaaaggccagccgcgcgaaccacaggtgtatacccttcccccatcccaggaagagatgactaagaatcaagtatccctgacctgcttggtgaaaggcttttatcccagcgatatagctgttgaatgggaatctaatggacagcctgaaaataactacaaaacaaccccccccgttctagattcagacggctcattctttctctacagtaggctaacagtcgataaaagtaggtggcaggagggaaacgtgtttagttgctctgtgatgcatgaggccctgcacaatcattacacacaaaagtcattatcactttcactgggtaaatag

SEQ ID NO: 12627 - RNA, 981 nt, synthetic construct
  misc_feature 1..981: note = source = /note="Description of Artificial Sequence: Synthetic coding sequence"
  source 1..981: mol_type = other RNA
gcttcaacgaagggcccgagcgtcttccccctggccccgtgctctagaagcacatctgaatcaaccgcagccctcgggtgccttgtaaaggactatttccccgaacccgtgaccgtctcttggaattccggagcgctgaccagcggcgttcacactttcccagctgtcctgcagtcttccggattatactccctgagttccgttgtgacagtaccctcatcaaacttcgggactcagacctatacgtgtaatgtagaccacaaaccatccaataccaaggtagataagaccgttgagcgtaaatgttgcgttgagtgcccgccatgtccggccccccccgtggcaggacccagtgtgttcttattcccaccaaagccgaaagacacccttatgatttctcgcaccccagaagtaacatgcgtcgtagtggatgtgtcacacgaagatcctgaagtccagttcaactggtatgtcgacggagttgaggtgcataatgctaagaccaaaccccgggaagaacagtttaattccacgtttcgcgttgtgtctgtgcttacagttgttcaccaggattggctgaatggaaaagaatacaagtgtaaggtctccaacaaaggcctcccagctcctattgaaaagaccatatctaaaaccaaaggccagccccgcgaacctcaggtttatactcttcccccaagccgtgaagaaatgacaaagaatcaggtttcgctgacatgcctggtgaagggtttttatccttctgatatcagcgtcgaatgggaaagcaacggacagcctgaaaacaactataaaaccaccccgccaatgctagattctgatgggtcattttttctttacagcaagttgaccgtagacaagagcagatggcagcaagggaacgttttttcatgcagcgtgatgcatgaggccctccacaatcattacactcagaagagcctttcactgtctcctggcaaatag

SEQ ID NO: 12628 - RNA, 993 nt, synthetic construct
  misc_feature 1..993: note = source = /note="Description of Artificial Sequence: Synthetic coding sequence"
  source 1..993: mol_type = other RNA
gccagtaccaagggaccgagtgtgttcccactggccccctccagcaaatccactagcggcgggacagccgcactgggatgtctggtgaaggactattttcccgagcctgtgaccgtgagctggaactctggcgctctgaccagcggcgtccacacgtttcctgcagtactccaaagcagcggcctgtactcactttcctctgtagtaacagttcctagcagtagtctggggactcaaacttacatctgtaacgttaaccacaagccatcaaataccaaagtggataaaaaagttgagccaaaatcttgcgataagacgcacacgtgccccccctgcccagcccctgagcttcttggaggaccctctgttttcctcttcccacccaagccgaaggatacactgatgattagcaggactcccgaggtgacttgtgtggtggtggacgttagccacgaagatcccgaagtgaagttcaactggtacgtggacggcgtcgaggtccataatgcgaagaccaagcccagggaagagcaatacaatagcacgtacagagtggtaagcgttctgactgtactccatcaggattggttgaatggaaaagaatacaagtgcaaggtctccaataaggcccttcccgcccctattgagaagacaattagcaaggctaaaggccagcctcgcgagccccaagtgtacacgttacccccatctagagatgagctcacaaagaatcaggtaagtctgacgtgcctggtgaagggcttttacccctctgacatcgcagttgagtgggagtctaacggacagcccgaaaataactacaaaacaactccacccgtgttggacagcgacggatccttcttcctatacagcaaacttactgtggacaagtccaggtggcagcagggcaacgtcttttcttgttctgtgatgcacgaggcattgcataaccattatacacaaaagtccttatccttgtctccaggaaagtag

SEQ ID NO: 12629 - RNA, 651 nt, synthetic construct
  misc_feature 1..651: note = source = /note="Description of Artificial Sequence: Synthetic coding sequence"
  source 1..651: mol_type = other RNA
atgggtgcagtcatgggcacattctcttccttgcagacaaagcaacgtagacccagcaaagacaagattgaggatgagcttgagatgacaatggtctgtcacaggcctgagggactagagcaactggaggcccagaccaactttaccaagagggagctgcaggttttgtatagggggttcaaaaacgagtgccctagtggagtcgttaatgaggatacgtttaaacaaatctacgcccagttctttccacacggagatgcaagcacctacgcccattatctttttaatgctttcgacactacacagacaggatcagttaaattcgaggatttcgttacagccctgagtatacttttacgagggactgttcacgagaagctgagatggacttttaatctttacgacataaacaaagatggctatatcaataaggaagaaatgatggacatagtgaaggcgatctatgatatgatgggtaagtacacctatccagtcttgaaagaagacactcccagacaacacgtcgatgtattcttccagaagatggacaagaacaaagatggaatcgtgactctcgatgaatttctggagtcctgccaggaagatgataacattatgcggtctctgcaactgtttcagaatgtgatgtag

SEQ ID NO: 12630 - RNA, 762 nt, synthetic construct
  misc_feature 1..762: note = source = /note="Description of Artificial Sequence: Synthetic coding sequence"
  source 1..762: mol_type = other RNA
atggctcgctcattattgctgccgctgcaaatcctacttctatccttagccttagaaacagctggtgaggaggctcagggggataagattatcgacggtgccccctgcgccaggggaagtcatccatggcaagtcgcgctgttatcaggcaatcaactacactgtggcggcgttttggtaaacgaaagatgggtacttacagccgcccactgtaaaatgaatgagtacacagtccacctcggaagtgacaccttaggagacagacgggcccaacgcattaaggcatcgaagtcatttcggcacccggggtacagtacccagactcacgtcaacgatctgatgctcgtcaagctgaatagtcaggctaggctgtcctccatggttaaaaaagtccggctgccttctaggtgtgagcctcccggtactacgtgcaccgtgagcggttggggcaccacaaccagtccagacgtaaccttcccctccgacctcatgtgtgtggatgtcaagctaatttctcctcaggattgtacaaaggtatataaagacttgctcgaaaactccatgctgtgcgcaggcataccagacagcaagaaaaatgcatgtaatggagattccggtggaccactcgtgtgtagaggcacccttcagggactggtcagttggggaacgttcccgtgcggacagccgaatgaccctggtgtctacacccaagtctgtaaattcaccaagtggattaatgacacaatgaagaaacatcgatag

SEQ ID NO: 12631 - RNA, 468 nt, synthetic construct
  misc_feature 1..468: note = source = /note="Description of Artificial Sequence: Synthetic coding sequence"
  source 1..468: mol_type = other RNA
atgtttcagagattgctcctcctgctcctactgtccatgggcggaacctgggcctccaaagagccacttagacctcgctgtcgaccaatcaatgctacattggcagtcgagaaggaaggttgtcccgtgtgtattaccgttaacacgaccatttgcgcagggtactgcccaactatgactcgggtccttcagggcgtcctgcccgccctcccacaggtggtgtgcaactaccgagacgtacgatttgagagcatacgcttgccgggctgcccccgcggagttaatccagttgtttcatatgctgtcgccctttcctgccagtgcgcgctgtgccggaggtctacaaccgactgtggcggacccaaggaccacccactcacctgtgacgaccccagatttcaagattcctcttcttctaaagcacctcctccctccttgcctagcccgagcaggctaccagggccttag

SEQ ID NO: 12632 - RNA, 1554 nt, synthetic construct
  misc_feature 1..1554: note = source = /note="Description of Artificial Sequence: Synthetic coding sequence"
  source 1..1554: mol_type = other RNA
atggccgtgagcagaaaggattggagcgcattgagctccttggctcggcagagaacactagaagacgaagaggaacaggagagagagcgtaggcggcgccaccgaaacttgtccagcaccactgatgatgaagcccctagattgtctcaaaatggggatcgccaagctagtgcaagtgaaagacttccttccgtcgaagaagctgaggtgcctaagcctctcccaccagccagcaaagacgaagatgaagatatacagagcatactaagaacacgccaagagaggcgacaacgacggcaggtagttgaggctgcacaggctccaattcaggagagactggaagcggaggagggacgaaacagtctgtctccagttcaggcaacacagaaacctttggttagtaaaaaggaattagagattccaccgagaagacgtctgagccgtgagcagaggggcccctgggcactggaggaagaatcccttgtaggacgcgagccagaagaacgaaagaagggcgtgccagagaagagccccgttttggaaaagtcctcgatgcccaagaaaaccgctcccgagaagagcctggtgagcgacaaaacatcaatctctgagaaggtgctggcaagcgagaagacctcactttcagaaaaaatcgccgtctccgaaaaacgtaattcttcggagaaaaagagtgtgttggaaaagacaagtgtttccgaaaaaagccttgcgcctggaatggccctgggctctggacgaaggctcgtgagcgagaaggcctcaatttttgagaaagccctggcttctgagaaaagccccacagccgatgcaaagccagcacctaaacgggccacggcctcggagcagccactcgcccaagaaccacctgcctcaggagggtcaccagcgacgaccaaggaacagcgcgggagagcactgcccggaaagaatctcccttcgctcgctaaacagggggcctccgacccacctactgtagcatctcgcctcccacccgtgactcttcaggtgaaaatcccttctaaagaagaggaggcagacatgtcttcccccactcagagaacatacagtagctctttgaagaggtcaagccccagaacgatatccttccgtatgaaaccaaaaaaagagaattccgaaaccaccctgacacggagcgcatctatgaagctgcccgataatactgtcaaattaggagagaagctagaaagatatcatacagcaattcggcggtcagaaagtgttaagagcaggggtttgccttgcacagagctgttcgtggcgccggtgggagttgcttctaagcgccacctgttcgagaaggaacttgctgggcagtctcgcgccgagcccgcctcatcgagaaaagagaacctccggctgagcggtgtggtgacctctagactcaacctgtggatttccagaacacaagagtctggtgaccaggacccacaggaggcccagaaggcaagctccgccactgagagaacacaatggggccagaaatctgactcaagtcttgatgccgaggtgtag

SEQ ID NO: 12633 - RNA, 270 nt, synthetic construct
  misc_feature 1..270: note = source = /note="Description of Artificial Sequence: Synthetic coding sequence"
  source 1..270: mol_type = other RNA
atgcaggcatgtatggtgcccggtctcgcgctctgcctactcttgggccccttggcaggagctaagcccgttcaggaagaaggtgacccgtacgctgagttgcctgctatgccttattggcccttttccaccagtgacttttggaactacgtgcagcacttccaggctttaggcgcctatccacagattgaagatatggcccgtacatttttcgcacacttccctttaggatccacactgggatttcacgtgccgtaccaagaagattag

SEQ ID NO: 12634 - RNA, 1302 nt, synthetic construct
  misc_feature 1..1302: note = source = /note="Description of Artificial Sequence: Synthetic coding sequence"
  source 1..1302: mol_type = other RNA
atgggaaacgcttgttgggagctgtactgcctggaacacggcatccagccagatggtcagatgccctctgataagaccatcggtggcggagacgatagcttcacaacctttttttgcgaaactggggctggtaagcatgtacctcgcgccgtgttcgtggacttggagccaaccgtgattgatgaaataagaaacgggccataccgtcagctcttccatcctgaacagctaatcacgggaaaagaggatgccgctaataattatgcacgtgggcattacacaatcgggaaagagattatcgacccggtcttggatagaataaggaagctgagcgaccagtgcacaggcctgcagggttttcttgtatttcattcattcggcgggggtacaggatctgggtttacgtctctgctaatggagcgactgtcggtagactacgggaaaaaaagcaagctcgaattctcaatatacccagcccctcaggtaagcacagccgtagtggaaccctacaattcgatcctcacgactcacacaactttagagcactctgattgtgcctttatggttgataatgaggccatttatgatatctgtcgcaggaacctagatattgaacggccaacctacactaatctgaatcggctgatcagccagatcgtgagtagtatcacagctagcctgagatttgacggtgcactgaatgtggatcttaccgaattccaaactaatctggtgccttacccccggatacacttccccctagccacctatgctcccgtaatctccgccgaaaaggcttaccacgaacaactcagcgtcgccgaaatcactaatgcatgcttcgagccggcaaaccagatggttaagtgcgacccacggcacgggaaatacatggcgtgctgcttgctgtataggggggacgttgttccaaaagatgtgaatgctgcaattgctgcgataaagaccaagagatctattcaattcgttgactggtgccccacaggattcaaagttggcatcaattatcagcctcccacagtcgtcccgggcggcgacttagcaaaagtacagagggctgtatgtatgctcagcaacacaaccgccattgctgaggcatgggcccgcctcgatcacaaatttgaccttatgtacgctaaacgagccttcgtccattggtacgtcggagaagggatggaagaaggagaattttctgaggctagagaggatatggcggctctagagaaggattatgaagaagttgggatagatagctatgaggacgaggacgagggagaagagtag

SEQ ID NO: 12635 - RNA, 1965 nt, synthetic construct
  misc_feature 1..1965: note = source = /note="Description of Artificial Sequence: Synthetic coding sequence"
  source 1..1965: mol_type = other RNA
atggccccaaagaaattgtcttgtctccgcagcttgttactgccactgtccctgacccttttgctaccccaagctgacaccagaagcttcgtcgtggatagagggcatgatcggtttctcttggatggagccccgttccgctacgtaagcggctctctgcattacttcagggttcccagagtgctgtgggctgatcggcttctgaagatgaggtggagtggcctgaacgctatacaattctatgtcccctggaactatcatgaacctcagcccggggtgtataactttaacggctcaagggacctcattgcctttctgaatgaagctgcgcttgctaacctgcttgtgatcctccgaccgggtccatacatctgcgctgagtgggaaatgggtgggttgccatcttggctgcttcgaaaacctgagattcatctgcggacctctgaccctgacttcctcgccgcggtagactcatggtttaaggttttgctgccaaagatttacccttggctataccacaacggtggtaacatcatctccattcaggtggagaacgaatatgggagctaccgcgcatgtgacttcagctatatgaggcacctggccggcctgttcagagctctcttgggggagaagatcctgctgttcaccacggatggccccgagggcctgaagtgcggctctctcagaggactttacactacagttgactttggtccagcagataatatgactaaaatctttaccttgctgcggaaatacgagcctcatggtcccctcgtgaactcggaatactacacaggttggctcgattattgggggcaaaatcactcaacccggtcagtgtctgctgtaactaaaggactcgagaacatgttgaaactgggagcgagtgtgaacatgtacatgtttcacggagggactaactttggttattggaatggtgctgacaagaagggccggtttctccccattacaaccagctacgactacgacgcccccatttcagaggctggggacccgactcccaagctgtttgcgttacgcgacgtcatcagtaagttccaggaagtcccgctcggacccctgcccccccccagcccgaagatgatgctagggcctgtgactctgcatctcgttggccacctgcttgcctttctggatcttctttgcccccggggtcctattcattcaattcttcccatgaccttcgaagctgtaaaacaggaccatgggttcatgctgtatagaacctatatgacacataccatcttcgagcctacacctttttgggtaccgaacaacggtgtccatgaccgggcctacgttatggttgatggcgtcttccaaggtgtagtggagagaaacatgcgggacaaactcttccttactggaaaacttggctccaaattggatattcttgtggaaaacatgggaaggctttcattcggctcaaacagtagtgatttcaagggtctccttaagcccccaatcctgggccagacaatccttacacagtggatgatgttccctctgaaaatcgacaacctcgtcaagtggtggtttccactccagctgcccaaatggccatacccacaagctccaagcggaccgactttctactccaaaactttccctatactgggctccgttggagacacctttctctacttgccaggctggactaaaggtcaggtatggataaacggatttaatctaggtcgctattggacgaagcagggcccccaacaaaccttatatgtccctcggttcttgttgtttcccagaggcgctctgaacaagattactttgctggaattagaggacgtgccactgcagcctcaggttcagtttctggacaagccaattttaaactcaactagcacgctccaccgtacacacatcaactccctgtccgctgataccttatccgcttcagagccaatggagttgtctgggcattag

SEQ ID NO: 12636 - RNA, 1173 nt, synthetic construct
  misc_feature 1..1173: note = source = /note="Description of Artificial Sequence: Synthetic coding sequence"
  source 1..1173: mol_type = other RNA
atgaagttccagggacctctcgcctgtctgctgctcgctctatgcctgggaagcggggaggcaggaccgctacagtctggggaggaatctacggggactaacattggcgaggccctgggccacggactgggagacgcgctttccgagggagttggcaaagctatagggaaggaggcaggcggcgccgctggcagcaaggtttcagaagctctgggccaggggactcgggaggccgtgggcactggcgtccggcaagtgccagggtttggcgtagcagatgcactcggtaatagggtgggggaagccgcccatgccctgggcaatacaggccatgaaatcggtaggcaggctgaggacgtgattaggcacggtgctgacgccgtcaggggatcgtggcagggcgtccccggccataatggagcatgggaaactagcggcggacacggaatttttggcagccagggcggcttgggaggccagggacaggggaaccccggaggtctgggtaccccatgggtacatggttaccccggcaactcagccggttcatttggaatgaatcctcagggtgcaccgtgggggcagggtgggaatggtggaccaccaaatttcggcactaacactcaaggcgctgttgctcagcccggctacggaagcgtgagagcatcgaatcagaacgaagggtgcacaaatccccctccaagtggctccggagggggcagctcgaatagcgggggcggatccgggtctcagagtgggtcctccggttctgggtccaatggcgataacaataacggcagttcatctgggggaagctccagcgggagttcatctggggggtcttcgggggggagctcaggcggttcgtctggcaacagcggaggctcgcggggagattctggctctgaatcatcttggggaagttcaacaggttcatctagcggcaatcatggtggcagcgggggcggtaacggccacaaacctgggtgcgaaaagccaggcaatgaggctaggggctccggggaaagcggaattcaaggatttcgcggacagggcgtgagcagtaatatgaggaacagcgagacctctccaggcatgttcaacttcgataccttttggaaaaactttaagtcaaaactgggctttatcaattgggacgccattaacaaatag

SEQ ID NO: 12637 - RNA, 846 nt, synthetic construct
  misc_feature 1..846: note = source = /note="Description of Artificial Sequence: Synthetic coding sequence"
  source 1..846: mol_type = other RNA
atgggtagtagaggccaaggtctgttgctggcttactgcctcctactcgcatttgcctctggtttggttttaagtcgcgtcccacacgtgcagggcgagcaacaagagtgggagggcacagaggaattgccttcaccccccgaccacgctgagagggctgaagagcaacatgaaaaataccgcccaagccaagatcagggactacccgcttcgagatgcctgcgctgttgcgaccccggcaccagtatgtatccagcaacagccgtcccacaaattaacatcactatacttaagggcgaaaaaggggaccgaggcgaccggggcctgcaaggcaagtacggaaaaactggctcagcaggcgcaaggggacacacagggccaaaggggcaaaaaggcagcatgggcgcccccggagagaggtgcaagagccactacgctgcattcagcgttgggcgcaaaaagccaatgcacagcaaccactattatcagactgtgatcttcgacacagagttcgtgaacctatatgaccatttcaatatgttcaccggaaaattttactgctacgtgcccggcctttacttcttctccctaaacgtgcacacctggaaccagaaggaaacataccttcacatcatgaagaacgaagaagaggttgtgattttatttgcccaagtgggcgatagaagtattatgcagtcgcagtcactgatgctggagctgagggaacaagatcaggtctgggtgaggctatacaagggtgaaagggaaaacgccattttctctgaggaacttgacacgtatatcactttttcaggttatttggtcaaacatgccaccgagccatag

SEQ ID NO: 12638 - RNA, 876 nt, synthetic construct
  misc_feature 1..876: note = source = /note="Description of Artificial Sequence: Synthetic coding sequence"
  source 1..876: mol_type = other RNA
gttctcagcgcctcaggacctggaagaaaaatgggaagccgaggtcaggggctcttgctggcatattgtctgctccttgccttcgcttcaggcctggtactcagcagagtgccacacgtccagggtgagcaacaggaatgggaaggaaccgaggagctaccatctccaccagaccacgctgagagagcagaagagcagcacgagaagtatcgaccatcccaggaccaaggtttgccagcctctagatgcctgcggtgctgcgatcccggaacctcgatgtatccagctacggccgtaccccagatcaacattactattctaaagggagaaaagggggataggggcgatcgagggttacaaggtaagtatgggaaaactggcagtgccggagccagaggccatacgggcccaaagggacaaaaaggttcaatgggggcgcctggcgaacgatgcaagagtcactatgcagcctttagcgtgggacgcaaaaagcctatgcattctaatcactactatcagaccgtcatcttcgatactgagtttgtcaatctgtatgatcacttcaatatgttcaccgggaaattctactgctatgtgcccggcctgtactttttttccctgaatgtacacacatggaatcagaaagagacttatctacatattatgaaaaatgaggaagaagtcgttatactttttgcccaggtgggggaccgctcaataatgcagagccaatcattgatgttagagttaagagagcaagaccaggtttgggtgaggctctacaaaggcgaaagggaaaacgcaatcttttctgaagaactcgacacttatatcacattttccggctacctggtgaaacatgccacggagccatag

SEQ ID NO: 12639 - RNA, 1002 nt, synthetic construct
  misc_feature 1..1002: note = source = /note="Description of Artificial Sequence: Synthetic coding sequence"
  source 1..1002: mol_type = other RNA
atggtttccaagagccggtggaagttacttgcgatgctcgcactcgtcctggtggtcatggtgtggtactctattagtcgggaagatcgatatatcgaactcttctatttcccaattccagaaaaaaaggaaccgtgcctgcagggtgaagccgaatctaaggccagtaagctctttgggaactactcccgggaccaacccattttcctgagactcgaagattatttttgggtaaagacaccgagcgcctatgaactcccctatgggactaagggaagtgaggatctgctgctgcgagttcttgcaatcactagcagttctattcctaaaaacattcagtcactccgatgtcgacgctgtgtggttgtaggaaatggacaccgcctgcgaaacagctcattaggcgacgctatcaataagtatgatgtggtcattaggctaaataacgcacccgtggctgggtacgagggagacgtaggctccaagaccacaatgaggctgttttatcccgagagcgcccattttgatcccaaggtggaaaataatcccgataccctcctggtgttggtggctttcaaagcgatggattttcactggattgagaccatcctttcagataagaaaagagtgaggaaaggcttctggaagcagccacccctgatatgggacgtgaaccccaagcaaatccggatcctgaatcccttttttatggagattgccgctgacaagctcctctccctgccaatgcagcagccgagaaaaataaagcagaagccaacaactgggctccttgctattacacttgctttacatttatgcgacctggttcatatcgcgggttttggttacccagacgcttacaataaaaagcaaactatacactactacgaacagatcacactaaagtctatggcaggctctggtcataacgtgtcacaagaggctctggccatcaaaagaatgcttgagatgggcgccatcaagaacctgacatcattttag

SEQ ID NO: 12640 - RNA, 312 nt, synthetic construct
  misc_feature 1..312: note = source = /note="Description of Artificial Sequence: Synthetic coding sequence"
  source 1..312: mol_type = other RNA
atgagtggccgggggaaagggggcaaagggctgggtaaggggggagccaaacggcatcgaaaagtgttaagagacaacattcaggggattactaagccggctatcaggcgtcttgcgaggagggggggggttaagagaatctctggactgatttatgaggagacaaggggcgtgttgaaggtgttcctggaaaacgtgataagggatgccgtaacttatacagaacatgctaaaaggaagaccgtgactgcaatggacgtggtttatgccttaaagcgacaaggacgcacactttatggttttgggggctag

SEQ ID NO: 12641 - RNA, 312 nt, synthetic construct
  misc_feature 1..312: note = source = /note="Description of Artificial Sequence: Synthetic coding sequence"
  source 1..312: mol_type = other RNA
atgtcgggcagaggcaaaggcggtaaagggctcgggaaaggaggagcgaaaagacacaggaaggtcctacgagacaatatccaaggcattactaagcccgctatccgacgtttagctcggcgaggcggcgtgaagaggatttcggggctcatttatgaggagacgcggggtgtcttaaaagtgtttctagagaacgtgattagggatgctgtgacctacacagaacatgccaaacgaaagacagtgacggccatggacgttgtatatgcattaaaacggcaagggcgcactctctatggttttggggggtag

SEQ ID NO: 12642 - RNA, 312 nt, synthetic construct
  misc_feature 1..312: note = source = /note="Description of Artificial Sequence: Synthetic coding sequence"
  source 1..312: mol_type = other RNA
atgtccgggagaggaaaaggcgggaagggactgggcaaaggcggggcgaagagacaccggaaagtgcttcgggataatatccaaggaattacaaaacccgccattcggcggctggccagacgaggcggagttaagaggatatcaggtctgatctacgaggaaaccaggggggtgttaaaagtcttcctggaaaatgtcatccgagacgcggtaacctataccgagcatgctaagcgaaaaactgtgacggccatggatgttgtgtacgcacttaaaaggcagggtagaactctgtacggctttggaggctag

SEQ ID NO: 12643 - RNA, 312 nt, synthetic construct
  misc_feature 1..312: note = source = /note="Description of Artificial Sequence: Synthetic coding sequence"
  source 1..312: mol_type = other RNA
atgagcggaaggggtaagggcggtaaaggcctaggaaaaggaggtgcaaagcggcaccgcaaagtactgagagacaacatccaggggattactaagccagccatccgaagacttgcacggcgcggcggggtgaagcgcatttccggcctaatctacgaagagacgcgcggagtcctgaaggttttcttagagaatgtcattagagatgccgtgacttacactgaacacgccaagagaaaaacagtgacagcaatggatgtggtatatgcactgaaaagacaagggcggacattatatggatttgggggttag

SEQ ID NO: 12644 - RNA, 2268 nt, synthetic construct
  misc_feature 1..2268: note = source = /note="Description of Artificial Sequence: Synthetic coding sequence"
  source 1..2268: mol_type = other RNA
atgcccccatttctcttgctggaggctgtatgcgttttcctgttttccagggtccccccctctctccccctgcaggaggttcacgtatccaaggagaccattggaaagatcagcgctgcttcaaaaatgatgtggtgcagcgccgcagttgatattatgttcctgttggacggcagtaactctgtgggaaaaggctcatttgaacgcagcaaacactttgccattactgtttgcgacggcctggatatctctcccgagagagtgagggtgggcgccttccaattcagcagtaccccccacctagaatttcccctcgattcatttagcacacagcaggaagttaaagccaggattaagaggatggttttcaaaggcggacggacagaaaccgaactagctctgaagtatctgctgcacagaggcttgccgggcggaagaaacgcctcagtcccacagatcctgataatagtgaccgatggaaaatctcagggcgatgtagcactgccttccaagcaacttaaggagcgaggggtgacagtctttgcggtaggagtccggttcccccggtgggaggagctgcatgcactcgcttccgagccaagggggcagcacgttctgctggccgagcaggtggaggatgctacaaacggactcttctccacactaagctcatccgccatctgttcaagcgcaacacctgactgcagggtggaagctcatccatgcgaacaccgcaccctcgagatggttagggagttcgctggcaacgcaccctgttggcgcgggtctcggaggacactcgccgttctagccgcccattgtccgttttattcctggaaaagggtgttcctgacccatccagcgacctgctaccggactacctgcccaggcccatgcgacagccaaccgtgccagaatggaggcacatgtgttccagaaggtcttgacggttaccagtgtctttgccctctggcttttggaggtgaagccaattgcgccctcaagctgtctctggagtgcagggtggacctcctgtttctactggacagttcggcagggaccactttagacggcttcctgcgtgctaaagtcttcgtgaagaggttcgtgagagcagtgctttccgaggactctcgcgcacgagtcggggtcgcgacgtattctcgggaactcttggtggcggtgcctgtgggagagtaccaggacgtgcctgacctcgtgtggtcactcgatggcataccgtttcgcggcgggccaacccttaccggctcagctttacgtcaggctgctgaacgcggatttggtagtgctacaagaactggccaggaccggcctaggcgcgtggtggtcttgttaacagagtctcactccgaggacgaggtggccgggcctgcgcggcacgccagggctcgcgagcttctgttattaggggtgggttccgaggcggtacgagcggagctcgaggagatcactgggtcacctaagcatgtgatggtgtactctgatccccaggatctgtttaatcagataccagaactgcaaggaaagttgtgtagccggcagcggcctggctgtcgaacccaggctcttgatctggtttttatgctcgacacctcggcatcagtgggaccagagaacttcgcacagatgcagtcctttgtgaggtcatgtgccctacagtttgaagtgaacccagatgtcacccaagtcggactggtcgtctacgggtcacaggtgcagactgccttcggcttggatacaaaacccactagggccgctatgttgcgggccatcagccaggctccctacctcggaggcgttggtagcgccggaactgccctgctgcacatatatgataaggtgatgaccgtacagaggggcgccagacctggagtgcctaaggccgtcgtagtcctcaccggcggacggggcgccgaggacgcagccgtcccagcacagaagttaagaaacaacggaatatcggttctggtcgtgggcgtagggcccgtgctctccgagggtttacgtaggctcgcaggcccccgggactcactgattcacgtcgctgcttacgccgatttgagatatcatcaggatgttctcatcgaatggctctgcggcgaagcaaagcagcccgtcaacctgtgtaaacccagcccatgcatgaatgaaggcagttgtgttctgcagaatggctcatatagatgcaagtgtcgcgacggttgggaagggccccactgtgaaaacagattcctgcgccggccttag

SEQ ID NO: 12645 - RNA, 816 nt, synthetic construct
  misc_feature 1..816: note = source = /note="Description of Artificial Sequence: Synthetic coding sequence"
  source 1..816: mol_type = other RNA
atgattaccggcgttttcagtatgcgactctggacccccgtcggggtactgaccagtttggcctactgtttacatcagcgaagagttgcacttgctgaactgcaggaagccgacggacaatgcccagtggacagaagcctgctgaaactgaaaatggtacaggtcgtgtttagacacggtgcgaggtcaccactcaagcctctgccccttgaagaacaggtggagtggaatccgcagctactcgaagtgccacctcagacccagttcgattacacagtgaccaatctcgcaggcggccctaaaccttactcgccttacgacagccaatatcatgagactacactgaaaggaggtatgtttgctggacaactgaccaaagtgggaatgcagcagatgtttgcgttgggcgaacgtctgagaaaaaactatgtggaagatatcccatttctgtccccaacgttcaacccccaggaagtctttatcagatcaaccaacatatttaggaacctggaatctacgaggtgcctactcgcgggcctcttccagtgtcaaaaagaaggacctattatcattcacactgatgaagctgacagtgaagtgttataccccaattaccaatcctgctggtcacttaggcagagaactagaggcaggcgccagaccgcctcactacaaccaggaatttcagaggacttaaagaaggtgaaggacagaatgggcatcgactcgagcgataaggtagatttttttattctgttggacaacgtggctgccgaacaggaaaaaatggggagctgtcgcttccacggctcatag

SEQ ID NO: 12646 - RNA, 1395 nt, synthetic construct
  misc_feature 1..1395: note = source = /note="Description of Artificial Sequence: Synthetic coding sequence"
  source 1..1395: mol_type = other RNA
atggaacacagtgtttgtccctcctccgccgttcacctgatccctgtatcaacccccaagaatggcatgagcagcaaatcccggaaacgtattatgcccgaccctgtcactgagccaccagtaacagaccctgtgtacgaagccttactctactgcaatataccaagtgtggctgaacggagcatggaggggcacgccccgcaccattttaagttagtcagtgtgcacgtatttattcgacatggggatcgatatcctctctacgtgataccgaaaacaaagcgaccagagattgattgtacacttgtagcaaacaggaaaccttaccatcccaagcttgaggccttcatttcccatatgagtaaaggatccggcgcctctttcgaaagtccattgaatagtctccccctgtatcctaaccatcccctgtgtgagatgggtgagctgacccagacgggagtcgttcagcatttgcagaatggacaactactgagggatatctacttgaagaagcataagctactaccaaacgactggtccgctgaccagttatatctagagacgaccggcaaatcacgaacattacagtcaggtctggccctgttgtatggatttctgcccgacttcgattggaagaagatttatttccggcaccaacccagtgctctgttctgtagcgggtcatgctattgtccagtgagaaatcaatacttggagaaggaacagagacggcagtatctcctgagacttaagaacagtcaattggagaaaacctacggagagatggcgaagatcgtggacgttcctaccaaacagctgagggcagccaaccccatcgatagcatgctctgtcacttttgtcacaacgtttcctttccatgcacacgaaatggttgtgtggatatggagcatttcaaggtcatcaaaactcaccaaatcgaggacgaaagagaacggcgggaaaagaagttgtatttcgggtattccctgctcggcgcccatcccatcttgaatcagacaatcggcagaatgcaacgggccacggaaggaaggaaagaggaactgtttgccttgtacagcgctcacgatgtcaccctttcgcccgtcctttccgccctgggtctgagcgaggctagatttccccgcttcgccgcacggctcattttcgagctgtggcaggaccgagagaaaccatccgagcattccgtgcggattctatataatggcgtggacgtaactttccacacgtctttctgtcaagaccaccataaaaggagccctaagccaatgtgcccactcgaaaatctcgtgcggttcgtaaaaagggacatgttcgtagcactgggaggctccggcaccaactactacgacgcctgccacagagagggcttttag

SEQ ID NO: 12647 - RNA, 1443 nt, synthetic construct
  misc_feature 1..1443: note = source = /note="Description of Artificial Sequence: Synthetic coding sequence"
  source 1..1443: mol_type = other RNA
atgctgttcaggaataggttcctcctgctgctcgccctagctgccctactggccttcgtgtctttgtcgttgcagttctttcatcttattccagtttctacaccaaaaaatgggatgtcttccaaatcacgcaaacgcattatgcccgaccccgtaacagaaccgcccgtgactgaccccgtctatgaagccctgctgtattgtaatattccctccgtcgcagaacgaagtatggaaggacacgcccctcaccatttcaaacttgtaagcgtgcatgtcttcatcaggcatggcgatagatatcctctctatgtcatcccaaaaacaaaacgccctgagatcgattgtaccctggtagcaaatcgcaagccctaccaccccaagttggaggcatttatctcccatatgtccaaaggtagcggggcatcttttgaatcaccactcaacagcctgcccttgtatcctaaccatcctctgtgtgaaatgggtgaattaacgcagacgggcgtcgtgcagcacctgcagaacgggcagctgcttagagatatctatctgaaaaaacacaagctgctccccaatgactggagcgccgatcagctctacctggagaccacaggcaagtcccgaaccctgcaatccggtctggcattgttgtacggcttcctaccagactttgactggaagaagatttactttagacatcagcccagcgctcttttctgtagtgggtcttgttattgtcctgtgaggaaccagtaccttgaaaaagaacagcgtcgacagtacttactgcgcctgaaaaactcacagctggagaagacctatggtgaaatggctaaaattgtcgatgttccaactaagcagctgagggccgctaaccctattgactctatgctttgccacttttgtcacaatgtctcttttccctgtacaagaaacggatgtgtggatatggagcactttaaggtcattaagacacaccaaatagaagatgaaagggaacgacgagagaagaagctttattttggctattcgctgctgggagcccatcctatcctaaatcaaacaataggtagaatgcagagagcaacagagggtcggaaagaagagctgttcgcactctactcagctcacgacgtgaccctcagtcccgtgctgtccgccctcggcctaagcgaggctcgttttccaagattcgcggctaggctgattttcgaactgtggcaggaccgagagaagccttctgagcattcagtccggattctatacaatggcgttgacgtgactttccacacgagcttctgtcaagaccatcataagaggagccccaaacctatgtgtcccctggaaaatctagtccgcttcgttaaaagagatatgttcgtagcactgggcggttccgggaccaattactatgacgcttgtcatagggagggcttttag

SEQ ID NO: 12648 - RNA, 1311 nt, synthetic construct
  misc_feature 1..1311: note = source = /note="Description of Artificial Sequence: Synthetic coding sequence"
  source 1..1311: mol_type = other RNA
atgcagggcacccctggcggtggaacacggcccggccctagcccagtcgataggcggacactcctcgtcttctcattcatcctcgctgccgcccttggccagatgaactttacaggtgatcaggtcttaagagtcttggcaaaggacgagaaacagctctctctgctgggtgatctggaggggttgaaaccacagaaagttgacttttggagaggcccagctaggccctctctccccgttgatatgagggtcccgttctcagagcttaaggacatcaaggcctatctggagagccatggattagcttactccattatgattaaggacatccaggtcttgttagacgaagaaagacaggcaatggccaaatcaagacgactggaacgatctacaaattccttctcgtatagttcataccacaccttagaagagatttatagttggattgacaatttcgtaatggaacactccgatatcgtgtcgaaaatccaaatcggaaactccttcgagaatcaatctatccttgttctcaagttttcaactggcgggtccaggcatcccgctatttggatagatacaggtatccactcccgcgagtggatcacacatgctaccggtatctggacagccaataaaatcgtatctgactacgggaaagatagggtactcacagacatactaaatgccatggatatcttcattgagcttgtgaccaatcccgacggtttcgcatttacgcactctatgaataggctctggcggaaaaataaatccatcagacctggtatcttctgcatcggcgtcgacctaaaccgcaactggaagtcaggattcggaggaaacgggtccaatagtaatccttgtagtgagacttatcatggcccctctcctcagagtgaacccgaagtagctgccatagtgaatttcatcactgcgcatgggaacttcaaagccctcattagtattcattcatacagtcaaatgttgatgtacccatacggccgcctgctagaaccggtttcaaatcaaagagagctgtatgatcttgcaaaagacgccgtcgaggccctgtacaaggtacacggcatcgaatacatcttcgggagtatatctactactctttacgtcgcttctggaatcaccgtggattgggcatacgattcaggcatcaagtacgccttttcctttgagcttcgagatacaggtcaatacggatttcttttgccagccacacaaattatccctacagctcaagagacctggatggccttgcggaccataatggaacacactctgaaccatccttattag

SEQ ID NO: 12649 - RNA, 1161 nt, synthetic construct
  misc_feature 1..1161: note = source = /note="Description of Artificial Sequence: Synthetic coding sequence"
  source 1..1161: mol_type = other RNA
atggctcagtggcattgttcacagcggacccaggcaggtggccatggggtcggggaaaggcttgctcagtgccaggaccagagttcccgacacgctgccgagctcagagacttcaagaataagatgcttcctctactcgaggtcgcagaaaaagaaagggaggcactgcgcacggaagccgatactattagcgggagagtcgataggctggagcgggaggttgattacctggaaacgcaaaaccctgcactcccgtgcgtcgagtttgatgagaaagtgacaggcggcccgggcacaaaagggaagggccgccggaatgagaaatatgacatggtgacggattgtggctataccatctcacaagtgaggtccatgaagatcttgaaacgcttcggaggcccagccggactctggaccaaagatcctttggggcagacagaaaagatatatgttctcgacggcactcagaatgacactgcgttcgtgttcccacgacttagagattttaccctggcaatggccgctcgcaaggctagcagagtgcgagtgccctttccttgggttgggacgggtcagctggtgtacgggggctttttgtacttcgccaggagacctccaggacgaccaggagggggaggtgagatggagaataccttacagttaattaagtttcacttggccaataggacagttgtcgactccagcgtgtttcccgcagagggtttgattcctccgtatgggttaaccgccgacacttatattgatctcgctgctgacgaagaaggactgtgggccgtgtacgctactcgggaggacgatcggcacctgtgtttagcaaaactcgatccacagactttggacactgagcaacaatgggacacaccctgcccacgcgagaatgcggaagcagcctttgtgatctgcggcaccttgtacgttgtgtacaacacacgccccgctagccgggcccgcattcagtgctcattcgatgcctcagggacactaacacccgaacgcgcagcccttccttactttccgaggagatatggagcacacgcgtcactgcgatataacccaagagaaagacaactttatgcctgggacgacggctaccagatagtgtacaagttggagatgaggaagaaggaagaggaggtgtag

SEQ ID NO: 12650 - RNA, 990 nt, synthetic construct
  misc_feature 1..990: note = source = /note="Description of Artificial Sequence: Synthetic coding sequence"
  source 1..990: mol_type = other RNA
atgcgcccgccaccagccctggccctcgccggtctgtgcctgctggctctgcccgccgccgccgcttcctatttcggattgacggggcgggaagtcctgactccgttcccaggcctcggcacggctgccgcccctgcccagggaggagcgcatttaaagcagtgtgacttgttgaaactgtcacggcgacagaagcagctttgccgccgcgagccaggtctggccgagaccctgagagatgccgcacatctcggattactggagtgccaattccagttcagacatgaacgatggaactgctcgctcgagggtcggatgggtcttctgaagagggggttcaaggagaccgctttcctttatgccgtatccagtgctgcacttacgcataccctggcacgcgcctgtagcgccggtcgaatggagcgatgcacctgcgatgatagccccggactcgaatccaggcaggcatggcagtggggtgtgtgcggcgacaaccttaagtattcgactaaatttctgagcaatttcctggggagtaagagagggaataaggacctaagagcgcgggccgatgcacataatacccatgtcggtatcaaagccgtgaagtcgggccttaggaccacatgcaagtgtcacggcgtgtctggatcctgcgccgtgagaacctgctggaagcagctcagcccgttcagagagacaggacaggtactgaagttacgctatgattctgccgtgaaagtgtcgagtgccacaaatgaggccttggggcgtctggaactgtgggcaccggccagacaggggagtttaaccaaaggacttgcgccccgcagcggtgatcttgtttacatggaggattccccgtctttctgtaggccctcaaaatattctcccgggacagctggatggagcgctgtcgcaaggtcccaattaataacaacgtctacttcccggatccaagcaatacttccttcgcagctgcctgagtag

SEQ ID NO: 12651 - RNA, 579 nt, synthetic construct
  misc_feature 1..579: note = source = /note="Description of Artificial Sequence: Synthetic coding sequence"
  source 1..579: mol_type = other RNA
atgcggttagcagggcccgagagcagtgtgacggccgcccctcgagcaaggaaatacaaatgcggactccctcaaccatgtccagaagaacatcttgcctttcgggtggtgtctggggccgctaatgttatcggaccaaagatctgcttggaggacaagatgctcatgtctagtgtgaaggataatgtaggtcgcggattgaacattgcactcgtgaatggcgtctccggggagctcatcgaggcccgggcgtttgatatgtgggcaggagatgtcaacgatctacttaaattcatccgcccactgcatgaaggcactctggtatttgtagcgtcgtacgatgacccagctacgaaaatgaacgaggagaccagaaaattgttcagcgagcttggcagccgcaacgcaaaggaactcgcctttcgcgactcctgggtgtttgtcggagcaaagggcgtccagaacaaatcaccgttcgagcagcacgtaaagaatagtaagcatagtaataagtacgaaggctggcccgaggcacttgagatggaagggtgcatacctcgtaggagcacggctagttag

SEQ ID NO: 12652 - RNA, 1053 nt, synthetic construct
  misc_feature 1..1053: note = source = /note="Description of Artificial Sequence: Synthetic coding sequence"
  source 1..1053: mol_type = other RNA
atgaagtgcagtctgcgcgtttggtttttaagcgtggcattcctactggtgtttataatgagcctcctcttcacctactcccatcattcaatggccaccctgccttatttagacagcggggcgctggacggcacacacagagttaagctggtgcctggctacgctggactgcagcgactgtctaaagaacggctgagtggtaagtcatgtgcatgtcgacggtgtatgggcgatgctggcgcatcagattggttcgactcacatttcgacggaaatataagccccgtgtggaccagagaaaacatggatcttcctccagatgttcagcggtggtggatgatgctgcaaccccagtttaaatctcataatactaacgaggtcttagaaaaactgtttcaaatcgtgcccggagagaatccctataggtttcgagacccccaccaatgtaggaggtgcgctgtggttggaaatagcgggaacttgcgaggaagcggatacggccaagacgtagacggacacaatttcatcatgcggatgaatcaggcgcccacagtcggattcgaacaggacgtcggctcaagaactacgcaccattttatgtacccggagtccgccaaaaatttgcctgccaacgtgtcattcgttctggtgccgtttaaggtcctagacctgctttggatcgctagtgcccttagtacgggacagatcaggtttacctatgcccctgttaaatctttcttaagggtggacaaagagaaagtgcagatttataaccccgcattctttaaatacatccacgatagatggacggagcaccacgggaggtatccatctacaggcatgttggttctttttttcgctctgcatgtctgcgacgaggtaaatgtgtacgggttcggcgcagacagccgaggcaattggcaccactactgggagaacaataggtacgccggcgaattccgtaagaccggggtgcatgatgccgattttgaagcacacatcattgatatgctggcaaaggcttcaaagattgaggtgtaccggggcaactag

SEQ ID NO: 12653 - RNA, 189 nt, synthetic construct
  misc_feature 1..189: note = source = /note="Description of Artificial Sequence: Synthetic coding sequence"
  source 1..189: mol_type = other RNA
atgaagatccagctatttttttttattcttcatttctgggtcacaattctccctgcacggtcaaacttcgagcctaaataccgcttcgagagatgtgaaaaagtgagaggtatttgcaaaacgttctgtgatgatgtcgaatatgactatggatattgcattaagtggagatcccaatgctgcgtttag

SEQ ID NO: 12654 - RNA, 738 nt, synthetic construct
  misc_feature 1..738: note = source = /note="Description of Artificial Sequence: Synthetic coding sequence"
  source 1..738: mol_type = other RNA
atgacgctgttcccagtcctgctattcctggtggctggacttctccctagctttcccgccaacgaagacaaagatccagcttttaccgcactcctgacgacccagacccaggtccagagggaaatagtcaataagcacaacgagctccgccgcgctgtttctcctcccgctcggaacatgttgaaaatggagtggaacaaagaggcagccgccaacgcacagaagtgggcaaatcagtgtaactatagacactcgaaccctaaggaccggatgacctctctgaaatgcggcgagaacctgtatatgagcagcgccagctcaagctggtctcaggccattcagtcttggtttgacgagtacaatgatttcgacttcggagttggcccaaaaacgccgaatgcggtcgttggtcattacacacaagttgtttggtactccagctaccttgtaggttgtggcaatgcctattgtcctaaccaaaaagtgctaaaatactactatgtctgtcaatattgccctgcgggtaactgggccaacagattgtacgttccttatgaacagggcgccccatgtgcgtcctgccctgacaactgcgacgacgggctgtgcaccaacggctgtaagtacgaggacctttattccaactgtaaatcgctgaagctgactctcacatgtaaacaccaactggtaagagattcctgtaaagcatcctgcaattgctctaattctatctattag

SEQ ID NO: 12655 - RNA, 1341 nt, synthetic construct
  misc_feature 1..1341: note = source = /note="Description of Artificial Sequence: Synthetic coding sequence"
  source 1..1341: mol_type = other RNA
atgctacatccggagactagtcctgggagaggccacctcctcgctgtgttactggcactactgggaactgcttgggctgaggtgtggccccctcagcttcaagaacaggcccccatggcaggggcattaaatcggaaagagtcattcctgcttcttagcctccacaataggctacgatcctgggtccagccacctgccgccgatatgcggagactggactggtccgattctcttgcccaactggcccaggcgcgcgctgctttgtgcggtacgccaaccccctctcttgcctccgggttgtggcgcacgctccaggttggatggaatatgcagttgctccctgccggactcgtctcttttgtagaagtggtatccctctggttcgctgaaggccagcggtactcacacgccgccggggagtgcgccagaaatgctacttgcactcattatacacagcttgtttgggccacatcctcacaactgggctgtggacgtcacctatgctcagctggccaagcggctatagaagcctttgtctgtgcctatagccctcgaggaaactgggaagtaaacgggaagactatcgtgccttataagaaaggagcttggtgctcactatgcacagcctcggtgtcaggttgcttcaaggcatgggatcatgctggcggcttgtgtgaggttccgcgaaacccgtgcaggatgtcctgtcaaaaccatggacgtctcaatattagtacatgccactgccactgccccccaggctatacaggcaggtattgtcaggtccggtgctcacttcagtgcgtgcatggacgctttcgagaggaagagtgctcttgtgtttgtgacataggttatggcggagctcagtgcgcaactaaggtgcattttccctttcatacgtgcgacctgcgaatcgatggggattgctttatggtgtcaagtgaagcagacacctactacagagccagaatgaagtgccagagaaagggaggcgttttagcgcagatcaaatcccaaaaagtccaggacattctcgctttctacttggggcggttagagacaaccaatgaggtgattgattccgactttgaaactaggaacttctggattggattgacctacaagactgctaaggattcctttcgctgggccacaggggaacaccaggcatttacatcgtttgcatttggccaaccagacaaccatgggttcggtaactgtgtggagctgcaggcttccgctgcttttaattggaatgaccagagatgtaaaacccgcaatcgatatatatgccaatttgcacaagaacatattagccgttggggaccaggttcctag

SEQ ID NO: 12656 - RNA, 585 nt, synthetic construct
  misc_feature 1..585: note = source = /note="Description of Artificial Sequence: Synthetic coding sequence"
  source 1..585: mol_type = other RNA
atgaccatgcgccataactggactcccgatctgagcccgctttgggtgctcctactatgcgcccacgttgtaacacttctggtgagggccactccggtgtcacaaactactactgccgccaccgccagcgtgaggtctacgaaagatccatgtccttcacaaccccctgtgttccctgccgccaagcagtgcccagccctagaagtcacatggcccgaggtggaggtccccctgaacgggacgctttctctcagctgcgtcgcttgtagccgattccccaatttttctatcctatactggttaggaaatggttccttcattgagcatttgcccggaagattgtgggaaggctctactagtcgtgaacgtggctctaccggtacacaactgtgcaaagcactcgtactcgaacagctcacccccgcattacattcaactaacttcagctgtgtgcttgttgaccccgaacaagttgttcagaggcacgtcgttttggcccagctatgggctggcttaagggcaacactgcccccaacacaggaagcactgccctcatctcactcctcaccgcagcaacaaggatag

SEQ ID NO: 12657 - RNA, 585 nt, synthetic construct
  misc_feature 1..585: note = source = /note="Description of Artificial Sequence: Synthetic coding sequence"
  source 1..585: mol_type = other RNA
atgacaatgcgccacaattggacaccagaccttagccctctatgggtgctgctcctctgcgctcatgttgtgacactgctcgtacgggcgactcctgtatcccagacaacaaccgccgctaccgccagcgtaagatctacaaaagacccttgtccttcacagccgcctgtgttccccgccgccaaacagtgcccagcactagaggtaacatggcccgaggtggaggtgccacttaacggcacactgagtctatcttgcgtggcatgcagccgcttccctaacttcagcatcctttactggctgggcaatggcagctttatcgagcatctacccgggagattgtgggaagggtccacttcaagggaacgaggctctaccgggacccaattgtgcaaggcactcgtacttgagcagctgacgccagcgctgcattcaactaactttagttgtgtattggttgacccggaacaggtcgtgcagagacacgtcgtcctggctcagctgtgggcgggactgcgggctacattacccccaactcaggaagccttgcctagctcacattcttctccccagcaacaaggatag

SEQ ID NO: 12658 - RNA, 348 nt, synthetic construct
  misc_feature 1..348: note = source = /note="Description of Artificial Sequence: Synthetic coding sequence"
  source 1..348: mol_type = other RNA
atgactatgcgacacaattggactcctgacctctcaccattgtgggtgctcttactgtgcgctcatgtggttacccttttagtccgagcaactcctgtgagccagacgacaaccgcagctaccgcaagcgtacgaagtacaaaagatccatgccccagccagccacctgtgtttccagcggccaaacaatgtccggctcttgaggttacgtggcccgaggtggaggtgcctctgagctgggcggaaggaaacctagcaccacaccctcgctctccagctttacagccccagcagtcaaccgccgccggcctgagactcagtaccggtcccgcagctgctcagccatag

SEQ ID NO: 12659 - RNA, 528 nt, synthetic construct
  misc_feature 1..528: note = source = /note="Description of Artificial Sequence: Synthetic coding sequence"
  source 1..528: mol_type = other RNA
atgctccctcccatggcactcccctccgttagttggatgctgctgtcatgcctcatgctgctcagccaagtacagggggaagaaccacagcgcgaattgccatcagccagaattcgctgtcccaagggaagcaaagcttacgggagccactgctatgctctattcctcagccctaagagctggaccgacgcagacttagcatgtcaaaaacgacccagcgggaacctggttagtgtgttgtcaggcgccgaaggttcttttgtttcaagtttagtcaaatccattgggaatagctacagttacgtgtggataggccttcacgaccccacccagggaaccgagcctaatggcgagggctgggagtggagcagcagcgatgtgatgaattatttcgcatgggaaagaaatccaagcaccatctcgtctcccggtcactgcgcatcactttcccgatccaccgcattccttagatggaaggactacaattgcaacgtaagactgccctacgtttgtaaatttactgattag

SEQ ID NO: 12660 - RNA, 993 nt, synthetic construct
  misc_feature 1..993: note = source = /note="Description of Artificial Sequence: Synthetic coding sequence"
  source 1..993: mol_type = other RNA
atgggtaagctgtgtctaggcccaactctgtgtcctgctgcagctgccgaggaaagcagggatgctgagccccgccgtgaactcctctgttctggacgtccctggacctggagagccgctgcccgagtgacgaccatgattccctgggtgcttctggcatgtgctcttccttgcgccgccgatcctctgctgggagcgttcgcacgaagagatttccgcaaaggctctccccaacttgtatgctctctgcctggaccacagggacctcccggacctcccggggcccccggacccagcggcatgatggggcgtatggggtttcccggcaaggatgggcaagatggacacgacggtgataggggagatagcggagaggaggggccccctggccgcactggtaaccggggtaagccgggacccaagggaaaagctggcgccataggacgagctggcccaagaggtccaaaaggggttaacgggacaccagggaagcacggcacacctggcaaaaaggggcctaaggggaagaagggtgagcctggcctcccagggccttgtagctgtggatccggtcacacaaagtctgcattctctgtggccgtaactaaaagttatccaagagaaaggttaccaattaaatttgacaaaattctcatgaacgaaggtggccactataatgccagttccgggaaatttgtctgtggcgtcccaggcatctactatttcacttatgacatcaccctcgcaaataagcatctcgcaattggcctcgttcataacggtcagtatcgaataaggacattcgacgccaatacaggcaaccatgatgtcgcctcagggagtaccatactagccctgaagcagggcgatgaagtgtggctacaaatcttctacagtgaacagaatggactgttctacgatccttactggactgactctctttttactggcttccttatttatgcagatcaggacgatccgaatgaagtgtag

SEQ ID NO: 12661 - RNA, 390 nt, synthetic construct
  misc_feature 1..390: note = source = /note="Description of Artificial Sequence: Synthetic coding sequence"
  source 1..390: mol_type = other RNA
atgagactgctcctcctggtgccactgctgctagcacccgccccagggagctccgcccctaaggtgcgccggcaaagcgacacttggggcccatggtcacagtggtctccctgtagtagaacatgcggaggaggggttagctttagagagcggccatgctactcccagcgaagggacggaggatccagttgtgtgggtccagccagaagccacagatcatgccgcacagagtcttgccccgatggggccagagatttccgagcagaacagtgcgcagaattcgacggagctgagtttcaagggaggagataccgctggctgccatactatagcgcacccaataagtgtgaattgaattgtatacctaagggactcgggttgcagggctag

SEQ ID NO: 12662 - RNA, 1227 nt, synthetic construct
  misc_feature 1..1227: note = source = /note="Description of Artificial Sequence: Synthetic coding sequence"
  source 1..1227: mol_type = other RNA
atgttctcaaatgcaaactctagatcaaagatgtggctactactgacaatggcatcccttatttcggtgttggggacgactcacgggctttttggaaagctgcacccaggttcaccagaggtgacgatgaacatcagccagatgatcacctactggggatatcctaacgaagaatacgaagtcgtcaccgaggacggatatattttggaagttaacagaattccgtatggcaagaaaaacagcggtaacacagggcagagacctgtggtgttccttcagcacgggcttctagcgtcggcaacaaattggataagcaacttgcctaacaattctttggcattcattctggcggatgctggatacgacgtgtggctgggcaactccagaggcaacacctgggccaggcggaacctgtattactcccctgattcggtagagttctgggcattcagtttcgacgagatggccaaatacgatctgcccgcaaccatagattttatcgtgaaaaaaacaggccaaaagcagttacattacgtgggtcatagtcagggtacaactatcggatttatcgcatttagcaccaatcctagccttgctaaaagaattaaaactttctatgcgctggcccctgtcgcaactgttaagtataccaagtccctgatcaacaagctaaggttcgttccgcaatctctcttcaaatttattttcggagacaaaatcttctaccctcataacttttttgaccaattcctggcaactgaggtgtgtagccgcgagatgctaaaccttctctgttctaatgccttattcataatatgcggttttgatagcaagaactttaacaccagtagactagatgtgtatctgtctcataaccctgccgggactagcgtgcaaaatatgttccattggacacaggcagttaaatcaggaaaatttcaggcatatgactggggttccccagtgcagaaccgaatgcattacgatcaatcacagccaccctactataatgtcacagcgatgaacgtccctatcgctgtgtggaacggcggaaaggatctgttggctgacccgcaagatgtgggccttctcctgcccaaacttcctaatttaatttaccataaagaaattcctttctacaatcatcttgactttatctgggctatggacgctccacaagaagtgtataatgacattgttagcatgattagcgaggacaagaaatag

SEQ ID NO: 12663 - RNA, 393 nt, synthetic construct
  misc_feature 1..393: note = source = /note="Description of Artificial Sequence: Synthetic coding sequence"
  source 1..393: mol_type = other RNA
atggcatccgatttgattcggaccatcttagccgtggctttgatctccaagctaggcacagccgtagacgccgaattaatgccatcaggggccatactacaaaacaagcgcgagaacctcccccgcgtgtgtcatgcgctcgcatttctcggcatggctagatgtcaggatctctttctcgtccgtctacaggggtggaagttgggcacgagattccaggacggccctagatctacgccacaggaagaaggcgggagtccacaacgaaaacggggcatgccagtgcaaattcacttcctgctcaaatcattcttatcctcccctatcacctttgcctttatctcgttagcgcgtactgtgtctctcgccacagctatatgcaagatcgtgtag

SEQ ID NO: 12664 - RNA, 393 nt, synthetic construct
  misc_feature 1..393: note = source = /note="Description of Artificial Sequence: Synthetic coding sequence"
  source 1..393: mol_type = other RNA
atggcatccgacttaattaggacaattcttgccgtcgccctgatcagcaagcttgggacagccgttgatgccgagttaatgcctagcggagcaatcctgcaaaacaagcgagagaacctcccccgtgtctgtcatgccttagcctttctgggaatggctcgttgtcaggatttatttctcgtgcgcttacaaggttggaaattaggtacccgctttcaggacggtccaaggagcaccccacaggaggaaggtggaagcccgcagcgaaaaagagggatgcccgtgcagattcacttcctcttaaaatcttttctctcctctcctataaccttcgcttttatctcgttagccaggactgtcagcctggccaccgctatttgcaagattgtatag

SEQ ID NO: 12665 - RNA, 1731 nt, synthetic construct
  misc_feature 1..1731: note = source = /note="Description of Artificial Sequence: Synthetic coding sequence"
  source 1..1731: mol_type = other RNA
atgatagtgtttggctgggctgtgtttcttgctagtcgcagcctgggtcaggggctcctgcttactctggaggagcacattgcacatttcttgggtacgggcggcgccgcgactactatggggaactcctgtatctgcagggatgactctggaacagacgacagcgttgacacacagcagcagcaagcagaaaattctgcagtccctaccgccgatacccggtcacagccaagagaccccgtccgacctcccagacggggacggggcccacacgaaccaaggagaaaaaagcagaatgtcgatggtctggtgctggacactctcgctgtaatccgcaccttggtggacaatgaccaggagcccccctatagcatgatcacactgcacgaaatggctgaaactgacgaagggtggcttgatgttgtgcagtcactgattcgtgtaataccactagaggatccacttggcccggccgtgatcacactcctacttgacgaatgccccctgccaactaaagacgccctgcaaaagctcactgaaatcctcaatctcaatggtgaggtggcctgccaggattcctcccaccctgccaaacacagaaatacttccgctgtgcttgggtgcctcgcggagaaattagcagggccagcaagcatcggactgctatcgcctgggattctggaatatctgctgcagtgcctgaaacttcaatcacatcctacagtgatgctgtttgctttgattgccttagaaaaatttgcccagacctccgagaacaaactgactatatctgaaagttctatctccgatagactggtgaccctggagtcctgggccaatgatccagactatcttaagagacaggtgggtttttgcgctcagtggtccctggacaatctatttctgaaggaaggccggcaactgacgtatgaaaaggtgaatttgagctctattcgcgcgatgctgaattccaacgacgtctctgagtacctgaagatctcaccacacggacttgaggcgagatgcgacgcttccagcttcgagtcagtgcgctgcacgttttgcgtggacgccggagtgtggtactacgaagtgacggtggtgacctccggagttatgcaaattggttgggccacgagggacagtaagttcctgaaccacgagggatacgggatcggcgatgatgagtacagctgcgcgtacgacggatgccgccaactgatttggtataatgcaagaagcaaaccccatatacatccatgctggaaggagggcgacacggtaggattcttacttgacctgaacgaaaaacagatgatctttttcctcaatggcaaccagctaccaccagagaaacaagtgtttagcagcacagtatccggtttctttgcggccgccagctttatgtcttaccaacaatgtgaattcaattttggagcgaaacctttcaagtacccccccagcatgaaatttagcacttttaacgactatgccttccttaccgcagaggagaaaatcatcctgccacgccaccggagactagccctgcttaaacaggtcagtattcgcgagaattgctgctcactgtgttgtgacgaggtggctgatacccaactgaaaccatgtggacactcggacttgtgtatggattgcgcgcttcaacttgaaacatgccctctttgcaggaaggaaatcgtgtctaggatacggcagatcagtcacatttcgtag

SEQ ID NO: 12666 - RNA, 360 nt, synthetic construct
  misc_feature 1..360: note = source = /note="Description of Artificial Sequence: Synthetic coding sequence"
  source 1..360: mol_type = other RNA
atggcaaggcctggaatggaaagatggagggatagactggcacttgtcacaggggctagtgggggcattggggccgccgtggccagggcgctggtgcaacagggccttaaagttgtcggatgtgcccggacagtgggtaatatcgaagaactggcagctgaatgcaaatctgcagggtacccaggcactttgataccttatcggtgtgacttatcaaacgaggaggacattctatccatgttcagtgcaattcgctcccagcacagcggtgtggacatatgcatcaacaacgccgggttagctagaccagacactctacttagcggctccacttctggatggaaagacatgttcaactag

SEQ ID NO: 12667 - RNA, 144 nt, synthetic construct
  misc_feature 1..144: note = source = /note="Description of Artificial Sequence: Synthetic coding sequence"
  source 1..144: mol_type = other RNA
atgcaggtttctacagcagccctggcggtactgctttgcacgatggcattatgtaaccaggtcctgagcgctcctcaagccggccgttccgttctaacccctgtgcgctccgggtctcgtaatacatctgtgacatggtcctag

SEQ ID NO: 12668 - RNA, 159 nt, synthetic construct
  misc_feature 1..159: note = source = /note="Description of Artificial Sequence: Synthetic coding sequence"
  source 1..159: mol_type = other RNA
atgcaagtgtcaacagccgctcttgccgtcctactctgtactatggcgctctgcaaccaggtactgtctgctcctttatctaggcctcgtgaagccggacgcagcgttctcactccagttcgaagcggcagcaggaatactagcgtgacctggtcgtag

SEQ ID NO: 12669 - RNA, 1272 nt, synthetic construct
  misc_feature 1..1272: note = source = /note="Description of Artificial Sequence: Synthetic coding sequence"
  source 1..1272: mol_type = other RNA
atggagctggaactcatgccctttaacgtgctgctcaggactacccttgacctcctgcaggaaaaagatccagcccatatctttgccgaacccgtgaatcttagcgaagtgccagactatctggagtttatatcaaagccaatggactttagtacgatgagacgtaagctggagtcccatctctatagaactttggaagagttcgaagaggattttaatctgattgtgactaactgcatgaaatacaatgccaaagacacaatatttcatagagcagcagtgcgtcttcgcgatctaggcggagccattctgcgccacgcccgccgccaggcggaaaacatcggctatgaccctgagcggggaactcacctaccagagtcacctaagcttgaagatttctatcgcttcagctgggaggacgttgataatattttgatcccagagaatagggcacatcttagccccgaagtgcagctcaaggagctactcgaaaaactagacctcgtaagcgccatgcgatcgagcggagcacgcacccgacgagtccgactcctgcggagagaaattaatgcccttcgacagaagcttgcacagccccctcctccacagccaccctcattaaacaagactgtcagcaacggtgagctccccgcagggccgcaaggagatgccgctgtgctggagcaagccctgcaagaggagcctgaggacgacggcgatagagatgatagcaaattgccaccaccccctacccttgagcctaccggtcccgcaccgtctctgagtgagcaggaatcaccacccgaaccacctaccctgaaacccattaacgattctaaacctccctctcgcttcctgaaaccacggaaagtcgaggaagacgaactgctagaaaagagcccccttcagctaggcaacgaaccactgcaacgtctcctgagcgataacgggataaataggctgagtctcatggctcccgataccccggctgggactccacttagtggagtcggaagacgtaccagcgtgctgtttaagaaggcgaaaaacggagtgaaactgcaacgctcgccggatcgcgtgctcgagaatggcgaagaccacggcgtcgcaggctcacccgctagccctgccagcattgaggaagaaagacactctcgcaagagacccagatcacgcagctgttcagagtcagaaggcgagcggagtccccagcaggaagaggaaacaggaatgacgaatggctttggcaagcacagaaagcgcgtgtag

SEQ ID NO: 12670 - RNA, 3030 nt, synthetic construct
  misc_feature 1..3030: note = source = /note="Description of Artificial Sequence: Synthetic coding sequence"
  source 1..3030: mol_type = other RNA
atggggtcagggcgcgtgcccggcctttgccttttggtgcttctcgtgcatgcacgtgcagcgcagtactccaaagccgcccaggatgtcgatgagtgtgttgaagggacagataactgccacattgacgccatctgccagaatacgccacgctcctataaatgcatttgcaagtccggttacactggggacggaaaacactgcaaggacgtggatgagtgtgaaagggaggacaatgccggctgtgtccatgactgcgtcaatatccccggtaactacagatgtacttgctatgacggctttcatttagcacatgatggccacaactgtcttgatgtggatgaatgtgccgagggcaatggcggctgccaacaatcatgcgtgaacatgatgggcagttatgaatgtcactgccgggaaggcttcttcttgtcagataaccagcatacctgtatccagcgtcctgaggagggcatgaactgtatgaataaaaaccatggctgtgcacatatctgcagagagactccaaagggtggaatcgcttgcgagtgccgccccggctttgaactgaccaagaaccagcgagattgtaagctgacctgtaattatggtaacgggggctgccagcacacatgcgacgacacagagcaggggcctaggtgcggttgccatattaagttcgtgctacacactgacggcaaaacatgcatcggggagaggcgcctggagcagcatattccgactcaggcagtaagcaacgagacgtgcgcagtcaacaatggtgggtgtgatagtaagtgtcatgatgcagcaaccggtgtgcactgcacgtgtccagtggggttcatgctacagccagaccgtaaaacctgtaaggacatcgatgagtgccgtctgaacaacggggggtgcgatcatatttgtaggaataccgtgggaagctttgagtgcagctgtaaaaagggatacaagcttctaattaatgagaggaattgccaggatattgatgagtgtagtttcgaccgcacatgtgatcacatctgcgttaacacccccggcagtttccagtgtctttgccaccgtgggtaccttttatacggaattacacactgcggcgatgtcgacgaatgtagtattaatagaggaggatgccggttcggatgtatcaacacaccaggatcctatcaatgtacatgccctgccggccagggacgtctgcactggaacggcaaggattgcacagagccactcaagtgccaagggtcccccggcgctagcaaagcaatgctgtcctgcaatagatctggcaagaaagacacctgcgctttgacttgtccctcaagggcaagatttcttcccgagtcagaaaacggatttacagtctcttgtgggacaccctcaccacgggccgcaccagcacgtgcggggcataatggcaacagcacaaattctaaccactgccacgaagccgcagttctgtctattaagcagcgagcctccttcaaaatcaaggacgccaaatgtcggcttcatctgagaaacaaggggaaaactgaggaggcggggcgaattactgggcctggaggcgcaccctgctctgagtgccaggtcaccttcattcacctcaaatgcgatagcagtagaaaagggaaagggcggagggcccggaccccccccggaaaagaagtgactcgactgaccctggaactggaggccgaagtacgcgctgaggaaaccacagcctcctgtggtctcccctgtctccggcagcggatggaacggagacttaaaggctccctgaaaatgctgagaaaaagtatcaaccaggatagattcctgctgcgcctcgctggactggactacgaactggctcacaagccaggcctagtggctggtgaacgggctgagccgatggaaagctgccgccccggtcagcaccgagcaggtacgaaatgcgtatcctgcccacagggaacatattatcatggacaaaccgaacagtgcgttccatgccccgctggcacctttcaggaacgcgagggccagctttcctgtgacctgtgccccggatccgacgcacacggccctcttggagctaccaacgtcactacctgtgccggtcagtgccccccaggccaacattctgtggacggatttaaaccatgtcaaccctgcccgagaggcacttaccagccggaagccggacggacactctgtttcccttgcgggggggggttgactacaaagcatgagggcgcaatctcattccaagactgcgacacaaaggttcaatgttcccccggtcattactacaataccagcattcaccgatgcatcagatgtgcgatggggtcataccagcccgattttagacaaaacttttgttctagatgcccagggaacaccagtactgatttcgacggatccacttctgttgcccagtgtaagaatcggcaatgcggcggcgagctgggcgaatttaccggttacattgaatcccccaactatcctggtaattatcccgccggcgtggagtgcatatggaacattaacccaccaccaaaaagaaaaatccttattgtcgttcctgaaatattcctgccatcagaggacgagtgcggcgatgtgctggtgatgaggaagaattctagcccaagttccatcacgacctatgagacttgtcagacatacgagagacccatcgcgtttactgcaagaagcaggaagctgtggatcaattttaagacttctgaggccaattcagcacggggcttccagattccctatgttacctatgacgaagactatgagcagctggtggaagacatcgtgcgagatgggcggctgtatgcctctgaaaatcatcaagaaattctgaaggacaagaaactgattaaagccttctttgaagtgttagcgcatcctcagaattacttcaagtacaccgaaaagcataaggaaatgctgccaaaaagtttcattaagctgctgagaagcaaggtatcctcttttctgcggccttataaatag

SEQ ID NO: 12671 - RNA, 984 nt, synthetic construct
  misc_feature 1..984: note = source = /note="Description of Artificial Sequence: Synthetic coding sequence"
  source 1..984: mol_type = other RNA
atgactgccttggaactggccagacgcggggcaagagttgtcctggcctgccggagccaagagcgcggtgaggcagccgcctttgatctgcgccaagagagcggaaataatgaggtcattttcatggctctcgatcttgcttcactcgcaagcgtcagggctttcgctaccgcctttctctcatccgagcctagactggacatcttaatacacaacgccgggattagttcttgcggccggacccgtgaagcctttaacctactgttacgtgtaaaccatataggccccttcttattgacacacctccttctcccttgtttgaaagcatgcgcaccatctcgggtcgtagtggtagccagcgctgcccattgtcgcggtaggctggacttcaagagacttgatcgtcctgttgtgggctggagacaagagctgcgggcatatgccgacacaaagttagccaacgtcctttttgcaagagagctggctaaccaactggaagccacaggggtcacctgctacgccgcccacccaggcccagttaacagcgaattgtttctgcgccatgtgcccggttggcttaggcccctcttaagaccactcgcctggttggtgctccgcgccccccgtggcggcgcacaaaccccattgtactgtgccctccaggaagggatcgaacctctttcaggccgatatttcgctaattgccatgtagaagaagtgccccccgccgcgagggacgatcgggcggctcataggttatgggaagcttccaagcggctcgccggtctcggtcctggcgaagatgctgagcctgatgaagatccccagtcagaagattccgaggctccctccagcttgagcaccccacatcctgaggagcctaccgttagtcaaccctaccctagcccccagagcagccccgatttatcgaagatgactcatcggattcaagcgaaggttgagccggagatccagctctcttag

SEQ ID NO: 12672 - RNA, 1320 nt, synthetic construct
  misc_feature 1..1320: note = source = /note="Description of Artificial Sequence: Synthetic coding sequence"
  source 1..1320: mol_type = other RNA
atgccagccatcgccgttcttgccgctgcggcagctgcatggtgtttcctgcaagtggagtctaggcacctggatgctctagcaggtggcgccgggcccaaccatggcaattttctggataacgatcagtggctaagcacggtctctcagtatgatagggacaagtactggaatcgcttccgcgatgatgactactttagaaattggaacccaaacaagccctttgatcaagccctcgacccctcgaaggatccatgtttaaaagtaaagtgttccccacataaagtatgtgtcacacaggattaccagaccgccctgtgcgtcagccggaaacatctcctgcctagacaaaagaaaggcaacgtggcccagaagcattgggtgggcccatccaatttagtgaagtgcaagccatgccctgtggctcagtcagcaatggtatgtgggtcagacggccacagctacacatccaaatgcaaactagaattccatgcttgttcgaccggtaaatctctggcaacactctgcgacggcccttgtccttgcttgcccgagccagaaccgccgaaacacaaggccgagcgatctgcatgtaccgacaaagagctacggaacctggcctctaggttgaaggattggtttggcgcactgcacgaggacgctaacagggtgatcaaaccgacctcttccaacactgcacagggccgtttcgacacaagcattcttccaatatgtaaagatagcttgggctggatgttcaataagctggacatgaactacgatctcctgttagatccctcagagatcaatgctatctatctagataaatacgaaccttgtatcaaaccgttgttcaattcgtgtgattcttttaaggacggtaaactttctaataacgaatggtgctactgttttcagaaacccggcgggcttccatgtcaaaacgagatgaataggatacaaaagctgtcaaagggcaagtcccttctgggcgccttcatcccgaggtgcaacgaggagggctattacaaggccactcagtgtcacggctcgaccggtcagtgctggtgcgtggacaagtatggcaatgagttagccggaagtagaaaacagggggccgttagctgcgaggaggaacaagagacttccggggattttggttcagggggttcggtggtactgctagatgacttggagtatgagagagagctgggacccaaagataaagaagggaaacttagagtgcatacacgcgctgttactgaggacgacgaggatgaagatgatgacaaggaagatgaggtgggctacatctggtag

SEQ ID NO: 12673 - RNA, 3687 nt, synthetic construct
  misc_feature 1..3687: note = source = /note="Description of Artificial Sequence: Synthetic coding sequence"
  source 1..3687: mol_type = other RNA
atgaagggcgccagactctttgtccttttatcctcactctggagtggcgggataggcctgaataactctaaacacagctggaccatccccgaagacggcaatagccagaagaccatgccatctgccagtgtaccacctaataagatacagtctctgcagatccttcccacaacccgcgttatgagcgccgagatcgctacaactcctgaggctcggacgagtgaggatagcttgctgaagtctaccctgcccccatcagagacatctgctcctgcagaaggcgttaggaaccagacgctcaccagcacagaaaaggctgagggcgtggtgaaactgcagaatttgacactccccacgaatgcatctattaagttcaatccaggtgctgagtccgtggtcctgagtaattctacactgaaattcttacaatctttcgccaggaaaagtaacgagcaggcaacgtccctgaacaccgtgggcgggacaggagggatcggaggggtgggcggtacaggcggggtgggcaacagggcacccagggaaacatatctctcccggggcgatagctcttcctctcagcgtaccgactaccagaagagcaactttgagaccacccgcggtaagaattggtgtgcttatgtgcacactcgactgtcacccacagtcattctggataatcaagtgacctacgtccctggaggaaaagggccttgtggctggaccggcgggagctgcccacagcgcagtcagaaaatatccaatcccgtttacaggatgcagcacaaaatcgtgacttctctggactggcggtgttgccccggatactcaggccctaaatgtcagcttcgggcccaggaacagcagtcacttatccacactaaccaagcagaaagtcacaccgccgttggccgtggcgtagccgaacagcagcagcagcaaggctgtggggaccccgaagttatgcagaagatgacggatcaagtgaattaccaagctatgaagctgaccctgctgcagaagaagatcgacaatatcagtctcacagtgaacgatgtccgaaacacctatagctccctggagggcaaggtttccgaggacaagagtcgggaattccagagcttgctgaaaggactgaagagtaagtccatcaacgtcctgataagagacatcgtgcgcgagcagttcaaaattttccaaaatgatatgcaggagactgtggcccagctctttaaaactgtgagtagcctatctgaagaccttgagtcgacccgccaaatcatccaaaaggttaacgagtcagttgtgagcattgcagcccagcaaaaattcgtgctggtacaggaaaaccgccctactctcacagacattgtggagcttcgtaaccacattgtgaacgtgcgccaggaaatgacccttacatgcgaaaaacctattaaagaactcgaggtcaagcaaacccatctggaaggagcccttgagcaggaacacagccggtcaatactgtattatgaatccttgaataagacccttagtaaacttaaagaagtgcacgagcagttgctgagcacggaacaagtcagcgaccaaaagaatgcccctgcagcagagtcggtctctaacaacgttaccgagtatatgtctactttacatgagaacattaaaaagcaaagcttgatgatgttgcaaatgtttgaagacctgcatatccaagagtctaagataaataatctcacagtttcacttgagatggagaaagagtctcttcgcggcgaatgtgaagacatgttgagtaagtgtcgaaacgattttaaatttcagctcaaagacacagaagaaaatttgcacgtccttaatcagacgctggccgaggttttattcccaatggacaacaaaatggataagatgtcggaacaattaaatgatctgacatatgacatggaaattctgcagccactgttggagcagggcgcttccttgcggcaaacaatgacttacgaacagccaaaagaggccatcgttatccggaagaagattgaaaatcttacatctgctgtgaattccttgaactttatcattaaagagctgaccaaacggcacaatttgttgaggaacgaggtccaggggcgcgacgacgccttggagagacgcattaatgaatacgcccttgaaatggaagacggcctgaataagaccatgacaattatcaacaatgctattgatttcattcaagacaactacgcactcaaagagaccctgtccacgattaaagataattccgaaattcatcataaatgtacttccgacatggagactatcttaacattcatccctcagtttcatcggttgaacgactcgatacaaaccctggtgaacgataatcagagatataattttgtcttacaagtcgcaaaaacacttgccggcatcccacgcgacgaaaaactaaaccagtcaaatttccagaaaatgtatcagatgttcaatgagactaccagccaggtgcgcaaataccaacagaacatgagtcacctggaggagaaattgctgctgactactaaaatctccaaaaattttgaaactagacttcaggacattgagtctaaggttactcaaaccctcatcccatattatatctccgtcaagaagggctcagtggtgactaatgaaagagatcaggcattgcaactgcaagtgcttaactctagatttaaggctcttgaggccaagagtatacacctaagtattaactttttctccttgaataagaccctgcacgaggtccttactatgtgccataacgcaagtacctccgtctccgaactgaacgcaacgatacctaaatggatcaagcactccctgcccgatattcagttgctgcagaagggactgaccgagtttgttgaacctatcatccagataaagactcaggcagctctttccaatcttacatgttgtattgacaggagtttacccggttcgctagcaaacgtggtgaagagccagaagcaagtcaaatccttgccaaaaaagatcaacgccctgaaaaaaccaactgtaaacctgactactgtcctgattggacgcacccaacggaacacagataacattatctatcctgaggaatacagcagctgcagccggcatccgtgccagaacggcgggacttgcatcaatgggcggacctctttcacgtgtgcttgtcggcaccctttcaccggcgacaattgtactatcaaactggtggaagagaatgcgctagctcccgatttttctaaaggatcatataggtatgcaccaatggtcgctttcttcgcaagccacacttacggcatgaccatcccaggcccaatactgtttaataacctcgatgtcaattacggagcatcttatactcccagaacagggaagttccgcataccatatctgggtgtctatgtttttaagtacaccatcgagtcctttagtgcacacatatccggatttcttgttgtggacggaatcgataaactggccttcgagtcagaaaatattaattccgagatccattgtgatagagttctaaccggggacgcactgctggagttaaactatgggcaagaagtgtggctgagattggcgaagggtacaatacctgcgaagttcccaccagtaacaacattctctggttaccttctgtaccggacatag

SEQ ID NO: 12674 - RNA, 1596 nt, synthetic construct
  misc_feature 1..1596: note = source = /note="Description of Artificial Sequence: Synthetic coding sequence"
  source 1..1596: mol_type = other RNA
atgaaaggggcccggctgtttgtgctgctctctagcctgtggagcgggggtatcggtctgaataatagcaagcactcttggaccataccggaagacggtaacagccagaagaccatgccctctgcatcagtgccccccaacaaaatccagtcccttcagattctcccaaccacaagggtgatgagtgccgaaatcgcaacaacaccagaaaaggcggagggggtcgtgaagttgcagaacctgactctccctactaatgcttctatcaagttcaatcctggcgccgagagcgttgttcttagtaactctacactgaagtttctgcaatccttcgctagaaagagtaacgagcaggcgacttccctgaacaccgtgggcggcacagggggtatcgggggggtgggaggaacaggtggcgttgggaacagagcaccacgcgagacatacctgtcaaggggagactcctcctcctcacagcgaaccgactaccagaaaagtaatttcgagaccactcggggaaaaaattggtgcgcttacgtgcataccagactgtcacccaccgtgatactggacaatcaagtaacatatgtaccaggtgggaaggggccttgcggttggactggggggagttgccctcaacgatcccaaaagattagtaatcccgtctacagaatgcaacacaaaattgtcaccagccttgactggcgatgctgccccggatatagcggccctaagtgtcagttgagggcacaggaacagcaaagtttaatccacacaaatcaggctgaatctcacacagcagtgggcagaggagtggcagagcagcagcagcagcaaggatgtggcgaccccgaggtgatgcagaagatgactgaccaagtgaattatcaggccatgaaactaacacttctgcagaagaagatcgacaacatttctttaaccgtaaacgacgtacggaatacatacagctccctcgagggcaaggtaagcgaggacaagtcaagggagtttcagagtctcctaaaggaagagtactctagctgttcccggcatccatgccagaatggcggaacctgcatcaatggccgtacatcctttacctgcgcctgtaggcacccctttactggcgataattgcaccattaagctggtcgaagaaaatgcccttgccccggacttcagtaaaggatcttaccgctacgcacctatggtagccttttttgcttcccacacttacggcatgacaataccagggcctatcctgttcaacaatctggacgtgaactacggagcttcatacacccctcggacaggcaaattccgcattccctatctgggtgtttacgtgtttaagtataccattgaaagcttttctgcgcatatctccgggttcttggtggtagatgggattgacaaactcgcatttgaaagcgaaaacattaacagcgaaatccactgcgatagggtgcttaccggcgatgcattgttagaattgaattatggtcaggaagtctggctccgccttgctaaagggaccatacccgccaagtttcctcctgtaactaccttcagcggatacctgctttaccggacctag

SEQ ID NO: 12675 - RNA, 942 nt, synthetic construct
  misc_feature 1..942: note = source = /note="Description of Artificial Sequence: Synthetic coding sequence"
  source 1..942: mol_type = other RNA
atgagtgacctgttgctgctcgggctgatagggggtctcaccctattgctgctcctgacccttctcgcttttgcaggctactctggactcctggccggtgttgaagtgtctgccggcagcccccccatccgcaatgttaccgtggcttataagttccacatgggcctttatggcgagaccgggcggttgttcactgaatcatgcagcatttcacccaagctccgttctatcgccgtgtactacgacaatcctcacatggtgcctcctgacaaatgcaggtgtgcagtgggctccatcctgtcagagggagaggagagtccctctcctgagttaatcgacctgtatcaaaagttcggttttaaagtgttttcgttcccggccccctctcacgtcgtgaccgccacctttccatacacaactatcctgtccatctggttagcaacgaggagagttcaccccgctctagatacttatattaaagaaagaaagctttgcgcctatccgcgcctagagatctatcaggaagaccagattcacttcatgtgtcctctagctagacaaggagacttttacgtccccgagatgaaagagactgaatggaagtggagagggctggttgaggcaatagatacccaggtagatgggaccggggcagacaccatgtcagatacaagtagcgtgagtcttgaggtgagcccaggatctcgcgagacctccgccgccactctctcaccaggagcttcgtctagaggctgggatgacggcgacacccgaagtgagcacagctatagcgaatccggagctagtggttctagctttgaggagcttgatcttgaaggagaagggccccttggcgaatcaagattagatccaggcacggaaccactgggcacaactaagtggctatgggaacccactgctcctgagaaaggaaaagagtag

SEQ ID NO: 12676 - RNA, 834 nt, synthetic construct
  misc_feature 1..834: note = source = /note="Description of Artificial Sequence: Synthetic coding sequence"
  source 1..834: mol_type = other RNA
atgtgtacggtggttgatcctcgaattgttcgtcgatacctcctgaggagacagctgggccagggggcatatggcattgtctggaaagcagtggatcggcgcactggagaagtggtcgccattaagaaaatattcgatgcttttcgcgataagaccgacgcccaaagaacctttcgcgagatcactctgctccaagaatttggcgaccatccaaatattatctcattgttggacgttattagagcagagaatgaccgcgacatctatctcgtgtttgaatttatgggatgtcccccctcacctccccctcccactgccgtccggactctgtctgcagataccgatttgaatgccgttattaggaaagggggactgcttcaagatgttcacgtgagaagtattttctaccagctattaagagccacaagatttttacattccggacatgtggtgcaccgggatcagaaaccgagtaatgtactcctggacgctaattgcactgtcaaactctgtgattttggccttgccagatctttaggcgaccttccagaaggccctgaagaccaggccgtgaccgagtatgtggccacgagatggtaccgggcccccgaagtcctgctgagcagccacagatacacgctgggagtggatatgtggtccctgggatgtatactcggagagatgctccgtggaagacccctgtttcctgggacctctaccttacatcagctagagctaattctagaaactatcccaccaccctctgaagaagatttgcttgcccttggtagcggctgccgagcctcggtgctccaccaactgggctctcgatag

SEQ ID NO: 12677 - RNA, 765 nt, synthetic construct
  misc_feature 1..765: note = source = /note="Description of Artificial Sequence: Synthetic coding sequence"
  source 1..765: mol_type = other RNA
atgtgcacggtcgtggacccgcggattgtacgccgatacttgctgagacgccagctcggccaaggcgcttacggaatcgtttggaaagcggttgatagaaggacaggagaggttgtggccattaagaagattttcgacgcgtttagagataagacagatgctcagcgaacatttagagagatcacattgctccaggagttcggcgatcaccccaacatcatcagcttactagacgtcattagggcagaaaatgatcgggatatttatttagtatttgagtttatggacactgaccttaacgccgtcatccggaaaggtgggcttctccaggatgtacatgtgaggtccattttctatcagttacttagagcaacacgctttctgcactctgggcatgtggtacacagggaccagaaaccctcgaacgtcctgcttgatgctaattgcacagtcaaactctgcgattttggactcgccagatctcttggggatctccccgaaggacccgaagatcaggccgttaccgagtacgtggcaacacggtggtatcgagcaccagaggtattattatccagccacaggtacacgcttggcgttgatatgtggagtctggggtgtatacttggcgaaatgcttcgtggtaggccactctttcctggtacatccactctgcatcagctggagcttattctggagactattcccccccctagcgaggagggggctcagaccgcttgcagaagcggaacaggagcatcaacatag

SEQ ID NO: 12678 - RNA, 474 nt, synthetic construct
  misc_feature 1..474: note = source = /note="Description of Artificial Sequence: Synthetic coding sequence"
  source 1..474: mol_type = other RNA
atggctctcctgctgtgcctcgtatgcctcacagcagcacttgcccatgggtgtctacactgtcatagtaacttttcaaaaaagttcagtttctataggcaccatgtgaatttcaagtcctggtgggtaggcgacatccccgtgtctggcgccctgctgacagattggagcgacgacactatgaaggaactgcacttagctattcccgcaaagattacacgagaaaagttggaccaggttgccacagcagtatatcaaatgatggatcaactataccaagggaagatgtactttcccggctacttcccaaacgagctaagaaacatattcagagagcaagtccatctgattcagaacgcaataatcgagagacatcttgctccgggctcctgggggggcggtcagctcagcagagagggacccagcctggcccccgaaggatccatgccaagtccccgaggagacctgccctag

SEQ ID NO: 12679 - RNA, 699 nt, synthetic construct
  misc_feature 1..699: note = source = /note="Description of Artificial Sequence: Synthetic coding sequence"
  source 1..699: mol_type = other RNA
atggctctgctgctgtgtctcgtgtgtcttactgcagctctagcccatggttgcttacattgtcacagtaacttttctaaaaaatttagcttttacagacatcatgttaacttcaaatcgtggtgggttggcgacatcccagtctccggggccctgttaaccgattggtcagacgacactatgaaggaactgcacctagccatcccagcgaagataactcgggagaagcttgaccaggtggcaacagcagtttatcagatgatggatcagctgtaccagggcaaaatgtattttccgggttatttccccaatgagctgagaaatatttttcgcgagcaagtccatctaattcagaatgccatcatcgagtctcggatcgattgtcagcaccgctgtggcatttttcagtacgaaacaatctcttgcaataactgcaccgattcccacgtagcctgcttcggttataattgcgagtctagtgctcagtggaagagcgccgtgcaggggcttctgaactacatcaataactggcacaagcaggacacatccatgagacccaggtcctccgcattttcctggcccggcactcatcgggctaccccagcattcctggtatcgccagcgctcagatgtctagaacctccacacctggcaaacctaacccttgaagacgctgccgagtgcctcaaacagcactag

SEQ ID NO: 12680 - RNA, 396 nt, synthetic construct
  misc_feature 1..396: note = source = /note="Description of Artificial Sequence: Synthetic coding sequence"
  source 1..396: mol_type = other RNA
atgggaggtgatggccgatacgttttgaacggacactgggtcgtttccccacctggaacttacgaagctgccggcacccacgtggtctacactagggacacgggcccccaggagacgctgcaggctgctggtcctacctcacatgatttactccttcaggtcctgcttcaggaaccgaatcccggaatcgaatttgaattttggttgccacgagagagatatagcccattccaagcccgggtgcaggctctgggatggcccctgcgacaacctcagccacgcggagtagaaccccagccccctgcagctcctgcggttacccccgcacagacccccacgctcgctccagggccctcagccggaccaccaccacctggtccaggagatcccctgtag

SEQ ID NO: 12681 - RNA, 447 nt, synthetic construct
  misc_feature 1..447: note = source = /note="Description of Artificial Sequence: Synthetic coding sequence"
  source 1..447: mol_type = other RNA
atggccaggatcccaactgccgccctaggttgtatatcactcctctgcctgcagctgcctgggtctctgtctcgctctctcggcggcgacccccgtccggtaaagccacgcgaacctccagccaggtccccttcttcatctctccagccccgacatcccgcaccccgacccgtggtgtggaaattgcacagagccctccaagctcagcgaggagccggccttgcccctgttatgggccagccactccgcgatggcggacgacaacactcagggccccgtagacattctggaccgcgacgaacccaagctcagctgctaagagttgggtgtgtgctcgggacctgccaagtccagaatctaagccatcggttgtggcagttaatggggcccgctggcaggcaagacagcgctcccgtcgacccatccagcccacactcctacggttag

SEQ ID NO: 12682 - RNA, 447 nt, synthetic construct
  misc_feature 1..447: note = source = /note="Description of Artificial Sequence: Synthetic coding sequence"
  source 1..447: mol_type = other RNA
atggcgcggatcccaactgccgcactggggtgtatttccctcctctgcctccaactccccggttctctttccagaagtttagggggggacccccgaccagtgaagcctcgcgagcctccggcacgctcaccctcctcatcgcttcagcctagacatcccgcccccagacccgttgtctggaaactccacagagccctgcaggcccagcgaggcgccggactcgcacccgtcatgggtcagcctttacgagacggtggtaggcagcattccgggccccgacgacatagtggcccccgcagaacacaggcccaactcttgcgcgtgggctgcgtgttaggtacctgccaggtccaaaacctctcacatcggctgtggcagctgatgggaccagcggggagacaagactccgctcccgtagacccatctagccctcactcatacggatag

SEQ ID NO: 12683 - RNA, 537 nt, synthetic construct
  misc_feature 1..537: note = source = /note="Description of Artificial Sequence: Synthetic coding sequence"
  source 1..537: mol_type = other RNA
atggatcgggccgccaggtgcagtggcgcgtcttctctgcccttactccttgctctcgcattgggactggtgattctccattgtgtcgtcgcagacggaaatagtacccgttctccagagacaaacggactcttatgtggtgaccctgaagaaaactgtgccgccacaactacacagtctaaaaggaagggccattttagtcgctgtcccaaacagtataagcactattgcataaaaggccgttgcagatttgtagtggcagaacagacgccttcttgcgtgtgcgatgaggggtacattggagccaggtgtgaacgcgttgatttattttaccttcggggagaccggggacaaattctggtcatctgtctgatcgcagtcatggtggtctttataattcttgttattggcgtgtgcacatgctgccacccccttcgtaagagacggaagagaaaaaagaaagaagaagagatggagaccttagggaaggacatcacacctatcaacgaagacattgaagagaccaacattgcctag

SEQ ID NO: 12684 - RNA, 1251 nt, synthetic construct
  misc_feature 1..1251: note = source = /note="Description of Artificial Sequence: Synthetic coding sequence"
  source 1..1251: mol_type = other RNA
atgagtatctctctgtctagccttatccttctgccgatttggatcaatatggcccagattcagcaaggcggtccagatgagaaagaaaagacgaccgcactgaaagatctgctgtctcgaatcgacctggacgagctgatgaaaaaagacgagccgccccttgactttcctgacactctagaaggatttgagtacgccttcaatgaaaagggacagctccggcacatcaaaaccggggagccctttgtgtttaactatcgcgaagacctgcacagatggaaccagaaacgttatgaagcactgggggagattatcacaaaatacgtctatgaactgctagaaaaggactgtaatcttaagaaggtaagtattccagtggatgctaccgaaagcgaacctaaaagtttcatcttcatgtctgaggacgctctgaccaatccccaaaagttgatggttctgatccacggatccggagtggtgagagcaggacagtgggcgcggaggctgatcattaacgaggacctggattctggcacacaaatcccctttattaaacgggccgttgccgaagggtacggtgtcattgtgctcaaccccaatgagaactacatcgaagtggagaagcccaaaatccacgttcagtccagcagcgattcctcagatgagcctgcggagaaacgggaaagaaaagacaaggttagcaaagaaaccaaaaaaaggagggatttttatgaaaaatatcgcaatccacagcgggaaaaggaaatgatgcaactgtatatccgcgagaacgggtcccccgaagaacacgccatatatgtctgggaccacttcattgcacaggctgctgcagagaatgtattcttcgtcgctcacagctatggtggtctggcttttgtggagctcatgatccagcgggaagctgacgtcaaaaacaaagtcacagctgtagctctaacagactccgtgcataatgtgtggcatcaagaagccgggaaaacgatccgagaatggatgagggaaaactgctgcaactgggtgagttccagtgagccgctagatacatccgtcgaatccatgctgccagactgtccacgggtgtccgccgggacagatcgccacgagctgacaagctggaaatcctttcctagcatcttcaaattcttcaccgaggcatccgaggcaaaaacaagttcacttaaaccagccgtgactagaagaagccatagaatcaaacacgaagaactctag

SEQ ID NO: 12685 - RNA, 840 nt, synthetic construct
  misc_feature 1..840: note = source = /note="Description of Artificial Sequence: Synthetic coding sequence"
  source 1..840: mol_type = other RNA
atgaagattatcatcctgttgggatttctaggagcaaccctctccgcgcccctgattcctcagagattgatgagtgcgagcaatagcaatgagctcctgcttaatctgaacaacggccaacttctcccattgcagctccagggaccacttaatagctggatcccccccttttctgggattttgcagcagcagcaacaagcacaaatccccgggcttagccagtttagtctctcggccctggaccagttcgcagggctcctccccaaccagatccctctgactggtgaagcttcattcgcccagggagctcaggctggccaggtggatccactgcaactgcaaaccccccctcagacccagcccggtccttcccatgtcatgccctacgtcttctcattcaaaatgccgcaagaacagggacagatgttccagtactaccccgtctacatggtcctcccatgggaacagccccagcagaccgtcccccgttccccccagcagaccagacagcaacaatatgaggaacaaatccccttctacgcccagttcggttacatacctcaacttgcggaaccagcaataagtggtggacagcagcaacttgcattcgacccacagttgggcactgcccctgagatcgccgtaatgagcaccggagaagaaatcccatacttacagaaagaagctattaactttcggcatgactcagccggagtgtttatgccaagcacttcaccaaagccatcaaccacaaatgtgtttacctccgctgttgaccagaccataacacccgagttgccagaagaaaaggataagacagatagtttgagagaaccatag

SEQ ID NO: 12686 - RNA, 444 nt, synthetic construct
  misc_feature 1..444: note = source = /note="Description of Artificial Sequence: Synthetic coding sequence"
  source 1..444: mol_type = other RNA
atgggccctgaagcactctcgtctctgctcttattattactggtggcttctggcgatgctgatatgaagggccacttcgatcccgccaaatgtaggtatgcactgggaatgcaggaccgtaccatcccagactccgatatttcggcctctagtagttggtcagattcgactgccgctagacattctaggctagagtcttcagatggggacggggcatggtgtcccgccggcagtgtgtttcccaaggaagaagagtatttacaggtggatttacagagactgcacttagtagcattggtcggtacacagggaaggcatgcaggtgggctaggcaaggaatttagtcgctcataccgcctacggtacagccgagacggccgcagatggatggggtggaaagaccggtggggccaggaggttatctccgggaacgaggacccctag

SEQ ID NO: 12687 - RNA, 618 nt, synthetic construct
  misc_feature 1..618: note = source = /note="Description of Artificial Sequence: Synthetic coding sequence"
  source 1..618: mol_type = other RNA
atggggggcccagtgagagagcccgccctgagcgtcgctctctggttatcttggggggctgcactgggagctgtggcatgtgctatggctctgttgacccagcagacggaattgcagagtctaaggcgggaggtgagtcgactccagggcaccggcgggccaagtcagaacggagagggatacccatggcagtcactccccgagcagcactcagtccttcacttggttcccataaatgcaacaagcaaggatgattctgacgtcacagaagtcatgtggcagcccgcactccgacgagggcgaggtcttcaagcccagggctacggagtccgaatccaggacgcgggggtttatctgctctattctcaagtgttattccaggacgtgacctttacaatgggacaggtcgtatctcgggaaggccagggaagacaggagaccttattccgatgtattagaagcatgccctcccaccctgatcgggcctataacagctgctattcagctggtgttttccatctgcatcaaggcgacatcctgtccgtaataatacctagagcccgcgcaaagctcaatctgtccccgcacggcacttttttgggattcgtgaaactttag

SEQ ID NO: 12688 - RNA, 744 nt, synthetic construct
  misc_feature 1..744: note = source = /note="Description of Artificial Sequence: Synthetic coding sequence"
  source 1..744: mol_type = other RNA
atgcctgcctctagcccattcctacttgctccaaaaggacctcccgggaacatgggtgggccagtgcgcgaacctgcattgagtgtagcgctttggctttcctggggagccgccttgggggccgtggcatgcgcaatggccttactaactcaacaaacagagctccagagtctgcgaagagaggtgagtcggctacagggaactggcgggccctcacagaacggagagggctatccctggcaatccttacccgagcagagcagcgacgctctcgaagcctgggagaacggtgaaagatctcgcaaacgtcgtgctgtcctgacccaaaagcagaagaaacaacactccgtccttcaccttgtgcccatcaatgcgacctccaaagacgatagcgacgtcaccgaagtgatgtggcagcccgcactccgacgcggtagggggctgcaggcccagggttatggagttcggatccaggatgctggagtttatctgttatattcacaggtgttgtttcaagacgtgactttcacgatgggacaagttgtttccagagaaggccaaggacggcaggaaacgctgttccgctgtattcgaagcatgccatcacatcccgatcgcgcctataactcctgttactcagcaggagtgtttcatttacaccaaggagacattctatcagtgattatcccgcgggccagagcaaagttaaatctgtctccacacgggactttcctgggcctgtag

SEQ ID NO: 12689 - RNA, 39 nt, synthetic construct
  misc_feature 1..39: note = source = /note="Description of Artificial Sequence: Synthetic coding sequence"
  source 1..39: mol_type = other RNA
atgggcaaaagtgaaagtctccaatccttacagcggtag

SEQ ID NO: 12690 - RNA, 4266 nt, synthetic construct
  misc_feature 1..4266: note = source = /note="Description of Artificial Sequence: Synthetic coding sequence"
  source 1..4266: mol_type = other RNA
atgatgctccctcagaattcttggcacattgatttcggccgctgttgttgccatcagaacctgttcagtgctgttgtcacttgcatcctactcttgaatagctgcttccttatcagctcttttaacggaacagacctggaactgagactcgttaatggcgatgggccatgttcgggaacagtggaagtgaaatttcaagggcagtggggcacagtttgcgatgacggatggaacaccactgctagtactgtggtttgtaagcaattggggtgtccattttcttttgcgatgttcaggtttggacaggcagtcacaagacacgggaaaatctggcttgatgatgtctcatgctatggcaatgagtcagccctgtgggagtgccagcaccgggagtggggaagccacaattgttatcatggcgaggatgtgggagtgaactgctatggcgaagcaaacctgggactgaggcttgtggacggtaacaactcttgttcaggaagagttgaagtgaaatttcaagaaaggtggggcaccatttgcgatgatggttggaatctgaacactgctgccgttgtttgccgccagctgggctgccctagttcctttatcagcagcggagtagtgaatagtccggccgtacttcgccccatttggttggacgacatcttgtgccaggggaatgagttggctttgtggaattgtaggcaccgcggctggggcaaccacgactgtagccataatgaagacgtgaccctcacatgctatgatagctccgacctcgaactaaggcttgtcggcggcacgaataggtgcatgggaagagtggaactcaagatacagggacgatggggtaccgtctgtcaccataaatggaacaacgccgctgccgatgtcgtttgcaaacagctgggttgcggcaccgcgctgcacttcgccggactcccacacctccagagtggctccgatgtcgtgtggcttgatggagtgtcttgctcgggtaatgaaagttttctgtgggactgtcgccattctgggacagtgaattttgattgtctccatcaaaacgatgtgagcgtcatctgcagcgacggggcagaccttgagctgaggcttgctgatggctccaataactgtagtggaagagtggaggttcggattcacgaacagtggtggactatatgcgaccaaaattggaagaacgagcaggcgctggtggtatgcaaacaactggggtgtccattcagcgtgtttgggtctcgaagggctaaaccaagcaatgaggcccgcgacatctggattaatagcatatcctgcaccggtaatgagtctgctctatgggactgtacgtatgatggcaaagcaaagagaacgtgctttcgcagaagtgatgccggagtaatatgttccgacaaagcggacttggacttgcggttagtcggcgcacactctccatgctatggaagactggaagtaaaatatcagggtgaatggggtacagtttgccacgaccggtggtcaacacgcaatgctgccgtagtgtgtaagcagttaggatgcggcaagccacttcacgtgtttgggatgacctactttaaggaggcatccgggcctatctggctggatgacgtcagctgtatcgggaacgagtccaatatttgggactgcgagcactcagggtggggcaagcataactgtgtccatcgcgaggacgtgatagttacttgtagtggcgacgctacgtggggcctccgcctcgtcggtggcagcaatcggtgttccggacgcctggaggtgtactttcagggacgatggggaactgtatgtgatgacgggtggaacagtaaggccgccgcagtcgtctgcagtcagctggactgtcccagctctattatcggcatgggtttgggaaatgcctctactgggtacgggaaaatttggttggatgacgtcagctgcgatggtgacgagagtgacctctggtcgtgcagaaactccggttgggggaacaatgactgtagccactccgaggatgtgggtgtgatttgttcggacgcctcggatatggaattgcgacttgtgggtggttcaagcagatgcgccgggaaagttgaggtcaacgtacagggggctgtcggcatcctctgtgctaacggttggggcatgaatatcgctgaggtcgtttgtagacagctggaatgcggaagtgcaatcagagtgtctagggagccccatttcacagagaggacgctgcacatattgatgtctaattctggctgtaccggaggcgaagcatccctgtgggactgcatcagatgggaatggaaacagactgcctgccacctgaatatggaggctagcctgatctgttcagcccatcgtcaaccgcgactcgtgggagccgatatgccctgttccggacgcgtcgaagtaaaacacgcggatacatggcggtcggtgtgtgattctgacttctccctgcatgccgcaaatgtgctttgccgcgagctaaactgtggcgacgctattagcttaagcgtgggcgatcacttcggcaagggaaacggcttaacctgggccgagaaattccagtgcgaaggcagcgaaacccacctagccctgtgccctattgtgcagcaccccgaggacacatgcattcattccagggaggtgggcgttgtatgcagccgctacacggatgtgcgattagttaacggtaagtctcaatgcgacggacaggttgagatcaatgttctgggacattggggcagcctatgtgatactcactgggaccctgaggacgctagggtgctctgcagacaactttcatgtgggaccgccttatctacaactggagggaaatacatcggcgaaaggtccgtacgcgtttggggtcaccggtttcactgtctgggaaacgagagtttgctggacaattgtcaaatgaccgtcctgggagcacctccctgcatccatggcaacacagttagtgtgatatgcactggctcccttacccagcccctgtttccgtgcttggcaaatgttagtgatccatatttatccgctgtgccagagggctccgctctgatttgtctggaggacaaacgcttgcgcctcgttgacggggacagtcgatgcgcaggtagggtcgaaatttaccacgatgggttctggggaaccatctgcgatgacggatgggatctcagcgatgcccacgtcgtgtgtcaaaaattgggatgcggggtggcctttaacgcaacagtttctgcacacttcggcgagggaagtgggccaatttggcttgacgatctaaactgtactgggatggaaagccacctgtggcagtgtccgtctagaggttgggggcaacatgactgcaggcataaagaggatgccggggtgatctgttctgagttcaccgccctgcggctatatagcgagacagagacagaaagctgtgccggccggctagaggttttttacaatgggacatggggctctgtgggcagaaggaatatcaccacagccattgctgggattgtttgccgacagctgggctgtggagaaaacggggtcgtcagcctagcccccctctccaaaaccggatccggcttcatgtgggttgatgatatccaatgcccaaagactcatatttcgatctggcagtgcttgagcgctccttgggagcgtaggatctcgtctcctgcagaagagacgtggattacctgcgaagaccgcatacgagtacgcgggggagacaccgagtgtagcggaagggtcgagatctggcacgccggttcatggggtaccgtctgtgacgatagctgggacctcgccgaggctgaagtcgtatgccaacagctgggctgtggcagtgccctcgcggcattgcgagatgcctctttcggacagggaacagggacaatctggttagacgacatgaggtgtaagggcaatgaatcgttcctgtgggattgtcatgcgaaaccttggggccagagcgactgcggacacaaggaggacgctggcgtgaggtgttctggccagtccttgaagtcacttaatgccagctcaggtcatctcgctttgatactcagctccatttttgggttactgctcttggtgctgtttatcctgttcctcacctggtgccgcgtgcaaaagcagaaacacctgccactgcgggatgacactcctaaccacgggtgtgaggatgccagcgatacgtctctgctcggcgtgctgccagccagtgaggcaactaaatag

SEQ ID NO: 12691 - RNA, 1410 nt, synthetic construct
  misc_feature 1..1410: note = source = /note="Description of Artificial Sequence: Synthetic coding sequence"
  source 1..1410: mol_type = other RNA
atgatcaccgaaggagcacaagcacctagactgctgcttccaccgctgcttctcctacttacccttccggctacaggctcagaccccgtactgtgttttacccagtatgaagagagcagtgggaaatgtaaagggctattaggagggggagtgagtgttgaagactgttgcctgaacaccgcctttgcctaccagaagagatcaggaggactatgccagccatgcagaagtccgcgttggtcgttatggagcacctgggctccctgcagtgtcacttgttccgagggttcccagttgcgttaccggaggtgtgtcggatggaatggccagtgtagtggaaaggtagcccctgggactcttgagtggcagcttcaggcttgtgaagatcagcagtgttgtccagaaatgggagggtggtccggctggggaccctgggaaccttgcagcgtaacatgtagcaaaggtactcggacgcgaagacgggcatgcaaccatcccgcccccaaatgcggcggacattgcccgggtcaggcccaggagtccgaagcatgtgacacgcagcaagtgtgtccaacccacggagcctgggccacatggggcccatggactccctgcagtgcctcatgccatggcggtccacacgagcctaaggaaacgcggagtcggaagtgcagtgcaccggagccttcccagaagccgcccggaaagccctgccctggtttggcttatgagcagcgacggtgtactgggctccccccatgcccagttgccgggggatggggaccctgggggcccgtttccccgtgtccagttacctgtggtctcggtcagaccatggagcagcgtacttgtaatcatcccgtaccccagcacggtggtcccttctgtgccggcgatgcgacccgcacccacatctgcaacaccgccgtgccgtgcccagttgacggagagtgggatagttggggagagtggtccccctgcatccgccgtaacatgaagtcgattagttgccaggagatacccggacagcaaagcaggggccggacatgcagaggacgtaaattcgacggccacagatgcgctggccaacagcaggatattagacattgttatagcatccagcattgtcccctgaaaggctcttggtccgaatggtccacttggggtctttgtatgccaccatgcggcccgaaccccaccagagcacgtcagcgactttgcacccccctgcttcctaaatatccccctacagtatccatggtagagggtcaaggagagaagaatgtgacattctggggccgccctctacccaggtgcgaggaattacagggccaaaaactggttgtagaagagaaacgaccctgtctccacgtcccggcctgtaaggatccagaagaggaggagctctag

SEQ ID NO: 12692 - RNA, 837 nt, synthetic construct
  misc_feature 1..837: note = source = /note="Description of Artificial Sequence: Synthetic coding sequence"
  source 1..837: mol_type = other RNA
atgcagtggctcagggtgcgagagagcccaggtgaagccacagggcatcgcgttacaatgggcaccgcagctctcggaccagtatgggcggctctcctgctctttcttcttatgtgcgagatccctatggtagaacttacattcgatcgggctgtggccagtgggtgccagcgatgctgcgacagcgaggaccccctggacccggcgcacgtgagttcagcctcgtccagcggccgaccccacgctcttcccgaaatacgtccttacatcaacatcactattctgaaaggtgataaaggtgaccccggacccatgggactcccaggttatatgggacgggaaggcccccagggagagcctggacctcagggtagtaagggggacaagggtgagatgggatcccctggagcaccttgccagaaacgcttcttcgccttttccgttggaaggaaaacagcccttcattcaggcgaagactttcagaccctgctattcgagcgagtattcgtaaatttggatggctgtttcgacatggctacaggccagttcgcagcacctttaagaggaatctactttttctctctaaatgtccactcctggaattacaaggaaacatacgtccatataatgcacaatcagaaagaggctgtcatcctgtatgcccagccaagcgaacggtcgatcatgcagtcccagtccgtcatgttggacttagcctacggtgatcgagtctgggtccgcctatttaagcggcagagggaaaacgctatctatagtaacgactttgatacatatataaccttcagcggacacctgatcaaagccgaggacgactag

SEQ ID NO: 12693 - RNA, 1128 nt, synthetic construct
  misc_feature 1..1128: note = source = /note="Description of Artificial Sequence: Synthetic coding sequence"
  source 1..1128: mol_type = other RNA
atggaattcgaaattacatttcgccccgactcaggagacggagttttgctttattcatatgataccggctcaaaggattttctcagcatcaacttggccgggggccatgtagaatttagattcgattgcggaagcggcaccggagttctcagaagcgaagaccctctgactcttggaaactggcatgaacttcgggtgtcccggaccgcaaaaaacggcatcctccaggtggacaagcagaaaattgtagagggaatggctgagggaggctttacccaaattaagtgcaataccgacattttcataggcggggttcccaattacgatgacgtgaaaaagaactccggcgtgctcaaaccattttcaggatctattcagaaaataattctcaacgatagaactattcacgtgaagcatgacttcacatcgggagttaatgttgagaacgcagcacatccttgtgtgcgagcgccctgtgcccatggaggaagttgtcggccacgaaaggaaggatatgactgcgactgtccgctcgggtttgaaggactgcactgtcagaaagctataatcgaggccattgagatcccacagttcattggaagatcctatctgacctacgacaaccccgacatactaaaacgggtctccggcagccgatctaatgtctttatgcgattcaagactacggcaaaggatggtcttctcctgtggaggggagattctcccatgaggccgaacagcgattttatctcacttgggctcagagatggcgccctggtgttctcctataatttgggatcaggcgttgcgagcataatggtgaacgggtccttcaacgatggccgctggcatagggtgaaggctgtgcgcgatgggcagtctggcaagattacagtggatgattatggcgccaggactggcaagtctcccggcatgatgcgacagctcaacatcaatggtgccttgtacgtgggtggcatgaaggagattgccctgcacaccaataggcaatacatgagaggactagtagggtgcatttcccacttcactctgtcaaccgattatcatatctcccttgtcgaagatgctgtggacggtaagaacattaacacgtgtggagcgaagtag

SEQ ID NO: 12694 - RNA, 459 nt, synthetic construct
  misc_feature 1..459: note = source = /note="Description of Artificial Sequence: Synthetic coding sequence"
  source 1..459: mol_type = other RNA
atgaggtttaagacgactgccaaagatggcctgttactctggcggggtgactcacctatgaggcccaactccgattttatctctctgggactgagggacggcgcactagtcttctcatataatctgggtagcggagtggcatcaattatggtcaatgggtccttcaatgacggacgctggcatcgagttaaggcagttcgagatgggcagtctggtaaaataaccgtcgatgactatggagctagaaccggtaaatccccagggatgatgagacagctgaacatcaacggcgcactctacgtaggagggatgaaagagatagcactgcacactaataggcaatacatgcgtggactcgttggttgcatcagtcactttacactttccacagattatcatattagcctcgttgaagatgcagtggacggcaagaatattaacacctgcggagcgaagtag

SEQ ID NO: 12695 - RNA, 1050 nt, synthetic construct
  misc_feature 1..1050: note = source = /note="Description of Artificial Sequence: Synthetic coding sequence"
  source 1..1050: mol_type = other RNA
atgacggccttacccggccccctgtggctacttggccttgctctgtgtgctttgggtggcggtggaccgggcctccgccccccaccagggtgcccacaaaggcgactgggcgccagagaacgacgagatgtacaacgcgaaatcctggccgtgttaggtctacctggtagaccccgccctagagcgccaccagctgctagcaggctgccggcctccgcccctttatttatgctcgacttgtatcacgcaatggcaggtgacgacgacgaggatggcgcaccagctgagaggcgccttggtcgggcagacctcgtaatgagtttcgtaaatatggtggagcgcgatagagcccttggacatcaggagccccattggaaggagttccgctttgacctcacccagatccccgctggagaagccgtgaccgctgctgagttcagaatctacaaagtcccatcaatacacctcctaaacaggactctgcacgtgagcatgttccaagtggtgcaagaacaatctaatcgggagtctgacctgtttttccttgacctgcagaccctgcgggccggcgatgaggggtggctggtcttagatgtaaccgcagccagcgactgttggctactgaagagacataaggacctgggcctaagactgtacgtagagacggaggacggagaaacatggactgggtgggggtggacaaaagattcccgactgcagatgtggaagttgaggctcagcaggactccctgggtgctctctctccacgcgcctggccctgcccaagcccccgccgagcggcctttgttgtgcctgttgcaaggtcattgtcctgcatctcctagccctatcaggactcctcgggccgtacggccattaagaaggcgacagccgaaaaagtccaatgaactgcctcaagctaaccgactgccaggcatttttgacgacgtgcatggttcccatgggaggcaggtttgcaggagacacgagctgtatgtgtcctttcaggatctggggtggttggttatagccgactctagctgtttctag

SEQ ID NO: 12696 - RNA, 1617 nt, synthetic construct
  misc_feature 1..1617: note = source = /note="Description of Artificial Sequence: Synthetic coding sequence"
  source 1..1617: mol_type = other RNA
atgtcatttagtgcgaccatcctattttctcccccaagcggaagcgaggctagatgctgttgctgcgcatgtaagagcgagacaaatggagggaatactggcagtcagggcggcaatcctccacccagcaccccaattacagtgacgggacacgggttagcggtccagtcttctgagcaactgctgcatgtgatctatcaaagggtagataaggcagtagggctggctgaagccgcattgggtcttgctcgggccaataacgagcttctcaaacggctccaggaagaggttggcgatctgcgccagggaaaggtgtcaattccagatgaagatggagaatctagggcccattccagcccgccagaggaaccaggacccctgaaagagtcaccaggcgaggccttcaaagccctttcagccgtggaggaagagtgcgattccgtgggcagtggagttcaggtggtgattgaggaattgcggcaactgggcgctgccagcgttggacctggccccctgggcttccccgctacgcaacgcgatatgcgactcccaggctgtaccttggctgcctccgaagctgctcccctcctgaacccattggtggacgactacgtcgcatcagagggcgccgtacagagggttctagtgcccgcgtacgctaaacagctgtcccccgccacacagctggccatccagcgagccactcctgagacgggccccgagaacggtactaagcttccaccccctcgacctgaggacatgctcaacgctgcagcagccctggactccgctcttgaggagagcggcccaggaagcacaggggaactgcgacacagcctggggcttacagtgtctccatgtcgcactcgcggatctggacagaagaattcaagaagaaagagggaccttgttctgtctaagttagtgcataatgtccataatcacataacgaacgataaacgcttcaacggctctgaaagcataaaatctagttggaatatctcagttgtaaagtttctactcgaaaagttaaagcaggagctggtgacgtccccccacaactacacggacaaagagctgaaaggcgcttgtgtcgcctacttcctgactaagcgccgcgaatataggaatagtctgaatccgtttaagggactgaaggagaaggaggagaagaaactgcggtcccgaaggtatcgtcttttcgcgaatcgctctagcattatgagacacttcggcccggaggatcaacgactttggaatgacgtcactgaagaattaatgtcagacgaggaagattctttgaacgaacccggtgtctgggttgctcggccaccccggtttcgtgcacaaagactgaccgaactttgttatcaccttgatgccaatagcaaacacggcacaaaagctaatagggtttatgggcctccgtcagaccgattgccatccgccgaagctcagctcctccccccggagctgtataacccaaacttccaagaagaagaagatgagggcggggacgagaatgccccagggtccccctcatttgaccagcctcacaagacttgctgtccagacctgaacagtttcatagaaatcaaagtagaaaaagatgagtag

SEQ ID NO: 12697 - RNA, 630 nt, synthetic construct
  misc_feature 1..630: note = source = /note="Description of Artificial Sequence: Synthetic coding sequence"
  source 1..630: mol_type = other RNA
atgagttttagtgccaccattctgttttccccgccatccggatcggaggctcgctgttgttgttgtgcctgtaaaagcgaaacaaatgggggaaatacaggctctcagggcggcaacccccccccgagcactcctatcactgtcactggtcatggcttggccgtccaatcttcagagcaactactccatgtcatttaccagcgagtggataaagcagtgggtctagcagaggctgccttgggtctagccagagccaacaacgaactgttgaagaggttgcaagaggaggtgggggatctcaggcagggtaaagtctctattccagacgaggacggggaaagtagagcccatagttcgcccccagaggaacccggcccgttaaaagaaagtcctggcgaggcattcaaagcactctcagccgttgaggaggaatgtgactccgtggggtccggtgtccaggtggtcatcgaggagctcagacagctaggagccgctagtgttgggccgggccccttgggcttccctgccacccagcgagatatgagactccccggatgtactttagccgcctcagaagccgcaccattgttgaatccgctagtggacgactacgtagccagcgaaggctag

SEQ ID NO: 12698 - RNA, 1617 nt, synthetic construct
  misc_feature 1..1617: note = source = /note="Description of Artificial Sequence: Synthetic coding sequence"
  source 1..1617: mol_type = other RNA
atgagcttttcagcgaccattttattctcccccccttccggatcagaggcccgatgttgttgctgtgcgtgcaagagcgaaaccaacggcggaaatactgggtctcagggcggtaatccccccccctcgacacctatcacagtgactggacacggtttggccgtgcagtcaagcgagcagctgctgcatgtcatataccagcgcgtggataaagcagttggcctggccgaagcggctctggggttggcccgcgccaataacgaactgttgaagcggctgcaggaagaagtgggcgatctcagacaggggaaagtgtctattccggatgaagacggcgaaagcagggcccacagctctcctcccgaggagcccggacccctgaaggaatcaccaggcgaagcgttcaaggccctgtcagccgtggaagaggaatgcgactcggtcggatcaggcgtgcaggtggtgattgaggaactacggcaattaggagccgcttctgtgggccccggcccgctcggcttccctgccacacagcgcgacatgagactgcccggctgcaccctggccgcgagtgaggccgccccactgctcaatcctctcgtggacgattacgtcgcatccgagggtgccgtgcaaagggtgctggtcccagcttacgcaaagcagctgagccctgccacccagctagctatccaaagagctacccctgagactggtcccgaaaatgggaccaagctcccacctccacgtcccgaggacatgcttaatgccgctgctgccctggattccgccttggaagagtccggcccaggctcaaccggggagctcagacattcactgggcctaactgtatctccgtgccggaccaggggatcaggtcagaaaaacagtagacgtaagagggacttagtcctatccaagctggttcataatgtgcataaccatattaccaacgacaaacgcttcaacggatccgagtcaattaaatcgtcttggaatatctccgtcgtgaaattccttctcgaaaaactaaagcaggaattagtaacctcccctcataactataccgacaaagagctaaagggcgcttgcgtggcctactttctcacaaagcgtagggagtaccggaactcattgaacccattcaaagggctaaaagagaaggaggagaaaaaactgagatctcgcagataccggttgttcgccaaccgttcatccattatgaggcacttcgggcccgaggatcaaagactatggaatgacgtaaccgaggagctgatgtccgacgaggaggattcactgaatgagcccggtgtgtgggttgcccgtcctccacgattcagggcccaaaggctcaccgaactttgctaccatctggacgccaattccaaacatgggaccaaggctaacagagtttatggccccccatcagacagactccccagcgctgaggcccagttgttgccccccgagttatacaacccaaacttccaagaagaagaagacgaaggcggcgacgaaaatgcccccggttccccctcttttgatcaaccccataagacctgttgcccagacctcaattccttcatcgagatcaaggttgaaaaagacgaatag

SEQ ID NO: 12699 - RNA, 1524 nt, synthetic construct
  misc_feature 1..1524: note = source = /note="Description of Artificial Sequence: Synthetic coding sequence"
  source 1..1524: mol_type = other RNA
atgtgtaccaaaaccatacccgtcctgtgggggtgttttcttttatggaatttatatgtgtcttccagtcaaaccatttaccccggaatcaaggccagaattacacagagagccttagactacggcgtgcaggcagggatgaagatgattgaacaaatgcttaaagagaagaagttacctgacctttctggatccgaaagcctagagttcttgaaggttgattacgtgaattataatttctccaatattaagatttctgcattttctttccctaatacatcactggccttcgtgccaggcgttgggataaaggcactgacaaaccacgggaccgccaacatcagtaccgactggggttttgagtcaccgctctttcaggataccggtggagcagacctgtttctatccggcgtttactttacaggcattatcattttaactcgaaacgacttcgggcatccaaccctcaaattgcaggactgctatgcgcagctctcgcacgcccacgtatccttttctggcgaactcagcgtgctgtacaatagcttcgccgagcccatggaaaagcccatactcaaaaacctgaacgaaatgctgtgccccataatcgcttccgaggtcaaggccctcaacgccaacctcagtacgcttgaagttctgaccaaaatcgataattatactctcctggattattctttgatctccagcccggaaatcacagagaactatcttgacctgaatctgaagggtgtgttttacccactcgaaaatctcacagaccctccattctcgcccgttcctttcgtgctgcccgagagatcaaactccatgctgtacatcggaatcgccgagtatttttttaagtctgcgagcttcgctcattttaccgctggcgtttttaatgtgacactatctacagaggagattagtaatcattttgtgcaaaactcacagggcctgggtaacgttctgtctagaattgccgagatttatatcctgtctcagcctttcatggtgcgcatcatggccaccgaaccccccattataaacctgcagcctggtaatttcactcttgacattccagcctcaatcatgatgcttacacagcctaaaaatagtacagttgaaaccattgtttctatggactttgtagccagcacgtcagtgggactggttatcctgggtcagcggctggtgtgttctctttctttgaatcgttttcgcctggcgctacctgagtcgaatagatctaacattgaggtgctgcgattcgaaaacatactgtccagtatactgcattttggagtgttgcctctcgcgaatgccaagttgcagcaaggcttccccctttccaatcctcataaatttctgttcgtgaattctgacattgaagtcctcgagggatttctgctgatctcgaccgatctcaagtacgagacttcatcgaaacaacagccaagctttcacgtgtgggagggtctgaacttaattagcagacagtggagaggcaaatccgcaccatag

SEQ ID NO: 12700 - RNA, 753 nt, synthetic construct
  misc_feature 1..753: note = source = /note="Description of Artificial Sequence: Synthetic coding sequence"
  source 1..753: mol_type = other RNA
atggcatccgagcggctccctaaccggcccgcgtgtcttctcgtagcgtctggcgcagcagaaggagtttccgctcagtccttcctccactgttttacaatggctagtacagcattcaaccttcaggtagcaacccccgggggaaaggctatggagtttgttgacgttactgagtctaatgcaaggtgggtgcaagattttaggctaaaggcatacgcgtcacccgccaagctggaatccatcgacggggccaggtaccatgcgctcctgattccttcctgccctggagccctcactgatttagcctcatcgggctctctcgctaggatcctccaacattttcactctgaaagcaaacctatctgcgctgtcggccacggcgtcgccgcattgtgctgcgccaccaacgaggatagatcttgggtttttgactcttattctcttactggccctagtgtttgtgaactagtgcgggccccagggttcgctcgcctcccactggtcgtcgaggatttcgttaaggattctggcgcatgtttttcaggcgcagcggccagctgtcccaaagcagatcgccactggcaacattttcctgtcgaggaaatatttcttgcttgcggctttaaggtagcaggtctgggcgcagcccctggctgggggcgtgggggaaaacaagaggataggcctcccgaggaacagagaagagcaggagaggattttcccatttatcagtgtgtgttcatctacccatag

SEQ ID NO: 12701 - RNA, 1386 nt, synthetic construct
  misc_feature 1..1386: note = source = /note="Description of Artificial Sequence: Synthetic coding sequence"
  source 1..1386: mol_type = other RNA
atgtccctcgatattcaaagcttagatatccaatgtgaggagttatccgatgctagatgggccgagctcctgccccttcttcagcagtgccaggtggtgagactcgacgattgcgggttgacagaagctagatgcaaagatatttcctccgccctgcgtgtgaatccagcgctggcagaactaaatctgcggagcaatgagcttggtgatgtgggcgtgcactgcgtcctccagggtttgcagacaccctcttgcaagattcagaagctgagcctacagaattgctgcctgaccggtgctgggtgcggtgtgctctcaagtactctcagaacactgccaactctgcaggagctgcacttgtcagataacctgctgggagatgctggtctgcaactgttgtgtgagggattgctcgacccccagtgccgcctggaaaaactgcagctggagtattgttcactgtctgccgcctcctgcgaacccttggcttccgtactccgtgctaaacccgattttaaggaactcactgtgtcgaataacgatatcaacgaggccggcgtgagagtgttgtgccagggactgaaagactccccctgccagttggaggctctgaaattggagtcatgcggggtgacatccgacaactgccgggacctgtgcggcattgtggccagcaaggcttccctccgagaactagcactcggttcgaacaaactcggtgatgtggggatggccgagctgtgccccggattgttgcatccttcatctcggctgcgtaccctgtggatatgggaatgtggaatcaccgctaagggatgcggggatttatgtcgcgtgctacgggcaaaggaaagcttgaaggagctgtccctggctggtaatgagctgggcgatgagggagctaggctcttgtgcgaaacccttctggagccaggatgtcagctggaatccctgtgggtaaagtcctgctccttcaccgctgcctgctgctcacacttctcttcagtattggcacagaacaggttcttactggagctccaaatcagcaataacagacttgaagatgctggtgtgcgtgaattatgccaagggctggggcagcctggctccgtgctgcgggtgttgtggcttgcagactgtgatgtcagcgacagctcctgttccagcctggctgccactcttctggctaatcactctctccgcgaattagatctttccaataactgcctgggagatgcgggtatcctgcaactagtggaatccgtgcgccagcctggttgcctgctcgaacaacttgtgttatacgacatctattggtcggaagaaatggaggatcggttacaggccttagaaaaagacaaaccgagtctgagagtgatttcttag

SEQ ID NO: 12702 - RNA, 1386 nt, synthetic construct
  misc_feature 1..1386: note = source = /note="Description of Artificial Sequence: Synthetic coding sequence"
  source 1..1386: mol_type = other RNA
atgtctcttgatattcaaagtctcgacattcagtgcgaggagttatctgatgcccggtgggctgaactgctaccgctgctgcagcagtgtcaggtggtgagattagacgattgtgggttgaccgaggcacgttgcaaggacatctcatccgcattacgtgtgaaccccgccctcgccgaactgaatctgcgttccaacgagctgggtgacgtgggagtgcactgtgtgctccagggactgcagactccctcatgtaaaatacaaaaattgagcctccagaattgttgtcttacaggcgccggatgtggggttctgagctccaccttaagaacactccccacgctacaggagctgcacctctccgataacctcctcggcgacgctgggctgcaactactgtgtgaggggctgcttgatcctcagtgccggctagagaaattgcagctggagtattgttccctgtccgctgcttcctgcgaaccccttgccagtgtgttgagagcgaagccggactttaaggagctgactgtctccaacaacgatatcaatgaagccggtgttcgggtactctgtcaagggctgaaggacagcccatgccaactggaggccttgaaactcgagtcctgtggagtgacaagtgataactgtagagacttatgtggaatagttgctagcaaggctagtctccgagagttagcgctcggcagcaacaaactaggggatgtgggcatggccgaactctgccccgggcttttgcatccctcgagcagattgcgcacactgtggatttgggaatgcggcattaccgcgaaagggtgtggagacctctgtcgcgtgctgcgggccaaagaaagcctcaaggagctctcgctcgctggcaatgagctcggcgacgagggagcaagactcctctgcgaaaccctcctggagccaggatgccagctcgagtccctctgggtgaaaagttgctcctttacggctgcctgctgctcgcacttctcttcagtactcgcacaaaatcgctttcttcttgagttacaaatttcgaacaatcgtctggaagacgcaggcgtccgagaattatgccaaggccttggccagcccgggagtgtgttacgggttctgtggttggcagactgcgacgtttcagactcttcttgttctagcctcgccgccaccctcctggcgaatcattcccttcgagagttggatctgagtaataattgtctgggcgacgccgggatcctgcagctcgtggagagtgttaggcagccagggtgcctgctagagcagctggttctctatgacatctattggtcagaagaaatggaagaccgcctccaggctctggagaaggacaaaccaagtttaagggttatctcctag

SEQ ID NO: 12703 - RNA, 1386 nt, synthetic construct
  misc_feature 1..1386: note = source = /note="Description of Artificial Sequence: Synthetic coding sequence"
  source 1..1386: mol_type = other RNA
atgtctctcgacattcagtccctggatatacagtgtgaagagttgtccgacgcgaggtgggcggagttgctacccttgctgcaacaatgtcaagtggtgcggttggacgactgcggcctgactgaagctcggtgtaaggacatcagctccgcgctgagagtgaaccccgccctggccgaattgaacttgcgtagcaacgagttgggtgatgttggagttcactgcgtacttcagggccttcagaccccatcttgtaaaatccagaaactctctctccaaaattgttgtcttactggagccggatgcggtgtcttgtcctctacccttcgcacgttgcccacactgcaggagctccatttgtcagacaacctcttaggcgatgcagggctccaactactgtgcgagggacttctggatccccagtgtagactcgagaaattacagcttgaatactgttctcttagtgctgcatcatgtgaaccactggctagcgttttacgagccaaacccgactttaaagaactgaccgtatcaaataatgatatcaacgaagcaggcgtgagggtactgtgtcagggcctgaaggattccccgtgccaacttgaggctctgaagcttgaatcttgtggtgtaactagtgacaattgtagggacctgtgcggaatagtcgcctccaaggcatctttacgagagctggcattggggagtaacaaacttggcgatgtgggtatggccgagctctgtcccgggctactccacccctcttcacgtcttcggaccctgtggatctgggagtgcggaattaccgcaaaaggttgcggcgacctgtgccgggtgctaagagctaaagagtcactaaaggagctgagccttgccggaaacgaattgggcgatgagggtgccagactgctttgtgagacccttttggaaccggggtgccagttggagagtttatgggtgaaatcgtgttcctttacggcggcgtgctgctcacatttcagtagtgttcttgcccagaataggtttcttcttgagcttcaaatctcaaacaataggctcgaagatgcaggggtgcgcgagttgtgccaaggactgggacagcctgggagcgtactcagagtgctctggcttgcagattgcgacgtgagcgattcatcatgctcctccctcgccgccactctcctggcaaaccacagcctgcgggagctggatctttccaataactgcctgggcgatgctggcatccttcaactggtagaatcagttcgccagccagggtgcctcctggaacagcttgttctctacgacatttactggtcagaggagatggaggacagactgcaagccctcgagaaagacaaacccagcctccgtgtcattagctag

SEQ ID NO: 12704 - RNA, 1452 nt, synthetic construct
  misc_feature 1..1452: note = source = /note="Description of Artificial Sequence: Synthetic coding sequence"
  source 1..1452: mol_type = other RNA
atgatcaccgcccattgctcattggatctgctgggatctgtagctgttctatgcgtttgcgacttatccccggcccagtgcgatattaattgctgctgcgatccagactgttctagcgtcgacttttcagtattttccgcctgctctgtgccagtggtgacaggggactctcagttctgcagccagaaagctgtaatttactctttgaactttacagcaaatcccccccagcgcgtgttcgaattagtggaccagattaatccttcaattttttgcattcacattaccaattacaagccagctctctcgttcattaaccccgaggtccccgatgaaaacaatttcgacactctcatgaagacctcagacggctttaccttgaacgcagaaagttacgtttcttttactaccaaactcgatataccaacagccgctaagtacgagtatggagtgcctcttcaaacctccgattcatttcttcgattcccgtcaagtcttacctccagtctgtgtaccgacaataatcccgccgcattcctggtgaatcaggccgtaaagtgcacccgcaagatcaacctggagcaatgtgaagaaattgaagccctgtcaatggctttctattcatccccggaaatcctcagggtacccgactcccgcaaaaaggttccgataaccgttcaatcgatcgtgatccagagtcttaataagaccctaacccggagagaagatacagatgtcctgcagcctacactagttaacgcaggtcacttctctctatgtgtcaacgtcgtgctggaggtcaaatattctcttacatatacagacgctggggaagttactaaggcagacctgagctttgtgctaggaacagtttcctcagtggtcgttccattacagcagaagtttgagatccactttctgcaagagaacacccaacccgttcctttgagcggaaacccaggatatgtcgtaggattgcctttagccgccggctttcaaccccataaaacgggagcattgccctgccaattggtagcacagaaggtaaaaagcctgctctggggacagggcttccctgattatgttgcccccttcggcaacagccaggcccaagacatgctcgattgggtaccgatccatttcataacccagagctttaaccggaaacactttgtcttgcaggattcatgccaactgccgggggccttagtaattgaggttaagtggactaagtatgggtctttgctcaacccccaggcaaagattgtgaatgtgactgctaatctcatctcttcctcatttccagaggcaaacagcggcaacgagcggacgatcctaatcagtaccgctgtcacttttgtggacgtcagtgctccagccgaagccggtttccgcgcaccacctgctatcaacgcccggctccccttcaacttcttctttcccttcgtgtag

SEQ ID NO: 12705 - RNA, 1596 nt, synthetic construct
  misc_feature 1..1596: note = source = /note="Description of Artificial Sequence: Synthetic coding sequence"
  source 1..1596: mol_type = other RNA
atgtgtcagctgctggagagcaccgtgatccagccacagggtgattcccccgtcgcagttctatgcgtctgcgacttgagccccgcacagtgtgatataaattgctgttgcgaccctgactgtagctcagtggatttctcagttttctccgcttgttctgtccccgtagtcacaggtgactcacagttctgttctcagaaggccgttatctactccctcaacttcactgcaaatcccccccagcgggtattcgaattggtggaccagatcaacccttcaattttttgcatacatataaccaactataagcctgccctgagttttattaaccccgaggtccctgacgaaaataactttgacacactgatgaagacttccgatggctttacactcaacgcagaaagttacgtgtcctttacgaccaagctggatatcccaactgctgccaagtatgaatatggcgtcccattacaaacgtctgacagcttcctgagattcccgtcctctctgactagttcgctgtgcacagacaacaatcccgccgcttttctggtgaaccaagctgtcaagtgtacccgaaaaattaacctcgaacagtgcgaagagatcgaggcactatctatggctttttatagtagtccagagatactgcgggtgcctgacagtcgcaaaaaagtacccattactgtccagtcaatcgtcattcaatccttgaacaagaccctcacaagaagggaagatacggatgtcctccagccaaccctggtgaatgctgggcacttcagcctttgtgtcaatgtcgtgctggaggtgaaatactcccttacctatacagacgctggggaagttactaaggccgaccttagttttgtgttagggaccgtgagttctgtagttgtgccacttcagcaaaaatttgaaattcattttctgcaggagaatacacagccagtacctcttagcgggaaccccggatacgtggtcggactcccactcgctgctgggttccaaccccataagatgagcgggatcatacagaccaccaaccgttacggacagctgacaatccttcactccaccacagaacaggactgccttgccctggagggagtgcgaacgccagtcctgtttggctacactatgcagtccggttgcaaactgaggcttaccggtgcattgccctgtcagttggtggcccaaaaagtcaagtccctgctttggggccaaggcttccccgattacgtggcaccttttggcaactcccaagcacaggacatgctggactgggtgcccatccattttatcacccaaagttttaaccgcaaggactcttgtcagcttccaggcgccctagttattgaagtgaagtggaccaaatacgggagcctgcttaacccacaagccaaaatcgttaacgtgaccgcaaatctaatctcctcctcttttcctgaagcaaactccggaaatgaacgaaccattctgatatcaactgccgtgacattcgtcgacgtcagtgcccctgccgaagccggattccgggctccccccgctatcaacgccagacttcctttcaacttctttttcccttttgtgtag

SEQ ID NO: 12706 - RNA, 1722 nt, synthetic construct
  misc_feature 1..1722: note = source = /note="Description of Artificial Sequence: Synthetic coding sequence"
  source 1..1722: mol_type = other RNA
atgcggcctcgcgggttgccccctctcttggtagttctgctaggctgctgggcctccgttagcgcacagaccgatgcgactcccgccgtgaccacagaaggtctcaactccacagaagcggccctagccacatttgggactttcccctcaacccgtcccccaggaaccccacgggcccccggtccgtctagtggcccacggccaactcccgtgaccgatgttgccgtactgtgtgtttgcgatttgtcacctgcccagtgtgatatcaattgttgttgcgaccccgattgttctagtgtagactttagcgtcttcagcgcctgtagcgttccagtcgtgacaggcgattcacagttttgctcacaaaaagccgtcatttacagtctgaatttcactgccaatcccccacagagggtatttgaactggtggaccagatcaacccatccatcttttgtattcacattacaaactataagcccgccctttcctttataaacccagaagtaccagacgaaaataacttcgatacattaatgaagacatcagatgggtttacactgaacgctgagtcctacgtaagtttcaccactaaattagatattcccactgctgcaaaatatgagtacggggtccccttgcagacaagcgattccttcctcagatttccctccagtctgacctcttccttatgcaccgacaataatcccgcgggacaggcatactggtttaccccggtgatccccgcactgtgggaagccgaagcaagaggttctctggaggtaccagattcgcgtaaaaaagtcccaattaccgtgcagtcaatcgtcatccagagtctgaataagactttaacgagacgtgaagataccgatgtgcttcagcccacactggtgaacgccggccatttctccctgtgtgttaatgtggttctcgaggtgaaatactcgcttacatacaccgacgctggtgaggttactaaagcggacctgagttttgtactgggcactgtgagtagtgtagtagtacctctgcagcaaaaattcgaaatccattttttgcaggagaacacacagccagttcctctttcaggcaatccaggttacgtcgtaggcctcccgctcgcggccggctttcagccacacaaaggcagcggaattatccaaactaccaatcgatacggccagctgacgattctccattcgactaccgaacaggactgtcttgcccttgagggtgtgcgtacgcctgttctattcggatataccatgcagagtggctgtaagctgcgactgaccggcgctcttccttgtcaactcgtcgctcagaaggttaagtcgctgctgtggggccaggggttccctgattatgttgctccctttggtaacagccaggcacaggatatgctggactgggtgccgatccatttcatcacacagtcttttaataggaaggactcatgccagctccccggcgccctcgtgatagaagttaagtggacaaaatatggctcacttctcaatccccaagctaagatcgtgaacgtaacagccaacttaatctcttcttcattcccggaagctaactcaggcaacgaaaggaccattttgatcagcactgcagtgacgttcgttgatgtgtccgcgcccgctgaggctggcttcagggctcctccagctatcaatgccagactcccatttaatttttttttcccattcgtatag

SEQ ID NO: 12707 - RNA, 1230 nt, synthetic construct
  misc_feature 1..1230: note = source = /note="Description of Artificial Sequence: Synthetic coding sequence"
  source 1..1230: mol_type = other RNA
atgaaaacatcagacggtttcaccttaaacgccgagagctacgtatcttttaccaccaaactggatatcccgacagccgcgaagtatgaatatggagtcccactccagactagcgacagcttccttaggttcccttcctcattgacatcaagcctctgtaccgataacaatccagcggcttttctagtgaaccaggctgttaaatgcactcgcaagattaatctagaacaatgtgaggagattgaggccctctccatggctttctactcctcccctgaaattttgcgggtgcctgatagccgcaagaaagtgcctattaccgtgcagtcaattgtgatacagtctcttaataaaaccttgacccgccgcgaggatacagacgtgctgcagccaacacttgttaacgcaggccacttttccctgtgcgtgaacgtggtacttgaagtcaaatattcattaacttataccgatgctggcgaagtaaccaaagccgatctgagttttgtcctcggaacagtatccagcgtagtcgtgcctttgcagcagaaattcgaaatacatttccttcaagagaacacccaacccgttcccctgagtgggaatccggggtacgtggtgggacttccattagccgccggtttccagcctcacaagggatccggcataatccagactacaaacagatacgggcagttgaccatccttcattcgaccaccgaacaggactgtctcgctcttgagggcgtccgaaccccggttctattcgggtacacaatgcagagcgggtgtaaattacggcttactggggcactcccctgtcaactggtggcccagaaggtcaaatcgttgttgtggggccaggggttcccagattatgtcgctccgtttggcaattctcaggctcaagacatgctagattgggttcctatccactttattacacagtcatttaatcgcaaagattcctgccagctccccggcgcactggtcatcgaagtgaaatggaccaagtatgggtcactcctcaatccccaggctaagatagtgaacgtaacggctaatcttattagttcttcctttcctgaagcaaattctgggaacgagcgtactattctcatctcgactgccgtcaccttcgtggatgtcagcgcacccgccgaagccggatttcgagctcctcccgctataaatgcgaggcttccatttaacttctttttcccatttgtatag

SEQ ID NO: 12708 - RNA, 1779 nt, synthetic construct
  misc_feature 1..1779: note = source = /note="Description of Artificial Sequence: Synthetic coding sequence"
  source 1..1779: mol_type = other RNA
atgaggcccagagggctgccgccgctcctggttgtattattgggctgctgggcaagcgtttctgcccaaacagatgcaactcctgccgtgacaactgagggcctgaactccacagaggctgcactcgcaacatttggaacattcccaagcacccggccccccggaacgccccgtgcccctggcccatcatctggacccaggcccactccagtcacagatgtggccgtattatgtgtttgtgacttgagcccagcccaatgcgatataaactgctgttgtgatcccgactgctcctccgtggatttttccgtgttctcggcctgcagcgtgcccgtcgtcaccggcgattcacagttttgtagtcagaaggcggttatttacagtcttaactttaccgcaaacccaccacagcgtgtgtttgagttagtagaccagatcaacccgtcaatcttttgtattcacattaccaactacaagcctgccttgagttttatcaacccagaggtacccgacgaaaataatttcgacaccctgatgaaaacgtccgacggcttcactctgaacgccgagtcctatgtgagcttcactacaaagctcgatatacccaccgcagctaaatatgagtatggagtgccgctccaaacttccgactcctttctgaggtttccctcttctcttaccagtagtctgtgtacagacaataaccccgccgcctttctagttaaccaggcggtgaagtgtacccgcaagataaacctcgagcagtgtgaagaaatcgaggctctgtcaatggccttctactcaagtcctgaaatactccgagtgccagactcacgtaaaaaagttcccatcacagtgcaatccattgtaatacagtcacttaacaaaactctgaccaggagggaagacaccgatgtgcttcagcctacccttgttaatgccggccatttctccctgtgtgtgaacgtcgtattggaagtgaaatattccctgacttacaccgacgccggagaagttactaaagccgatctgagcttcgtgctgggaaccgtgtctagtgtagtcgtgccactgcagcaaaaatttgagatacactttctgcaggagaatacccaaccggtccctctgtccggaaatccaggttacgtcgtcggactgcccctggctgccggcttccaaccccacaaaggtagcggtatcatccagactacaaatcggtatggacagctaacaatcctccactcaacaactgaacaagactgccttgctttggaaggagtgcgaacccctgtactgttcggctatacaatgcagtctggctgcaagctgcgattaacaggggcactgccttgtcagctcgtcgcgcagaaggtgaaatcacttctgtggggacagggctttcccgattatgtagcccctttcgggaactcacaggcccaggatatgctagattgggtaccaattcattttatcactcagtcctttaaccgaaagcacttcgtgttgcaagactcatgccagctgcccggggccctggtcatcgaggttaagtggaccaagtacgggagccttcttaatccgcaggctaaaattgtgaacgtgaccgctaatttgatctcaagtagtttcccagaggcaaacagcggcaacgagcgcacaatcttgatcagtaccgccgtaacatttgtcgatgtgtcagcccccgcggaggccggattccgggccccacccgccatcaacgctcggctgcccttcaactttttctttccatttgtgtag

SEQ ID NO: 12709 - RNA, 552 nt, synthetic construct
  misc_feature 1..552: note = source = /note="Description of Artificial Sequence: Synthetic coding sequence"
  source 1..552: mol_type = other RNA
atgatatttttacttctcatgctgtctctagagttgcagcttcaccagatcgcagccctattcacagtgacagtgcctaaggagctatacattattgaacatggatccaacgtaaccctggagtgcaactttgacaccggttcacacgtgaacttgggcgccattacagcgagcctacagaaagtagaaaacgacacaagtccacaccgggagcgcgctactcttctggaggaacagcttccattgggaaaggcttccttccacattccccaagtccaagtcagggacgagggccagtatcagtgcattatcatttatggcgtagcatgggactataaatatctgacactgaaagttaagggccagatggaaccccggacccaccctacctggctgctccacatattcatcccattttgcataatagcttttattttcatagcgaccgtaatcgcgctgcgaaaacagctttgtcagaaactgtactcctctaaagataccaccaagcgcccggtaaccacgacaaaaagagaagttaacagcgcaatctag

SEQ ID NO: 12710 - RNA, 822 nt, synthetic construct
  misc_feature 1..822: note = source = /note="Description of Artificial Sequence: Synthetic coding sequence"
  source 1..822: mol_type = other RNA
atgatctttttactgctgatgctttctcttgaactgcagttgcaccagattgccgccctgtttactgttaccgtcccgaaggaattatatatcattgaacacggatccaacgtgacactcgagtgcaacttcgacaccggcagtcacgtgaatctcggagccattacagccagtctccagaaagtggaaaatgatacctccccacacagagaaagggcaacgctgttggaagaacagttaccactgggcaaggcttccttccacatcccacaggtacaagtccgggacgagggacagtatcaatgcatcatcatctacggagttgcatgggattacaaatatctcacccttaaagtaaaagccagttaccgcaagattaatacacacattttgaaagtgccagaaaccgatgaggtcgagttaacgtgccaggccacaggctacccgctggctgaagtttcctggcccaatgtgtccgtgccagcaaatacctctcacagccgaactccggaaggcctctaccaggtcacatccgtgctgcgtttgaagccgccacccggtcgcaacttcagttgcgtcttctggaatacccatgtccgagagctgacacttgcgtctatcgacctccagtcgcagatggagccaagaactcacccgacctggctattgcacattttcattcctttctgcattattgcttttattttcatcgccaccgtgatagcacttagaaaacagctttgccagaagctctactcatccaaggacaccaccaagcggcctgtgactacaactaaacgcgaagtgaactcagcaatctag

SEQ ID NO: 12711 - RNA, 372 nt, synthetic construct
  misc_feature 1..372: note = source = /note="Description of Artificial Sequence: Synthetic coding sequence"
  source 1..372: mol_type = other RNA
ctgggcgataggagaggtcgtagttcaggagcaagagcagccgctgtgggctcaacaggcgagagattggagatggaggaagatatactgcagctccaagccgaggcaaccgctgaagtgttgggggaggtcgctcaagcacagaaagttctgagagattcggtgcaacggctagaagttcagttgcgtagcgcttggctcggtccagcatatcgggaattcgaggtccttaaggcacatgctgacaaacagtcacacatcctgtgggctcttacgggtcatgtccagcggcaaaggagagaaatggtggctcagcagcataggttgagacagatccaggagcggctgcatacagccgcgttacctgcatag

SEQ ID NO: 12712 - RNA, 345 nt, synthetic construct
  misc_feature 1..345: note = source = /note="Description of Artificial Sequence: Synthetic coding sequence"
  source 1..345: mol_type = other RNA
atggcctccttcaagctagcagatagtgtgtgggaagacagtctttcaaaacgccaaaggaatcagggccgcatgaaaactttgcctgtgctggtcctctcactgacactcctgactgtattcagcgaaacttctcctatactcacagagaagcaagccaagcagctcctgaggtctcgtagacaagataggccatccaaaccaggctttccagacgaacctatgagagagtatatgcatcaccttctggctctggagcaccgggccgaagagcaattcttagaacattggctcaatccccattgcaagcctcattgtgaccgtaatcgaattcatcccgtgtag

SEQ ID NO: 12713 - RNA, 345 nt, synthetic construct
  misc_feature 1..345: note = source = /note="Description of Artificial Sequence: Synthetic coding sequence"
  source 1..345: mol_type = other RNA
atggcatccttcaagctggctgatagtgtctgggaggattctctttcaaaaaggcagcggaatcaaggcagaatgaagactttaccggtgctggttctatccctgactctgctgaccgtgttctccgaaaccagcccgattttgacagaaaaacaagccaaacagctcctgcgaagcagaaggcaagaccgaccttccaaacccggttttccagacgaaccaatgagagaatacatgcatcacctcctcgctcttgagcaccgagcagaggaacagtttctcgagcattggcttaatccacattgcaaaccacactgcgaccgaaataggatccatcctgtctag

SEQ ID NO: 12714 - RNA, 444 nt, synthetic construct
  misc_feature 1..444: note = source = /note="Description of Artificial Sequence: Synthetic coding sequence"
  source 1..444: mol_type = other RNA
atggccctacagagaactcatagcctactgcttctcttgcttctcactctccttggattggggttagttcaaccttcatatggccaagatggaatgtaccaacgctttcttagacagcacgtccatcctgaagagactggtgggagcgataggtattgcaatttaatgatgcagcgcaggaagatgactctataccactgcaagagattcaacaccttcattcatgaggatatctggaatatccgctccatttgctctactaccaatatccagtgtaagaacggaaaaatgaattgccacgagggcgtggtgaaagtaacagactgcagagatacaggcagttctcgggcccctaattgccgctatcgagctattgcatcaaccagaagggttgtcatcgcctgcgagggaaatcctcaagtgccagttcactttgatggttag

SEQ ID NO: 12715 - RNA, 1302 nt, synthetic construct
  misc_feature 1..1302: note = source = /note="Description of Artificial Sequence: Synthetic coding sequence"
  source 1..1302: mol_type = other RNA
atggagccccagctggggcctgaggctgctgctttgagaccaggttggcttgcgcttctgctctgggttagcgctttgtcatgctcattctccctcccggcttcctcattaagttcacttgttcctcaagtacggacctcctacaactttgggcgaacattcctgggcctggataagtgcaatgcctgcatcggcacgtccatctgcaaaaagtttttcaaggaagaaattcgcagcgacaattggctagcctcccatcttggtttgccacctgattcccttctgtcctatcccgccaattatagtgatgacagcaaaatttggcggccagtcgaaatattccgccttgtatctaaatatcaaaacgaaatctccgaccgacgaatatgtgcatctgcttcagcccctaagacctgctccattgaacgggtcctgcggaagaccgagcgatttcagaagtggctgcaagccaaaagactgacccccgatttagtgcagggtttggcttcaccactgcttcgctgtccctctcagaggctgctcgatcgcgtagtgcggcggtacgctgaggtcgctgacgccgggtcaatctttatggatcactttactgatagggataaactgagacttctgtatactctggccgttaacagccatcccatccttctgcaaattttccctggcgcagaggggtggcctctgcccaaatacctgggttcttgtggacggttcctcgtctccacaagcacccgaccactccaagaattctatgacgcgcctcccgaccaagcggccgacttggcttaccagcttctgggtgtgctcgaatccctgaggtcaaacgatttgaactacttcttctacttcacgcacattgatgcaggtatgtttggcgtttttaataacggacatcttttcattcgcgatgcatccgccgtaggcgtgatcgacaaacaggagggttctcaggaagcgaatcgcgccggagagaacaaagatattttctcctgtctcgttagcggctgtcaggctcaactgccaagttgtgagtcaatctccgagaaacagagcctggtgctcgtgtgtcaaaagctccttccacgacttctccagggacgctttcctagtccagtgcaggacgacatcgattctattctggtgcaatgtggagattctatacggcccgatcctgaagtgcttggcgccgcttctcaactcaaggacatcctccggcctcttcgtacctgtgactcgcgatttgcctatcggtatcctgactgtaaatacaatgacaaattctag

SEQ ID NO: 12716 - RNA, 600 nt, synthetic construct
  misc_feature 1..600: note = source = /note="Description of Artificial Sequence: Synthetic coding sequence"
  source 1..600: mol_type = other RNA
atggagacctttccactcctgttgctgtcactggggctggtgttggccgaggcctcagaaagtacaatgaagataattaaggaagaatttactgatgaagagatgcaatatgatatggcaaaatctggccaagagaagcaaaccatcgagatcttaatgaatcccatattgctggtgaaaaatacatccctgtccatgtccaaagatgacatgtcaagcacactgttaacattcaggagtttacactacaatgacccaaaaggaaatagcagcgggaatgataaggaatgctgcaacgatatgacagtgtggagaaaagtctctgaggccaacggcagctgcaaatggtcaaataattttattcgtagctctaccgaggtgatgcgccgagtgcaccgcgccccgtcttgtaaatttgttcaaaatcctggcatttcttgctgcgagtcattggagttggagaatactgtctgccagtttaccaccggtaaacagttcccccggtgtcaatatcactcagtcacctctctggagaagatcctcacggtactgacgggtcacagtctgatgagctggctcgtgtgtggatcaaaattgtag

SEQ ID NO: 12717 - RNA, 600 nt, synthetic construct
  misc_feature 1..600: note = source = /note="Description of Artificial Sequence: Synthetic coding sequence"
  source 1..600: mol_type = other RNA
atggagacgttcccgttgctgctgttgtcactgggcttggtgctggcggaagcgtctgaatccactatgaagatcatcaaagaagagttcaccgatgaggagatgcaatatgacatggccaaatccgggcaagagaaacagactattgaaatcctaatgaaccctattctactcgtcaagaatacatcgctatcaatgtctaaagatgacatgtcctccaccctgcttaccttccggtcgctgcactataatgacccaaaagggaatagctccgggaatgacaaggagtgttgcaatgatatgaccgtctggcgtaaggtatctgaggcgaatggttcatgtaagtggagtaataactttatacgatctagtactgaagtgatgaggagggtacaccgtgcacctagttgcaagtttgtgcagaatcccgggattagctgttgtgagtctctggaacttgaaaatacagtgtgtcaatttactacggggaagcagtttcctcgctgtcagtatcactccgttacaagcttggagaaaattctcaccgtattaacaggtcactcgctgatgtcctggctggtttgtggttctaaactgtag

SEQ ID NO: 12718 - RNA, 291 nt, synthetic construct
  misc_feature 1..291: note = source = /note="Description of Artificial Sequence: Synthetic coding sequence"
  source 1..291: mol_type = other RNA
atgctcccatgtctggcgctcctccttttaatggaactttcagtttgtaccgtggcaggagatggtggtgaggaacagacactaagcaccgaagccgaaacttgggaaggcgctggcccttctattcagctccaactgcaggaggtcaaaaccggtaaggctagccagtttttcggcctgatgggaaaacgcgtgggcgcctatcagctcgagcacactttccagggcctgctgggaaagcgatcgctgtttacagaaggacgcgaagatgaggctcaggggtccgaatag

SEQ ID NO: 12719 - RNA, 981 nt, synthetic construct
  misc_feature 1..981: note = source = /note="Description of Artificial Sequence: Synthetic coding sequence"
  source 1..981: mol_type = other RNA
atgaccggattgtgtgggtactcagcaccggatatgcggggcttgaggctgatcatgatccccgttgaactgctgctgtgctaccttctcttacaccctgtggacgcaacaagctatggcaaacagaccaatgtattgatgcacttccctcttagcctggagagtcagacaccctcatccgatccacttagttgtcagtttttacatcccaagtctctccctggattttcgcatatggcccctttgcctaagtttctggtttctcttgccctccgaaacgcacttgaagaggccggctgtcaggcagatgtttgggctctccaacttcagctctatcgccaggggggagttaacgccactcaggtacttatccaacatctgcgcggactacagaaaggtaggtcaaccgaacgcaacgtttctgtggaggccctcgcttcggccctgcagctcctggctcgcgagcagcagtctacgggaagggtgggcagatcactaccaacagaggattgtgaaaatgaaaaagaacaagcagttcataatgtcgttcagcttctcccaggggtcggcacattctacaacctcgggaccgctttgtactacgctacacaaaattgcctggggaaggctcgggaacggggcagggatggcgcaatcgaccttggctatgacctgctgatgaccatggctggtatgagcgggggccctatgggactcgcgattagtgcagctttaaagccggctctacgtagcggggtccagcagttaatccaatactaccaggatcagaaggacgccaatatttcccaaccggaaactaccaaagaggggctacgagctatcagcgatgttagtgatctcgaggagaccacaaccctggcatcctttatctccgaagtcgtctcaagtgcaccctactggggctgggcaatcattaagagttacgatttagatcccggcgcagggtcactcgagatctag

SEQ ID NO: 12720 - RNA, 1476 nt, synthetic construct
  misc_feature 1..1476: note = source = /note="Description of Artificial Sequence: Synthetic coding sequence"
  source 1..1476: mol_type = other RNA
atgcggtggatactctgctggagccttaccctgtgcttgatggctcagacagcactgggcgcactacatacaaagagaccccaggtggtgactaagtacggcacgctccagggtaaacagatgcacgtcggcaagacaccaatacaggtttttctcggtgtccctttctctagacctcccctgggcattcttcgtttcgccccgcccgaaccaccagaaccttggaaaggaattagagacgccactacataccccccgggctgcttacaagagtcctggggacaactcgcctctatgtatgtcagcacacgcgaacgctacaaatggcttcgtttttcagaagactgtctgtatctcaatgtctatgctcccgccagagcacccggtgaccctcagctcccagtgatggtttggttccccggcggcgcgtttatcgtcggtgccgcttcctcttacgagggtagcgatctcgcggcacgggaaaaagtggtcctcgtattcctccagcaccgtctggggatcttcggtttcctttccacagacgattctcatgcccgcggtaattgggggttgctagatcagatggctgccctgaggtgggttcaagaaaacattgccgcatttgggggtgatcccgggaatgtgacgctattcggacagtccgcaggcgcgatgtctattagtggcttgatgatgtctccattggcaagcggcctgtttcaccgtgctatttcacagtccggcacagcgctgtttcgtctgttcatcacgagcaaccccctgaaggtggcgaagaaggttgcccatctcgctggttgtaaccacaacagtacgcagatcctcgtgaattgtcttcgtgccctgtccgggacaaaggtgatgagagtttctaataagatgagattccttcagctgaattttcagcgtgatccagaggaaatcatttggagtatgagtcccgtcgtggatggggtggtgattccagatgaccctcttgtgcttctgactcagggaaaagttagctctgtaccatatcttctgggggtgaataacctcgagtttaattggcttctcccttacaacatcacgaaggaacaggtgccacttgtggtggaggaatatctggataatgtaaatgagcacgactggaaaatgctgagaaaccgcatgatggacatagtccaggatgcaactttcgtgtacgctaccctgcagaccgcacactatcatagaggcctgtcaatgggaaaggaaaaagccttgtctctgcagatgatgaaatactgggctaattttgccagaacagggaacccaaacgacggcaacctgccttgctggcccagatacaataaagacgaaaaatacctccagcttgactttactaccagagtcggaatgaaacttaaggaaaagaagatggccttctggatgtctctgtaccagtcgcagcgacctgagaagcagcggcagttctag

SEQ ID NO: 12721 - RNA, 285 nt, synthetic construct
  misc_feature 1..285: note = source = /note="Description of Artificial Sequence: Synthetic coding sequence"
  source 1..285: mol_type = other RNA
atggctgcattccctcataaaatcatcttcttcttggtttgcagcaccttaacccatgtggcttttagtggtatttttaataagcgcgactttacccgttggcctaagcccagatgtaagatgtatattcccttagatccagactacaacgctgactgtcctaacgtgactgcaccggtatgtgcaagcaatggtcatactttccagaacgagtgcttcttctgcgtcgaacaaagagagttccactacagaattaagtttgaaaaatatggcaaatgcgactag

SEQ ID NO: 12722 - RNA, 402 nt, synthetic construct
  misc_feature 1..402: note = source = /note="Description of Artificial Sequence: Synthetic coding sequence"
  source 1..402: mol_type = other RNA
atgaggcagcggttactaccctctgttacatcgctgctgttagtggctcttctgttccccgggtcttcccaggcacggcacgtgaaccactcagccacggaggccttaggcgagctccgagagcgggcccccggccaaggcacaaacggattccaactactcagacatgctgtaaaacgcgacttactccctcctcgcacacctccataccagggtgatgttcctccagggattcgcaacactatatgccatatgcaacagggaatttgtaggctgtttttctgtcactcaggcgagaaaaagagggacatatgttcagatccctggaacagatgctgtgtttccaatacagacgaagaaggcaaagagaaacccgaaatggatggtagatctgggatatag

SEQ ID NO: 12723 - RNA, 564 nt, synthetic construct
  misc_feature 1..564: note = source = /note="Description of Artificial Sequence: Synthetic coding sequence"
  source 1..564: mol_type = other RNA
atgggatgctgcggttgtagtggcggatgcggatccggatgtggtggatgtggcagcggctgcggagggtgtggtagctcctgttgcgttccaatctgctgctgcaagcctgtttgttgttgtgttcctgcatgttcatgtagctcttgtgggtcttgcggaggctccaaaggaggacgcggatcatgcggtggttcgaaaggcgactgtggatcctgtggcggatctaaagggggctgtggatcgtgtggatgttcccaatgttcgtgttataaaccatgttgttgttcctccggatgcggatctagttgttgccaatctagctgctgcaagccctgctgcagtcagtcctcttgttgtaagccatgtagttgctcttctggatgtggctcaagttgttgtcaaagttcctgctgtaagccatgttgttctcagtcctcttgctgcaaaccctgttgttgctcctctggctgtggatcgtcttgctgtcagtcaagttgctgtaagccctgctgttcccagtcttcttgctgcgtccccatctgctgtcagtgcaagatttag

SEQ ID NO: 12724 - RNA, 564 nt, synthetic construct
  misc_feature 1..564: note = source = /note="Description of Artificial Sequence: Synthetic coding sequence"
  source 1..564: mol_type = other RNA
atgagaccgctcgcgggtgctccagtcccaaagcgccagaagtgcgaccactggacaccctgtccctcagacacctacgcttatcgccttctttcaggtgggggtcggtcaaaatatgccaagatttgtttcgaagataatctgctaatgggcgagcagttgggaaacgtggcacggggtattaatatcgccatagtgaattatgtgacgggcaacgttactgctacaagatgtttcgacatgtacgagggcgacaactcaggccctatgacaaagtttatacagtcagctgcgccaaaaagcctgctgtttatggtcacctacgacgatggtagcacgcgcctgaacaatgacgcaaaaaacgcaattgaagcacttgggagcaaagagattcgaaatatgaaatttcggtcttcctgggtttttattgctgcaaaaggcctagagttaccttctgagatccagcgagagaaaataaatcatagcgacgctaagaataaccgctactccggatggcctgcagagatccagattgagggttgtattccaaaagagagatcgtag

SEQ ID NO: 12725 - RNA, 249 nt, synthetic construct
  misc_feature 1..249: note = source = /note="Description of Artificial Sequence: Synthetic coding sequence"
  source 1..249: mol_type = other RNA
atgaaaatactgtgcatatttctcacattcgttttcacagtttcatgcggtccaagcgtaccccagaagaaaactcgcgaagtggctgagagaaagcgtgaatgccaactcgtgcgcggagcttgtaaacccgaatgcaattcatgggagtatgtgtactactactgcaatgtaaatccgtgctgcgccgtgtgggagtatcagaaacctatcatcaacaaaattacatctaagctccatcagaaatag

SEQ ID NO: 12726 - RNA, 186 nt, synthetic construct
  misc_feature 1..186: note = source = /note="Description of Artificial Sequence: Synthetic coding sequence"
  source 1..186: mol_type = other RNA
atgaagattcatgttttcttattcgtcctgttcttctttttggtacccattgctactcgggttaagtgtgcagtcaaagatacctactcctgcttcatcatgcgaggcaaatgccgtcacgaatgccatgatttcgaaaaacccatcggattctgcactaaactgaacgctaattgttacatgtag

SEQ ID NO: 12727 - RNA, 1056 nt, synthetic construct
  misc_feature 1..1056: note = source = /note="Description of Artificial Sequence: Synthetic coding sequence"
  source 1..1056: mol_type = other RNA
atgggaaatctgtttatgctttgggcagcactcggtatctgctgcgctgctttttctgcatccgcatggagtgtgaacaacttcctcattactggtcctaaagcttatctcacatacaccactagtgtggccctgggagcccaatcaggaatcgaggagtgtaaattccagtttgcctgggagcgctggaactgtcccgaaaacgccctgcagctgagtacacataataggttaaggtccgcaaccagagagacaagctttattcacgcaatatcttctgccggcgtgatgtacatcatcactaagaattgctccatgggcgacttcgagaattgcggctgcgatggctctaacaacggcaagacgggaggccacggctggatttgggggggctgttctgacaacgttgagttcggggagcgcatttcaaaactgttcgtcgatagcttagagaagggtaaggacgcacgcgctctgatgaacctccataacaatagagccggcagactggccgtgagggccactatgaaaagaacatgcaaatgccatggaataagtgggtcatgttctattcagacttgttggctccagttggcagagttccgcgaaatgggagactatctgaaggccaaatacgatcaagctctgaagattgagatggacaaacgtcagctgagagctggaaattctgccgaaggtcactgggttcccgctgaggcttttctcccgtcggcagaagcagagctgatcttcttggaagaatcccctgactactgcacatgcaactcatcgctcggcatctacgggactgaaggtcgggagtgcttgcagaacagccataatacctcaagatgggagcggagaagttgcggacgcttgtgtacggaatgtggactgcaagtggaggaacgaaaaactgaagttatatcgtcctgtaattgcaaatttcaatggtgttgcaccgtgaaatgtgatcaatgtcgccacgtcgtgtcaaaatactactgtgctcgttcacccgggtcagctcagtctctcggaaagggtagtgcctag

SEQ ID NO: 12728 - RNA, 1446 nt, synthetic construct
  misc_feature 1..1446: note = source = /note="Description of Artificial Sequence: Synthetic coding sequence"
  source 1..1446: mol_type = other RNA
atgcagtccaggctcctgctgctgggggctccaggtggccacggtgggccagcctctagaaggatgagactactactgagacaggtagttcagcgccggcctggcggcgacaggcagcgtcccgaagtgagactactgcacgccggctccggcgccgatactggagataccgtaaacatcggagatgttagttacaaactgaagattcctaaaaatcctgaacttgtccctcagaattatatttccgactctctggcccaatcagttgtgcagcacttgaggtggatcatgcaaaaagacttattaggccaggatgtgttcctgattggcccccccggtcctcttcgtaggtcgatcgcaatgcaatacttagaactgacaaaacgggaagtggagtacattgccctgtccagagacaccaccgaaaccgatctgaagcagagaagagagatcagggctgggacggcgttctatatagaccagtgcgctgttagggctgctacagagggcaggaccctgatcttggagggcttggagaaggccgaacgcaacgtgctgccagtactcaacaacctcctggagaaccgtgagatgcaactagaagatggcagatttcttatgagcgccgaaagatatgacaagctgttaagggatcataccaagaaggagctcgatagttggaagattgtgagggtatccgagaactttcgcgttattgcgttaggcctgccggtgccccgttactcggggaatcccctggacccccctcttcggtcgaggtttcaggctcgggacatatactatcttcccttcaaagaccagttgaaactgctgtactccattggagccaacgtaagtgccgaaaaagtgtcacaactgttgtcattcgcaaccaccttgtgtagtcaggaaagcagtacattgggtctcccagatttccccctggacagtttagcagccgctgtccagattttggattctttccccatgatgccaataaaacacgctatccagtggttgtatccctactccattctgttaggacacgaagggaaaatggccgtcgaaggagtcttgaaaagattcgaactgcaggactctgggtcttctctccttccaaaggagattgttaaggtggaaaaaatgatggagaaccacgtgtcacaggcctccgtgaccatcaggatcgccgacaaagaggtaacaataaaggtaccagcaggaactcgccttttatctcagccctgtgcgtccgacaggttcatacagactttgagtcacaaacagcttcaagcggagatgatgcagagccacatggtgaaggatatctgtctgattggcggaaagggctgtgggaagacagttatcgctaagaattttgcagataccctgggctacaacatagaaccaatcatgctgtatcaacacaaggtgccccatatctag

SEQ ID NO: 12729 - RNA, 786 nt, synthetic construct
  misc_feature 1..786: note = source = /note="Description of Artificial Sequence: Synthetic coding sequence"
  source 1..786: mol_type = other RNA
atggctagtctggccgtttctaactggcctaagccaatgccactcataccttgtctctcctggagcacggcctcaggagtatttaccacaggtgtgctttctaagtccatcaactggcgcgaactggaaaagcagtactacacacagaccgtctacgaggaagagatcatccatatgctggaatactgtgggactgacagtttcaaaatgggccaggagttcgtaaagcactttacgtcaagcgccgacaaactgacaaatctcaaccttgtctctcgcacgctgaatctcgacataagtaatcaagtggtcagccagaagcccgcagactgtcacaatagttccaagacttctgtatccgccacttcggaaggccttctcctgcaagatacgtccaagatgaaaaggttcaatcagacgctgtctacaaacaagagcgggtatacctctagaaacccacagtcctaccaccttctatccaaagaacagtcaagaaatagtctgaggaaagagtcactgatttttatgaaaggggtgatggacgaatgtacacacgtagcgaacttctcggttcccgtagacccctcgttaatcatagtggtgcaggcaaaagaggatgcatatatcccaagaaccggagtaagaagcctgcaggaaatctggcccgggtgcgagattcgctatctggagggcgggcatatcagcgcctacctctttaaacaggggctgttcagacaagcgatctacgacgccttcgatcgattccttcataaatatgcaaattag

SEQ ID NO: 12730 - RNA, 1245 nt, synthetic construct
  misc_feature 1..1245: note = source = /note="Description of Artificial Sequence: Synthetic coding sequence"
  source 1..1245: mol_type = other RNA
atgggagtctcaaaactggacatactgtaccgccgtttactgctaactaaactgttcatccggggatgggggcggccagaagaccttaaaagactgttcgaattcagaaaaatgattggtaaccgggagcggtgccagaacctcgtgagctccgattatccggtacacattgataaaatagaagagcagagcgactgtaaaatactggacgggcatttcgtcagtcccatggcacactatgttcccgacatcatgccaatcgagagtgtgatcgcaagatttcagtttattgtccctaaagagtggaattccaagtacaggcccgtatgcatccatctggccggaacaggtgaccaccattactggagacggaggacacttatggcaaggccaatgattaaggaggcgaggatggcttctctgctgttagaaaacccctattacggctgcagaaaacctaaggatcaggttagatcctctctgaagaacgttagcgatctgttcgtaatgggtggagcattggtcctcgagagcgcggccctactgcattggctagagagagaggggtatgggcctctggggatgaccggaatttcaatgggagggcacatggcgtctcttgcagtatccaactggcccaagccaatgcccctgatcccctgtctctcttggagtacagcatccggcgttttcactaccacagactcattcaaaatggggcaagagtttgttaagcacttcacttccagcgccgacaaactcaccaatttgaatcttgtctcccgcaccttgaacctagacatctccaatcaagtggtgtcccagaagcctgccgattgccacaattcctctaagacatccgtgtctgccacatcagaaggactcttgttgcaggacacttccaaaatgaaacgtttcaaccaaaccctgagtaccaataaaagtggctatacgtcacggaacccacaatcatatcaccttctgtctaaggaacagagcagaaattccttgagaaaagagagtctgatatttatgaagggggtgatggatgaatgcacacatgtggcaaattttagcgtcccagttgatccctctcttataatcgtcgttcaggccaaagaagacgcctatattcctagaacaggcgtaagatcattgcaagagatctggccagggtgtgaaatccgataccttgagggcgggcacattagcgcatacctgtttaagcagggactgtttagatag

SEQ ID NO: 12731 - RNA, 747 nt, synthetic construct
  misc_feature 1..747: note = source = /note="Description of Artificial Sequence: Synthetic coding sequence"
  source 1..747: mol_type = other RNA
atgaaactgaccttcttcctggggctgctcgccctgatctcgtgtttcacacccagcgagagtcagcgcttttctcgtagaccttacctgcctggccaattaccacctccacccctgtaccgccccagatgggtacctccttccccccctccaccttatgacagtagactgaactcaccactctccctacctttcgtgccaggacgcgtcccgccttccagctttagcagattctcgcaagcagtcattctctcacaactgttccccctcgaatccatcagacaacctaggttgttcccaggctacccaaacttgcatttcccactaagaccttactacgtcgggcccatccggatcctgaaacctccttttccccccatcccgttcttccttgccatctatctgccaatttcaaaccccgagccccagatcaatataacgacagccgacaccactatcaccacaaaccctccaacaacggctactgcaactacatccacctcaactaagcccacaatgacaataagcagctccaccgtccctatcagcagtacccctgagcctgctacatccatcagtgccgccacacccgcagcttcaacagagaatacgactcagatactggccaacaggccccacacagtactgctcaacgcgacagttcaagtaacgacctcaaatcaaacgatcctctcaagtcctgcatttaaaagtttttggcagaaattatttgcgatcttcggatag

SEQ ID NO: 12732 - RNA, 231 nt, synthetic construct
  misc_feature 1..231: note = source = /note="Description of Artificial Sequence: Synthetic coding sequence"
  source 1..231: mol_type = other RNA
atgggcgcagctatctcccagggcgctcttatcgcgatcgtgtgcaacgggttagtagggtttcttcttctcctgttgtgggtgatcctgtgctgggcctgtcatagtagatccgctgacgtcgatagtctttctgaatcttcccccaatagctcacccggtccctgccctgaaaaagcccctccaccccaaaaaccaagtcacgagggatcttatctgctccaaccttag

SEQ ID NO: 12733 - RNA, 1536 nt, synthetic construct
  misc_feature 1..1536: note = source = /note="Description of Artificial Sequence: Synthetic coding sequence"
  source 1..1536: mol_type = other RNA
atgctagtggacggtccttctgaacggcccgccctttgcttccttctgctggctgttgctatgtcttttttcgggagcgccttgtctatcgacgaaacccgtgcccacctgctcctgaaagaaaaaatgatgcgcttaggcggcagactggtgctgaacactaaagaggagctagctaatgaacggctgatgaccctcaagatcgcagaaatgaaagaggcgatgcggacacttatattccccccctcaatgcatttctttcaggccaaacatctgatcgaacgatctcaagtatttaacatcctgcggatgatgccaaagggagcagctctgcacctgcacgacatagggatcgtaacaatggactggttagtccggaatgtgacctaccgccctcattgccatatctgcttcacaccccggggaattatgcaatttagattcgcccatcccactccccgaccaagtgagaaatgtagcaaatggatcctgctcgaggattatcggaagcgcgtacagaatgtaacagagtttgacgatagcctactgagaaatttcacattggtcacccagcatcccgaagttatctatactaatcagaatgttgtgtggagcaaatttgaaacaatcttcttcaccatttcaggtctaattcattatgctccagtgtttcgagactacgtgttcaggtccatgcaggagttttatgaagataacgtgctctacatggaaatcagggctagattactcccagtttatgagctctcaggcgagcaccacgatgaggaatggtcagtgaagacgtatcaagaggtcgcacagaagttcgtcgaaacccaccccgaattcataggcatcaaaataatctacagcgaccatcggagcaaagacgttgccgtgatcgctgagtccataagaatggcgatgggcctgcgaatcaagtttccgacagtggttgctggattcgatctggtgggccacgaagacactggccactccctgcacgactacaaagaggccttaatgatcccagccaaagatggcgtaaagcttccatactttttccacgccggcgagaccgattggcaaggaaccagtattgacaggaatatcctcgacgcgttaatgctgaatactacgcgcataggccacggctttgccttgtctaaacatccagcagtaaggacctacagctggaaaaaagatatacctatcgaagtgtgtcccatatctaatcaggtactgaaactcgtatccgatttacgcaaccaccctgtagccacacttatggccactggccacccaatggtgatctcaagcgatgaccctgccatgttcggcgcaaaaggcttgagctacgatttttatgaggtcttcatgggcattggtgggatgaaagccgacctgaggactctgaagcagctcgccatgaactcgattaaatattcaacgctactcgagtccgagaaaaacacctttatggagatatggaagaaacggtgggacaaatttatcgcagacgtcgcgacgaagtag

SEQ ID NO: 12734 - RNA, 1536 nt, synthetic construct
  misc_feature 1..1536: note = source = /note="Description of Artificial Sequence: Synthetic coding sequence"
  source 1..1536: mol_type = other RNA
atgctagtagatgggcctagcgagcgaccagctctgtgctttctgcttctggcagtggccatgagtttcttcggctcagctctcagcatcgatgaaaccagagcacacctcctcctcaaagagaagatgatgaggctgggaggtcgtctagtgttaaacactaaagaagagcttgctaacgagcgtctcatgactctgaagattgcagaaatgaaggaagctatgcgcacgctgatttttccgccaagcatgcactttttccaggcgaaacatctgatcgaaagaagtcaagtcttcaacatccttcgaatgatgccgaaaggagccgccttacacctgcatgatatcggcatcgttaccatggactggttggtgcggaatgtgacgtacagaccgcactgccatatttgcttcactccaaggggcattatgcagtttaggtttgcccacccaactccccggccgtccgaaaagtgtagtaagtggatccttcttgaagactaccgaaaaagagttcaaaacgtgacagaatttgacgattctctactgcgaaattttactttggtaacccagcaccccgaggtgatctacaccaaccagaacgtggtctggtctaaatttgagacaatcttcttcaccatttctggacttatccactacgcccccgtgtttcgagactatgtgtttaggtctatgcaggagttctacgaagacaatgtcctctatatggagattcgcgccaggcttttacccgtatacgaactttccggagagcatcacgatgaggagtggagtgttaaaacctatcaggaggtcgcccagaaattcgtagaaacccacccagagtttataggtatcaaaatcatctactctgaccaccggtccaaggatgtggcagtgatagcagagtctatcaggatggcaatgggacttaggatcaagttccccaccgtggttgccggcttcgacctcgtcggacatgaggatacaggccacagtttgcatgactacaaagaggccctgatgattcctgccaaagacggagtcaagttaccctacttttttcacgcaggggagaccgactggcaaggcacttctatagaccggaacattcttgatgcacttatgcttaatactaccagaatcgggcacgggtttgccttatctaaacaccctgccgtccggacctactcgtggaagaaagacatccctattgaagtttgccccatcagcaaccaggtattaaaactagtgtccgatcttaggaaccatccagtcgctactttaatggccacagggcaccccatggtgatatcctcagatgaccctgccatgtttggagccaagggactatcttacgatttctacgaggtattcatggggattggaggtatgaaggccgacttgagaaccttaaagcagctggccatgaactcaattaaatatagcaccttgttggaatccgaaaagaacactttcatggagatttggaagaaacgatgggacaaattcattgccgacgtagccacaaagtag

SEQ ID NO: 12735 - RNA, 240 nt, synthetic construct
  misc_feature 1..240: note = source = /note="Description of Artificial Sequence: Synthetic coding sequence"
  source 1..240: mol_type = other RNA
atgaaactccatagcctgatttctgtcctgctgctgttcgtgacactgattcccaaaggcaaaaccggcgtgatccctggccagaagcagtgcatcgcccttaagggtgtttgtcgcgataaactgtgttcaaccctggacgacactataggtatttgtaacgagggcaagaaatgctgcagaaggtggtggatcctggaaccctacccaacacctgttccaaaggggaaaagtccgtag

SEQ ID NO: 12736 - RNA, 351 nt, synthetic construct
  misc_feature 1..351: note = source = /note="Description of Artificial Sequence: Synthetic coding sequence"
  source 1..351: mol_type = other RNA
atggctgctggaagtgccccaatgcaactacatctgagagcgacgatccgaatgaaagacggcctctgtgttccacgcaaatggatttaccacctgactgaagggagtaccgacttgcgaaccgaggggagacctgatatgaagacggaattattttccagctcatgccccggagggataatgttgaatgagaccggacaggggtatcagagatttttgttatataatcggagtcctcaccccccagagaagtgcgtggaggagttcaagagccttacttcttgcctggactcaaaagccttccttctcacacctagaaaccaagaagcgtgtgaactctctaataactag

SEQ ID NO: 12737 - RNA, 543 nt, synthetic construct
  misc_feature 1..543: note = source = /note="Description of Artificial Sequence: Synthetic coding sequence"
  source 1..543: mol_type = other RNA
caggtgatcccaataaactcaggtgatcttttcgtacatccgttgtggaaccggtcctgtgtagcttgcggaaacgacatagccctgatcaagctctcccggagtgcacagttaggtgacgctgtccagctggcatccttaccacccgcaggggacatattgccaaatgaaacaccttgttatatcactggctggggtagactttatacgaatggccctctcccagataagctccaggaagcccttctacccgtggtggactatgagcactgtagtcgttggaactggtggggatcttccgttaagaaaacgatggtgtgcgccggtggtgatattcggtctggctgcaacggggattccggagggcctctcaactgccccacggaggacggaggctggcaagtgcacggagtgacatctttcgtgtccgcatttggctgcaatacccggcgcaagcccactgtcttcacccgcgttagtgcattcatcgactggattgaagagaaactccagggtaataaagctcccgagagtaggacgtag

SEQ ID NO: 12738 - RNA, 1215 nt, synthetic construct
  misc_feature 1..1215: note = source = /note="Description of Artificial Sequence: Synthetic coding sequence"
  source 1..1215: mol_type = other RNA
atgcctccattcctgataacattattcctgtttcactcctgctgtctgcgcgccaatggacacttgagagaaggcatgacgttgctcaagaccgagttcgcattacatctttatcagagcgtggccgcatgtagaaacgagaccaatttcgtgatcagtcccgccggagtatcccttccactcgagatacttcagtttggagcagaggggagcaccggccagcagctcgcggatgctctgggatacacggttcacgacaaacgcgtcaaggatttcctgcacgccgtttatgctaccctgccgacctcttcgcaggggaccgagatggagttggcctgcagcctgtttgtgcaagtcgggacaccattgtccccttgcttcgttgaacacgtgtcctggtgggcgaactcctctctcgaacccgcggatctatctgaacctaattccacagccattcagactagcgaaggtgcatctcgggaaacagccggaggaggaccatctgagggaccgggcggctggccatgggagcaggtatccgctgcgttcgcccagctggttttagtgtccacaatgagtttccaaggaacctggcgcaagagattctccagcactgatacacaaatcttgccatttacctgcgcatacggcctggttctccaggtcccgatgatgcatcagacaacagaggtgaactacggccaattccaagacacagccgggcaccaggttggcgtgcttgaactcccttacctgggaagcgcggtgagcctttttctcgtgttgccgcgcgataaagatactccactcagtcatatcgagcctcatctgactgctagcaccatccacctctggaccacaagtctccgaagagcgcgaatggatgtcttcctgccccgcttccgtattcagaaccagtttaatttgaaaagcattcttaattcctggggggtgaccgatttatttgaccctctgaaagcaaacttgaagggaataagcggccaagacggattttacgtatcagaggctattcacaaggcgaagatagaagtccttgaggaagggaccaaagcaagcggcgccacagctttacttctgctcaagagatctcgaattcccatctttaaggccgatcgcccctttatctacttcttgcgcgaacctaatacgggatttgttttcagcattggtagagtctccaatccactcgactag

SEQ ID NO: 12739 - RNA, 444 nt, synthetic construct
  misc_feature 1..444: note = source = /note="Description of Artificial Sequence: Synthetic coding sequence"
  source 1..444: mol_type = other RNA
atgggccctgaggctcttagctcacttctgctgctgctcctggtggcaagtggagacgcggacatgaagggacactttgatccagcgaagtgccgttacgcgctaggtatgcaagaccgtaccattcctgattccgatatatccgcttccagcagctggtccgattccaccgccgcacgacactctaggttggagagctctgacggggacggagcctggtgtccagcaggatccgtttttcccaaggaggaggaatacttacaggttgacctgcagagattgcacttggtggcactcgtcggcacacagggaagacacgccggtggtctgggcaaggaattttcacgaagttatcgccttaggtattctagagacggacgaagatggatgggctggaaggatcggtggggacaagaggttatatcaggcaacgaagacccctag

SEQ ID NO: 12740 - RNA, 2631 nt, synthetic construct
  misc_feature 1..2631: note = source = /note="Description of Artificial Sequence: Synthetic coding sequence"
  source 1..2631: mol_type = other RNA
atgggcccggaggccctgtcgagcttattgcttctcctgttagtggcgtctggtgatgccgacatgaaaggtcactttgatcccgccaaatgccggtacgctctggggatgcaggacagaaccatcccagatagcgatatctcagctagttcgtcttggtccgattctacagcagcaagacattcccgtttggagtctagtgacggggacggggcctggtgcccagccggcagcgtgttcccgaaagaggaggagtatcttcaggtcgaccttcagaggctgcacctggttgctctggtcggcacgcagggcaggcatgccggcggcctggggaaggagttctcccgttcgtaccgcttaagatacagccgggatgggcgtaggtggatgggatggaaggatcggtggggtcaggaggtcatctctggcaacgaagatcctgagggagttgtcctgaaggatctcggaccaccgatggtcgctagactcgttcgcttttatccgagagcagacagagtcatgtccgtgtgtctgagagtcgaattatacggatgcttgtggcgcgacggccttttaagctatacagctccggtcggacagaccatgtacctcagtgaggcagtttacctgaacgacagcacatatgacgggcataccgtaggtggactacaatatggggggttaggacagctggcagacggcgttgtggggctcgatgatttcagaaagtcccaggagttgcgcgtctggcccggatacgactacgtggggtggagcaatcacagctttagcagcggatacgtagagatggagtttgaatttgatcgcttgagagcattccaggcaatgcaggtgcactgtaacaatatgcacactctgggagcccgcctaccgggtggggttgaatgtcgtttccgcaggggacctgcaatggcatgggagggtgagcccatgcgtcacaacctcggcgggaaccttggagatcctcgcgcccgcgccgtttcagttccactcggaggccgtgttgctcgatttctgcagtgtcggtttctcttcgccgggccttggctgctgttctccgagatatccttcatttcagatgtggtcaacaactcttctcccgcactcggaggcacattccccccggccccatggtggccaccaggacctccgcccactaatttctcttctcttgagctggagccaaggggccaacagcccgttgctaaagcagagggtagcccaactgccatactcattggctgtttggtggccattatcctgttgctccttctgattattgcgctcatgctgtggcgactgcactggcggaggcttctttcaaaggcggaaaggcgcgtgcttgaggaagaattaactgtgcatctctcggtccccggcgatactatcctgattaataaccgcccaggtccacgggagccacctccctatcaggaaccccgcccccggggcaatcccccacattccgccccctgcgtgcccaatggctctgcgtactctggagactacatggagccagagaagcctggagccccgctcttgccccccccaccacagaattccgtgccacactacgcagaagccgatatcgtcactcttcagggcgtgactggagggaatacttacgctgttccggccttgccaccaggtgccgtcggagacggcccccctagagtagatttcccgagatcaagactgagatttaaggaaaagctgggggagggacagttcggcgaggtacacctgtgtgaagtggactcaccccaggacctagtcagcctcgactttccactgaacgtccgcaagggtcaccccttactcgtggccgtgaaaatcttgagacccgatgctacaaagaacgccaggaacgatttcctcaaagaggttaagattatgagccgactgaaagaccctaacattatacgcttgctgggcgtatgcgtgcaagacgaccctttgtgtatgattacggattatatggagaacggcgatctcaaccagttcttgtccgcgcatcagcttgaagacaaggccgcagaaggcgcccctggggatggtcaggcagcccagggtccgactatctcctatcccatgctgctacatgtggccgcgcaaatagcttccgggatgagatatctggcaaccctcaactttgtgcatcgtgacttggccacacggaattgcctcgtgggcgaaaattttaccataaaaattgcagatttcggaatgtccaggaatctgtacgcaggcgattattacagggttcaaggcagagcagtgttacctataagatggatggcctgggaatgcattctcatgggtaagtttaccaccgcaagcgacgtatgggcattcggcgtgacactttgggaggtgctaatgctttgtcgggctcagccgtttggacagctgaccgatgagcaagtgattgagaacgccggcgagttctttagggatcaaggcaggcaagtgtatttatctagaccacctgcttgtcctcagggcttgtacgagttgatgctgaggtgttggtcccgggagtccgaacagaggcccccattttcgcagctgcacaggtttctagccgaggatgccttgaatactgtttag

SEQ ID NO: 12741 - RNA, 2631 nt, synthetic construct
  misc_feature 1..2631: note = source = /note="Description of Artificial Sequence: Synthetic coding sequence"
  source 1..2631: mol_type = other RNA
atgggccccgaagcactatcaagccttttgttgctgttgctggtggcctccggcgatgccgatatgaaagggcacttcgatcctgccaaatgtcgatacgctctggggatgcaggatcgcaccattccagactcagatatcagcgcatcaagttcttggagtgactctacagctgcgcggcacagtaggttagaaagcagcgacggcgatggcgcctggtgtccagccggcagcgtgtttccaaaggaggaggagtacctgcaagtcgatttgcagcgactccatctagttgcactggttggcactcagggaagacatgcgggcggattagggaaggagttctccagatcatacaggctccggtattctcgtgacggcagacgctggatgggctggaaggatcgctgggggcaggaagtcattagtggcaacgaagaccccgagggggtggtgttgaaagacctcggtcccccaatggtcgctagacttgtacggttttacccacgagccgacagggttatgagcgtgtgcctacgagttgagctctatgggtgtctctggcgggacggcctactgagctatactgctccggtagggcagaccatgtatctgtccgaagctgtgtatttaaatgactccacttacgatgggcacaccgtgggcggactgcagtacggtggcctcggccagcttgctgacggcgtggtggggctcgatgacttccggaagtcccaagagcttcgcgtatggcctggctatgattacgtgggttggagcaaccactcctttagttctggctatgtcgagatggagtttgaatttgacaggctgcgtgcattccaagctatgcaagtccattgtaacaatatgcacacgctcggggccagactgcccggaggagtggagtgcagattcagacggggtcccgccatggcgtgggaaggtgaaccaatgcgacacaacctgggcggcaatctgggcgatccacgcgctcgggccgtatccgttccattgggtgggagagtcgcccgctttcttcagtgtcgattcctgttcgcaggtccctggctcctgtttagcgagatatcctttatctccgacgtcgtaaataactccagccctgccctcgggggaaccttccctcccgccccttggtggccaccgggccctccccctactaatttctcaagcctcgaacttgaaccgcgaggccagcagccagtagctaaggccgaaggctcgcccacagctattctgatcggttgcctggtggctatcattctgcttctcttgctcatcattgcactcatgctgtggagactgcactggcggagattgctgtccaaggcggaaagaagagtgctggaggaggaacttactgtacaccttagtgtgcccggagatacgatccttatcaacaacagacccgggcctagggaaccccccccatatcaagagccacgccctcgcggcaatcctccccattcggccccttgcgtgcccaacggctcggcttatagcggcgactatatggagcccgagaaaccgggagctcctttacttcctcctcctcctcagaactcagttccccattacgccgaagccgatatcgtgactctgcaaggagtcactggaggcaatacgtatgctgtcccggctctgccaccaggtgccgttggcgatgggccgccaagggtggatttcccccggagccgactcagattcaaggaaaaactgggggaaggacagttcggagaggtccacctgtgtgaggtagattcaccccaagatctagtatctcttgactttcctctcaacgttcgcaaggggcacccactgcttgttgctgtcaaaattttgagacctgacgccaccaagaatgccagaaacgatttcctaaaagaggtcaaaatcatgtcccgacttaaggatcccaacatcatcaggttgctgggagtgtgtgtgcaggacgacccgctttgtatgatcacagactacatggaaaatggggacctgaatcagtttctctccgcacaccagctggaggataaggctgcagagggggccccgggtgacgggcaagctgctcagggcccaacaattagctaccccatgctgttgcacgtggccgcacagattgccagtggtatgcggtacctggcaaccctaaattttgtacacagggatctcgcgacacgtaactgcctggtgggggagaattttaccatcaaaattgcggacttcggcatgtctcgcaatctctatgcaggtgattactatagagtgcaaggccgggccgtgctcccaattcgttggatggcgtgggagtgtattctcatgggaaaatttacaaccgctagcgacgtctgggctttcggcgtgacactttgggaggtgctgatgttgtgtcgggcacaacccttcggccagctaacagatgaacaggtaattgagaacgccggtgagttttttagggatcaaggccggcaggtgtacctgtcccgacctccagcttgtcctcagggcctttacgagttaatgctcaggtgctggtcaagggaatcagagcagcgcccccccttttcacaattgcacagatttctcgccgaggatgcactgaacactgtttag

SEQ ID NO: 12742 - RNA, 2742 nt, synthetic construct
  misc_feature 1..2742: note = source = /note="Description of Artificial Sequence: Synthetic coding sequence"
  source 1..2742: mol_type = other RNA
atgggcccagaagcactgtcatccctgcttcttttgctcctcgtggctagcggtgatgcagacatgaaggggcacttcgaccctgctaagtgtcggtatgctttaggcatgcaagaccgaacaattcccgattcagatatttctgcttcaagcagctggagcgacagcacagcagccagacattctcgtcttgaatccagcgacggtgatggcgcatggtgcccagcgggatcagtgtttcctaaggaagaagagtatctccaggtcgacctacaacgtcttcacctggttgcccttgtgggtacccagggtagacacgcaggaggcttgggcaaggaattttcacggagctatcgcctgcgttacagccgggatgggcgacgttggatgggctggaaggatcgctgggggcaagaggtgattagcggcaatgaggaccccgaaggggtagtactcaaagatctgggcccgccaatggttgcaaggctcgtccgattttatccccgagccgacagagtgatgtcagtttgtctgcgggttgagctgtatggctgtctgtggcgagatggactgttgagctatacagctccagtgggccaaacaatgtacttatctgaggccgtgtacctgaatgatagcacctatgacgggcacacggtgggcgggctgcaatacggaggcctaggacagcttgctgatggagtcgtggggctggatgacttcagaaagtcacaggaacttcgggtgtggccgggatatgactacgttggctggagtaatcattcctttagcagcggttacgtggaaatggaatttgaattcgatagactcagggcctttcaggcaatgcaagtacattgtaataacatgcatactctgggtgccagactacccgggggagtcgaatgtcgcttcaggagagggcccgccatggcctgggagggtgagcctatgagacataacctgggaggcaatctcggtgatccccgagcccgcgcagtgtcagttccccttggcggacgggtagcacggttcctccagtgtcgcttcctttttgccggcccctggctgctattctcagaaatttcgttcatatccgacgtcgttaacaatagttctcctgcattggggggtacattcccaccagctccatggtggccacctggtccaccaccgaccaatttttctagtctggagctcgagccgagaggccaacagccagtggccaaagcagagggctctccgaccgccatcttaatcgggtgcctcgtcgcaattattctgcttctgcttctcatcatcgcgctgatgctgtggcgacttcattggagaaggctattaagtaaggccgagcgccgggtgctggaagaggagctgacagtccatctgagcgtacccggcgacaccatccttatcaacaacagacccggaccccgcgagcctccaccataccaggaacccagacctcgcggcaatccaccccactcggcaccctgcgtcccaaacggatcggctctgctgctgagtaaccccgcctaccggctgctgctggccacctatgcacgcccgcccagaggccccggtccacctacaccagcctgggctaagcctactaacactcaagcctacagtggtgactacatggagcccgagaagcctggcgcccccctactccctcctccgccccagaactctgtaccacactacgcagaggccgatatcgtaacactgcagggcgtgacgggaggcaatacatacgccgttccagctctccctccaggagctgttggtgatggcccacccagagtagacttccccagatcaaggctgaggtttaaagagaaacttggcgaggggcagtttggtgaggttcatctttgtgaggtagactcaccccaggacttggtatctctggattttccgctcaacgtcagaaaagggcatccactactggtcgccgtgaaaatcttaagacctgatgctaccaaaaacgctcgaaacgactttctgaaagaagtgaagatcatgtcacggctaaaagacccaaacataatccgcctgttaggtgtctgtgtacaggatgatccactgtgcatgattacagattatatggagaatggagacctgaaccagttcttgtctgcccatcagctggaagacaaggccgccgagggcgcccctggcgacgggcaagctgcgcaaggaccaacgattagctaccctatgctgctacacgtggccgctcagatagcatctggaatgaggtatctagcaacactgaactttgtgcaccgcgatctggctactagaaactgtctggtaggggaaaacttcaccattaaaattgccgattttggaatgtcaagaaatttgtacgccggcgattattatcgagtacaagggcgagccgtgctgccaattagatggatggcctgggaatgtatcctgatgggcaagttcaccactgcaagcgacgtctgggccttcggagtgactctttgggaagtgctgatgctgtgtcgcgcccagcccttcggccagctcacggatgagcaggtcattgagaatgcgggagaatttttccgcgaccagggtaggcaggtgtacttatcacgcccgcctgcgtgcccccaggggctgtacgagctgatgctgcggtgttggagtagggagtccgaacagagaccacccttctctcaactccatcgctttctcgctgaagatgctttgaatactgtttag

SEQ ID NO: 12743 - RNA, 444 nt, synthetic construct
  misc_feature 1..444: note = source = /note="Description of Artificial Sequence: Synthetic coding sequence"
  source 1..444: mol_type = other RNA
atgggccctgaagcactgagttcgctgcttctactcctacttgtcgcttctggagacgcggatatgaagggccactttgatccagccaaatgtcgttacgctctaggcatgcaagatagaaccattcctgactcagacatttccgcctcctcgtcttggtctgattccacggcagctcggcactcccgcttagagtccagcgatggggatggagcttggtgtccggccggctctgtgttccctaaagaagaagagtacttgcaagtggacctacagcggcttcacctggtggcactcgttggtacgcaagggcgccacgcaggaggtttggggaaggagttttctcgaagctatcgacttcgatatagtcgtgatggtcggcgatggatgggttggaaagaccgatggggacaggaggtgattagtggaaacgaagacccgtag

SEQ ID NO: 12744 - RNA, 2631 nt, synthetic construct
  misc_feature 1..2631: note = source = /note="Description of Artificial Sequence: Synthetic coding sequence"
  source 1..2631: mol_type = other RNA
atgggtcccgaggccttgagctccctgctcctactgttgttggttgctagtggagacgccgatatgaaaggacactttgatcccgcgaagtgccgctatgctctgggaatgcaggataggacaattccggacagtgatattagcgcctcatccagctggtcagacagtaccgccgcccggcattccagacttgaaagctccgatggagacggtgcctggtgtcccgccggatctgttttccccaaggaggaggaatacctccaggtggacctgcagcgacttcacctcgtggccctggtaggcacacagggtaggcacgcaggggggttagggaaagaattttccagatcctataggctccgctattcaagggatggacggcgttggatggggtggaaagatcgctggggccaggaagtaataagtggtaacgaagacccggaaggcgttgtcctgaaagacctgggcccccccatggtcgcgcgcctggtgcgcttctatccacgcgccgatagggtgatgagcgtttgcctcagagtagagctgtacggctgcctctggcgcgatggactgctgtcctataccgcacccgtgggccagactatgtacttgtccgaggcagtgtatctcaacgatagtacttacgacggtcacacggtaggaggtctgcagtacggaggattgggacagttggccgatggcgtggtgggtctggatgattttagaaaatctcaagaactgcgggtttggcctgggtacgattatgtgggctggtccaaccatagcttctctagtgggtacgtggaaatggagtttgagtttgacagactcagagcatttcaggctatgcaggtacattgtaataatatgcatacactaggggcccggttacctggaggcgtagagtgcaggtttagaagaggaccagctatggcctgggaaggcgaaccaatgaggcataatctggggggaaaccttggtgacccacgggcaagagctgtcagtgtgccactaggcggacgcgtggcaagattcttacagtgtaggtttctcttcgccggaccatggcttctattctcggagatcagcttcatatctgatgtggttaacaattctagcccggccctaggtggcaccttcccaccggccccctggtggccccccggaccacctcccaccaacttcagctctctggaactagaaccccgtggccagcagcctgtggcaaaagccgagggcagcccaaccgccatcctgatcggatgcctggtggcaattatccttctactcctcttaatcatcgcacttatgctctggcgtctgcactggcggcgcctgctgagcaaggctgaacgtcgagtactcgaggaggagctgaccgtccatttgtctgtgcctggagatacgatactcattaataatagacccggccctcgtgagccacccccttatcaggagccaaggcctcgagggaatccaccccattccgccccttgtgtccccaatggctctgcctattctggagattatatggagccggagaagccgggagcaccactgttgccgccaccccctcaaaattctgtgccccactacgcagaggcagatatcgtcactcttcaaggagtgacaggaggcaacacatatgcagtcccagctcttccccccggagcagtgggagatggccctcctagggtagattttccgcgatcccggctaaggttcaaagagaagttgggtgagggacagtttggtgaagtacatctatgcgaggtggattctcctcaggatttagtgtccctggattttcctctgaatgttaggaagggccacccgctgctcgtcgcggtcaagattctacgcccggacgccacgaagaacgccaggaacgacttcctcaaagaagtgaagatcatgtctcgattgaaggacccaaatatcatccggctcctgggggtgtgcgttcaggacgacccgttatgcatgataaccgactacatggaaaacggcgatttaaatcaatttctgtcagcccaccagctggaggacaaggcagcagaaggcgctccaggggatggtcaggcagcccagggtcccactattagttacccaatgttgctgcatgtggctgcacagattgccagcggtatgagatatcttgcaactcttaattttgtgcaccgggatttagccacacgcaactgccttgttggagagaatttcacaatcaaaattgccgattttggcatgtcgcggaatctgtatgcgggtgactattatcgcgtacaaggtagggctgttctcccgatcaggtggatggcttgggagtgcattttaatgggtaagttcacgacagctagcgatgtgtgggcatttggggtcactctctgggaagtgcttatgctgtgtcgcgcccagcccttcggccagctgactgatgaacaggttatcgaaaacgccggggaattctttcgtgatcagggaagacaggtctacctctcccggccgcctgcctgtccccagggcctctatgagttgatgctgcgctgttggagtcgtgaaagcgagcagcgtcctcccttttcccagctacaccgttttctcgctgaagacgctcttaacaccgtgtag

SEQ ID NO: 12745 - RNA, 2631 nt, synthetic construct
  misc_feature 1..2631: note = source = /note="Description of Artificial Sequence: Synthetic coding sequence"
  source 1..2631: mol_type = other RNA
atgggacctgaagccctctcaagtctgctgctcttgctgctcgtggcttccggcgacgcagacatgaaaggccattttgatccagctaagtgtaggtatgcgcttggcatgcaggatcgcacaatcccagattcagacatctctgctagctccagctggtctgacagcactgctgcgcggcactctaggctggaatcttctgatggcgacggcgcctggtgccctgccggaagcgtctttcctaaggaagaagagtatcttcaggtcgaccttcagagacttcaccttgtggccctcgtgggtactcaagggcggcatgcggggggactagggaaagaattttcacgctcctatcgactgcgctacagcagagacggcagaaggtggatgggctggaaggatagatgggggcaagaagtgatctcgggcaacgaagatcccgagggtgtggttctgaaagacctgggcccaccaatggtggcccggctcgtgagattttaccctagagccgatcgtgtaatgtctgtatgccttagggtggagctctacggatgtctatggcgggatggcctgctcagctatactgcccccgtgggtcagacgatgtacctgtcagaggccgtgtacttgaatgacagcacgtacgatggacacaccgtgggggggcttcaatatggaggtctgggtcagttagctgatggtgtggtggggctcgatgattttaggaaatctcaagaactgcgagtatggccgggctacgactacgtcgggtggtctaatcactctttcagttctggctacgtggaaatggagtttgaatttgataggctccgtgcttttcaggccatgcaggtgcactgtaataacatgcacacactcggagcacgcctgcccgggggcgtggagtgtaggtttcgccgaggtccggcaatggcctgggagggggaacccatgcgccataacctcggcggaaatcttggcgaccccagagcacgcgccgttagtgtgcctctcggcggtagggtcgcacggttcctacagtgcagatttctattcgcaggtccctggttgctcttctcagaaatctctttcatttctgacgtggtgaacaattcatcacccgcattaggggggaccttcccacctgcaccctggtggccccccggacccccccctaccaatttctcgtccctagagctcgagccaagaggacagcaacccgtcgccaaagccgaaggcagccccacagcaatcctcattggatgtttagtagctatcattttactcctcctgttgatcatagcccttatgctttggagattacactggcgccgcttacttagcaaggcggaacggcgcgtgctcgaggaagaactcactgtgcatctgagcgtgccaggcgacacgattttgattaataatcggccaggccccagggagccccctccgtaccaggagccccgtccaagggggaaccccccccattctgccccctgtgttcctaatggtagcgcctactccggtgactatatggaacccgagaagccaggggccccgctcctcccccccccaccacaaaactcagttccacattacgcagaagccgacattgtcaccctacagggcgtgactggggggaatacctacgcagtacccgctttgcctcccggggcggtgggggatggaccaccgagagtcgactttccccggagccgcttgcgcttcaaagaaaaattgggggaggggcagttcggcgaagtgcacctgtgcgaagtcgatagtccccaggacctagtctcactggacttccccttgaacgtacgtaaagggcaccccctacttgtagctgtcaaaatcttgcgaccagacgcgactaagaatgccaggaacgacttccttaaggaggtgaaaataatgagccgattgaaagacccgaacattatccggctgctaggcgtttgtgtccaggatgacccgttgtgcatgattactgactatatggaaaacggagacttaaatcagttcctgagtgcgcatcaattagaggacaaggcagccgagggagcaccaggcgacggacaagccgctcagggacctaccatcagttaccctatgctgttacacgtggccgctcagattgccagcggtatgcgctatctggccactttaaacttcgtgcacagagacttggcaacaaggaattgtcttgtcggcgagaatttcaccatcaagatcgccgattttggcatgagtcgcaacctatacgcaggcgactattatagagtacagggccgtgccgtattacctatccgctggatggcttgggaatgcattctaatgggaaaattcacgaccgctagcgatgtgtgggcattcggggttacgttgtgggaggtgttaatgctttgccgagcacagccgtttggccagttaaccgacgagcaagtaatagagaacgctggggagttcttccgcgatcagggccgccaagtctacctcagtaggccaccagcatgccctcaggggctgtacgagttgatgctgagatgttggagtagagaatcggaacagcgtcctccatttagtcagttacatcgatttctggcagaagacgcactcaacaccgtgtag

SEQ ID NO: 12746 - RNA, 2631 nt, synthetic construct
  misc_feature 1..2631: note = source = /note="Description of Artificial Sequence: Synthetic coding sequence"
  source 1..2631: mol_type = other RNA
atgggaccagaggcgctgtcaagtctgctcctcctcctacttgttgcctctggtgacgccgatatgaagggccacttcgatcctgcaaagtgccgttatgcgctcggaatgcaggataggactattccagattccgatatttctgcatcctcctcgtggtcagatagcacagcagcccgtcactctcgactggagtctagcgatggcgacggtgcctggtgtccggctggtagtgtgttccccaaggaggaggaatatttacaggtggaccttcaaagactgcacctggtggctctcgtaggcacccaggggcggcatgcaggtggcctgggcaaggagttttctaggtcctatagacttaggtattcccgggatggaaggagatggatgggttggaaggatagatggggccaggaggttatttctggtaacgaagatccggagggggtggtcctcaaagacctcggaccacctatggtggcgaggttggtacgattctaccccagagcagacagggtgatgagtgtctgtctgcgggttgaactatatggctgtctgtggagagacggattgctcagttatacagctcctgtcggccagacaatgtatctgtctgaagcagtctacctgaacgattcaacctacgatggccacaccgtgggtggtctccaatatggcggactgggacaactcgctgatggtgtggttgggttggatgactttaggaagtcccaggagctccgcgtgtggcccggctacgactatgtcggatggtccaaccattcttttagctccgggtacgttgagatggaattcgaatttgatcggttacgagcctttcaggctatgcaagtccactgtaacaacatgcacaccctcggagcaaggctgcctggaggagtcgaatgccgatttagacgcgggccagctatggcttgggagggcgagccaatgcgccataacctgggaggcaatctgggcgacccgagggcccgtgctgtgtctgttcctctcgggggcagggtggctaggttcctgcagtgtcgatttctgttcgccggcccttggctgttgttttctgagatttcattcatttccgacgtggtcaacaacagcagtcccgctttaggcggcactttccctccagcaccatggtggccccctggccctccgcctacaaacttcagcagtctcgaacttgaaccacgtggacaacagcccgttgcgaaagcagagggcagccccaccgcaatcttaataggctgcctggtcgccatcattctgcttctcttgctcattattgccctgatgctctggaggctgcactggcgccgcctgctctccaaggccgagagacgggtgctcgaagaagaattaactgtacacttatcagtccccggcgatacaatcctcattaataatcgtccaggtcctcgcgaaccccccccctatcaggaacctagaccccgtgggaaccctccccactctgccccctgtgttcccaacggtagtgcctactctggggattacatggaacctgagaagccaggagccccccttctcccgccccctcctcagaacagtgtaccacattacgcagaggctgatatcgtcaccctgcagggagtgaccggagggaatacctatgctgtgcctgcactccccccaggggctgtgggcgacggcccacctagagtggacttccctcgatcacgtttacggttcaaggaaaaactgggcgagggtcagttcggcgaggtccacttgtgcgaagtcgatagcccccaggatctggtgtctctcgactttcctctcaacgttcggaagggacatccactcttagtggcagtgaagattttgcgccccgacgccacaaaaaatgccaggaacgatttcctcaaagaagtgaaaataatgtccaggctaaaagaccctaatattatccgcctactcggcgtgtgtgtccaggatgatccactttgtatgattaccgattacatggagaacggggacttgaaccagtttctctctgcccatcagctggaggacaaggctgccgagggagctcccggtgacggccaagccgcgcaggggcctacaataagttaccctatgctgttgcacgtagccgcccagattgcgagcgggatgagatatctagctactttgaatttcgtgcaccgagatctcgctacacgaaattgcctggtgggagaaaacttcactataaaaattgccgactttggcatgagtagaaacctgtatgcaggagactactacagggtgcagggaagggccgtcctgcctatcagatggatggcatgggaatgtatccttatgggtaagttcacgaccgcatccgatgtttgggccttcggcgtcacactgtgggaagtgcttatgctgtgcagggcccaaccatttggccaactcacagacgaacaggtgattgagaacgctggggagttctttagagatcaaggacgccaagtgtatctgtccagaccccccgcttgtccccaagggctgtacgaactaatgttgaggtgttggtccagggaaagcgagcaacgtcccccattctcccagctgcataggtttctagcagaggacgcccttaatacagtatag

SEQ ID NO: 12747 - RNA, 2742 nt, synthetic construct
  misc_feature 1..2742: note = source = /note="Description of Artificial Sequence: Synthetic coding sequence"
  source 1..2742: mol_type = other RNA
atggggccagaagccctgtcctctctgctgttactgttgctggttgctagcggtgatgccgatatgaaagggcacttcgatccggcaaaatgtcggtatgcccttggcatgcaagatcggacaatccctgattcagacatttctgctagctcttcttggtccgattctacggcagccaggcatagtcgtttggagtcgtctgatggcgacggtgcttggtgtcccgctggttctgtgttccctaaggaagaagagtacctacaagtcgatctccagcgcctccacctggtggccctggttggtacgcagggtcggcatgcgggaggcctcggcaaggagttcagtaggagctacaggctgcggtatagtcgagatggacgccggtggatgggctggaaggacagatggggccaggaagttatctcaggcaatgaggatcccgagggtgtagtgcttaaggacctggggcctccaatggtcgccagactcgtgcgcttttatccaagagcagatcgtgttatgtctgtgtgcctaagggtcgagctatacggatgcctgtggcgggacggcctgttgagttacactgcgcctgtgggacagactatgtacctgtctgaggctgtgtatttgaatgatagcacctacgacggtcatactgttgggggactccagtatgggggcctagggcagctggcggacggtgtcgtcgggttagatgactttcgtaagtctcaagaattaagggtctggcctggctacgattacgtggggtggagcaaccattctttcagctccggctatgtcgagatggagtttgagttcgaccggcttagagccttccaggccatgcaggttcactgcaataatatgcatactctcggcgcaagactccccggaggggtcgagtgccggtttcgcaggggccccgccatggcatgggaaggcgaaccgatgagacacaacctgggcggcaacctgggtgacccgagagctagggctgtgtctgtcccactcggcggccgggttgctcggttccttcagtgccgatttctgtttgcaggcccatggctgctcttctctgagatttcatttatatccgatgtcgtgaataattcttcccctgctctcggtggaacattcccccccgctccatggtggccaccaggccctcctcctaccaatttcagcagtttagaactagaaccaaggggccagcagcccgtggcaaaagccgagggatcccccacagctatactcattggatgtctggtggctattatcctgcttctactcctgattatagctctcatgctctggcgactccactggagaagattactgtcgaaggccgagaggagagtactggaggaagagctcacagtgcacctgagtgttcccggagacaccattctgatcaataatagaccaggcccaagggaaccccccccctaccaagagcccagacctagagggaatccaccccattctgcaccttgcgtcccaaacggctcagctctcctgctgtcaaaccccgcctacagactgctcctggctacgtatgcgagacccccaaggggaccaggtccccccacacccgcttgggctaaaccaaccaacacacaggcctacagtggtgactacatggaacccgaaaaacctggcgctcccctcttaccacctccacctcagaactcagttccccactacgcagaggcagatattgtcaccttacagggagtcactgggggaaacacctatgctgtgccagccctccctccaggtgccgtaggcgatgggcctccaagagtcgatttcccgagatctagactgcgattcaaggagaaacttggggagggccagttcggggaagtccatctgtgcgaagtcgactcccctcaggacctggtgtccctggactttccactgaatgtccgaaagggccaccccctcttagtagccgtgaagatccttagaccagatgccactaaaaacgcacggaatgactttctgaaggaagtcaaaattatgtcccggttaaaagaccccaacattatccggcttcttggagtatgtgttcaggatgatcccctttgtatgatcaccgactatatggaaaacggggacttaaatcagttcctgtcagcacatcaactcgaagacaaggccgctgagggtgcacctggagacggccaggcagcccaggggcctactattagctaccctatgctcttacacgtcgcagcccagatcgcatctgggatgaggtacctcgctaccctgaatttcgttcatcgcgaccttgccactcgcaattgtctcgtcggtgaaaattttacaattaagatcgccgactttggcatgtcccgaaatctgtacgcaggagactactatagagtgcagggtagagctgttctgcccatccggtggatggcttgggagtgtatactcatgggaaaatttactactgctagcgacgtgtgggccttcggtgtcaccctgtgggaggtcctgatgctatgccgtgcacagccattcggacaactcactgatgagcaggttattgaaaatgccggtgagttttttcgcgatcaggggcgtcaggtttacctctcccgccctccagcctgtccccaaggactgtacgaattgatgctgcgctgctggtcacgcgagagcgaacagagaccacccttttcacagttgcatcgcttcctggctgaggacgccctgaacacagtgtag

SEQ ID NO: 12748 - RNA, 2742 nt, synthetic construct
  misc_feature 1..2742: note = source = /note="Description of Artificial Sequence: Synthetic coding sequence"
  source 1..2742: mol_type = other RNA
atgggacccgaggccctctcttcacttctgcttctgctgctagtggcctcgggagatgccgacatgaaagggcactttgaccctgcaaagtgcaggtacgcacttggaatgcaggatcggacaatccccgacagtgatatctctgcctcctcatcttggtctgatagcactgccgcccgccactcacggctagaaagctcagacggagacggggcttggtgcccggcaggaagtgtgtttcctaaggaggaagagtatctccaggtggaccttcaacgcttacacctcgtggccctggtggggacccaaggaagacatgccggcggcctggggaaggagttctctagatcctataggctgaggtacagtagagacggacgtagatggatggggtggaaggacaggtggggtcaggaggtgatatccggtaacgaagacccagaaggtgtggtcctgaaagatttaggcccacctatggtggcaaggctggtcagattttatccgcgggccgatcgagtaatgtctgtgtgtttgagagtcgagttgtacgggtgtctatggcgggatggacttttatcgtatacggcgccggtgggtcagactatgtacttgtccgaagccgtgtatttgaacgactccacctacgacgggcataccgtagggggcttacagtacggtggactgggacaactggccgatggagtcgtaggcctagatgattttcgcaaatcacaagaattaagggtgtggccaggctacgattacgtggggtggtctaatcactctttttcctctgggtatgtggagatggagttcgagttcgatcggctgcgggccttccaggctatgcaggttcactgcaataacatgcacaccctcggtgcaagactgcccggcggcgtcgagtgtcgtttcagaagagggcctgctatggcttgggagggtgaacctatgcgccataatcttggaggcaacctcggggatccccgcgcccgagctgtttcagtgcccctgggtggtcgggttgctagattcctacagtgtcggtttctctttgccgggccgtggctgcttttttcagagattagttttatatcggacgtggtgaacaattcatcacctgcactcgggggcaccttccctcctgccccgtggtggcccccgggaccccctcccaccaattttagcagtttggagctggagccaagggggcagcaaccggtggctaaagctgagggctctcccacggccatcttaattggctgtttagtggccataatccttcttctcttattgatcattgccctgatgctgtggcgactgcactggcggcgactgctctctaaagcagaacgtagagttttagaagaagagctcactgtgcacctctcagtcccgggagataccatactcataaataatagacctggtcctcgcgaaccgcctccttaccaggagccaagaccgcgagggaacccaccacatagtgccccttgcgtgcctaacggcagtgctctcctgctgtccaaccccgcgtacagactgctcctcgcaacatatgccagaccaccacgggggcccggcccgccaactccagcatgggccaagcccacaaacacgcaggcttactctggagattatatggagccagagaagccaggagcaccactactcccgccccctccccaaaattctgtcccgcactatgcagaggccgacatcgttaccctccaaggtgtgactggtggaaatacctatgccgtacccgccttacctcccggtgccgtaggtgatgggcccccaagagtcgatttcccgcggtcaaggctgagattcaaggagaaactgggagagggtcagttcggggaggttcacctgtgcgaggtggacagtcctcaggaccttgtgtctctggacttccctctcaacgtaagaaaaggtcaccccctcttagtggccgtgaagattctgagaccggacgcgactaagaacgccagaaacgattttctcaaagaggttaagatcatgtcccgactgaaagatccaaacatcatacgcctgcttggagtgtgcgtgcaagacgatccactgtgtatgattacagactatatggaaaatggcgacctaaaccagtttctttccgcccatcagttagaggacaaagcagccgaaggtgcaccaggcgatggccaggcagcccaggggcctacaatttcttacccaatgttgctccacgttgccgcacagattgctagtggaatgcggtaccttgccacacttaacttcgtccaccgggacctggcaacgaggaactgtctggtgggagagaactttacaataaagatagccgatttcggaatgtccaggaacctctacgcaggtgactactacagggtccagggcagggcagtgcttccaatccgttggatggcatgggagtgtatattgatggggaaattcaccactgcaagcgatgtctgggcttttggagtcacactctgggaagttctgatgctttgtcgtgcgcaaccatttggccagctgacagacgaacaggtaattgagaatgctggggagttttttagagaccaagggcgtcaggtctacctctctcgtcctccagcctgtcctcagggtttgtatgagctgatgctgagatgctggtcacgggagagtgagcagaggcctcctttttcacagctgcacaggttcctagccgaggatgcacttaatactgtttag

SEQ ID NO: 12749 - RNA, 309 nt, synthetic construct
  misc_feature 1..309: note = source = /note="Description of Artificial Sequence: Synthetic coding sequence"
  source 1..309: mol_type = other RNA
atgtcggtaatgaaaccgtgtctcatgaccatagcaattcttatgatcctagcacagaagaccccgggcggcctttttagaagtcataacgggaaatctagagaaccgtggaacccttgtgaactgtaccaggggatgtgtcgcaatgcatgccgcgagtatgagattcagtacttgacctgtcctaatgatcagaagtgttgtctaaaacttagcgtcaaaatcacatccagtaagaatgtcaaagaagactatgactcaaatagtaaccttagcgtgaccaactcctctagttacagccatatctag

SEQ ID NO: 12750 - RNA, 267 nt, synthetic construct
  misc_feature 1..267: note = source = /note="Description of Artificial Sequence: Synthetic coding sequence"
  source 1..267: mol_type = other RNA
atgctccctgaccattttagccctcttagcggggatattaaactgtccgttttagccttagtggtattggtggtacttgctcagactgcgccagacgggtggataagacggtgctactatggaaccggtagatgcagaaagtcatgcaaggaaatagaacgaaaaaaagagaaatgcggcgaaaagcatatatgttgcgtgcccaaggagaaggataagctctcacacatccacgatcaaaaagaaacctccgagctgtacatatag

SEQ ID NO: 12751 - RNA, 1401 nt, synthetic construct
  misc_feature 1..1401: note = source = /note="Description of Artificial Sequence: Synthetic coding sequence"
  source 1..1401: mol_type = other RNA
atgaagcccccactgctcgtcttcatcgtgtgcctgctctggttaaaggactctcattgcgcacccacatggaaagacaagacagcgatttcagagaaccttaaatctttctcagaggtaggagagatagacgccgatgaggaggtaaagaaggccttaaccgggatcaagcagatgaaaattatgatggagaggaaagaaaaagaacacactaacctaatgtcaacacttaagaagtgtcgcgaggagaagcaggaagccctaaagttgttgaatgaagtgcaggagcaccttgaggaagaggaaagactgtgccgagaaagcctggccgatagttggggcgagtgtcgctcatgcctcgaaaacaattgcatgcgcatttacaccacgtgtcagccaagctggtctagcgtgaagaataaaatcgagaggttctttcggaaaatttaccaatttctgttccctttccacgaagacaacgagaaggacctgcctatttcggaaaagctcatcgaagaggatgctcaacttactcaaatggaagatgttttttcccagttgacagtggacgtgaacagcctttttaacagatcgtttaacgtttttagacaaatgcagcaggagttcgatcagaccttccagtcccactttatctcagacacggatctcacagaaccatacttcttcccagctttctccaaagagccaatgaccaaggccgacctggagcagtgttgggatatccccaatttctttcagctcttctgcaatttctccgtgagtatatatgagtccgtgtccgaaacaatcaccaaaatgttgaaggctatcgaggatttacccaaacaagataaggcccctgatcatggggggctgatttcgaagatgcttcctggccaggacaggggtctgtgcggcgaactggaccaaaacttgagccggtgtttcaaattccatgaaaagtgtcaaaagtgccaggcccacctatcggaggattgcccagacgtgcctgctctgcatacggaactggatgaagctattagacttgtgaacgtcagcaaccaacaatacggacagatactgcagatgaccagaaagcatttagaggacaccgcctacctcgttgaaaagatgcgtggccagttcggttgggtaagtgaactcgccaaccaggcacccgagactgagatcattttcaactctattcaggtggtcccgagaatccatgaagggaatatttctaaacaagacgagacaatgatgaccgacctgtctattttgccgtcgtctaatttcaccctcaaaattcccttagaggagagtgccgagagctccaacttcattggctatgttgtcgcaaaggcgttgcagcacttcaaggagcattttaaaacatggtag

SEQ ID NO: 12752 - RNA, 207 nt, synthetic construct
  misc_feature 1..207: note = source = /note="Description of Artificial Sequence: Synthetic coding sequence"
  source 1..207: mol_type = other RNA
atgaaactgtgtgtgactgttttgtccctgctagtacttgtggctgccttttgttcacttgccctgtctgcacccaccaaatccagcgagtggaaattgcaaggtgtgtgtttccagtgttgcagtgggaaggatcctatccatcaaagctgtccgacctggacaatggttcgccagagaaagatgcccaccaccggaaagggttag

SEQ ID NO: 12753 - RNA, 420 nt, synthetic construct
  misc_feature 1..420: note = source = /note="Description of Artificial Sequence: Synthetic coding sequence"
  source 1..420: mol_type = other RNA
atgtacaaactggcatcatgttgtttgttgtttattgggtttctcaaccccctcctgtccctgcccctgctggatagtcgcgaaatctcttttcaattatctgccccacacgaggatgcccgccttacccctgaggaattagagagggcctcactgttgcaaattctgccggaaatgctgggggccgagcggggagatatccttcggaaggccgattcatcaactaacatattcaatcccagaggtaacttgcgtaagttccaggacttctccggacaggaccccaacattttgttatctcacctgctggctagaatttggaaaccctacaaaaagcagcggcgtaaacttcggcaagaccttagattatggaaaaaggagcccggccttagaatcttcaagaactatgtatatatctag

SEQ ID NO: 12754 - RNA, 1974 nt, synthetic construct
  misc_feature 1..1974: note = source = /note="Description of Artificial Sequence: Synthetic coding sequence"
  source 1..1974: mol_type = other RNA
atgaggacagtcgttctcactatgaaagcgtctgtgatagagatgttcctggtacttttagtcaccggagttcattcgaataaggagacagctaaaaaaatcaaacgacctaagttcaccgtgccacaaatcaactgcgacgtcaaggccggaaagattatagatcccgaattcatcgttaaatgtccagcagggtgtcaggatccaaagtaccatgtgtatggaactgatgtttacgcatcctactcctctgtctgtggtgccgccgttcactccggcgtgctcgataatagtgggggtaagatattagtcagaaaggtggcaggtcagtcaggctacaaagggtcttatagtaacggcgtgcagtctctaagcttaccacggtggagggagtctttcatcgtcctggaaagcaaacccaaaaaaggggtgacctaccctagtgcgcttacgtactctagcagtaaaagccccgcagcccaggcgggcgagacaacaaaagcctaccaaagacccccaattccaggtaccactgctcagccagtcacactaatgcaactacttgcggtgaccgtcgcagtcgctacgccaacgacccttccccgccctagcccatccgctgcttcgacgacctctatccctagacctcaatccgtggggcaccggtctcaggaaatggacctgtggagcactgcaacctatacgtcctcgcagaatcgcccacgagcagatccaggaattcagcgacaggatccgtcaggagccgctttccagaaaccagtgggcgctgacgtgtccttggactgtaaaattgacttatcattcttgatcgacggctcaactagtatagggaagcggcggtttcgaatccagaagcagctgctcgcagacgtagcacaggccctggacattggcccggccggtcctcttatgggcgttgtacagtacggagacaatccagccacacactttaatcttaagacgcacacaaattctcgtgatcttaagaccgccatagagaaaataactcaaagaggtggcctcagcaacgttggaagggccataagctttgtcactaagaattttttttcgaaagcgaatggaaaccgttccggagccccgaatgtagttgtagtgatggttgacggatggcccacagacaaagttgaagaagctagccggctggcaagagagtccggtattaacatcttttttattaccatagaaggggcagccgaaaatgagaagcagtatgtggtggagcccaactttgcaaacaaggcagtctgccgaacaaacgggttttactctttacatgtccaatcatggtttggcctccacaaaacattacagcccctggtgaaacgggtgtgtgacacggacaggctggcctgtagtaagacatgcttaaattctgcagacattggctttgttatcgacggctcatcatcagtgggaaccggaaatttccgcaccgtcctgcagtttgtgacaaatctaaccaaagagtttgagatttctgataccgatacacgcattggtgccgtacaatacacatatgaacaacgtctcgaatttggttttgacaagtactcttcgaaacctgatatactcaatgcaatcaagagagtgggctactggagtggcgggacttcaacgggagccgctatcaattttgcacttgagcagctgtttaaaaaatcaaagccaaataaacgcaaactcatgatattgatcaccgacggccgcagctacgacgatgtgaggattcccgcaatggctgcgcatttaaagggcgtcatcacttacgctattggggtggcctgggctgcgcaagaggagcttgaggtgatcgctacccacccagcccgggatcatagcttcttcgttgatgagttcgacaacctccaccagtacgtcccacgtattatccagaatatctgtacagagttcaacagtcagcccaggaattag

SEQ ID NO: 12755 - RNA, 3975 nt, synthetic construct
  misc_feature 1..3975: note = source = /note="Description of Artificial Sequence: Synthetic coding sequence"
  source 1..3975: mol_type = other RNA
atgagacatggcgtggcctgggccttgctggtggccgccgctctggggctgggcgccagaggagtgcgcggggccgtggcactagcggacttctatccttttggtgctgaaagaggcgatgccgttacacccaagcaggatgatggtgggtcggggcttcgccccctgagtgtgcccttccctttcttcggcgccgagcactccggtctgtatgtaaacaacaacggcatcatctcattcctcaaggaagtgagccaattcacccccgtggcctttccaatcgccaaagaccgctgtgtggttgcagctttctgggccgacgtcgataacagaagggcaggcgacgtgtattaccgcgaggcaacagatcctgcaatgcttcgcagagccaccgaggacgtgcgccactattttcccgagctgctggactttaacgccacatgggtcttcgtagctacatggtaccgcgtgactttctttggcggcagctccagcagtcctgttaatacgttccagaccgtgcttattactgacggtaagctgtctttcacgatattcaattacgagtcgattgtgtggactaccggaacacacgcttcaagtggaggaaatgcaaccggccttggcgggatagcggcccaagccgggtttaacgctggagatggacaacgatacttcagcattcctggctcaagaacagccgacatggcagaagtggagacaactaccaacgttggggtgcctggacggtgggcgtttagaattgatgatgcacaggtgcgggtcggaggctgcggccacactacctccgtgtgcctggccttgagaccctgtcttaacggtgggaagtgcattgatgattgcgtgaccggaaatccaagttatacttgctcctgcttgagcggcttcaccggacggcgctgccacctcgacgtaaatgagtgtgcaagtcagccatgtcagaacggaggcacctgcacacatggtatcaatagtttccgatgtcaatgccccgcaggcttcggcggacccacttgtgaaacagcacagagcccatgcgatactaaggaatgccagcacggaggacagtgccaggtggagaatggcagcgccgtgtgcgtgtgccaagcaggctacaccggggctgcttgtgagatggatgttgacgattgttcccctgacccttgtctaaatggcgggtcatgcgtggacctcgttggcaattatacctgtctttgcgccgagccattcaaaggccttcgctgtgaaaccggagaccaccccgtgccagacgcctgcctctcagctccctgccataacggaggaacctgcgttgatgcagatcagggttatgtttgcgagtgccccgagggttttatgggtctggattgtcgggagagagtgcccgatgactgtgagtgcagaaatggggggcgctgcctgggggcaaacactacattgtgtcagtgtcccctgggtttctttggcctactctgtgaatttgaaataacggcaatgccttgtaacatgaatacccagtgtccagacggcggctattgtatggaacatggtggaagttacctgtgtgtttgtcacaccgatcacaacgcatcacatagcctgcctagtccttgtgattctgatccatgtttcaatgggggatcttgtgatgctcatgatgatagttatacctgtgagtgccctagagggttccacgggaagcattgtgagaaggcacgcccacatttatgttcatctgggccctgccgcaacgggggtacctgcaaggaggctggcggcgaatatcactgcagctgtccctacaggtttacagggcgccattgtgaaatcggcaagcctgattcatgcgctagcggaccttgccataacgggggcacttgctttcactacatcgggaagtacaagtgcgactgcccgcccggctttagcggcaggcactgtgagatcgctccaagtccatgctttcgcagcccatgtgtgaatggaggcacctgcgaagacagggataccgattttttttgccactgccaagcaggatacatgggtcgacggtgccaggcagaggtggactgcggacctcctgaagaagtcaaacatgcaacactgcgtttcaacgggacccgactgggagcagttgccctgtacgcttgcgaccgtgggtacagcctatcggctccatctagaattagggtctgtcagccccatggtgtttggagcgaaccacctcagtgtctcgaaatcgacgagtgccgctcacagccttgcctgcatggcgggtcctgccaggaccgcgtcgctggatatctgtgcctgtgttccactgggtacgagggagcccactgtgaactagaacgtgatgaatgcagagcccacccttgtagaaacggcggttcttgccggaacctccctggggcatacgtctgtagatgccccgccgggttcgttggtgtgcactgcgaaaccgaggtggacgcttgcgacagctccccttgtcagcacggaggtcggtgtgagagtggaggtggggcatatttgtgcgtgtgtcccgagagtttttttgggtaccactgcgagaccgtttctgatccttgcttcagttccccctgcggaggaagaggatattgccttgccagcaatggctctcacagttgcacgtgcaaagttggttacactggtgaagactgtgcgaaggagcttttcccaccgacagccttaaaaatggagagggtggaagagagtggtgtcagcatctcctggaatccccccaacggccctgccgccagacagatgttagacggttacgccgtgacctacgtgagcagtgacggtagctacaggcggacggattttgtagaccggactcgttcttctcatcagctgcaggccctcgccgccggtcgagcttataatatcagtgtctttagcgtcaagagaaactcaaacaacaagaatgacatatcccggccagctgtgctgctcgccagaacccgacctagacccgtagaaggcttcgaagtgaccaatgtcaccgcgtcaaccatatcagtccaatgggcacttcataggatcagacacgcaacggtttcaggtgttagagtaagtatccggcatcccgaggccctgcgggaccaagccaccgatgtggaccgctcggtcgatcggtttacattcagggcgcttctgcccggtaagaggtacacaattcagctgacgactctctcaggcctgcgtggtgaggaacacccaactgagagcctggctaccgctcctacacacgtgtggacccgaccattaccccctgccaatctgactgccgcccgagtgacagctacaagcgcccatgtagtgtgggacgcaccaacacctggaagcctgctcgaggcttacgtgatcaatgtgaccacatcccagtccaccaagtcgcggtatgtgccaaatgggaaactggcctcgtacactgtccgcgatctactcccgggccgaaggtaccagttaagcgtgatcgcagttcaaagcaccgaattaggccctcaacactcagagcccgcgcatttatatattatcacctctccaagagatggtgcggaccggcgctggcaccaaggaggacatcaccccagagtcctgaaaaaccgccctccccccgccaggctcccagaactgagacttcttaatgatcattccgcccctgagacccccacccagcccccacgcttcagcgagctggtcgacggtcgcgggcgagtcagtgctcgctttggaggatctcctagcaaggctgctaccgtgcgctcccagcccacagcttcggcccaattggagaacatggaggaggcccctaagcgcgtatctctggccttgcagcttcctgaacatggtagcaaggacatcggttctgaatccgcagccctggtaggcaccctggggttgaccgactgctcacagggcccctag

SEQ ID NO: 12756 - RNA, 732 nt, synthetic construct
  misc_feature 1..732: note = source = /note="Description of Artificial Sequence: Synthetic coding sequence"
  source 1..732: mol_type = other RNA
atgggcatcttcctggtttacgtaggctttgtgttcttctcagtgctgtacgtacaacagggacttagtagtcaagctaaatttacagagttcccccgaaatgtaaccgccaccgaaggccagaatgttgaaatgtcgtgtgcgtttcagagcgggtctgccagcgtatatcttgagatccaatggtggtttttgagaggcccagaagacttggatccaggcgcagaaggagctggcgcacaggtggagctgctgccagaccgggacccagatagtgacggtacaaagatttctacagtcaaggtgcagggaaatgacatcagtcataaattacaaatctccaaggttagaaaaaaggatgagggactctacgagtgccgcgtgacagatgccaactatggcgaactgcaggagcataaggcccaggcttacctcaaagttaacgccaactctcacgcgcgaagaatgcaagcttttgaagccagcccaatgtggctgcaagacatgaagccaagaaagaacgtctccgccgccataccatctagtattcacgggtctgccaatcaacgtacacactcaactagtagccctcaggtcgtcgccaaaatccctaagcagtctccccagtctggcatggagacccacttcgaaccttttattttacctctgaccaatgctccacagaaaggccaatcttatcgggtcgatcgttttatgaacggggacttttag

SEQ ID NO: 12757 - RNA, 1218 nt, synthetic construct
  misc_feature 1..1218: note = source = /note="Description of Artificial Sequence: Synthetic coding sequence"
  source 1..1218: mol_type = other RNA
atgtggtatgtttcaacacgaggagttgcacctcgggtgaattttgagggggctttatttagcggctacgcacccgacggcggcctgttcatgcctgaagaacttccacagctagatcgaggcacactgtgccagtggtctaccctttcctatcccgggctggtgaaagagctctgcgccctctttattggctctgagttgctgccgaaggatgaactcaacgatctgattgatcgggcattcagcagatttcggcacagggaggtggtacacttatctaggctcagaaatggtctgaacgttctcgagttatggcatggtgtgacctacgcatttaaagacttgagcctgagctgtacaacacagttcctgcagtactttttagagaagcgcgagaaacatgtcactgtcgtagtagggacaagcggcgacactggctcagcagctatcgagtccgtgcagggagcgaaaaatatggatatcatcgttctgctgcctaaggggcactgtaccaaaattcaggagctgcagatgacaacagtgttaaaacagaatgtccacgtgtttggggtggagggtaacagcgatgaactggatgagcctatcaagacagtgttcgcagacgtcgcctttgtcaaaaaacacaaccttatgtccctgaactcaattaattggtcccgggtcctcgtgcagatggcgcatcactttttcgcgtacttccagtgtacaccctctctggacactcatccactgccgctagtcgaggtagtagtgcctacaggagccgccggcaacctggccgccggttatatagctcaaaaaataggtctcccaatccgactcgtggtggctgtgaaccgtaatgacattatccatagaaccgttcagcaaggggacttcagcttgtccgaagctgtgaagagcaccctggcttctgctatggacatccaggtgccctataatatggaacgagtgttttggctcttgagcggttccgactctcaggtgacacgtgctttgatggagcagtttgaaagaacacagtctgtgaacctccctaaagaactccactctaaatgggaaaggcaagattatgagaagatggccgtgatggagtgcgatggttgttgcgtggagctgtgtttgggcaattgtggcccacggagaggcagcgtgacagatatacccggtaccgcaatggttaggggggggggatag

SEQ ID NO: 12758 - RNA, 573 nt, synthetic construct
  misc_feature 1..573: note = source = /note="Description of Artificial Sequence: Synthetic coding sequence"
  source 1..573: mol_type = other RNA
atgcgcacagttgttttgacaatgaaagctagcgtcatcgagatgttcctggtgctcctcgttacaggcgtgcactccaacaaagaaaccgccaagaagattaaaagaccaaagttcaccgttcctcaaatcaactgtgatgttaaagccgggaaaattatcgacccagagtttatcgtgaaatgccctgcgggatgccaggacccaaagtaccacgtctacggcactgatgtgtatgcctcttattcatccgtctgcggcgctgctgttcattctggtgtgttagacaattccggcggaaaaatcttagtgaggaaagtggccggtcagtctgggtacaaaggctcctacagtaacggagtccagtctctgagtctcccacgctggagagagtcttttatcgtgttggaaagtaagcccaaaaaaggggtgacctacccctcagccctgacttactctagtagtaaaagccctgccgcgcaggccgatttatggagcacagcaacctacactagttcccaaaaccgccctagggcagaccctgtccagcgccagccatgttactctctctag

SEQ ID NO: 12759 - RNA, 399 nt, synthetic construct
  misc_feature 1..399: note = source = /note="Description of Artificial Sequence: Synthetic coding sequence"
  source 1..399: mol_type = other RNA
atggcccccagtccaagaacgggttcgcgacaggatgccaccgcattgcctagtatgtcatccaccttctgggccttcatgatcctcgcctccttactcatagcatattgttcacaattagctgccggcacctgcgaaattgtgacgttagaccgtgatagctcccagccccgcaggacaatcgcacgccagacggccaggtgcgcctgtaggaagggccagattgctggtacgacccgcgcccgccccgcctgcgttgatgctcgcatcatcaagactaaacagtggtgcgacatgctgccatgtctagaaggagaaggatgtgatctgcttatcaatagatcaggttggacatgtacccagcccggaggaagaatcaaaacaacaaccgtgtcttag

SEQ ID NO: 12760 - RNA, 957 nt, synthetic construct
  misc_feature 1..957: note = source = /note="Description of Artificial Sequence: Synthetic coding sequence"
  source 1..957: mol_type = other RNA
atgttaccactgactatgacggtcctgatcctgctgttactgcctacggggcaggccgcccccaaggacggcgtaaccagaccggacagcgaagttcagcatcagcttctgcctaaccctttccagcccggacaggaacagctgggtctgcttcagagttatctcaagggtcttggccggactgaggtacagttggagcatctgagtcgggagcaggtcctcctctatctgtttgcactgcacgattacgatcagagcggccagctggacggcctggaactattatccatgctcaccgccgccctcgcacccggtgcagccaattccccaacaacaaaccccgttatattaattgtggacaaagtcttagaaactcaggatttgaacggagatggtctgatgacaccagccgaactgataaactttcccggtgtagcattgaggcacgttgagccgggggagcctctggcccccagccctcaagagccacaagctgttggccgccagtcactgctggctaagagcccacttaggcaggaaacccaggaggcacccggaccacgggaggaagctaagggacaagtcgaagcgagacgggaaagtcttgaccctgtgcaggagcccggtggacaagccgaagctgatggagatgtgccgggaccacgtggcgaggccgaaggtcaggccgaagctaagggagacgcacctggcccgagaggggaagcaggtgggcaggccgaggccgagggcgatgctcccgggccccggggtgaggccggcggccaggccgaagcagagggagacgcaccaggcccccgaggagaagcaggcggacaggccgaggctagggagaatggagaggaggctaaggaactgcctggggagacactggagtcaaaaaacacccagaacgactttgaagttcacatcgttcaggtggaaaacgacgaaatttag

SEQ ID NO: 12761 - RNA, 399 nt, synthetic construct
  misc_feature 1..399: note = source = /note="Description of Artificial Sequence: Synthetic coding sequence"
  source 1..399: mol_type = other RNA
atgctgcctctcaccatgacagtgctgattctcctcctcctccccacgggtcaggcagcacctaaggatggcgtcaccaggccagactctgaagttcaacaccagttattgcccaatccttttcagccaggacaagaacagctgggacttttgcaatcttacttgaaggggctcggccgaactgaagtccaactagagcaccttagcagagagcaggttctgttatatttatttgccctgcacgactatgaccagagcggtcagctggatggcttagagctgcttagcatgttgaccgcagcccttgcccccggcgcagccaacagccccacgaccaaccctggaaatctggatgcacggctcgacggaggcgaaaaagcaatgcagccccagtggtag

SEQ ID NO: 12762 - RNA, 732 nt, synthetic construct
  misc_feature 1..732: note = source = /note="Description of Artificial Sequence: Synthetic coding sequence"
  source 1..732: mol_type = other RNA
atgctgctctctttactgggcgcttgcgctgtagtgggccccttccatggcccagagtgggagcccgtgcaaggactgctctcccaaaatcacagttgcagggatcctcagtgttgtgggaacctcttagtgctgtgcctcttcctggtttggcaagtgcggcattgttggcatcaggtcacaagaaccagattcagtacacggaatgtcattaaggtgccgctgcaaaagagagccgtgccatccatgcgctgcgagacagtgttcaagctgaccccagagttcttctctccaggtaagagccgaggccttgactcccaacagtgcgctcagaggcagcggtggggttatagacggagcctgcaagaaagctgggcccagaacctgctgtctcctcaacacccttgcccgggacctccttccggagtccacacccattccgaaccaatcttttgcaccacctcaattagcaacacttgtctgcttcctcaaaattcttcctggaaagcctggcaagtgccgtggtgtctccacgatggccagaccagaccagccttggatatgtgccaggaaatggaacaactcctcctccactctcaggagcgcctcgtatcgttagaacccgtcattagcgtccgcagtcgccctacatcgatgaccctgacaacttccctgccaaatctgctgtctgcagaaagattacaattctgtccgcagcgtgcacccgcttag

SEQ ID NO: 12763 - RNA, 2505 nt, synthetic construct
  misc_feature 1..2505: note = source = /note="Description of Artificial Sequence: Synthetic coding sequence"
  source 1..2505: mol_type = other RNA
atgaaacatacactggctctgttggcaccactgttgggattaggtctaggattggcactatctcaattagctgctggcgcaaccgactgtaagttcctcggcccagccgaacatctcacctttactcctgccgctcgagccaggtggttagcgcctagggtgagagcacccgggctgctggattcactgtatggtaccgtgcgccgctttctgtcagtcgtccagttgaatccatttccatcggagctagtcaaagcactgttgaacgaactcgcaagcgttaaagtaaacgaggtggtgaggtacgaagctggctacgtggtgtgcgctgtaatcgccgggttgtacctgctcctcgttcccaccgcagggttgtgtttctgttgttgtagatgccatcgacgctgcggaggacgagtaaagaccgaacataaggccctggcttgcgaacgcgccgctctgatggtgttcctgcttcttacaactctattactgctcataggagtggtgtgcgccttcgtgacaaatcagcgaacacatgagcagatgggacccagcatagaggccatgccagagactctgctctctctctgggggctggtatccgatgtcccccaggagctgcaggccgttgcccagcagttttcgctcccccaggaacaggtcagcgaagaacttgatggcgtgggtgtctcaatcggctctgctatccacacccaactcaggtcaagcgtctatcctctgctcgctgcagtgggcagtctaggacaggttctccaggtgtcagtgcatcacttacagacattgaacgctacagtcgtggaactccaggcaggtcagcaagatctggaacctgccatacgagagcatcgtgacaggctcctggaactcctgcaggaggcccgctgccagggagactgtgccggagcgctgagctgggctcgtacactcgagctgggagcagacttttcccaggttcccagtgtagaccatgtgctccaccagttgaagggggtacctgaagctaatttttcatccatggtccaggaagagaactccactttcaatgcccttccagcgctggccgctatgcagactagctcagtggtgcaggagctcaaaaaagctgtggctcaacagccagagggcgttcgcaccttagctgaaggatttcctggcctcgaagccgctagcaggtgggcccaagccttacaggaggtagaagagtcctcacggccttacttgcaagaagtccagaggtacgagacttatcggtggattgtaggatgtgtgctatgctccgtggtcttgtttgtggtgctgtgcaacctgctgggtctcaacctcggtatctggggcctgtcagctagagacgatccctctcatcccgaggcaaaaggagaagctggggctcgctttctaatggccggcgtaggcctttcctttctgtttgctgcccccctgatcctactggtgtttgcaacattcttagtcggtggtaacgtccagaccttagtgtgtcagagctgggagaatggcgagctgttcgagttcgctgatactcccggaaacctgccaccctcaatgaatctctctcagttgcttggactacggaagaacatcagtatacaccaagcttatcagcaatgcaaagaaggcgctgccttgtggaccgtgttgcagctgaatgacagttatgatctggaggagcacctagatatcaaccagtacaccaacaaactgcgccaggagttgcagagtctgaaggtggacacacaatccctggatctcctgtctagcgccgcccggagggatctggaagccttgcagtctagtggcttacagaggattcattaccctgactttctggtgcaaattcagcggccagtggtgaaaacgtctatggagcaactggcccaggaactacagggactcgctcaagcccaggataactctgtgttaggtcagcgtttgcaggaagaagctcaggggctgagaaatctgcaccaggagaaggtcgtcccccagcagtctttagtggctaaactgaatctgtcagtgagggccttggagagcagcgccccaaacctgcagcttgaaactagcgacgtgttggctaatgtcacttacttaaaaggagagttacccgcgtgggcagcacgcatcctgagaaacgtatctgagtgtttcctcgcgagggaaatggggtacttttcacagtatgtcgcttgggtacgggaggaggtcactcagaggatagcaacctgtcaacctctgtcaggagcattagacaacagcagggtgatcctgtgcgatatgatggccgacccatggaacgcgttttggttttgtctcgcatggtgcaccttctttctcattccatccattatctttgcggtgaaaacctccaagtacttccgccctattcgtaagaggctcagctcaacaagtagtgaggagacccagctgtttcacatccctcgagtaacgtcgctgaaactctag

SEQ ID NO: 12764 - RNA, 1185 nt, synthetic construct
  misc_feature 1..1185: note = source = /note="Description of Artificial Sequence: Synthetic coding sequence"
  source 1..1185: mol_type = other RNA
atgtggagatgcccattaggtctgctgttattgctgccactcgcaggccaccttgcgctgggcgctcagcaaggaagagggagacgtgaattggcaccaggattacacctgagaggaatcagagacgccgggggtagatactgccaggaacaagatctttgctgccgcggcagagcggacgactgtgctctgccgtatcttggagccatttgctattgtgacttgttctgtaacaggactgtctccgattgctgccctttccctcctattcagggttgtatgcatggtgggcggatttaccctgtgttaggcacatattgggacaattgcaaccggtgcacctgccaagaaaatagacagtggcagtgtgaccaggagccatgtcttgtagatcccgatatgataaaagctattaatcaaggcaactacggatggcaagcgggcaaccactcagctttttgggggatgactctggacgagggcatccgttataggctgggaacaatccggccctcctccagcgtaatgaatatgcatgaaatttatactgtcctgaaccccggggaagtcctgccgaccgctttcgaagcgtctgaaaaatggcccaatctgatacatgagccactcgatcaggggaactgcgcaggcagctgggccttttcaaccgccgccgtggcaagtgaccgtgtgtccattcattctctgggtcatatgacccctgtgttgtctccccaaaacctcttgtcctgcgatacacatcagcaacagggatgccgaggcggaagacttgacggcgcctggtggtttttgcggcgtcgtggcgtggtgagcgaccactgctaccctttcagcgggcgagagcgggacgaggcaggccccgctcctccctgcatgatgcactcccgagccatgggaagaggtaaaaggcaggccacagcccattgccctaattcttatgttaataacaatgacatctaccaagtgacccctgtataccgcctggggtctaatgataaagagattatgaaagaactaatggagaacgggccagttcaagcccttatggaagtgcatgaagactttttcctgtacaaaggaggaatctatagccatacacccgtgtccttgggtcggcctgagcgatatcgtcgacatggcacccattcagtaaaaatcacaggctag

SEQ ID NO: 12765 - RNA, 303 nt, synthetic construct
  misc_feature 1..303: note = source = /note="Description of Artificial Sequence: Synthetic coding sequence"
  source 1..303: mol_type = other RNA
atggccgcagcgctggcacttgtggccggagttctgagtggtgccgtcctcccattgtggtctgccctgccacagtacaagaaaaaaataactgaccggtgctttcatcacagcgaatgttacagcggctgttgccttatggaccttgattcaggcggtgcgttttgtgccccccgcgccagaattaccatgatctgtttaccccagaccaaaggggctaccaatatcatatgcccctgcaggatgggattgacctgcatttccaaagatctgatgtgctcccgtcgatgccatatgatttag

SEQ ID NO: 12766 - RNA, 978 nt, synthetic construct
  misc_feature 1..978: note = source = /note="Description of Artificial Sequence: Synthetic coding sequence"
  source 1..978: mol_type = other RNA
atgagactcccaagaagggctgccctcggcttgctcccattgttattactgctgccacccgctccagaagccgccaagaagcctaccccgtgtcatcgttgcagggggctggtggacaagttcaaccaaggcatggtcgacaccgctaagaagaactttggtggcggcaataccgcctgggaggagaagacacttagcaagtatgagagtagcgagatcagattgctggaaattctggaagggttgtgtgagagttctgactttgagtgcaatcagatgctggaggcgcaagaggagcatttggaggcctggtggttacagttaaaatcggaataccccgacctattcgagtggttttgcgtaaagaccctgaaagtgtgctgtagtcccggaacatacggacctgattgtctggcatgtcagggcggatctcagcggccatgttcaggaaatggacactgttctggcgatggttctcgccagggtgatgggtcgtgtagatgtcatatggggtaccagggacctttatgtactgactgtatggacggatacttctcctctcttcgcaatgaaacccacagcatttgtacggcctgtgacgaaagctgtaagacctgttccggccttacaaatagagactgcggggaatgcgaagttgggtgggttttggacgaaggggcttgcgtggaatgcgactctagctgcgtggggtgcactggcgaaggtccgggcaattgtaaagaatgtatatccggctatgccagagagcacggccaatgtgcggatgtggatgagtgcagcttggcagagaaaacctgtgtgcgaaaaaatgaaaactgctataacacccctggtagctatgtatgtgtgtgccccgacgggtttgaagagactgaggatgcttgcgtacccccagccgaggctgaagcgaccgagggggaaagcccgacacagctgccaagcagagaagatctgtag

SEQ ID NO: 12767 - RNA, 459 nt, synthetic construct
  misc_feature 1..459: note = source = /note="Description of Artificial Sequence: Synthetic coding sequence"
  source 1..459: mol_type = other RNA
atgcggggaccaggacacccacttttactcggcttactgttggtccttggggctgccggtaggggaagagggggagcagaacctcgggaaccagccgacgggcaagcactgctgagactggtggtagaacttgttcaagagctccgcaaacaccactccgctgaacataaggggctgcaactgctgggtagagactgtgcactcggtcgcgctgaggctgcaggactggggccatcccccgagcagcgcgtggaaatcgttccccgcgacctccgtatgaaggataaatttcttaagcatctcaccggacctctgtacttttcgcctaagtgctccaagcacttccatagactttatcataatacgagagactgtaccatacccgcctactataagcggtgcgcaagacttttgaccaggctggccgtgtcgcccgtttgcatggaagataagcaatag

SEQ ID NO: 12768 - RNA, 411 nt, synthetic construct
  misc_feature 1..411: note = source = /note="Description of Artificial Sequence: Synthetic coding sequence"
  source 1..411: mol_type = other RNA
atggccagaacgaagcaaactgcaaggaagagtacgggtggaaaggcccctcgaaagcagctagcaaccaaggctgcaagaaagtctgcacccgctactggtggcgtgaagaagccccaccgctacagacccggaacggtcgccctgcgagaaataagacggtaccagaaatccaccgaactgttgatcaggaagcttcctttccagcgattagtacgtgaaattgcccaggactttaagactgacctcaggttccagagctccgctgtgatggctttgcaggaagccagtgaggcttatctggtgggattattcgaggataccaatctgtgtgcaattcacgctaagcgtgttactataatgcccaaggatatacaactcgctcgacgcattaggggagagagagcctag

SEQ ID NO: 12769 - RNA, 1209 nt, synthetic construct
  misc_feature 1..1209: note = source = /note="Description of Artificial Sequence: Synthetic coding sequence"
  source 1..1209: mol_type = other RNA
atgcgattgccacggcgggcagcactgggcctgctccccttgttactcctgctcccacctgctccagaagctgcaaagaaaccaactccctgtcacagatgccggggtctcgtggacaaattcaatcaaggcatggtggatactgcgaaaaaaaatttcggcggtgggaatactgcgtgggaggagaaaacccttagtaagtacgagagctccgaaatacgcctgcttgaaattctggaggggctttgtgagtcttctgatttcgagtgtaaccagatgcttgaggcacaggaggagcatctggaggcctggtggttgcagctgaagtcagagtaccctgacctattcgagtggttttgtgtgaaaactttaaaagtatgctgctctcctggaacttacggtcctgactgtcttgcatgccagggcggatcgcaaagaccttgctccgggaacggccattgtagcggggatggatcaagacagggggatggatcttgccggtgccacatggggtaccagggccctctctgcaccgattgcatggacggttatttttcttcactgcgtaacgagacccacagcatatgcacggtgcgcacaggactgagcgattcctatcctccatgttgcctatctctgggatgctggaggggggtcggtcacgcttggatccgagggaggaacacccatactcagcccggttacagctctcgagtctggatagccgcattttctccagcttgtgacgaaagttgtaaaacctgtagtgggttgacgaatagggattgcggtgagtgtgaagtgggatgggtgcttgacgaaggtgcctgtgtagatgtcgatgagtgcgctgcagagccacccccgtgctcagctgcccaattttgtaaaaacgccaacggctcatacacctgcgaggaatgtgattcgtcctgcgtgggatgcacaggggaagggcctggcaattgtaaggaatgcatctctggctatgcccgcgaacacggccaatgtgcggacgtagatgagtgcagtctagcggagaagacgtgtgtcagaaagaatgaaaattgttacaacacacctgggtcatacgtgtgcgtgtgccctgatggtttcgaagaaaccgaagacgcctgcgtaccacccgcagaggctgaagccacagagggggagtctcccacccagttgccctctcgagaggatttgtag

SEQ ID NO: 12770 - RNA, 633 nt, synthetic construct
  misc_feature 1..633: note = source = /note="Description of Artificial Sequence: Synthetic coding sequence"
  source 1..633: mol_type = other RNA
atgtctgccggaaaaatgatgcgcaccctcataacaacccacccgctcccgttactactcctaccgcagcaacttctacaactggttcaattccaagaagtcgatactgacttcgattttccagaggaggacaaaaaagaggagtttgaggagtgtctcgagaaatttttcagtacaggaccagcccgcccccccacaaaagaaaaggtgaagcgcagagtactcattgaacccggaatgcctcttaatcacatcgaatactgcaaccacgaaattatgggcaaaaacgtgtactataaacaccgttgggtggcagagcactatttccttttaatgcagtatgatgaacttcagaaaatctgttacaacagattcgtcccatgtaagaacggtatccggaaatgcaacaggtcaaaaggactggtagaaggcgtgtattgtaacttgacggaggcctttgaaattcctgcttgcaagtatgaaagtttgtacaggaagggatacgttctgatcacctgcagctggcagaacgagatgcaaaaaaggattccacatacaattaatgacctcgtagaaccacctgaacaccggtcctttctctccgaagacggggtctttgtcatcagtccctag

SEQ ID NO: 12771 - RNA, 585 nt, synthetic construct
  misc_feature 1..585: note = source = /note="Description of Artificial Sequence: Synthetic coding sequence"
  source 1..585: mol_type = other RNA
atgacaatgagacataattggacccccgatctgtctcctttgtgggtactgttgctgtgtgcacatgtggtaactctacttgtccgcgcgactcccgtgtcacagactactaccgcagctacagccagcgtacgctctactaaggacccttgcccttcccaacctccagtatttccagcagctaagcaatgtcctgccctcgaagtcacctggcccgaagttgaggttccattaaatggcacccttagtttatcatgcgtagcttgttcacgattcccaaacttttccattctctactggttaggtaacggctccttcatagagcatctccccggccgactgtgggaggggtccacatctagggagaggggcagtacaggaacccaactgtgcaaggctttagtgctggagcagcttacccctgcccttcactccacaaactttagttgcgtgcttgtcgatccagagcaagtggtgcagagacacgtggttctcgcacaactttgggccggcctgcgagcaactctgccgccaacccaggaggccctcccctcaagccatagctcccctcaacagcaaggatag

SEQ ID NO: 12772 - RNA, 4059 nt, synthetic construct
  misc_feature 1..4059: note = source = /note="Description of Artificial Sequence: Synthetic coding sequence"
  source 1..4059: mol_type = other RNA
atgaggcacggagtggcttgggccctcttggtcgcggccgctttgggactgggcgcaaggggggtacgaggggctgtggcattggcagatttttacccttttggcgcagaacgcggtgatgccgtcacccccaaacaagacgacggtggcagtggattacgcccgctaagcgttccgtttcctttctttggggctgaacacagtggcctttacgtaaacaacaatggaatcattagttttctgaaagaagtgagtcagtttacacctgtagccttccccatcgctaaagatagatgcgttgtcgccgccttttgggcggatgtcgataaccggcgcgcgggtgatgtgtactatcgagaagccaccgatccagccatgctgagacgagctacagaagatgtccgccattactttccagaactccttgactttaatgcaacttgggttttcgtagctacctggtacagggtgaccttttttggcggatcctccagctcgccagtaaacacgttccagaccgtgctgataacagacggtaaactctcttttacgatcttcaattatgagtctattgtctggaccaccggtacccatgcttcatctgggggtaacgccacagggctcggcggcatcgccgcccaagccgggtttaacgctggagatggtcagcgatattttagcatccccggctccaggaccgcagatatggccgaggtcgaaacgacaactaacgtcggggtccccgggcgatgggccttcagaattgatgatgcccaggtgagggtgggcggttgcggccatacaacctccgtgtgcctcgcattacgtccatgcctgaatggtggaaagtgcattgacgactgcgtgaccgggaaccccagttatacctgttcttgcttgagcggctttaccgggcgcaggtgtcacctggacgtgaacgaatgcgcgtcacagccctgccagaacggtggaacttgtacacatggcataaatagcttccgttgccagtgtcccgctggctttggtggcccaacctgtgagacagcccagagcccttgcgacactaaagaatgccagcacggcggtcagtgccaggtcgagaacggctccgccgtctgcgtgtgccaagcggggtacaccggggctgcgtgtgagatggatgttgatgattgctccccagacccatgtcttaatggcggcagctgcgtcgatcttgtaggcaactacacctgcctctgcgctgagccctttaagggacttcgctgtgaaaccggagaccatccagttccagacgcctgtctgtctgcaccatgtcataatgggggaacctgtgtggacgcggaccaggggtacgtctgcgaatgcccggagggattcatgggccttgactgtagagagcgcgtgcccgatgattgtgaatgtaggaatggggggcgctgtctaggcgccaatactaccctgtgccagtgccctcttgggtttttcgggttgctgtgtgagttcgagatcactgcaatgccctgtaacatgaatactcaatgtccagatggcggatattgtatggaacatggtggctcatacctgtgtgtgtgtcacactgaccacaacgcttcccattcactgccctcgccttgcgattccgatccttgctttaatggtgggtcttgcgatgcccacgacgattcctacacctgcgagtgcccaagaggatttcatgggaaacattgtgagaaggctcggccccacctgtgttcctcaggaccttgcagaaatggcggcacttgtaaagaggccggcggcgagtaccattgctcctgtccgtatagattcactggaagacactgcgaaatcggaaaaccagattcctgcgcctctggaccctgccacaacggcgggacgtgttttcattacatagggaagtacaagtgcgactgcccccccggattctcgggaagacattgtgagatcgctccatcgccgtgttttaggtctccatgcgtgaacgggggaacttgtgaggaccgggacacggattttttttgtcactgtcaggcaggctacatgggaaggcgctgccaggctgaagtggactgcggacccccagaggaggtgaaacacgcaactctccgattcaatgggacacgcctgggagctgtcgctctctatgcttgtgaccggggatatagtctgagcgcgccctcacgcatcagagtatgccaaccgcacggagtctggtctgagcccccgcagtgtcttgaaatcgatgagtgtaggtctcaaccctgtctgcacggaggcagctgccaggatcgagtggccggttatttatgcctctgttcaacaggctacgagggcgcccattgtgagctagagcgagacgagtgccgtgcgcacccctgcaggaacggcggctcatgccggaacctccccggagcttacgtgtgcagatgtccagcagggttcgtgggcgtgcattgcgaaacagaagttgacgcatgcgattcctccccctgtcagcacggggggcgatgcgaatccgggggtggggcctacttatgcgtgtgccccgagagcttcttcgggtaccattgtgagaccgtatcggacccatgtttttcctccccatgtggcgggcgtggctactgcttagcctctaacgggtcccactcatgtacctgtaaagtaggatatactggagaagattgcgcaaaagagctgttcccacctactgcgctgaaaatggaacgagtggaagaatcaggggtgagcatctcatggaacccacctaacgggcccgccgcccgacagatgcttgacggctacgctgtgacatatgtttcctctgacggttcctataggcgcactgactttgtggatcggaccagaagctcccaccaattacaagctttagccgcaggccgcgcctataacatatcagttttttctgtgaaacgcaactccaataataagaacgatattagtcgcccggcagtgctcctggccaggactaggccacgcccagttgaggggtttgaagttaccaacgtgactgcttcaacaatttctgtgcagtgggccctccaccgcattagacacgctaccgtgtcaggcgtgcgcgtctcaatccgacatcccgaagcactccgcgaccaggcaactgacgttgaccgtagcgtggaccgctttactttcagagcccttttgcctggaaagcgctacaccattcagctgaccactctgtccggacttaggggggaagaacaccccaccgagtctctagccactgcccctacccacgtttggacacggccgctacccccagctaacctcaccgctgcccgggtcactgctacttctgcccatgtcgtgtgggacgcccctactccaggctcactcctcgaagcctatgtcatcaacgtaacgactagtcagtcaaccaagtctagatatgtacctaatggaaagttagccagctatacagtgcgagacctattgccaggtcgccgttatcagctttcagtgattgcagttcagtcaaccgaattgggcccacagcactcggagcctgcgcatctttatataatcacgtctcctagggacggcgccgaccgtcggtggcatcagggaggccaccaccctagagtgctcaagaaccggcccccccctgcgcggctccctgaattgaggttactgaacgaccacagtgccccagaaactccgacacagcccccccggttcagcgagctggtggacggccgaggcagggtatccgctcggtttggcgggagccctagtaaggctgctaccgtccgttcccacgttcccgggaattgttcagagaatccatgccaaaacggcgggacgtgcgtccctggagccgacgctcactcatgtgattgcgggcccgggtttaagggccggagatgcgagctagcctgtataaaagtgtcaaggccttgtacacggctctttagcgaaactaaggcattcccagtttgggagggcggtgtttgccaccatgtgaagcagtccaagagccagaccttggagaagtcctag

SEQ ID NO: 12773 - RNA, 957 nt, synthetic construct
  misc_feature 1..957: note = source = /note="Description of Artificial Sequence: Synthetic coding sequence"
  source 1..957: mol_type = other RNA
atgcttccactgaccatgaccgttctcattttgctgctgctgcctactggacaggctgctcccaaagacggagtcacccgccccgatagtgaagtacagcaccagctcctccctaacccattccagccagggcaggagcagctcggtctgctgcagtcataccttaagggcctgggcagaacagaggtccaactcgaacacctctcccgcgaacaggtacttttatatctcttcgccctccacgattatgaccagtctggtcagcttgatggactggagctgctgagcatgttaaccgcagcgttggcccccggggccgcaaattcccctactacaaatcctgtcattctgattgttgataaggttctggagactcaagatctaaatggggacggcctcatgacgcccgcagaattaattaatttcccaggtgtggcacttaggcacgttgagccaggggaaccgctcgccccctcacctcaggagcctcaagcggtggggcgacagagtctgcttgcaaagtctcctctgcgacaggagacccaggaagcccctggacctcgggaggaagctaagggacaggtggaggcaaggagggaatcgttagatccagttcaggagcccggagggcaggctgaggccgacggcgacgttcccgggccacggggggaagccgagggacaggcagaagcaaaaggggatgccccaggcccccggggagaggcaggcggacaggccgaggctgaaggagatgctccaggacctcgtggcgaagctgggggacaggccgaggctgagggggacgccccaggcccacgcggggaagccggtggacaggccgaggctcgagaaaatggagaggaagctaaggaactcccgggcgaaactcttgagagcaagaatacccaaaacgacttcgaggtgcacatagtacaggtagaaaacgatgagatttag

SEQ ID NO: 12774 - RNA, 816 nt, synthetic construct
  misc_feature 1..816: note = source = /note="Description of Artificial Sequence: Synthetic coding sequence"
  source 1..816: mol_type = other RNA
atgcaggccgcatgttggtacgtgctattcttgttgcagccaaccgtgtatctggtgacatgcgctaatctgacaaacggaggcaaaagcgaattgctgaaatccggaagttcaaaatccactcttaagcacatttggaccgaaagttcaaaggatctatctatctccagactcctcagtcaaacctttcggggaaaagagaatgacaccgatcttgatctgaggtatgacacacccgagccctattccgagcaggacctgtgggactggctgcgcaattccaccgacttacaggaacctcgcccccgtgctaaacgcagaccaattgtcaagacagggaaattcaaaaaaatgttcggatggggggacttccattctaatatcaagactgtaaaactcaacctcctgatcacagggaagattgtggaccacggtaacggaaccttctcggtgtattttagacacaactccacaggccagggtaacgtgtcagtttctttggtaccccctactaagattgtagaattcgaccttgctcaacagaccgttatcgacgctaaagacagtaagtcttttaactgtcgcatagaatacgaaaaggtggataaagcaacaaaaaacactctgtgcaattatgaccctagcaagacctgttatcaggagcagacacagagccacgtgtcctggctttgttccaagcccttcaaggtgatttgtatttacatttctttttattccaccgactacaaacttgttcagaaagtctgtcccgactacaactaccactctgatactccttattttcccagcggttag

SEQ ID NO: 12775 - RNA, 999 nt, synthetic construct
  misc_feature 1..999: note = source = /note="Description of Artificial Sequence: Synthetic coding sequence"
  source 1..999: mol_type = other RNA
atgcttctgttggccgctgccttcctagtggcgttcgtcctgcttctctatatggtatctccattaatctcccctaaacctcttgctctacccggggcacatgtggtggtgacaggaggatccagcgggattggcaaatgtatcgcgatcgaatgctataagcagggtgcttttatcaccctggtggccagaaatgaggacaagctcctgcaggctaagaaagagatcgaaatgcactcaattaacgataagcaagtagtgctgtgtattagtgtggatgtgtcccaggattataatcaggtggaaaacgttattaaacaggcgcaagaaaagctcggccccgttgatatgctggtgaattgtgcaggtatggcagtctcaggcaaattcgaagatctcgaggtcagcacatttgagcgcctaatgtccataaattatcttggcagcgtgtatccttctcgtgcagttatcactacgatgaaggagagacgggtcggaagaattgtattcgtgtccagtcaagcgggacaattgggactcttcggattcacagcatactcagctagcaagttcgcgattcgcggactggcagaagcactccagatggaggtcaaaccctataatgtttacatcactgtggcttatcctccagacacagataccccagggtttgctgaagaaaaccgaacaaagccacttgagacccgtctgatctctgaaaccacttctgtctgtaagcctgaacaggtggccaagcaaatcgtcaaagacgctattcaggggaattttaattcatctctgggttccgatggctatatgttgagtgctctcacgtgcgggatggcccctgtgaccagcataacagaaggtctacaacaagtcgttacaatgggtcttttccgaactattgctctgttttaccttggatcattcgatagcatcgttcgcaggtgtatgatgcaaagagagaagagcgagaacgcagataaaacggcatag

SEQ ID NO: 12776 - RNA, 1497 nt, synthetic construct
  misc_feature 1..1497: note = source = /note="Description of Artificial Sequence: Synthetic coding sequence"
  source 1..1497: mol_type = other RNA
atgagtttctccgccaccattctgtttagccctccaagcggcagtgaggctagatgttgctgttgtgcctgcaaaagcgaaaccaacggaggcaacacgggatcacagggaggaaatccaccgccaagcacacctattaccgtgaccggacacggtctggcagtgcaaagtagcgaacaattactgcacgtaatttaccagcgggttgataaggctgtcgggttggccgaggctgcacttgggcttgctcgagccaataacgaactcttgaagagactgcaggaagaagtgggggatctgagacaagggaaggtcagtatacctgacgaggatggcgagtcccgagctcactctagcccacccgaagagccaggccctctaaaagaatcacccggcgaggccttcaaagccctgtctgctgtcgaggaggaatgcgactctgttgggagcggcgtgcaggttgtgatcgaggaactgaggcaactcggcgccgcatccgtaggaccagggccccttggcttcccagctacccaacgggatatgaggttgcccggctgcacattggccgcgtctgaagccgcccctctgctgaacccactggttgacgactatgtggctagcgagggggcagtgcagagggttctggttcccgcatatgcaaagcagctttccccagccactcagctagctatccaacgagcaacgcctgagaccggacccgagaacggcactaagttacccccaccacgtcctgaagatatgctgaatgccgccgcggcattagatagtgctcttgaagagagcggccctggaagcacaggcgagctgagacacagtctgggactcacagtgtccccctgtcgcacacgaggtagcggacagaagaattccagaagaaaacgagatctggtgttgtccaagttggttcacaatgttcacaatcatataacaaacgataagcgattcaacggctcagagagcatcaagagctcttggaacattagcgtggtgaagtttttactggaaaagctgaaacaggaacttgtgacctctccccacaactacactgataaagaattgaagggagcttgtgtggcatactttttgactaagcggcgggaatatcggaattccttgaatccttttaaagggcttaaagagaaagaagaaaaaaaactacgttctcgtagatatagattatttgccaaccggagcagcataatgcggcactttggtccggaggatcaaagactgtggaacgatgttaccgaggagttgatgagcgacgaagaagactccttgaacgagcctgatcgactcccatccgccgaggcccagctattgcctccggagttatataatcctaactttcaggaggaagaagacgagggaggcgacgagaatgcccccgggtccccctccttcgaccaacctcataaaacatgttgtcctgacctgaactccttcatcgagattaaagttgagaaggatgagtag

SEQ ID NO: 12777 - RNA, 966 nt, synthetic construct
  misc_feature 1..966: note = source = /note="Description of Artificial Sequence: Synthetic coding sequence"
  source 1..966: mol_type = other RNA
atgaggctgccccgtcgcgccgcactcgggctgctccccctgctgttattgttacctccggcccctgaagccgcaaagaaaccgacaccatgccaccggtgtagaggactggtggacaagtttaatcagggaatggtcgacacagctaaaaagaactttggaggtggcaacaccgcctgggaggagaagacactgagtaaatacgaatcctctgaaatcagactcttagaaatcctcgagggactgtgtgaatcatctgacttcgaatgcaatcagatgctggaagcccaggaggaacacctcgaagcctggtggctgcagctgaaatcagagtatcccgaccttttcgaatggttctgcgttaaaacattgaaggtctgctgttctccaggcacatatggcccagactgcctggcctgccagggcggctcacagagaccctgcagtggcaacggacattgctctggtgatggaagcagacagggggacggaagctgcaggtgccacatgggataccagggccctttgtgtacggattgcatggacggatatttttcctcactgcggaacgagactcatagtatctgtactgcttgcgacgagtcctgtaagacctgcagcgggctgaccaaccgagattgtggggaatgtgaagtcgggtgggtgttggacgaaggagcctgtgtggacgtggatgaatgtgccgctgaaccaccaccttgtagcgctgcccagttctgcaaaaacgctaacggatcttacacatgcgaagacgtcgacgaatgttccttggctgaaaaaacatgtgtcagaaaaaacgagaactgctacaacactcccggctcgtacgtctgcgtctgccccgacggattcgaggagactgaggatgcgtgcgtgccgcccgcagaggccgaagccacagaaggtgaaagccctacccagctgcctagccgcgaggatctgtag

SEQ ID NO: 12778 - RNA, 711 nt, synthetic construct
  misc_feature 1..711: note = source = /note="Description of Artificial Sequence: Synthetic coding sequence"
  source 1..711: mol_type = other RNA
atgatgggcatcttcttagtgtacgtcggctttgtatttttctctgttttgtatgtccagcagggactttcttctcaagcaaaatttaccgaatttccgcgcaatgtcactgcaactgaaggccaaaacgtcgagatgtcctgcgcattccagtccggctccgcttctgtatacctggaaatccagtggtggttcctgaggggacccgaagacctggacccaggggcagaaggcgccggcgcccaggttgagttactgcccgacagagatccagatagcgacggcaccaagataagtacagtcaaagtgcagggaaatgacatttcccacaaactacagatttcaaaagtgcggaaaaaggacgaaggcctttacgagtgcagggtgaccgacgcaaattacggcgagttgcaggagcacaaggctcaggcctatctgaaagttaacgcaaacagccatgcaagacgaatgcaggctttcgaagccagccctatgtggctgcaagatatgaaaccccgcaaaaatgtatccgccgccatcccgtctagcatccacggaagcgccaatcaacgcacccattccacatcctctccccaagttgtcgctaaaatccccaagcaatccccccagagcggagcacgcatcgcaacctcccacggactgagcgtactgctgctcgtgtgcgggttcgtcaagggggcccttctctag

SEQ ID NO: 12779 - RNA, 273 nt, synthetic construct
  misc_feature 1..273: note = source = /note="Description of Artificial Sequence: Synthetic coding sequence"
  source 1..273: mol_type = other RNA
atgaacatgaagcctgccactgcatccgcgttgctgttgctgctcctcgggctcgcttggacacagggctcccacggatggggtgcagacgcttcatccctccagaaacgtgcaggcagagacgaccagaactataactacaatcaacacgcctatcccacagcgtatggcggcaagtactccgttaagacgcccgctaaagggggagtaagcccttcttcttccgcctctcgcgtacagcccggacttcttcaatgggtcaaattttggtag

SEQ ID NO: 12780 - RNA, 360 nt, synthetic construct
  misc_feature 1..360: note = source = /note="Description of Artificial Sequence: Synthetic coding sequence"
  source 1..360: mol_type = other RNA
atgcctgccgtgtttatgctcgctagttcttctgctcttcagtgcggccgcggggtcccccgatttcccaggactgaggtcggagcggggcattccgtgaatgaagaaaccaaggccgaaaaagttggaaatcaaacctctgttattccagcaacaagtcgccaagctgcacttggtacatcgtggacccaaagaaggactcagccgctccaagaacggtcccattggcaccccaggggaaataacgcctcgggtatgggtggccataggatgtttcccggccccctcagaggccctgccgcccaggtgcttgaaaatgaatgcggtagcttgggaagagcagctgagggacgatcttag

SEQ ID NO: 12781 - RNA, 639 nt, synthetic construct
  misc_feature 1..639: note = source = /note="Description of Artificial Sequence: Synthetic coding sequence"
  source 1..639: mol_type = other RNA
atgctgtccagcgtggtcttctggggacttatcgcactgatcggtacatcaagaggatcttatcccttctctcactcaatgaagccacacctgcaccccagattgtatcatgggtgctacggcgatataatgactatgaaaacgagcggagctacctgcgatgcaaacagtgtgatgaattgcggtattagaggctctgagatgttcgccgagatggacttgagagcgattaagccttaccaaaccctgattaaagaggtgggacaaagacattgcgtggacccagctgtgatcgccgctatcatctcacgcgagagccatggagggtctgtgcttcaggacgggtgggaccaccgcggtcttaagttcgggctcatgcagctggataagcagacttaccaccctgtgggtgcctgggatagcaaggaacacctgtcacaagctaccggaatcctgaccgaacgtatcaaggccattcagaagaagtttccaacatggtctgttgcccaacatttaaaaggggggctctcagccttcaagtctggtattgaagctatcgccacaccttcagacatagataacgactttgtcaacgacatcattgcaagagcgaagttttacaaacgccagtcattttag

SEQ ID NO: 12782 - RNA, 387 nt, synthetic construct
  misc_feature 1..387: note = source = /note="Description of Artificial Sequence: Synthetic coding sequence"
  source 1..387: mol_type = other RNA
atgcgggtggctagacggacacggaacgtgtgtagatgtccccgcgcggccggcccgggcgtccctgagcccagagccgctcccttacctctgctcgctatggcgcctcctccagcctgccggagtcctatgagtcctcccccccccccccttttgcttcttctgctatcactcgctctgcttggagctcgggccagggccgaacctgctgggtctgccgtacctgctcagagccgtccatgtgtcgattgccatgccttcgagtttatgcaacgcgccctacaagatctacgaaaaactgcatgctctcttgacgcgagaaccgaaactctgctgctccaagccgaaaggagagcactgtgtgcttgttggcctgcaggacactag

SEQ ID NO: 12783 - RNA, 399 nt, synthetic construct
  misc_feature 1..399: note = source = /note="Description of Artificial Sequence: Synthetic coding sequence"
  source 1..399: mol_type = other RNA
atgggcccacgagttcttcaacctcctctgcttctgctgctgctcgccctgttgctggcagctctgccttgtggcgcggaggaagcctctcctctgaggcctgctcaagtgactctttcaccccccccagccgtgactaatggaagtcagcccggagctccccataattctactcacacccggcctcctggcgcttctggatccgcattaacaaggtccttttacgtgatcctgggcttctgtggccttactgcattgtactttcttatccgggcttttagactgaagaaaccacagcgacgacgttacgggctactcgccaacactgaggacccaacagagatggcctcattagactccgacgaggagactgtgtttgaatcaaggaatctgcgctag

SEQ ID NO: 12784 - RNA, 585 nt, synthetic construct
  misc_feature 1..585: note = source = /note="Description of Artificial Sequence: Synthetic coding sequence"
  source 1..585: mol_type = other RNA
atgagcgccctctggttattattaggactgctggctctgatggacctttccgagagttccaattggggctgttacggaaatattcaaagcctggacaccccaggtgctagctgtggaatcggccgcagacacggcttaaactactgcggtgtgagagcttccgaacggctggctgaaatcgacatgccttaccttctcaagtaccaacctatgatgcaaacaattggccagaaatactgcatggatccagctgtgatcgccggtgtgttatccaggaagtcacccggtgacaagatcctcgtgaatatgggcgatagaaccagcatggtgcaggaccccggatcacaggcgcctacttcttggatttccgaatcccaagtgtcccagaccacagaggtgctgactactcgcatcaaagaaattcagcggcgatttccaacatggaccccagaccaatacttgcgcggcgggctctgtgcctactcaggtggtgccggatacgtacgttcatcgcaagatctgtcgtgtgatttttgtaatgatgtgctcgctcgagctaagtatctcaaacgccacgggttttag

SEQ ID NO: 12785 - RNA, 441 nt, synthetic construct
  misc_feature 1..441: note = source = /note="Description of Artificial Sequence: Synthetic coding sequence"
  source 1..441: mol_type = other RNA
atggtcattaccatttattacgatgttaaggtgcggttcatcgtacgtggatgtggtcaatacatttcctaccgatgccaggagaaaagaaatacctatttcgccgaatactggtaccaggcccaatgttgtcagtacgattattgtaattcttggtcttccccacagctgcagagcagcttacccgagccacacgacagacccctagccctgcctctcagcgactctcagatccagtggttttatcaggccctcaacctgtcattgcccttgcctaacttccacgcaggcactgagcccgatggattggaccccatggttacgctctccctgaatttaggccttagctttgccgaacttagacggatgtatttgttcctaaatagcagcggactactcgtattacctcaggccgggctcttaaccccccacccctcttag

SEQ ID NO: 12786 - RNA, 234 nt, synthetic construct
  misc_feature 1..234: note = source = /note="Description of Artificial Sequence: Synthetic coding sequence"
  source 1..234: mol_type = other RNA
atgggcagttctggactcctatctctccttgtgcttttcgtcctccttgcaaacgtacagggccccgggcttacagactggttattcccccgcagatgccctaaaatcagagaggaatgcgaattccaggaaagggacgtatgcacaaaagaccgacagtgtcaggataataaaaagtgttgcgtgttcagctgtgggaaaaagtgtctggaccttaaacaaggaaagcagtag

SEQ ID NO: 12787 - RNA, 444 nt, synthetic construct
  misc_feature 1..444: note = source = /note="Description of Artificial Sequence: Synthetic coding sequence"
  source 1..444: mol_type = other RNA
atggggcaggaggtgcacggatcctgttgggccttgggcgcaggaggggggcagagacaatgggttggacggtcaatgcccccattagctcctcaattatgtcgcgcagtgttccttgttcccatactgttactattacaagtcaaaccccttaacggctctcccggccccaaagacggctcccagaccgaaaagaccccatccgcggaccagaaccaggaacagttcgaggagcactttgttgcaagttccgttggcgaaatgtggcaagtcgtggacatggcacagcaggaagaagaccagtccagtaaaaccgctgcggttcacaagcacagtttccatctgtcgttttgtttttccttggccagtgtgatggtattctctggggggcccctcagaaggactttccccaatatacagctgtgcttcatgctgacccactag

SEQ ID NO: 12788 - RNA, 1695 nt, synthetic construct
  misc_feature 1..1695: note = source = /note="Description of Artificial Sequence: Synthetic coding sequence"
  source 1..1695: mol_type = other RNA
atggctcctaagaaattgagctgcctaagatctctgctgttaccactgtccttaacactgctgctgcctcaggcagatactcgatcatttgtggtcgacaggggccacgatagattcctactggacggcgcccccttcaggtatgtttccggctctctgcactattttcgggtgcctcgcgtgctgtgggccgaccgcttgctcaagatgagatggagtgggctcaatgcaattcagttctatgtgccgtggaattatcatgaacctcaaccgggcgtctacaatttcaatggaagcagggatctgatcgccttcttaaacgaggccgccctggccaaccttctggtgattctgagaccaggcccatatatctgtgctgagtgggagatgggagggcttcctagttggctcctgagaaagccggagattcatttacgaacaagtgacccagctgacaatatgacaaaaatctttaccttgctcagaaagtacgagccccatggaccacttgtgaacagtgagtattacacggggtggctggactactgggggcagaaccacagcactaggtcagtttctgccgtgaccaagggcttggagaatatgctgaagttaggcgcctcagtgaacatgtacatgttccatggggggaccaacttcggatactggaatggcgccgacaaaaagggaaggtttctgcccatcacgacaagctatgactacgacgcccctatttccgaagccggagaccccacccccaaactttttgcccttagggacgtgattagcaagttccaagaggttccactcggtcccctgccccccccaagtccaaaaatgatgcttggtcccgttacgctccacctggttggccatctgctggcattcctagacctgctgtgtcctcgtggaccaatccacagcatactgcctatgacatttgaagcagttaaacaagaccacggcttcatgctgtaccgcacatatatgactcatactatctttgaacctacacccttctgggtgcccaataatggcgtccatgatcgcgcatatgtaatggttgacggagtttttcagggggtcgtcgagcgcaacatgagagataagctctttctgacaggtaagctggggtctaaactagacattctagtggagaacatgggcagattatccttcggctctaactcatccgatttcaaaggtctgctcaagccacccattctaggtcaaaccatcctgacgcagtggatgatgttccccctgaaaatagacaacctggttaagtggtggttcccgttacagctcccgaaatggccctaccctcaggctcctagtggaccgaccttttactcgaaaacctttcctatcttgggctcagtcggcgacacgtttttgtacctgcctggttggactaaaggtcaggtctggattaacggcttcaacctgggccgctattggacaaaacaggggccacaacagacattatacgtgcctcgattcctactgttcccccgcggtgccctcaataaaatcacccttctcgaactcgaagacgttcctctccagcctcaggttcagtttttagataaaccaatcctgaacagcacctcaacactacatagaactcatatcaatagcctttcagccgatacactcagcgctagtgagccgatggaacttagcgggcactag

SEQ ID NO: 12789 - RNA, 423 nt, synthetic construct
  misc_feature 1..423: note = source = /note="Description of Artificial Sequence: Synthetic coding sequence"
  source 1..423: mol_type = other RNA
atgttttttactatctctcgcaaaaacatgtcgcagaagctcagcctcctgctcctggtctttggactgatttggggactgatgttacttcattacacatttcagcagcctcggcatcagagtagcgtcaaactgagggaacaaattttagacctgtcgaagcgatacgtgaaggctctcgcagaggaaaacaagaatacagtggacgtggagaatggagcttccatggccggctatgctgatctcaagagaaccatcgcggtcttgcttgatgatatactccagaggctggtaaagctggagaataaagtggactatatagttgtgaacgggtctgctgcaaacacaaccaacgggacatccggtaacctggttccagtgacgaccaacaagcgtacaaacgtctcaggttcaattcgctag

SEQ ID NO: 12790 - RNA, 528 nt, synthetic construct
  misc_feature 1..528: note = source = /note="Description of Artificial Sequence: Synthetic coding sequence"
  source 1..528: mol_type = other RNA
atgcttccacctatggctctgccttctgtttcatggatgctgctttcttgcttgatgctcctgtcacaagtccagggtgaggaacctcaaagggaactgccctctgctagaatcagatgtccaaaaggcagcaaagcatatggaagtcactgctacgcgttgttcctgtcacctaaatcatggacagatgccgaccttgcctgccagaagaggccgtctgggaacctcgtgtcagtcctgtctggagccgagggttcttttgtaagctctttagtcaaaagcataggaaactcctacagctatgtgtggattgggctgcacgacccaactcaaggaaccgagcctaacggggaggggtgggagtggtcttcctccgatgtcatgaattacttcgcttgggaaaggaatccctcaacaattagctcgcccggtcattgcgcttcactttctagatccactgctttcctccgctggaaagattacaactgtaacgtgcgtctcccctatgtgtgcaaatttactgattag

SEQ ID NO: 12791 - RNA, 381 nt, synthetic construct
  misc_feature 1..381: note = source = /note="Description of Artificial Sequence: Synthetic coding sequence"
  source 1..381: mol_type = other RNA
atgcatctaagccagctactggcttgcgcgctgctgctgaccctactcagtcttagacctagtgaggcgaagcctggagccccaccaaaggtaccaagaactccaccggctgaggagctggccgaaccccaagcggcgggagggggacagaaaaagggtgacaaggcccctggcggcggaggagccaatctcaaaggtgataggtccagattactgcgagatctgagggtggacacaaagagtagagccgcatgggcccgactgctccaagagcaccctaatgcaaggaagtataaaggagcaaataaaaaaggcctgagcaagggttgcttcggactcaaactggacagaatcggatctatgtcgggtctcggatgctag

SEQ ID NO: 12792 - RNA, 288 nt, synthetic construct
  misc_feature 1..288: note = source = /note="Description of Artificial Sequence: Synthetic coding sequence"
  source 1..288: mol_type = other RNA
atggcacccccacccgcttgtagaagtccgatgtcccctcctccccctcccttgctattactactcctctcactagcactcttgggtgcacgcgcgagggctgaaccagcaggctctgctgtccccgcccagtccagaccgtgtgtcgactgccatgcctttgaatttatgcagcgcgccctccaagacctcaggaagactgcatgctcacttgacgctagaacagagaccctgttattgcaagccgaaaggcgcgccctttgtgcctgctggccggcaggccactag

SEQ ID NO: 12793 - RNA, 423 nt, synthetic construct
  misc_feature 1..423: note = source = /note="Description of Artificial Sequence: Synthetic coding sequence"
  source 1..423: mol_type = other RNA
atgttctttaccatttccaggaagaatatgtcccaaaagctttccctcctacttctggtattcggtttgatttggggcctgatgctccttcattacacatttcagcaacctcggcaccagagctcagttaagttgcgtgaacaaattcttgacctatccaaaaggtatgtgaaagcgttggctgaggagaataagaacaccgtcgacgtggaaaatggagccagtatggctggctacgccgatctcaagaggactatcgcagtccttctagatgacatacttcagcgtttagtgaagttagaaaacaaggttgattatatagttgttaatgggagtgcagcaaacaccaccaacgggacttccggaaacttagtgcctgtgaccactaacaaacgcaccaacgtgagcggcagtataagatag

SEQ ID NO: 12794 - RNA, 291 nt, synthetic construct
  misc_feature 1..291: note = source = /note="Description of Artificial Sequence: Synthetic coding sequence"
  source 1..291: mol_type = other RNA
atggagcacaaagaagtggtgttactcttactcctgttcctgaagagcgggcagggcgagccattggatgactatgtcaacacacaaggtccatctctcttttccgtgacaaagaagcagctgggggccggctcaagagaagaatgtgctgccaagtgtgaagaggacaaggagttcacctgtcgcgctttccagtaccatagtaaagagcagcagtgtgtgatcatggccgagaaccgaaaatcatcaattataattagaatgagggatgctgtgttgtttgaaaaatag

SEQ ID NO: 12795 - RNA, 678 nt, synthetic construct
  misc_feature 1..678: note = source = /note="Description of Artificial Sequence: Synthetic coding sequence"
  source 1..678: mol_type = other RNA
taagctgacctcccgagctgctggggagccggaccatgctacacaggccataaggtgggtgcgctccggcgggataccgtaatatgctgctgtaggcatggcgactactctacaccatgtttatttacaccaggcaaaccaagtagaaacccttctccatggaaaagaaccctctggactctgtccgcaccctgggctggccctgcgggctggaccggcgaagaacagaacgctactaagaccggcctcattacccgtaggcccagacccttgaggcgtcgcccacacccagccccagcttctcctttgccagagatcattcggggcaatattccaaggatgctcggaaagttcgtacctgtgaattgggaaccaccacagcccctcccatttcccaaatatctgagatgctataggtgcctgctggagacaaaggagctgggctgcttgcttggatcggacatctgcctgacgcccgcagggtcaagctgcattacacttcacaagaaaaatagctccggatcagacgtcatggtgtctgattgtagatctaaggaacagatgtccgactgttcaaataccagaacatcccctgttagtggattttggatctttagccagtactgcttcctcgacttctgtaacgatccacaaaatcgcggcttatacaccccctag

SEQ ID NO: 12796 - RNA, 684 nt, synthetic construct
  misc_feature 1..684: note = source = /note="Description of Artificial Sequence: Synthetic coding sequence"
  source 1..684: mol_type = other RNA
atgggagctgtcatgggcacattctcttccctccaaaccaaacagcgccgcccttccaaagatatcgcttggtggtactatcaataccagagagataagatcgaagacgaattggaaatgaccatggtttgccaccgacccgagggtctagaacagctagaagctcaaaccaatttcacaaaacgggaactgcaggtgttatatcgagggtttaaaaatgaatgccccagcggcgtggttaacgaggacacctttaaacaaatctatgcccagtttttccctcatggggacgctagtacatacgcccattatctgttcaatgctttcgacacaactcaaacagggagcgtcaagtttgaagactttgtaacagccctgagcattttattgaggggcaccgtgcacgagaaactacgctggacgttcaacttatacgacatcaacaaggatggatatattaacaaagaggagatgatggacatcgtgaaggcaatttatgatatgatgggcaaatacacttatccggttctgaaagaggatacaccccggcaacacgttgacgtattttttcagaagatggacaaaaataaagacggtatcgtgactctggacgagtttcttgagtcttgccaggaagatgataatattatgcgttcccttcagttgttccagaatgtaatgtag

SEQ ID NO: 12797 - RNA, 546 nt, synthetic construct
  misc_feature 1..546: note = source = /note="Description of Artificial Sequence: Synthetic coding sequence"
  source 1..546: mol_type = other RNA
atgcaggtcaacttcgttagctatgtgcagctcacttcacgtgcactcccctccttgacagatagcaaaggcagcttggtggtagtttcaagcctcttagggagggtccccacatcattttctactccttattctgccgctaagtttgcacttgacggcttctttgggtccctgcgtcgcgaactcgatgttcaggatgtcaacgtggcaatcacaatgtgcgtactcgggctacgagacagagcctccgcagccgaagctgtaaggtcctctacgtcgcgtcccagacagccagaacaccggggtgtgccacttcagagccagactgctatgtttctcccccccaccgtgcctggagcacggaccctgactgaaactccacttcggggctggccacagccaaagatgaagtcttctagacagaaatccaaaaccgagaagaatgatgggcacctggaacccgtcaccgcttgggaggtgcaagtcccacgcgttcgtagactgtgccgcggcctggcccgaccacatctcttcggacacgactag

SEQ ID NO: 12798 - RNA, 423 nt, synthetic construct
  misc_feature 1..423: note = source = /note="Description of Artificial Sequence: Synthetic coding sequence"
  source 1..423: mol_type = other RNA
atgtccgacctgctcctgcttggattaatcggcggactgacattgctgctgctgctgaccttgctggcattcgctgggtattccgggttgctcgctggggtggaagtttcagccggctcgccccccataagaaatgtgaccgtcgcctacaagtttcacatgggcctttatggagagacaggccgactttttacagagtcttgcagcatctccccaaagctcaggtctattgcggtctactatgacaatccccatatggttcccccagacaagtgtagatgcgccgtgggaagtatcctctccgagggcgaggaaagtccatctccagagctgatcgatctgtatcaaaagtttgggttcaaagtgtttagttttccggctccatcacatgtggtgaccgccacttttccatatacaacctag

SEQ ID NO: 12799 - RNA, 177 nt, synthetic construct
  misc_feature 1..177: note = source = /note="Description of Artificial Sequence: Synthetic coding sequence"
  source 1..177: mol_type = other RNA
atgggacccgaagcgctctcttccctcttacttcttctcctggttgcctctggtgacgccgatatgaaaggacactttgacccagcgaaatgtaggtacgcattaggcatgcaggataggaccatccccgattcagatattagtgcctcaagctcctggtcagatagcacggcgtag

SEQ ID NO: 12800 - RNA, 2742 nt, synthetic construct
  misc_feature 1..2742: note = source = /note="Description of Artificial Sequence: Synthetic coding sequence"
  source 1..2742: mol_type = other RNA
atggggccagaggccctgagctctctacttttgctgttattagttgctagtggcgacgcggacatgaagggacacttcgaccctgctaaatgccggtatgctttaggcatgcaggacagaactatccctgattctgatataagtgcctcatcatcatggagtgattctacagccgctagacattcccgactggaaagcagtgacggagatggagcctggtgcccggctggaagtgtctttcctaaagaagaagaatacttacaggtagatctgcagcgtctgcatctagtggcccttgtaggcactcagggacggcacgcgggaggactgggtaaggagttctctcgtagttacaggctgaggtattccagagacggcaggcggtggatggggtggaaggaccgctggggacaggaagtcatctccggcaacgaagatcctgagggagttgtgctgaaagacttggggccccccatggtggcgcggcttgttagattctacccaagggctgaccgggttatgagcgtgtgcctcagagtggagctctacggatgtctgtggagagacggacttctcagttatacagcgcccgtcggtcagaccatgtatctgagcgaggccgtgtatctgaacgactctacgtacgatgggcacactgtcggggggctccagtacggaggattgggacaactcgcagacggagtggtaggcttggatgacttcaggaagtctcaggaattgcgggtttggcctgggtacgactacgtcgggtggtccaatcacagcttttcctcaggatacgtcgagatggagttcgagttcgacaggttaagggctttccaggccatgcaggtccactgcaacaacatgcacactttaggggccagacttcccgggggagttgaatgtcgatttcgccgaggaccagcgatggcttgggagggagagccaatgcggcataatctgggaggcaatttaggcgatccaagggctcgcgccgtgtctgtacccttgggtggaagagtcgccaggttccttcagtgcaggtttctgtttgcaggcccatggttattgttcagcgagatctcatttatctctgatgtggtcaataattcatctccagcacttggcggcaccttcccgcctgccccttggtggccccccggtcccccccctaccaacttctcatcactcgaactagagcctcgaggacaacagcccgtggccaaagccgaaggatcccctactgcaatattgattggctgcctcgtcgctattatactgttactgcttctgattattgcgctgatgctttggcggctccattggaggagactgctgtctaaggctgagcgcagggtactggaagaagagcttacagtccacctgtccgtgccaggtgacacaatcctgatcaacaacaggccaggtcccagagaacccccaccttaccaggagcccagacctagaggaaatccaccacatagtgctccgtgcgtgcccaatggaagcgctctgcttttgagtaaccccgcttatcgcttacttctagccacttatgcccggcccccccgcggaccagggccaccaaccccagcctgggccaagcctaccaatactcaagcctacagtggtgactatatggaacccgagaagcctggcgccccgcttctcccacccccccctcagaacagtgtaccccactacgccgaggccgatatcgtgaccctccaaggagtgacaggcggcaatacctacgcagtacctgcactgccaccaggagccgtaggggacggtccccccagagtggacttcccacgatctagattgagatttaaagaaaagctgggagaaggacagtttggggaggttcatctgtgcgaagtagattctccccaggacctggtttctctggatttccccctcaatgtccgaaaaggccatcctcttctagtcgccgtaaaaattctccggcctgacgctacaaagaacgcccggaatgatttcctgaaagaagttaagatcatgagccgcctcaaagatcccaacatcatcagactcctgggggtgtgtgtacaggatgacccgctttgtatgattactgactacatggagaacggcgacctcaatcagttcttgtccgcccaccagctcgaagacaaggccgcggagggggctcctggcgacgggcaggccgcgcaggggcctactattagttacccaatgcttctgcacgttgccgcccagatcgctagtggaatgaggtatctcgctactcttaacttcgtccatagggatcttgccacccgcaattgcctcgtcggtgaaaattttacgattaagattgccgatttcggtatgtcgcggaacttatatgccggcgactactacagggtgcagggccgggctgtgctgccaatccgctggatggcatgggaatgcatccttatgggcaagtttactactgcttctgacgtatgggcttttggtgtgactctctgggaggtattgatgctgtgcagggcacaaccgtttggccaattgacggatgagcaggtgatagagaacgcaggcgagttcttcagggatcagggtaggcaggtgtatctcagccggccccccgcttgcccccagggcctgtacgagctgatgctgaggtgttggtcccgcgaaagtgagcagaggcctccattttcccagttacacagattccttgcagaagatgccctcaacacagtgtag

SEQ ID NO: 12801 - RNA, 1146 nt, synthetic construct
  misc_feature 1..1146: note = source = /note="Description of Artificial Sequence: Synthetic coding sequence"
  source 1..1146: mol_type = other RNA
atgcgtctgctcgcgtggctgattttcttggctaactggggaggtgcccgggctgagccaggaaaattctggcacattgctgatttgcatcttgatcccgactacaaagtttcaaaagatcccttccaggtatgcccaagtgccggctcacagcctgtcccggacgctgggccctggggagactacttgtgtgattctccatgggccctgatcaattcctccatatacgccatgaaagaaatcgaaccagagcctgactttattctttggactggcgacgatacgcctcacgtgcctgacgaaaaacttggggaggctgctgtcctcgaaatcgtcgaacgccttaccaaactaattagggaggtgttccccggagccttctattgtgaaaaattgcccgggccctccggggccggaaggatcgttgtactaaacaccaacttatactacactagcaatgcgttgaccgccgacatggccgatcctgggcagcagttccagtggttagaagatgtgctcacagacgcctctaaagcaggagatatggtttatatagtaggccacgtccctcccggcttcttcgaaaagactcagaacaaggcctggttccgggaagggtttaacgagaaatatctgaaagttgtccggaagcatcacagagtcatagcaggacaattctttggacaccaccacacagactcatttagaatgctttacgatgacgccggtgtgccaatctctgccatgttcattacacctggcgtgaccccatggaagacaactctccctggagtggtcaatggtgcgaacaatccagcaatccgggtctttgaatacgaccgcgccaccttgtcactcaaggatatggtgacttactttatgaatctgagtcaagccaacgcccagggcacgccacgctgggagctggaataccagtcaacactgcagcgctattatgtatataactccgtctcttactcggcaggggtctgcgacgaggcctgttccatgcagcacgtttgtgctatgcggcaggtggatattgatgcatacactacctgtctgtatgcctccggaaccacacctgtgccacagctacctctgctgctcatggctttgctcggattgtgtaccttggttctctag

SEQ ID NO: 12802 - RNA, 456 nt, synthetic construct
  misc_feature 1..456: note = source = /note="Description of Artificial Sequence: Synthetic coding sequence"
  source 1..456: mol_type = other RNA
atgcgcgtagcaggggccgccaaactggtagttgccgtggctgtttttctcctcacattctatgtgatcagccaagtcttcgagatcaaaatggacgcgtcgctgggcaacttgttcgcccgatctgctcttgatacagcggccagaagcacaaaacccccaagatacaagtgcggcatctctaaggcttgcccagagaagcatttcgcgttcaaaatggcttcaggcgctgccaacgtggtcggaccaaaaatttgcctggaagataacgtgctcatgagcggcgtaaagaataatgttgggagaggtataaatgtggccctagctaatggcaaaactggcgaagtgctcgataccaaatatttcgacatgtggggaggggacgttgcaccatttatagaatttctgaaggccatccaagacgggactattgtcttgatgggtacctacgactag

SEQ ID NO: 12803 - RNA, 936 nt, synthetic construct
  misc_feature 1..936: note = source = /note="Description of Artificial Sequence: Synthetic coding sequence"
  source 1..936: mol_type = other RNA
taggcccctagcccttgttcccactttaactgcggcagtcaggtaacggacggaggcacaatcaaacaaaagatcttcacctttgacgctatgtttagcacgaattactcacacatggaaaactaccgtaagcgcgaggaccttgtctatcagagcacagtcagactacccgaggtccggatttctgataacgggccttatgaatgtcatgtgggtatatatgaccgggccaccagagaaaaagtagtcctggctagtgggaacattttcctgaacgttatggcacctccaaccagtatcgaagttgttgcagcagacactcccgcacccttcagtcgatatcaagctcaaaacttcacacttgtttgcatcgtgtctggcggtaaaccggcacctatggtgtactttaaacgcgacggcgagcccattgatgcagtgccactctctgaaccgcctgctgcctctagcgggcccctgcaggactctaggcccttccgctctctactgcatagagatttagacgatactaaaatgcagaagagcttgtctctcctcgatgccgagaacagaggcgggcggccttacaccgagcgaccctcccgtggactaacacctgacccaaatatcctgcttcaacctaccactgaaaatatacctgaaaccgtggtgtcccgagagtttcctcgttgggttcatagcgccgaacccacatattttctgcgacactcccgtacaccatcaagtgatggaactgtggaggtgagagccctgcttacctggacactgaatcctcagatagataatgaagccctcttcagctgcgaagtaaagcatcccgctctgtccatgcccatgcaagctgaggtcaccctggtcgcccccaaagggcccaagatagttatgacaccctcacgggcaagggtgggtgacacctag

SEQ ID NO: 12804 - RNA, 978 nt, synthetic construct
  misc_feature 1..978: note = source = /note="Description of Artificial Sequence: Synthetic coding sequence"
  source 1..978: mol_type = other RNA
atgcaaggacgcgttgctggctcatgcgccccgctgggcttgttactggtgtgcctacatctccccggactgtttgctagatccattggagtggtcgaagaaaaggtgtctcagaaccttggcaccaacctgcctcagctgggccagcctagcagcaccgggccctcaaacagtgaacacccccagcctgcccttgacccccgctccaatgacctggcccgggtacccctcaaactgagcgtgccagcttctgatggatttccacctgccggcggatccgcagtgcaacgctggccacctagttgggggttgcccgctatggattcgtggcctccagaggacccatggcaaatgatggcagccgctgccgaggaccgtcttggcgaggcgcttcctgaggagctgtcctacttaagttctgccgctgccctagcccccggatctggccccctgccgggcgagtcaagccctgatgccactgggctctctcctaaagcttccttactgcaccaggatagcgagtcccgacgcttgcctcggtcaaattcattgggggctggcggaaaaatactgtcccagcgtcccccctggagcctgattcaccgagtcttaccagatcacccttggggcaccctcaatcctagtgtgagctggggcggcggcgggcctggcaccggttggggaacccgcccgatgccacatccagagggcatatgggggatcaacaaccagccacccggtacatcatggggaaacataaaccggtatcccggtggatcttggggaaacataaaccgatatcctggcggcagttggggcaatattaatcggtatcctggaggaagctggggaaacatccatttataccctggcatcaacaaccctttcccccccggagttcttcgaccccctggttcctcttggaacatcccagctggattccctaacccgccaagtccccggctgcaatggggctag

SEQ ID NO: 12805 - RNA, 957 nt, synthetic construct
  misc_feature 1..957: note = source = /note="Description of Artificial Sequence: Synthetic coding sequence"
  source 1..957: mol_type = other RNA
atggggctgcacctcaggccatatagagtcgggctgcttcctgatgggctgttgtttcttctgctgttgctcatgctgctggccgatcctgcacttcccgctggccgacaccccccagtggtattaggatggttcacaactaagcaccccgggccacctagctttttgatggtgtggatgtatgtctcccttgcactaggcagaccaagccactggtcaagctggactcccgccaaggccgcttgggtaccaatttctactccatggtggcgggccctctgggctggggccacccatggggtgaggatgtctgaaggtctgccaatgactggagcagagcctcaaagacaaccgcaagcttggaaggacaaatacattagagcatttgtctcacttggggcgccctggggtggagtagccaaaaccctgagagttcttgcttctggagacaataatcgtatcccggtgattggtccactgaaaattcgcgagcagcaaagatctgcagtctccacttcctggctgcttccatacaattatacctggtcccctgaaaaggttttcgtacagactccgaccatcaattataccctgagagattaccgcaagtttttccaggacattggttttgaagacgggtggttgatgcggcaggacacagaaggccttgtggaagctacaatgcccccgggagtgcagctgcactgcttatacggcaccggagtaccaaccccagacagcttctactatgagagtttcccagatcgggacccaaagatttgtttcggagacggagatggcaccgtaaacctaaaatccgcactacagtgtcaggcttggcaatccagacaagagcatcaggtactgctccaggagctgccggggagtgagcatatagagatgctggccaacgcaacaacactcgcttatctgaagcgcgtattgctagggccttag

SEQ ID NO: 12806 - RNA, 1575 nt, synthetic construct
  misc_feature 1..1575: note = source = /note="Description of Artificial Sequence: Synthetic coding sequence"
  source 1..1575: mol_type = other RNA
tacgccctcagagacaggcagggaaatgctattggagttaccgcttgcgacatagatggagacggcagggaagaaatctatttcttaaatacaaacaatgcattcagtggagttgctacatacacagataagctgtttaagttccgtaataaccggtgggaagatattctgtcagacgaagtcaacgttgcgaggggggtcgccagcctgtttgcaggtcggtctgtcgcctgcgtcgacaggaaaggctcagggcggtacagcatatacatcgctaattacgcttacggaaatgtgggacctgacgctctcattgagatggaccctgaagcatcagacttatctagaggcatcctggccctcagggatgtcgccgcggaggccggcgtcagcaaatatacaggcgggaggggagtatctgttggacccatcctcagttcatctgccagcgacattttttgcgataacgaaaatgggccaaactttttgttccacaacagaggtgatggaacatttgttgacgctgctgcaagtgcaggagtcgatgaccctcatcagcacggtagaggagtggctttggctgacttcaatagagacggcaaagtggacatagtctacggaaactggaatggcccccatcggttgtacctccagatgtcgactcacggaaaggtccggttccgcgacatcgcctctcctaaattctctatgccttctcccgtgcgaaccgtgatcaccgccgattttgacaacgatcaggagcttgagattttctttaataacatcgcctatcggagtagctccgccaacagactttttcgtgtaatcaggcgagaacatggggatccactaatcgaagaacttaaccctggggacgcactcgaacctgaaggcagaggaacgggaggcgtcgtcactgactttgacggagacggcatgcttgatctgatcctgtcgcatggagagtcgatggcgcaacccctgtcagtatttagaggaaatcagggctttaataataattggttgagagttgttcctaggacacggttcggagcgtttgcaaggggggccaaggtggtgctgtataccaagaaaagcggggcgcatctgcgcattatcgacggtggcagtggctatctatgcgagatggaacccgtcgcccatttcggtcttggaaaggatgaagcttctagtgttgaagtaacgtggccagatggaaagatggtgtctagaaacgtagcttccggtgagatgaattcagttctggagattctgtacccccgcgacgaggacactcttcaggacccagctcccttagagacaccgatgaatgctagttcaagccacagctgcgcactggaaacctcaccctatgtttccacaccaatggaagctaccggggcagggcctactcgctcagccgtaggcgcgactagtcctacccggatggcacagccggcatggggcttgtcggcgtcccaccgggcccccgctcctcctccacccccacttctcctgccgctacctctcctccttcctttactggaactgcctctcctgcaccgctcctcttag

SEQ ID NO: 12807 - RNA, 636 nt, synthetic construct
  misc_feature 1..636: note = source = /note="Description of Artificial Sequence: Synthetic coding sequence"
  source 1..636: mol_type = other RNA
atggtctcaagaatggtctccaccatgcttagcggcctcctgttctggcttgcttccggctggacccccgcattcgcttactccccacggaccccagaccgtgtttccgaggccgacatccaaaggctgctacacggcgtcatggaacagttaggaattgcccgcccaagggtggaatatccagctcaccaagcaatgaatcttgtgggaccgcagtctatcgaaggtggcgctcacgaaggcctgcaacatctgggaccatttggcaatatacctaatatagtggcagagctcacaggtgacaatattcctaaagacttctctgaagaccagggttatcccgatccacccaacccttgtccagtagggaaaaccgacgacggctgtttagagaacacacctgatacggctgagttctcccgggagttccagctccaccagcacctttttgatccggaacatgactacccagggctcggcaagtggaataaaaagttactgtacgaaaagatgaaaggcggcgagaggaggaaacgcagatccgtgaatccgtacctgcagggccaacgcttggataacgtagtcgcaaaaaaatccgttccccatttctccgacgaggataaagatcccgaatag

SEQ ID NO: 12808 - RNA, 465 nt, synthetic construct
  misc_feature 1..465: note = source = /note="Description of Artificial Sequence: Synthetic coding sequence"
  source 1..465: mol_type = other RNA
atggccttgggagtacctatctccgtctacctcctgtttaacgccatgactgccctgaccgaagaagccgcagtcacagtcactccaccgattacggctcagcaaggcaattggacagtgaataagaccgaagcggacaatatagaaggcccgatcgccctgaaattctcacacctgtgcctggaagaccataactcctattgcatcaatggagcctgtgcctttcaccatgaactggaaaaggcgatatgccgctgcttcacaggttacacaggagagcgatgtgagcatctcacgctaacatcttacgcagttgactcctacgagaaatacattgctatcggtataggtgtgggcttgttgttatctggattccttgtcatattttactgctatatcaggaaacgctgcctaaaactgaaatccccttacaatgtctgctctggagaacgccgccctctttag

SEQ ID NO: 12809 - RNA, 1446 nt, synthetic construct
  misc_feature 1..1446: note = source = /note="Description of Artificial Sequence: Synthetic coding sequence"
  source 1..1446: mol_type = other RNA
atggggaaactgcgccccggcagggtggagtggttggcaagcgggcatacagagcgaccacacctctttcaaaatctgttgctttttttatgggcactgctcaattgtggacttggcgtttccgcccaaggacccggggagtggactccttgggtcagctggacccgctgttcttcttcatgtggacggggcgtttcagtgaggagtcgccgctgcctacgcttacccggcgaggagccatgttggggtgattctcatgagtacaggctgtgccaactgccagattgtccgccaggtgcagtaccattccgagacctgcagtgcgcactgtataatgggcggcccgtgttgggtactcagaagacttaccaatgggtgccttttcatggcgcgccaaaccagtgtgatcttaactgcttagcagaagggcatgccttttaccattccttcggccgtgtgctagacggcactgcctgcagtcctggagcccaaggcgtttgtgttgctggccgttgtctttcggcaggctgtgatggattgctaggatctggcgccttggaagataggtgtggccgatgcggcggcgccaatgatagttgtctctttgtacagcgggttttcagagacgcaggcgcctttgcaggctactggaatgttacactgatcccggagggcgcacgccacattcgcgtggagcaccgttcaagaaatcatctggctcttatgggcggcgatggccgctatgttctgaacggccactgggttgtcagccccccaggcacgtatgaagctgccggaacccacgtagtatatacacgcgataccggaccccaagagaccctgcaagccgctggccccacttcacacgacctgctgttgcaggtgctcctgcaggaacctaatccaggcattgagttcgaattctggttacccagagaacgatactccccctttcaagctcgagtgcaagcgctcgggtggcccctccgccagccccaacccaggggcgtcgagcctcagcctcctgctgcgcccgctgttaccccggcgcaaacccccaccttggcacccgacccatgccccccttgtcccgacaccagaggaagggcccatcgcctgttacactattgtggttctgacttcgttttccaggctcgcgtgctcggacatcatcaccaagcgcaagagacccgctatgaagtaaggatacagctggtgtacaaaaatcgtagccccttaagagcaagggaatatgtctgggctccgggccactgtccctgtccaatgctcgcccctcaccgggactacttgatggctgtgcaacgactcgtctctcccgacggaacacaagatcagttactgctccctcatgcaggttacgctcgtccgtggagcccagctgaagactcccgcattcggctgaccgcgcgcagatgccctgggtag

SEQ ID NO: 12810 - RNA, 627 nt, synthetic construct
  misc_feature 1..627: note = source = /note="Description of Artificial Sequence: Synthetic coding sequence"
  source 1..627: mol_type = other RNA
atggcagacatgcagaatctggtcgagagactcgagagagcagtcggcaggcttgaagccgtcagccatacaagcgatatgcatcgaggctatgcagattctccctctaaagctggcgctgccccatatgttcaagccttcgatagcctactcgccggcccagtggccgaatatctgaagatcagtaaagagatcggtggtgatgtgcagaagcatgccgagatggttcatacaggcctgaagctggagagagcactcctggtgacagcctcccagtgccaacaaccagccgagaacaagctgtccgacttattagcaccaatatctgagcagattaaggaagtcatcacattccgcgaaaaaaatagggggtcaaaactgttcaatcatctgtccgctgtgtccgagtccatccaagctctgggctgggtcgccatggccccgaaacctgggccttacgttaaggaaatgaatgacgctgcaatgttctatacaaaccgagtgttgaaggagtacaaggatgtcgataagaagcacgttgactgggttaaagcatatctgtctatctggactgaattgcaggcgtacatcaaagagtttcacactacagggctcgcctggtcatag

SEQ ID NO: 12811 - RNA, 1482 nt, synthetic construct
  misc_feature 1..1482: note = source = /note="Description of Artificial Sequence: Synthetic coding sequence"
  source 1..1482: mol_type = other RNA
tctgaagccgtgtacctgaatgacagcacctacgacggtcacaccgtcggaggcctgcagtatggcgggctgggccagctggcagatggtgtggtaggactagacgacttcaggaaaagccaagagctaagggtctggcccggctatgactacgtgggttggagcaaccactccttctcgagcggatatgtcgaaatggagtttgagtttgataggctacgagcgttccaggctatgcaggtgcactgtaataacatgcataccttgggagctcggctccccgggggggtggagtgccggttccgcagaggaccggccatggcatgggagggggaaccaatgcggcataacttaggaggaaatctgggagacccccgagctagggcagtgtccgttcccctaggcggacgggtggcacggttcttacaatgtcggttccttttcgccggtccctggctcctattcagcgagattagttttatatcagatgtcgtcaacaatagctctccagccctcggcggaactttcccaccagccccttggtggcctcctggaccacctcccaccaatttctcatcattagaattagaaccgagagggcagcagcctgtggccaaggctgagggttctcctacggcgatattgattggctgtctggtggcgatcatactattgctcctactaattattgctctcatgctgtggaggctccattggcgtagacttctctcgaaagtactggaatcccaccccagaacaagatccccaggcctagttggaataagaccgacccctcttcctgtctctcccatggctctgaggtgttgctcgccaatacaacctacagcatcattctggccactaacacctgtgcccttggaggcgcgcgctccacctcaccctcccgggcctaatccccccacaccaagaggggtgactgggggcaatacgtacgctgttcctgccttacccccaggcgcagtgggagatggccctcctcgcgtcgactttccccgatctagattgcgattcaaagagaaactgggcgaagggcagtttggcgaagtgcatctatgtgaagtggacagcccacaggatctcgtgagtctagattttccgctgaatgtgcggaagggtcacccactgcttgttgctgtcaagattcttcggccggacgccacgaaaaatgcacgaaatgactttctcaaagaagtcaaaataatgtccaggctgaaggaccctaacatcatacggttacttggcgtgtgcgtgcaggatgatcccctgtgtatgatcactgactatatggaaaacggcgacctgaatcaatttctctcggcccaccaacttgaggataaggctgccgaaggggccccaggcgacggacaggccgctcaaggacccacaatcagttaccccatgcttcttcacgtggcagctcagatcgcctcgggcatgcggtatctggccaccttaaactag

SEQ ID NO: 12812 - RNA, 2319 nt, synthetic construct
  misc_feature 1..2319: note = source = /note="Description of Artificial Sequence: Synthetic coding sequence"
  source 1..2319: mol_type = other RNA
atgcagtttcaactgaccctctttttgcacctcggctggctctcttattctaaagcacaggacgattgcaaccggggagcctgccaccctacgacaggggacctgctggtggggcgtaatacacagctcatggcctcttcaacgtgcgggctcagcagagcacaaaaatattgtatactatcctaccttgagggagaacagaagtgcttcatctgtgatagccggttcccatacgacccttatgaccagcccaatagccataccattgagaacgtcatcgtgagcttcgagcctgacagagagaaaaagtggtggcagtctgagaatggccttgatcatgtgtctatccgtctggatcttgaggcccttttccgtttttcacacttaatattgacattcaagacattccgtcctgctgcaatgctcgttgagcggtcaactgactacggtcataactggaaagtttttaaatattttgccaaagattgcgctacctctttccccaatattacatctgggcaagctcaaggcgttggcgatattgtgtgtgattctaagtattcagatatagaacctagcactggaggcgaagtggtgctgaaagtgctggatcctagttttgagatcgagaacccgtatagcccttatatacaagacctagtcactctgaccaatctccggataaactttacaaagcttcatacccttggcgatgctctcctcggacggcgccagaacgattctctcgacaaatattattacgccctctatgagatgatcgtcagaggcagttgtttttgcaatggccatgcttccgagtgtcggccgatgcaaaagatgcggggcgacgtatttagtccccccggaatggttcacgggcagtgtgtctgccaacacaacacagacgggcctaattgtgagagatgtaaggacttcttccaggatgcaccatggcggccagctgcggatctacaggataacgcatgccggagctgtagctgtaactcccatagttcccgttgccacttcgatatgaccacttatctcgccagcggcggcttatctggcggcgtctgtgaggactgccagcacaacaccgagggccagcactgtgatcgttgtcgtcccctgttttatcgcgaccctctcaaaaccatctcagatccctacgcctgtataccatgcgaatgcgaccccgatggaaccattagcggcggaatttgcgtgtcccattcggaccctgccctgggctctgtggctgggcaatgcttgtgcaaagaaaacgtggagggagctaaatgtgatcagtgcaagcccaaccactatggcttaagcgctaccgacccgctgggttgtcaaccttgtgattgtaatccattgggcagtctaccattcctgacttgcgacgtcgacacaggacagtgtctgtgtctcagttatgtgacaggggcccactgtgaggagtgcacagtgggctactggggactggggaatcacttgcacggatgctccccctgtgattgtgacatcggcggagcctattccaacgtttgttcacccaagaatggccagtgtgagtgtaggccccatgttacaggccgatcctgctcggagccagcaccgggctactttttcgcgcccttaaatttttacctttatgaagctgaagaagcaactaccttgcagggattggcccctctgggaagtgaaacattcggccagtcccccgccgtccacgttgtcttgggagaaccagtccccgggaatccggtaacttggacaggtccaggttttgcacgcgttctgccaggcgcaggtctcaggttcgcggtcaacaacattccctttccggtagactttaccatagccatccactatgagacccagagcgctgctgattggaccgttcagatcgtcgttaatccaccagggggctccgaacattgcatcccaaagaccctacaaagcaaaccccagagctttgcactgcccgccgccacacgcattatgctgttgccaacacctatatgtcttgagccagatgtacagtactcaattgatgtttatttctcccagcccttacagggggaaagccacgctcatagtcacgtccttgtggattctgctgcagtgcaatggcacaatctgggtagcctgcagccacctccacccgagtgcaagcagttcagctgtttttctttccctagttcctgggactatagacatccacccccacatctcgctaacttttgtatctttagccgcgacggagtcagtccacattggcctggttggagccaaacaccagacttaagatag

SEQ ID NO: 12813 - RNA, 1371 nt, synthetic construct
  misc_feature 1..1371: note = source = /note="Description of Artificial Sequence: Synthetic coding sequence"
  source 1..1371: mol_type = other RNA
atgggcagggcaggcgcagccgctgtaatccctggtcttgcactgctgtgggccgtgggtcttggctcagcagcaccatccccgcatcttaggttgtcatttcaggaactgcaggcctggcacggtctccagaccttttctctggaaaggacttgctgctaccaggcactgttggttgacgaggagaggggccgactatttgtgggtgcggaaaaccatgtagctagcctgaacctcgacaacatttcgaaacgcgcaaagaagctcgcctggcccgccccagtggagtggagggaggaatgcaactgggccggtaaggatataggtacagaatgcatgaatttcgtgaagctgctgcacgcctataatcggacgcacttgctggcatgcgggacaggcgcctttcacccaacctgtgcattcgtggaggtgggccatcgagctgaggagcctgtgttaagactcgatcccgggagaattgaggatggcaaaggaaaaagtccctacgaccccaggcaccgggctgccagcgttctggtcggcgaagaactgtacagcggagtggccgcagacctcatggggcgggattttactatattccgttccctcgggcagaggcccagcttacgcaccgagccgcacgactccaggtggctcaacgagcctaagtttgttaaagtgttctggatacctgagagtgagaatccagatgacgataaaatctacttctttttccgcgaaactgcagtcgaagctgcgcccgcactcggccgtttatccgtctctcgcgttggccaaatttgtaggaatgacgtgggcggtcagagatctcttgtgaataagtggactacatttctgaaagctaggcttgtgtgttctgtacctggcgtcgaaggcgacacacactttgatcagctccaggacgtttttctgctctcctctcgtgatcatcgtacacccttattgtacgcggtctttagtaccagtagctcgatcttccaggggagcgccgtgtgcgtgtattccatgaatgacgttcgcagggcctttctgggcccattcgcacacaaagagggcccaatgcaccagtgggtcagctaccagggtcgcgttccatatccgaggcaagcctgtgcccccgctagacccctggctccatctgttcccccgaggactagccaaacaatgtcctcaagcttgcgcggaactacccctagttgtacaactctgtcgtgccctctcggcggcgccttgttttcgtacaaactcgagcctatcacaccgtccctcaagctgcctagaaccggacttcaaccgttgactgatacaatgacctcctctagtcttgctcagaccctggctcgatgctag

SEQ ID NO: 12814 - RNA, 333 nt, synthetic construct
  misc_feature 1..333: note = source = /note="Description of Artificial Sequence: Synthetic coding sequence"
  source 1..333: mol_type = other RNA
ctctttatgctgcacaagatcgtacaggtctataactcagatgtgatcgacaagcagagcgccagtatgacaagcgataatgctgatgataaagctgtaataattctagtgcccgtgcgtctcgggggagaaaggactaataccgactacctagaattcgtgaagggaattttgagtcttgagtactgcgtaggaattattggggggaaacctaagcaaagttactatttcgctggctttcaggatgattccttgatctacatggacccccattattgccagtccttcgtcgacgtctctataaaggattttccattggaggttatactttag

SEQ ID NO: 12815 - RNA, 420 nt, synthetic construct
  misc_feature 1..420: note = source = /note="Description of Artificial Sequence: Synthetic coding sequence"
  source 1..420: mol_type = other RNA
atgggaccagaagcattatcctcactactgcttcttttgctcgtagcctctggggacgctgacatgaaagggcactttgaccctgccaaatgtcgctacgcacttggaatgcaagatcggacaattcctgattccgacataagcgcaagttccagctggagtgacagtactgccgccagacacagccgtctcgagagctctgacggggatggcgcgtggtgtcctgcaggatccgtctttccgaaggaggaagaatatctgcaggtcgatctccaaagactccatctggtcgccctcgtgggcacccaggggaggcatgccggaggactgggcaaagaattctccaggtcataccgactgcggtacagcagagatggacgaagatggatgggatggaaagacaggtggggccaggaatag

SEQ ID NO: 12816 - RNA, 570 nt, synthetic construct
  misc_feature 1..570: note = source = /note="Description of Artificial Sequence: Synthetic coding sequence"
  source 1..570: mol_type = other RNA
atgctcggcatcacatcttgttccgatcagcaggctaaagagggcgaaggactcgagggcagctctaccgggagcagcagcggtaaccacggtggctccggcggaggtaacggccataagccagggtgcgagaagcctgggaacgaggcccggggatcaggtgagtctggtatccagaattcagagacaagccctggaatgtttaacttcgataccttttggaagaacttcaaatccaaactcggtttcataaactgggacgcgattaataaaaaccaggtccccccaccatccacacgcgcacttctgtactttagccgcctctgggaggacttcaagcaaaatacccccttcctgaactggaaagccatcattgaaggcgcagacgcaagttcgctgcagaagagagcaggacgggacgaccagaattataattacaaccaacacgcataccctaccgcatatggcggcaaatattcagtgaagactccagctaagggcggggtatccccctcatcctccgccagcagagtacaacccggtctcttgcagtgggtgaaattctggtag

SEQ ID NO: 12817 - RNA, 438 nt, synthetic construct
  misc_feature 1..438: note = source = /note="Description of Artificial Sequence: Synthetic coding sequence"
  source 1..438: mol_type = other RNA
atggctgacatgcagaatctggtagagagactggagcgcgcagtgggcagactggaggctgtatcccataccagcgacatgcaccgagggtacgccgattccccctctaaagctggcgcagctccatatgtccaggcctatataaaggaatttcacactacaggattagcttggtccaagacaggtcccgtagctaaagagctgagcgggctgccatccggaccttcagcgggaagttgccctcctcccccccctccgtgtccacctccacccccagtgagtactatttcttgcagctatgagtctgcgagccggagcagtttattcgcccaaataaatcagggagagtctattacacacgctctaaagcacgtctcggacgatatgaaaacccacaaaaatccagcattaaaggcgcaaagcggacctgtcagatag

SEQ ID NO: 12818 - RNA, 264 nt, synthetic construct
  misc_feature 1..264: note = source = /note="Description of Artificial Sequence: Synthetic coding sequence"
  source 1..264: mol_type = other RNA
tgcaaaagaaaaccctacctccttccatccatccgagagggcgccaggctgggcatccaggaatgcggatcacagtttcgccatgagagatggaactgtatgatcaccgccgccgctacaacagccccaatgggagcttccccgttattcggctatgaactgtcgtccggctgccgccaagtagacgtgtctcgattaccccttcctcgctcctttcgtctcctttgttgtgaaaacatgctagagaatcatgtcttcttctag

SEQ ID NO: 12819 - RNA, 2535 nt, synthetic construct
  misc_feature 1..2535: note = source = /note="Description of Artificial Sequence: Synthetic coding sequence"
  source 1..2535: mol_type = other RNA
atgggacccggagctcctttcgccagggtgggatggccgcttcctcttttagttgtgatggctgccggagtagctcccgtctgggcatcacattcgccccatttgccccgaccccacagcagagttcctccccatccgtcttctgaacgccgagcagtgtacatcggggccttgtttccaatgtccgggggctggcccgggggacaagcgtgccagcctgctgtagagatggcgctcgaggacgtcaactcccgccgagatattctgccagactatgagctgaaactaattcatcacgatagtaagtgcgacccaggtcaagcgacaaagtacctgtacgagctgctttataacgacccaattaaaataattctgatgcccggctgcagttccgtatctacgcttgtcgctgaggcggctcgcatgtggaacttaattgttctatcatacggctcatcatccccagcactgtcaaatcggcagcgctttcccacctttttcaggacacacccttccgctacactgcacaatcccacacgcgtgaagctgtttgaaaagtggggatggaaaaagattgcaaccattcagcagacaactgaagttttcacaagtacgttagatgacctcgaggaaagggtgaaggaggcgggcattgaaattaccttccggcaatctttcttctctgacccggctgttcctgtgaagaaccttaaacgccaggacgcacgaataattgtaggtcttttttacgagacggaggcacgaaaagtgttttgcgaagtgtataaagagcgattgttcggaaagaaatatgtctggttcctgatcgggtggtatgccgataactggttcaagatctacgatccatccataaattgcaccgttgatgaaatgactgaggcagttgaaggccacatcaccaccgagattgtgatgctgaatcccgctaatacccgcagcattagtaacatgacatcccaggaatttgtggaaaagctgaccaagagactgaagaggcatcccgaggaaaccggcggtttccaggaggcacctctggcctacgatgctatttgggcccttgccctcgccttgaacaagacatctggggggggaggtagaagtggggtgcggctggaagatttcaactacaataatcagaccataacagatcagatctacagggccatgaattcctcttcgtttgagggagtaagtggacacgtagtattcgatgcctctgggagccgtatggcctggacgctaatcgaacaactgcagggcggatcttataagaagattggctactacgatagcacaaaagacgacctgtcttggagcaaaaccgacaagtggatcgggggcagcccacccgccgatcagacccttgtaattaaaacttttcgttttctgagtcagaaactgtttataagtgttagcgtcctcagcagcctcggaatagtgttagctgtggtatgcctgagcttcaacatctacaatagtcatgtgagatatatccagaacagccagccaaacctcaacaatctcaccgctgtcggctgctccctggcactcgcggctgtgttccctcttggtctggatggctaccatattggaaggaatcagtttccctttgtgtgtcaagcccgcctgtggctgctgggactggggttttccctggggtacggttccatgtttactaaaatctggtgggtgcacacagtgttcaccaaaaaggaggaaaagaaggaatggcgcaagacgcttgaaccttggaagttgtatgcaacagttggactgttggtagggatggacgtgctgacgttggccatctggcagattgtggatccactccaccgcacgatcgagactttcgccaaagaggagcctaaggaggacatcgatgtgtctattctgccccagcttgagcactgctcttccaggaagatgaacacatggctcggcatattctatggctacaagggattgttactcctgctgggcatcttcttagcttatgagacaaaatctgttagcacggaaaaaatcaacgaccacagagccgtgggcatggcaatctacaatgtcgccgtcttatgtctgatcactgctcccgttaccatgatccttagcagccagcaggacgccgcttttgcctttgccagccttgctatcgtcttttcgtcatacattacattagttgttttgttcgtaccaaaaatgagacgactgatcacccgcggcgagtggcagagtgaggcgcaggatacaatgaaaacgggttcatctaccaataataacgaggaggagaagtctaggctcttggagaaagaaaaccgggagctggaaaagattatagccgaaaaggaagagcgggtctcggaactgcgacaccagcttcaatcacggcagcagctgaggtcacgcagacacccaccgacccctccagaaccttccggcggtctacctagaggaccaccagaaccaccggatcgactctcgtgtgacggctctagggtacatctgctttataagtag

SEQ ID NO: 12820 - RNA, 2631 nt, synthetic construct
  misc_feature 1..2631: note = source = /note="Description of Artificial Sequence: Synthetic coding sequence"
  source 1..2631: mol_type = other RNA
atgggacccgaagcattaagctcactcctactcctgctgcttgttgcttccggcgatgccgatatgaagggccacttcgaccctgccaagtgtcggtatgctctgggaatgcaggaccgaacgataccagattccgatataagtgcctcttctagctggtcggattccaccgccgctcgccattctcggcttgagtcaagtgatggcgatggggcttggtgccccgccggaagcgtgttccccaaagaagaagaatacttgcaagtggacttgcagcgactgcatttagttgccctggtgggtactcagggaaggcacgcgggtgggctgggtaaagaattttcccggtcttatcgactgcgctatagtcgggatggaaggcgatggatgggctggaaagacagatggggccaagaagtgatatcaggaaacgaggaccctgaaggagttgtgctcaaggacctcggtccccctatggtggcgcggctggtgagattttacccacgcgccgacagggtgatgtcagtgtgtctgagagttgaactgtacggctgtctttggcgggacggactgctctcttatactgctcccgtgggccaaaccatgtatcttagtgaagcggtgtacctcaatgacagtacctatgacggacataccgtggggggtcttcagtacggcggactggggcagctggctgacggggttgtcggcctggatgacttcagaaaatcacaggagttgagggtatggcccggttacgactacgttggctggtcgaaccacagctttagcagcggatacgtcgagatggaattcgaattcgaccgactgagagcctttcaggctatgcaggtacactgcaataacatgcataccctaggagctcgacttccaggaggagtggagtgccgctttaggagaggtcccgctatggcatgggagggagagccaatgaggcacaaccttggagggaacctcggtgaccccagagcccgcgctgtcagcgttcccctgggcgggagggtggcgcggtttttgcagtgccgattcctctttgctggaccttggctgttgtttagcgaaataagttttatctcggacgtcgtgaacaactcttcacctgcccttgggggaacgttcccaccagccccttggtggccccccggacctccccctacaaatttcagcagcctggagcttgagcctcgcggacaacagcctgtcgcaaaagcggaaggatcaccaacagcaatcctcattgggtgcttagtagcgattattcttttactgctcttaattatcgctctgatgctgtggcggcttcattggcggagactactgtctaaggcagagcggagggtgttggaggaggagctcactgttcacctttctgtacctggagacacaatcctgataaacaatagacccggacctagggagcctcccccctatcaggaacccaggcctcgcgggaatcccccccatagcgctccttgcgttccaaacggcagcgcctacagcggtgattacatggagccagaaaagcctggtgcacctctgctgccccccccccctcagaacagcgtcccacattacgctgaagccgatatcgtcactctccagggcgttacaggcggtaatacttacgccgttcccgccctcccgcctggcgcagtgggggatggcccccctcgcgtggactttccgcgctccagactgcggttcaaagagaagttaggggaaggccagtttggggaggtccatttgtgcgaagttgactccccacaggacctcgtgtcattagattttccactgaatgtcaggaaggggcaccccctcctggtagctgtgaaaatcctgcggcctgatgcaaccaagaacgcacggaacgattttctcaaggaagtaaaaataatgtcccgactgaaggatcccaacattatccgactgctaggggtgtgtgttcaggatgatcctctttgtatgattactgactacatggaaaatggggaccttaaccagttcttgtctgctcaccagctggaagataaggctgcggaaggggccccaggcgacggccaggccgctcagggccctacaatctcctatcccatgcttctccatgtggccgcacagattgcttccggcatgcgttacttagctacccttaattttgttcatagagatcttgccactcggaattgtctggtaggtgaaaactttaccattaaaatcgcagatttcggaatgtctagaaatctttatgcaggggactattacagggttcaggggcgggcagttttgccaattcgatggatggcctgggagtgcattctgatgggaaagtttaccacagcttctgacgtgtgggcatttggggtgactctgtgggaggttctgatgctttgccgagctcagcctttcggacagctgacagatgagcaggtcattgagaacgccggtgaattctttcgcgaccaaggacggcaggtgtacctgagtaggcctcctgcctgtccacaggggctctacgagttgatgctgagatgctggagccgagagtccgagcagcggccaccatttagccagcttcatagatttctggccgaagatgccctcaacaccgtttag

SEQ ID NO: 12821 - RNA, 942 nt, synthetic construct
  misc_feature 1..942: note = source = /note="Description of Artificial Sequence: Synthetic coding sequence"
  source 1..942: mol_type = other RNA
atgtccgacctactccttctgggacttataggcgggctgactctattgctactcctgaccctcctggcctttgccgggtattcagggttgcttgcaggcgttgaggtctcagcaggatcaccaccaatccgtaacgtgaccgttgcctacaaatttcatatgggcttgtatggtgaaacgggtaggttgttcactgaaagctgttctataagtcccaagttgaggtctatcgctgtgtattatgacaatccgcacatggtgccacccgataagtgtcgatgcgctgtgggctctatcctgagtgaaggcgaggagagtccctcaccagaactgatcgatctctatcagaagtttggttttaaggtgttttcgtttcctgctccaagtcacgtggtcacagccacttttccctataccaccattttgagcatctggctggccacacgtcgcgttcacccagcactagatacctatattaaagagagaaaactgtgcgcctatccacgtctggaaatctaccaagaggaccaaatccattttatgtgtcctctagcccgccaaggcgatttttatgtgcccgaaatgaaagaaaccgaatggaaatggcgagggctagtcgaggcaattgacacgcaggtggacggcactggcgccgataccatgagcgacacgtcttctgttagcttggaagtttcacctgggtcacgcgaaacatccgcagcaacactgtcccccggggcatcatcacggggctgggacgatggggacaccaggagtgaacactcgtattccgaaagcggagctagtggttcttccttcgaggagctggatcttgagggtgaaggtccgctgggtgagagcagacttgatcctggaactgagcctctggggacaaccaaatggctctgggagcctaccgctcctgaaaaggggaaagaatag

SEQ ID NO: 12822 - RNA, 843 nt, synthetic construct
  misc_feature 1..843: note = source = /note="Description of Artificial Sequence: Synthetic coding sequence"
  source 1..843: mol_type = other RNA
atgaagacatttacttggaccctgggcgtcttgttcttcctgctcgtagacacgggccattgccgcggggggcagttcaagatcaagaagataaatcagcgaagatacccaagaactataaaggacatgataacaaggatggacctggaaaatctgaaggatgtgctttcccgtcaaaaaagagagatcgacgttctgcaactggtcgttgacgtcgatggaaatatcgtcaatgaggttaagctgctgaggaaggagtccagaaatatgaattcaagggttacccagctctacatgcagctgctgcacgagattattagaaaacgagataatagcctcgagctgagtcagcttgaaaacaaaattcttaacgtcactacagagatgctgaaaatggccactagatatagggagctagaggtgaagtatgcttcattgacagacttagtgaacaatcagagtgtcatgattaccctgctcgaagaacagtgcctgagaattttctctcgtcaggatactcacgtgtctccgccgctggtccaggtagttccgcagcatattcccaactcccaacagtatactcccggattactaggaggcaatgaaatccaacgcgaccctggctacccccgggacttaatgccccccccagatttggccacttctccaacaaaaagcccattcaaaattccaccggtaacgtttatcaacgaaggccctttcaaagattgtcaacaggccaaagaggctggccactctgtaaacggtattttctgggcagaatatagaggtggcagctactctcttcgggctgtgcagatgatgatcaagcctatcgactag

SEQ ID NO: 12823 - RNA, 522 nt, synthetic construct
  misc_feature 1..522: note = source = /note="Description of Artificial Sequence: Synthetic coding sequence"
  source 1..522: mol_type = other RNA
atgcactggaaaatgctcctgctgctgttgttgtactacaatgctgaagcatctatgtgtcacaggtggagccgcgccgttcttttccccgccgcacaccgacctaaacgttccagttccctccccctcaatccggtcctacagacgtcactcgaagaggtagagcttctttatgaattcctgcttgccgagcttgagatctctcctgacctgcaaattagcattaaggatgaggagctcgcctccctgcgaaaggcctcagattttagaaccgtttgtaacaatgtgattcctaaaagtatccccgatatccgcagactttccgctagtctgtcctcacacccaggtatacttaaaaaagaagactttgaaagaactgttttaacccttgcctataccgcttacagaactgctctttcccatgggcatcagaaggacatttgggctcagagcctggtcagcctgttccaagctcttagacacgacctcatgcggagtagtcaacctggcgtgccaccctag

SEQ ID NO: 12824 - RNA, 309 nt, synthetic construct
  misc_feature 1..309: note = source = /note="Description of Artificial Sequence: Synthetic coding sequence"
  source 1..309: mol_type = other RNA
atggaaaggggggcaggcgcaaagctcttaccactgctcctcctgcttcgggcaaccgggtttacgtgcgctcagacagacggcagaaatggatacactgcggtgatcgaagtcacttcaggaggaccttggggggactgggcttggccagagatgtgccccgacgggttctttgcaagtgggttttctttgaaagtggagcctccgcagggaataccaggcgatgatacagctttaaatggaatacggttgcactgcgctcgcggaaacgtgcttggtaacactcacgtgctaggccgtatggagtag

SEQ ID NO: 12825 - RNA, 351 nt, synthetic construct
  misc_feature 1..351: note = source = /note="Description of Artificial Sequence: Synthetic coding sequence"
  source 1..351: mol_type = other RNA
atggccgctggatccgccccaatgcagctgcatctccgcgctaccatcaggatgaaggacggtctctgtgtgcctagaaagtggatttaccacctcacagagggaagcaccgatttgaggacagagggtaggcccgatatgaaaactgagctcttttcctcaagctgccctgggggtattatgctgaacgaaactggacagggttatcaaaggttcctgctgtacaacagatctccacacccacctgaaaaatgcgtagaggagttcaaatccttaacctcctgcttggatagcaaagcttttttactgacaccaaggaatcaagaggcttgcgaactgtccaacaattag

SEQ ID NO: 12826 - RNA, 1137 nt, synthetic construct
  misc_feature 1..1137: note = source = /note="Description of Artificial Sequence: Synthetic coding sequence"
  source 1..1137: mol_type = other RNA
taatacagcggcgactacatggaaccggaaaaacctggtgccccattgttaccgcccccaccacaaaattccgtcccgcactacgccgaggctgatattgttacattacaaggcgttacaggaggaaatacctacgctgtacctgcattgccaccaggtgccgtgggggatggacctccaagagtcgatttcccccggtctcgattacggttcaaggaaaagttgggcgagggtcagtttggcgaggtccacctttgcgaggttgactcaccccaggatctggttagtttagactttccactgaacgtccgcaagggccaccccttactggttgccgtgaagatactaagacccgatgccactaaaaacgcatcattttccctcttcagccgcaacgatttcctcaaggaggtcaagatcatgtcaagactgaaggaccccaacatcatccggcttctcggcgtgtgtgtccaggacgaccccttgtgcatgattaccgattacatggagaacggcgacttaaaccagttccttagcgctcaccagctcgaggataaagccgctgagggtgctcccggcgatggccaggctgcccagggtccaaccatctcctacccaatgctcctgcacgttgccgcccaaatagcatcagggatgagatatctagccaccctgaacttcgtgcaccgggacttagccacaaggaactgcctggttggcgaaaacttcaccatcaagattgcagattttggaatgtcaagaaacttgtacgccggtgactactacagagttcaaggcagagctgtactgcctatccgctggatggcttgggaatgtatcttaatgggtaagttcacaacagcgtccgacgtgtgggcattcggagtcacactgtgggaggtgctaatgttatgtagagcgcaaccttttggccagttaacagatgagcaggttattgaaaacgctggggaattttttcgagatcagggacgccaggtgtacctgtctcgccctcccgcctgtccacagggtctgtacgaactgatgttgagatgctggtcaagagaaagcgaacaacgccctcccttctcacagcttcacaggtttcttgctgaggacgccttgaatacggtttag

SEQ ID NO: 12827 - RNA, 942 nt, synthetic construct
  misc_feature 1..942: note = source = /note="Description of Artificial Sequence: Synthetic coding sequence"
  source 1..942: mol_type = other RNA
atgtccgatctgctgctcttgggcttaatcggcggcttaacgttgctgctgctgctgactttgctcgcattcgctggttacagtggacttttggcaggtgttgaggtgtcagccggatctcccccaattagaaatgtgacggtcgcctataagtttcacatgggtctatacggcgaaaccggacgactgttcaccgaaagttgtagtatcagcccaaagcttaggtccatcgccgtctattacgacaatccccacatggttcctcctgataagtgtcgatgtgccgttggatcaatcctttctgagggtgaggaaagtccctccccagaactaatagacctctatcagaaattcggttttaaagtgttctctttccccgcgccatcacacgtcgttacggccacttttccctacaccaccattttgtcaatatggttggcaacccgccgcgtgcacccggctcttgatacctacattaaagaaaggaagttgtgtgcctatccaagactcgaaatttaccaggaggaccagatccatttcatgtgtcctctcgccaggcagggggatttttatgtgcccgagatgaaggagaccgaatggaagtggagagggcttgtggaagctatcgatacgcaagtggacggaaccggcgccgataccatgtctgacacaagcagcgtgtctctggaggtgtcaccaggcagtcgcgaaacatccgcagccaccctcagtccaggggccagcagcagggggtgggacgacggtgacacacgctctgaacacagctacagcgaaagcggggcatcaggatcatcgtttgaagaattagatctagagggggagggaccattgggagagagcagactagacccgggcactgaacctttaggtaccaccaaatggctctgggagccaaccgccccagagaaagggaaagaatag

SEQ ID NO: 12828 - RNA, 420 nt, synthetic construct
  misc_feature 1..420: note = source = /note="Description of Artificial Sequence: Synthetic coding sequence"
  source 1..420: mol_type = other RNA
atggggcctgaggcgctgtcgagcctcctactactgctgcttgtggcttccggtgacgcagatatgaaaggacacttcgatcccgccaaatgtcgctacgcccttggaatgcaagatcgtaccattcctgattccgacatctctgcctcctcttcttggtccgactccaccgccgcgcgccatagtcggctcgaaagctctgacggcgacggcgcttggtgccctgcaggctcagtgtttccaaaggaagaagaatatttacaggtcgacctacagcgactgcatctggtcgccctggtaggtacacagggaaggcatgccggaggattgggaaaggaattctctcgaagttatcgtctaagatatagccgagatgggcgcagatggatgggttggaaggatcgttggggccaggagtag

SEQ ID NO: 12829 - RNA, 342 nt, synthetic construct
  misc_feature 1..342: note = source = /note="Description of Artificial Sequence: Synthetic coding sequence"
  source 1..342: mol_type = other RNA
atggataatgtccaacctaaaattaaacatcgccccttctgtttcagtgtgaaaggtcacgtgaagatgctgcgactcgccttaaccgtaactagcatgacattttttatcattgcacaagcccccgagccatacattgtaatcactgggttcgaagttacagtgatcctcttctttatcctgctgtacgttctcagactggacagactcatgaagtggctgttctggcctctactcgacattattaacagtcttgtgaccaccgtattcatgctaatagttagcgtgctagccttaatccccgagactaccaccctcaccgttggtggcggcctgttctag

SEQ ID NO: 12830 - RNA, 465 nt, synthetic construct
  misc_feature 1..465: note = source = /note="Description of Artificial Sequence: Synthetic coding sequence"
  source 1..465: mol_type = other RNA
atgtttggctggggagactttcactccaatatcaaaacagtaaagctgaacctgcttattacaggcaagatcgtggaccatggtaacggaacttttagtgtgtacttcaggcataactctaccgggcagggtaatgtatctgtgtcacttgtaccacccacaaagatcgtcgagtttgatcttgcccaacaaacagtaattgatgctaaagatagcaagagtttcaattgcaggatagaatatgaaaaggtagacaaagcgaccaaaaataccctctgtaactacgacccaagtaaaacgtgctaccaggagcaaacccagagtcacgttagctggttatgttccaagccattcaaagtcatttgcatatacatctctttctattctactgattataaactggtgcagaaagtgtgccccgactacaattatcactcagacacaccatatttcccaagcgggtag

SEQ ID NO: 12831 - RNA, 531 nt, synthetic construct
  misc_feature 1..531: note = source = /note="Description of Artificial Sequence: Synthetic coding sequence"
  source 1..531: mol_type = other RNA
atggccgatatgcagaatctcgtcgaacgcttagagcgtgccgttgggcgccttgaagctgtatcacataccagcgacatgcacagagggtacgcagattcgccatctaaagcaggcgccgccccctacgtacaggcattcgatagtctgctcgccggccctgttgcagagtacttaaagatttccaaagagatcgggggggacgtacagaaacacgcagagatggtacacaccggactgaagctagagcgggctctgttggtgacggcctctcagtgtcagcagccagccgagaacaaactttcagatctactcgctccaatctcggaacagataaaggaggtgattacctttagagagaagaaccgtggcagtaagctcttcaaccatctctctgccgtgagcgagagcattcaggctttgggctgggttgctatggcccccaaaccgggcccgtacgtgaaggagatgaatgacgcagctatgttttatacaaaccgtgtactgaaggagtataaagatgtcgactag

SEQ ID NO: 12832 - RNA, 2535 nt, synthetic construct
  misc_feature 1..2535: note = source = /note="Description of Artificial Sequence: Synthetic coding sequence"
  source 1..2535: mol_type = other RNA
atgggacccggggcgccctttgccagggtcggatggccattgcccctcctcgtggttatggccgcaggtgttgctcccgtttgggcatctcacagtccacatctgccaagacctcactcccgagttcctccccatccatctagcgaacgcagggccgtatatattggcgctctgtttccgatgagtggcggatggcctgggggccaggcctgccagcctgccgtagagatggctttggaagacgtcaattctcgaagagacattttgccggattacgagctgaaacttatccaccacgactccaaatgcgacccaggacaggcaaccaaatacctgtacgagctgctgtataatgaccctatcaagataatcctgatgcccggctgcagttccgttagtactcttgtggcggaggctgctcggatgtggaatctcatcgtcctcagttacggtagttccagccccgcgctcagcaatcgacagaggttcccgaccttttttcgcactcacccttctgctacacttcacaacccaacgcgagtgaagctgtttgagaagtggggatggaagaagatcgcaactatccagcaaaccactgaagtgtttactagcacgctggacgacttggaagaacgagtgaaagaagccggaattgaaatcacttttagacagtcatttttttcagaccctgcggttccggtcaagaatttaaaaagacaggacgcccgaattattgtgggccttttttacgaaacagaggcacggaaggttttttgcgaagtttacaaagagcgtctgttcggaaagaaatacgtatggttcctgattgggtggtatgccgataattggttcaagatatacgacccttcaatcaactgtaccgtcgacgagatgacagaagccgttgagggacatattacaacagagatcgtgatgctgaatccagccaatacgagaagcatttcaaacatgacctcccaggaattcgtggagaagttgactaagcgcctgaagaggcatcctgaagagaccggtggatttcaggaagctcctctggcctacgacgcaatttgggctttggcgcttgcactgaacaagactagcggcgggggaggtcgatccggggttcggcttgaagacttcaattacaacaaccagaccatcaccgatcagatctaccgcgcgatgaattcctcttctttcgagggcgtgtcgggacacgttgttttcgacgcttcaggatcaagaatggcttggaccctgatcgagcagctccagggcggatcctataaaaaaattggctattatgatagtacgaaggacgatctctcttggagcaaaactgacaaatggataggaggctcgcccccagccgaccaaactctggttatcaagacctttcggttcttgtcccagaagttatttatttcagtgagcgtgctcagctccttaggaattgttttagctgtagtgtgcctttcttttaacatttataattcccatgtacgttatatacagaactcacaacccaacttgaataatctgacagccgtaggttgtagccttgccctggccgccgtgtttccactaggactcgatggataccatatcggccgcaatcagtttcccttcgtgtgtcaggcccggctatggttgctaggactagggttttctttgggatacggatccatgtttacaaagatttggtgggtccacacggttttcaccaaaaaagaggaaaagaaagagtggcggaagactcttgagccctggaaactgtatgctaccgttggactgctcgtcgggatggacgtgttgaccctggccatttggcaaatcgttgaccctctacacagaacaatcgagacgtttgcgaaggaagagccaaaagaggacattgacgtgtccatcctgccacagctggagcattgtagtagtcgtaaaatgaatacatggcttggcattttttatggttacaagggcctcctcctgctcctgggcatattccttgcttacgagactaagagtgtgtccaccgagaaaatcaatgatcaccgagcggtgggcatggccatctataatgttgccgtgctgtgtcttataacagcccccgttactatgattctaagttcacagcaggacgcggcatttgcttttgcttctctggctattgtgttttcctcttacatcacactagttgttctcttcgtgcccaagatgaggcgtcttataactcggggcgagtggcaaagcgaggcccaggacaccatgaagactggatcctccacaaacaacaatgaagaggagaagtcacgcttactggaaaaggagaaccgcgaactcgagaagatcatagccgaaaaggaggagcgggttagtgagctaaggcatcagttacaaagcaggcaacagttgcgtagtcgcagacatccgcccacccccccggagccttcaggtgggcttcccagaggcccccctgagccacctgaccgactgtcttgtgatgggtctcgagtacatctcctctacaaatag

SEQ ID NO: 12833 - RNA, 2055 nt, synthetic construct
  misc_feature 1..2055: note = source = /note="Description of Artificial Sequence: Synthetic coding sequence"
  source 1..2055: mol_type = other RNA
tagccccgttcttccacccatgtgcccctcgtcctgcctctactcgttttactgttgctagcacctgcccgccaggcagctgctcagaggtgcccacaggcgtgcatctgcgataattcacgaaggcatgtggcctgccgataccaaaatttaaccgaagtcccagacgcgatcccagagctgacacaaaggcttgatctacagggcaacctgctgaaggtcatacccgcagccgccttccagggcgtcccacatctcacgcacctcgacctacgacattgcgaagttgagctggtggcagaaggggcctttagagggcttgggaggctgctgctgctgaacctggccagcaaccatctgcgtgaactgcctcaggaagccttggacggccttggctcactgcgacgcctcgagttagaaggaaatgccctagaagagcttcgacccggcacctttggtgccttaggggcccttgcaactctcaacctggcacacaatgccctagtgtatctgcctgcgatggcatttcagggactactgagagtgcgctggctaagactctcccataatgcgctgtctgtgctggctcccgaggctctcgcagggctgccggctctgcgtcgactgagcctccatcacaacgagctgcaggctttgccagggccagttcttagccaagctcgtggtttagcacggctggaactggggcacaatcctttgacatacgcaggcgaggaagacggcttagcactgcccggcctgcgtgaactgcttcttgatggcggcgcgctgcaggccctcggcccgcgcgcctttgctcactgtccaaggctgcatacccttgatctaagaggtaatcagctggatacattaccacctctgcagggcccaggccaacttcgtcggctccgtttgcaggggaatccactttggtgtggatgtcaggctcgtcccctactcgagtggctggcgagggctcgggtgaggagtgatggtgcgtgccagggtcccagaagactacggggcgaggctttggacgctttacggccgtgggatctgcggtgtccaggcgatgccgcccaagaagaagaggaactggaggagagagccgttgccggcccgcgtgccccaccaagaggaccaccccggggaccaggcgaagaacgtgccgtggccccttgcccaagggcctgcgtatgtgttcccgagtccagacactcatcatgtgagggttgtggccttcaagcggttcctaggggcttcccttcagacacccagctcctggacctcaggaggaatcatttcccaagtgtcccaagggccgctttccccgggctgggacaccttgtgtcattacatctccagcactgtggcatcgctgagctcgaggcgggcgcgcttgcaggacttggaagactcatttacctgtatcttagcgataaccagttggccggcctttctgcagctgcactggaaggggcaccccgcctcggatacctttacctggaaagaaaccgcttcctccaagtaccaggcgccgccctaagagcccttcctagcctattctcacttcacttgcaagacaacgccgtcgacaggctggctcctggagacctgggcagaacccgcgctctgcggtgggtctatttgtcgggtaatcgtatcacggaggtgtcattgggggccctgggccccgcccgcgaactggagaaactgcacctagacaggaatcaattgagggaagttccgacaggcgcactagaagggttgccagctctacttgaactgcagctctctggaaatccccttcgcgccttacgagacggcgcttttcaaccggtcggtaggagcctccagcatctgtttctgaactcttccggcttagaacagatttgtcctggcgcatttagtggactgggccccgggttgcagtcactgcaccttcagaaaaaccaactcagggccctaccagccctgccgtcagcccgaaggaccccaatcaagggacggcagtgtggggctgacaaagttggtaaagaaaaagggagactttag

SEQ ID NO: 12834 - RNA, 2259 nt, synthetic construct
  misc_feature 1..2259: note = source = /note="Description of Artificial Sequence: Synthetic coding sequence"
  source 1..2259: mol_type = other RNA
atggctagacacctgctattgccgttggtcatgctcgtcatctctcccattcctggcgccttccaggacagtgccctgagtccaacccaggaagaaccggaagacctggactgtggacgcccagagccatcagctagaattgtgggtggaagtaatgcccagcctggcacctggccttggcaggtgagtctgcaccacggcggcggccatatatgtggaggctctctaattgctccctcctgggttttgtctgcagcgcattgttttatgacaaacggcacactggagccggcagctgagtggtctgtgctcctgggagtccacagtcaggatggtcccctcgacggagcccacacgcgagccgtagccgccattgtagtgcccgctaattacagtcaagttgaattgggagccgatcttgcccttttgcgcctagcctcacccgctagtctgggtcctgccgtctggccagtgtgcttgccgcgcgctagtcaccgttttgtccacggcacagcgtgttgggccaccggttggggagacgtgcaggaggctgaccctttgcccttgccatgggtcctgcaggaggtggaattaaggttgctgggagaagccacctgccagtgcttgtacagtcagccaggcccttttaaccttaccttacaaattctgccgggaatgctgtgtgccgggtaccccgaaggacgccgggatacctgtcagggggattctggagggcccttggtgtgcgaagaggggggtcggtggttccaagccgggatcacttctttcggcttcggatgtgggcggagaaaccgaccaggggtttttaccgctgtggcaacctatgaagcatggatccgcgaacaagtaatgggttccgagcccggacctgctttccctacgcagcctcaaaagacgcagtccgatccacaggaaccaagagaggagaactgtaccattgcgctcccggagtgtggcaaagctcccaggcctggtgcatggccatgggaggcgcaggtcatggtgcctggttctcgcccttgccatggagcattggttagcgagtcttgggtacttgctccagcctcatgttttttggaccctaactccagcgatagcccccccagggacctggacgcatggcgtgtactgctgccatccagacctagagctgaacgtgtggccagactcgtgcagcacgaaaacgcttcctgggacaatgcttcagatctcgctctattacaattgagaacccctgtgaacctgagtgcagccagccgtccagtttgcctgccacatcccgagcactactttcttcctggctcacggtgccgtcttgcccggtgggggcgaggtgagccagctttaggaccaggagcactactggaggccgaacttttaggcggctggtggtgtcactgtctgtatgggcgacaaggcgccgcagtgcctctgcccggcgaccctcctcacgcgttgtgtcccgcatatcaggagaaagaggaggtcggatcttgctggaatgactcacgctggtcactgctgtgccaggaagagggaacctggtttctggccgggatcagagacttcccgtcaggatgcctgcggcctcgggcctttttccctcttcagacacacggcccttggataagtcatgtgacccggggagcatacctggaggaccaactagcttgggactgggggccagatggagaagaaacagagactcaaacctgtcccccgcacactgagcacggggcttgtggacttaggctagaggcggcgcctgtcggcgttttgtggccttggttagctgaggttcacgtcgccggagacagagtctgcacgggcattctgcttgcaccagggtgggtgctggccgccactcactgcgtgttacggcctggcagtaccactgtcccatatatcgaggtctacctgggaagggccggggcctctagtctgcctcaggggcatcaaatgaccagcgccccccctctcctctgtcagatgacagagggaagttggatcctcgtcggcatggccgtgcagggaagcagagaactgttcgccgccattggcccagaagaagcttggatctcccagacggtcggagaggctaacttcctgcctccttccgggtctccccactggcctacaggtggcagcaacttatgtccccccgagctcgccaaagcctcaggctctccacacgccgtatattttttgttactactgaccctgttgatacaatcatag

SEQ ID NO: 12835 - RNA, 453 nt, synthetic construct
  misc_feature 1..453: note = source = /note="Description of Artificial Sequence: Synthetic coding sequence"
  source 1..453: mol_type = other RNA
atgcgcttcatggctggccctgccggatcacagtccctgggcccattatgctttcactcatccccacaggccctttacaccgtcctgctgatcgtactcgtgatgatgtctctggttttcggaaagttcgtgcccgtcaattgggagcctcctcaacccctcccattccccaagtatctgcgatgctacagatgtctcctcgaaaccaaagaactggggtgcctgttggggtcagacatctgcctgacccccgccggttctagctgcatcacactgcacaagaaaaattctagcggctctgacgttatggtctccgactgccgaagtaaagaacaaatgagcgattgctccaacacacgaacaagcccagtatcaggattttggattttctctcagtattgcttcctggacttttgtaatgatccgcaaaatcggggactttatacgccctag

SEQ ID NO: 12836 - RNA, 1161 nt, synthetic construct
  misc_feature 1..1161: note = source = /note="Description of Artificial Sequence: Synthetic coding sequence"
  source 1..1161: mol_type = other RNA
atgaagttccaagggccactagcctgccttttgctggcgctgtgtctgggatctggggaggctggaccccttcagtccggggaagaatccactggcactaacatcggagaagcgctcggccatggcctgggcgatgcgctgtccgagggtgtaggcaaagctataggcaaagaagcaggaggagcagcaggctctaaagtcagcgaagcacttggacagggtactagggaagcagttgggactggcgtgcggcaagtgcccggattcggggtggcagatgccctgggtaatcgcgtcggagaggccgcgcacgctctggggaataccgggcatgagatcggaagacaagcagaagatgtcatcagacacggcgccgatgccgtccgtgggagctggcagggcgtgcccgggcacaacggcgcttgggaaacttcaggaggccatggcatatttggttctcagggcggacttggtggtcagggacagggaaatccaggcgggctggggacgccgtgggtgcacgggtaccccgggaacagtgcaggtagttttgggatgaatccccagggagcaccctgggggcagggaggcaacggaggacccccaaacttcggtaccaacacacagggggcagtggcacagccagggtacggctccgtgcgcgccagcaaccagaacgaagggtgtaccaacccccccccctctggttcaggaggcggcagctcgaattctggcggaggatcagggtctcagtctgggtcttctgggagcggctccaatggcgataataacaacgggtctagcagcggtggttccagctccgggagctcttctggcggcagttcaggcggttctagcggaggctcctctggaaattctggcggatcccgaggtgattcggggagcgaatcatcttggggctcttcaactggcagcagtagtggaaaccatggtggctctggaggcggaaacgggcataaaccgggctgtgaaaagccaggcaatgaagccagaggaagcggcgaaagcgggattcagaattccgagaccagtccaggcatgtttaactttgacactttttggaaaaatttcaagagcaaactgggatttattaactgggacgccattaacaaagaccaacggagcagcaggatcccttag

SEQ ID NO: 12837 - RNA, 1995 nt, synthetic construct
  misc_feature 1..1995: note = source = /note="Description of Artificial Sequence: Synthetic coding sequence"
  source 1..1995: mol_type = other RNA
atgaagactgggttgtttttcctttgcctactaggcactgccgctgcaattccaacaaacgctcgcttactcagcgatcactccaagccaactgcagaaactgtcgcccctgacaacaccgccatcccttccttgcgagccgaggccgaggagaatgagaaagaaaccgccgtctcgactgaggacgacagccatcacaaggccgagaaatcttctgtcctgaaaagtaaggaggaaagtcatgagcagtctgctgagcagggaaagtcaagcagccaggagcttggcctgaaggaccaggaagattccgatggacacttatcagttaacttggagtacgcccctacagagggaactctcgacattaaagaggacatgtccgaacctcaagagaagaagcttagtgaaaatactgactttctggccccgggagtcagctcattcactgactccaatcagcaggagagcataactaaaagggaggaaaatcaggaacagccgagaaattacagccatcatcaactgaaccgtagcagtaaacatagccaaggattgcgggaccaagggaatcaggagcaggaccccaatatcagcaatggagaggaagaggaggagaaggagcccggcgaagtgggcacccacaatgacaatcaggaacgcaaaactgaactgccaagagagcacgctaactcgaagcaggaagaggataacacacagagcgatgacatcctcgaggaatcggatcagcctacacaggtctcaaagatgcaagaagatgaatttgaccaaggcaaccaagagcaggaagataattccaacgccgagatggaagaagagaatgcctcaaacgttaataagcatatccaggaaaccgaatggcagagccaagaaggcaaaacaggactggaggccatcagtaaccataaagagaccgaagaaaaaacagtctccgaggccctactgatggagccaaccgatgatggtaacacgacaccaaggaaccacggggtcgacgacgatggggacgacgatggcgatgatggcggcacggatggacctaggcattccgccagcgacgactactttatccctagccaggcgtttttagaggctgagcgcgcccagtcaattgcctatcatctcaagatagaggaacagcgcgagaaagtgcacgaaaacgaaaatatcgggactactgaaccaggtgaacatcaagaagctaagaaagctgagaatagtagcaacgaggaagagacatcttcagagggaaatatgcgagtccatgcggtggacagttgcatgagcttccagtgtaaacgcggccacatttgtaaagccgaccagcaggggaagccgcactgcgtttgccaggacccagttacatgccccccaacaaagcccctggaccaagtatgcggcacagacaatcaaacttatgcaagtagctgccatctattcgccacaaagtgcaggctggaagggactaagaaaggccatcagttacagttagactacttcggagcctgtaaatcaatacccacatgtacagattttgaggttatacagttcccattgagaatgagagactggctaaagaacatccttatgcaattgtacgaagctaattctgagcatgccggttatctcaacgagaaacaacgaaataaagtgaaaaagatctacctcgatgagaagaggttgttggcgggggaccacccaattgacctcctgttgagagacttcaagaagaactaccacatgtacgtgtatcccgtccactggcaatttagcgagttggatcaacaccctatggaccgggtgcttactcactccgagctggcgccattacgtgccagcctagttcctatggagcactgcattacccgattttttgaggaatgcgaccccaacaaagacaagcatatcacattaaaggaatggggccattgttttggtataaaggaagaagatatcgacgaaaacctccttttttag

SEQ ID NO: 12838 - RNA, 420 nt, synthetic construct
  misc_feature 1..420: note = source = /note="Description of Artificial Sequence: Synthetic coding sequence"
  source 1..420: mol_type = other RNA
atgggacccgaagccctgagctccttactgctgctcctgttggtagccagtggagatgcagatatgaagggacatttcgatcccgccaagtgtagatacgccctaggaatgcaggaccgaaccattcccgatagtgatatttcggcatcctccagttggagcgactccacagccgcgagacattccaggttggaaagcagtgacggggacggggcttggtgccctgcaggcagtgtctttcccaaggaggaggaatatctccaggttgatcttcagcgattacacctcgtcgctttggtcgggacacagggaagacatgctggcggcctcggcaaggaattttcccgctcctacaggcttagatatagcagggacgggcgacgatggatgggctggaaggaccgatgggggcaagaatag

SEQ ID NO: 12839 - RNA, 285 nt, synthetic construct
  misc_feature 1..285: note = source = /note="Description of Artificial Sequence: Synthetic coding sequence"
  source 1..285: mol_type = other RNA
atgcaacactcactggtgttcttcttcgctgtgattttacatctttcacatcttctccacttagatgctagcatccatcccttccgcttgccattttcctccaaaccattcctgctcatccccatgtcaaacaccaccctgccccataccgcatggccgcttagttttctgcatcagactgttagtaccctgaaagctgtcgccgttacacacagcctctggcacctccagattcccgtggactgccaagcttgtaacagaaagagtaagaagatctactgctag

SEQ ID NO: 12840 - RNA, 699 nt, synthetic construct
  misc_feature 1..699: note = source = /note="Description of Artificial Sequence: Synthetic coding sequence"
  source 1..699: mol_type = other RNA
atgcttcctaagtccagacgcgctctgaccattcaggagattgccgctctcgccagaagctcattgcatggcattagtcaagtggtcaaggatcatgtcacaaaacctaccgctatggcgcagggccgggtagcccacctaatcgaatggaaaggctggagcaaaccatccgattcaccagcggccctggaaagtgcgttctcttcctacagtgacctgagcgaaggggagcaggaagcaagattcgctgctggtgtcgctgagcagtttgcgattgcagaagctaagcttagggcctggagctcagttgacggggaagactcgacagatgattcctacgacgaggacttcgcgggcggcatggataccgatatggcgggacagttaccactgggcccccatctgcaagatctgtttacagggcataggtttagtcggcccgtccgccaggggtctgtggaacccgaatccgactgttcccaaactgtttcccctgatacgctgtgtagttcattgtgtagcctggaagacggcctgctgggtagcccagctcgtcttgccagccaattactcggcgacgaacttttgctggcgaagctccccccctcccgagaatcagcttttaggagtttgggccccctagaagctcaggattccttatacaatagccctctgaccgagagttgtcttagtccatag

SEQ ID NO: 12841 - RNA, 2631 nt, synthetic construct
  misc_feature 1..2631: note = source = /note="Description of Artificial Sequence: Synthetic coding sequence"
  source 1..2631: mol_type = other RNA
atgggacccgaggcattgtccagtctgctgctgcttctcctggtggcgtctggagacgccgacatgaaagggcactttgacccagccaagtgcaggtatgcgttgggcatgcaagaccggaccattcctgattctgacatttccgcctcttcctcctggtcagatagcacagcagctaggcacagccgtttggagagttccgatggggatggggcttggtgcccagccggatccgtgttcccaaaagaagaagagtatctgcaggtcgacctccaaaggttacatttagtcgcccttgtaggcacacagggtagacacgctggagggcttggcaaagagttctcccgttcataccggttaaggtatagccgagatggccgcagatggatgggctggaaagacagatggggccaagaagtaatctcagggaatgaggaccccgagggcgtagttcttaaggatctcggacctccaatggttgcacgactggtacgattctacccccgcgccgatagggtgatgagtgtctgcttacgtgttgagttatacggctgcctgtggcgagacggtcttctctcgtatacagctccggtcggccaaaccatgtaccttagcgaggctgtgtacctcaatgactcaacgtacgatgggcacacggtcggggggcttcagtacgggggcctgggacaactggcagacggtgtagttggcctcgacgatttccggaaatcccaggagctgagggtctggccgggctatgactatgtgggttggtcaaatcatagctttagctctggttacgtggaaatggaatttgagtttgatagattacgggcctttcaggccatgcaggtacattgcaacaatatgcataccttgggggctagactgcctggaggcgtcgaatgccgctttagacggggtcctgccatggcatgggaaggtgaaccgatgcggcacaatcttggtgggaacttaggggacccccgggctagagccgttagtgtcccacttggcggccgcgttgcacggtttctgcaatgcagatttttgtttgccgggccgtggctgctttttagtgaaatctctttcatctccgacgtggtcaataattcatcacctgccctaggcggcaccttccctcctgctccctggtggccccctgggccgccacccacaaacttttcttcccttgaacttgagcctcggggacaacaacccgttgccaaggctgaggggtcccccacagctattctgattggctgcctcgttgcgatcatactattgcttctgctgattattgctctgatgctctggaggcttcattggagaagactgctgtcaaaagctgaacgcagagtactggaggaagagctgacggtccatctaagcgtgccgggagataccatactgataaacaaccgcccagggccccgtgaaccgcctccgtaccaggaacccaggccgcgcgggaacccaccccactccgctccctgtgtgccaaacgggtcagcatactccggagactacatggagcccgagaagcccggcgccccgctgcttcccccacccccccagaacagtgtccctcattacgcagaagccgacatcgtgaccctacagggcgtgaccggaggtaacacctacgcagtgcctgctttacccccaggggccgtcggcgacgggcctcctcgcgtggattttcctagaagccgattacggtttaaagagaagctgggtgagggccaatttggagaggtacatttgtgcgaagtagactctccacaagatttggtgtctctcgactttccactaaacgttcgtaagggacatcctttgcttgttgccgtcaagatcctgagaccggacgcaactaaaaacgctaggaatgacttccttaaggaggttaagataatgtctcggcttaaggacccaaatatcattaggttactcggtgtttgcgttcaggacgatccgctatgtatgatcacagactacatggagaacggcgacctaaaccagtttctctcagcacaccagctggaggacaaggccgccgagggagcacctggagatggacaggccgcccagggacccacgatctcttacccaatgctcttgcatgtcgccgcacagattgcgagcggcatgagatatctcgcaactctcaatttcgtgcaccgagacctggccactcgtaactgcctggtgggcgaaaacttcacaattaagatcgccgacttcgggatgagcagaaatctgtatgccggagactattaccgcgtgcaggggagagccgttctccctatccgctggatggcctgggaatgtatcttgatgggcaaatttactacagcatcagatgtgtgggcctttggtgtgacattatgggaagtgttgatgctgtgtagggcgcaaccctttggccagttaacagatgaacaggtgatcgagaacgctggtgagttcttcagggaccagggaaggcaggtctacctttctcgcccgcctgcttgtccacaaggcctgtatgagcttatgttgcgctgctggtcgagggagtcggagcagaggcctcctttttctcagctacacagatttctggcagaggacgccctgaacaccgtgtag

SEQ ID NO: 12842 - RNA, 165 nt, synthetic construct
  misc_feature 1..165: note = source = /note="Description of Artificial Sequence: Synthetic coding sequence"
  source 1..165: mol_type = other RNA
atgtgtcgcgaaaccgccggttacgggtggttactggcaagtactgagctgttaagcctcctggagccactctcaccccagttactcaaagagcatatttcttgcacaagccaggtagctgcaggagccaaagtcacccccgattctgccgtatgggccccgtag

SEQ ID NO: 12843 - RNA, 2256 nt, synthetic construct
  misc_feature 1..2256: note = source = /note="Description of Artificial Sequence: Synthetic coding sequence"
  source 1..2256: mol_type = other RNA
atggcatttaggaccatctgtgtgctcgtgggcgtgtttatctgttccatttgtgtgaaaggttccagccagcctcaggccagggtgtacctcaccttcgatgagttaagagagactaaaacttccgaatacttttcactgtcacatcacccactggattatagaattctgctcatggatgaggaccaagacagaatttacgtcggaagcaaggatcatatcttgtccctcaatataaacaacatatcacaagaggctctgagcgtattttggcctgcatcgacaatcaaagtggaagaatgtaagatggcagggaaagatccaactcatggttgtggtaattttgtaagagtaattcaaacatttaacagaactcacctatacgtctgcggttccggtgcattcagcccagtttgcacgtatctgaacagagggcggcgcagcgaggatcaagtttttatgatcgactctaagtgtgagtccggaaaaggaaggtgttcatttaaccccaacgttaacaccgtgagtgtaatgatcaacgaggaactctttagcggcatgtacattgactttatgggtactgatgcagctatatttcggtcactgaccaagcgcaacgccgtgaggacagatcaacataacagcaaatggttgagtgaacctatgtttgtggacgcacacgttatccccgacggaacagaccctaacgatgctaaggtctactttttctttaaggaaaaacttaccgataacaaccggtctacgaagcagatccattccatgattgcccgcatctgccctaatgatactggcggcttgcggtcgctcgtgaataaatggaccacttttctgaaagctagattggtctgcagcgtcaccgacgaggatggaccggagacccacttcgatgaactcgaggatgtgtttcttcttgaaacagacaatcccagaactacgttagtgtatggaattttcacaactagctccagcgtgtttaaaggcagcgccgtatgtgtgtaccacctgagcgatatccaaacagttttcaatggacccttcgcccataaggagggcccaaaccatcagttgatttcatatcaggggaggattccttacccaagaccaggcacctgccctggcggagccttcacccccaacatgaggaccaccaaggagttcccagatgacgtagtgacctttatcagaaaccacccccttatgtacaactccatatatcccattcacaaaaggcctctgatcgtgcgaatagggaccgattataaatataccaagattgctgtcgaccgggttaatgcagccgacggccgttaccatgtactcttcttaggaacggataggggaaccgtacagaaggtcgtcgtcctgccaacgaataattcagtaagtggagagctgatcctagaggagctggaggtttttaagaatcacgcaccaattaccaccatgaagatttcctctaagaagcagcagctgtacgtgagtagtaatgaaggcgtcagtcaagtctcattgcacagatgccatatttacggcacagcctgtgcagactgttgcctggcgagagacccatactgtgcatgggatggacacagctgctcacgattctatcctaccggtaagcgaagatcccgcaggcaggacgtccgccacggcaacccattgacccaatgccgtggctttaatctgaaggcttaccgcaatgccgccgagatcgtccagtacggcgttaagaacaacactacttttctggagtgcgctccgaagtccccgcaggctagcattaagtggctactccagaaggataaggatcggcggaaagaggtgaagcttaacgagagaattattgccacctctcaggggcttctgattcgcagcgtgcagggttcagatcaggggctataccactgcattgctaccgaaaattcttttaaacaaactattgccaagatcaactttaaggttttggatagcgaaatggtcgccgtggtaaccgacaagtggtcaccctggacctgggcctctagtgtcagagcccttcctttccaccccaaagacataatgggcgctttcagccattccgaaatgcagatgattaatcagtactgtaaggacactcgacaacaacaccaacagggtgatgagagccagaagatgaggggggattacggcaagttaaaagctctcatcaatagtcgtaagagtcggaatcgaagaaatcaactgcctgaaagctag

SEQ ID NO: 12844 - RNA, 630 nt, synthetic construct
  misc_feature 1..630: note = source = /note="Description of Artificial Sequence: Synthetic coding sequence"
  source 1..630: mol_type = other RNA
atgggacctgaagctctgagttcacttctactgttgttgctcgtcgcaagtggagacgcggatatgaaaggccatttcgaccccgcaaaatgtaggtatgccttgggaatgcaggaccggaccatacccgattctgacataagcgcaagttctagctggtccgactctactgctgcacggcacagcagattggaatccagtgacggcgacggagcctggtgtcccgcgggatctgtgttcccaaaagaggaggaatacttgcaggtggaccttcagaggctccacctcgtggccctggtaggcacccaggggcgacatgccggtgggttaggtaaggaattcagcagaagctatagactgcgatactcacgagatggccgcaggtggatgggatggaaggatcgctggggacaggaagtgatttctgggaatgaagatccagaaggcgttgttctgaaggacttgggtcctccaatggtggcccggcttgttagattctaccctcgcgctgaccgggtaatgagcgtgtgcttaagggtggagttgtatggctgcctgtggagagatgggctgttgagttatactgcacccgtagggcagacaatgtacctgagtgaggctgtctattag

SEQ ID NO: 12845 - RNA, 315 nt, synthetic construct
  misc_feature 1..315: note = source = /note="Description of Artificial Sequence: Synthetic coding sequence"
  source 1..315: mol_type = other RNA
atgagcgatcttttgctgctcggcttaatcggtgggcttactctcttgctcctacttacacttctcgcctttgccggatactcgggtctcttagctggggtggaagtgtctgcaggaagtcctccaattcgtaatgtcactgttgcttataaatttcacatgggtctgtacggtgagacagggaggctttttaccgaatcttgctccattagccccaaattgaggtcaatcgccgtgtattacgacaacccccatatggtccctcctgataaatgtaggtgcgctgtgggcagcattctcagtgaaggtgagtag

SEQ ID NO: 12846 - RNA, 2631 nt, synthetic construct
  misc_feature 1..2631: note = source = /note="Description of Artificial Sequence: Synthetic coding sequence"
  source 1..2631: mol_type = other RNA
atgggaccggaggccctttcatccctcctactgctgcttcttgtggcctcaggcgatgctgatatgaagggccactttgacccggcaaaatgccgatacgcattaggtatgcaggatcgcaccattcccgactcagatatttcggcctctagttcgtggtcggatagtacagccgcccggcattcccggcttgaaagttccgacggcgacggagcatggtgccccgccgggagcgtatttccaaaggaggaagaatatctccaggtcgacctgcaacggctgcacctggttgcattggtcggaacacagggccgtcacgcaggcgggttaggcaaggagttcagtagatcgtataggctccgctacagccgggacggtagacgctggatgggatggaaggaccggtggggtcaggaagtcattagcggtaacgaggatccagaaggtgtcgtgctgaaagacttaggcccgcctatggtcgcccgactcgtaaggttctatcctcgggcggaccgggtgatgagtgtttgcctgcgggtcgagctgtatggatgcttatggagagatggcctgttgtcatacaccgccccagtaggccagaccatgtacctatcagaagccgtgtacctcaacgactccacatatgatgggcacaccgttggaggtctgcaatatggaggtttgggacagttggctgacggagtcgtaggactggatgacttcagaaagtctcaggagttacgtgtttggccaggctacgactacgttgggtggagcaaccactcattctctagtggatatgtcgaaatggagtttgagttcgaccgactcagggcgtttcaggctatgcaggttcattgtaacaatatgcacacgctaggcgcccgcctacctggaggggttgagtgcaggttccggagaggtccagcgatggcctgggagggggaacccatgaggcataacctgggaggcaatctgggagatccgagggcgcgggccgtttccgtgccgctgggcgggagagtggctcgcttcctccaatgccggttcctattcgccggaccgtggcttctcttttctgagatttccttcataagtgacgtagtcaataattcttcaccagcactaggaggaacatttccaccagccccttggtggccacctggcccgccaccaacaaactttagcagtttggagctggagccccgtggacagcaacccgtcgctaaggctgagggatccccaacagccatcttgattgggtgcctggtagctattatcctgctccttctgctcatcattgctctcatgctctggcggctgcactggcgcaggctgctcagcaaagcagaacgtcgggtgcttgaggaggaacttactgtgcatctgtccgtgcctggcgacacaattttgattaataatcggcctggcccgcgcgaaccacctccttaccaggaacctcggccaagaggaaaccctccccactcggccccctgcgttcccaatggcagcgcgtatagtggtgactatatggaacccgagaaacctggagctcccttactacctcctccccctcagaacagcgtcccgcattacgccgaggctgatattgtgactctgcagggagtgaccggggggaacacctatgcagtgccagcgctccccccaggagcggtaggagatggacccccaagagtggatttcccccggagcaggctgcgctttaaggagaagctgggtgagggacagttcggtgaggtgcatctgtgcgaagtggacagccctcaggatttggtgtcattagatttccctctgaatgtgagaaagggccaccccctgcttgttgccgtcaagattctgcgtcccgacgctaccaagaacgccagaaacgacttcctcaaggaggtcaaaattatgagtaggcttaaggatccaaatatcatacggctgctgggggtgtgtgtacaagatgaccccctttgcatgatcaccgactatatggagaatggcgatctgaaccaattcctgtcagcccatcagcttgaggacaaggctgctgagggggccccgggcgacggacaggctgcgcagggacccaccatctcctatcctatgcttctccatgtggctgcccagatcgcctctgggatgaggtaccttgctaccctcaattttgttcacagggatctcgctacgagaaattgtctggtgggtgagaattttacgattaagatcgctgacttcggaatgagccgcaacctgtacgcaggcgattactatcgcgtccagggaagagcagtgctacccataaggtggatggcttgggagtgtatcctgatggggaaatttactacagctagcgacgtttgggcattcggcgttactctgtgggaagtactcatgctttgccgcgcccagcctttcggtcaactgacggacgagcaggtcattgagaacgccggtgaattttttagagaccaaggtagacaagtgtatctctcgaggcccccagcctgccctcagggtctgtacgaactgatgctccgatgctggtcgagagagagtgaacagaggcctccgttttctcagctgcataggttcttagccgaggacgcacttaatactgtgtag

SEQ ID NO: 12847 - RNA, 1053 nt, synthetic construct
  misc_feature 1..1053: note = source = /note="Description of Artificial Sequence: Synthetic coding sequence"
  source 1..1053: mol_type = other RNA
atggaggcattcgcgctggggccagcccgtcggggtcggcgtcgcacaagagccgccggatctctgctatccagggcggcaatcctcttatttatatccgcgttcctggttcgggtccctagctcagtcgggcatttagtgagactcccccgtgcctttcggctgaccaaagactcagtgaagatcgtaggtagtacatcctttcccgttaaagcctatgtgatgctccaccagaagtcccctcacgttttatgcgtgacccagcagctccgcaatgcagaacttatcgaccccagttttcagtggtatggacccaaagggaaagtcgtaagcgaaaaccggaccgctcagataacctcaaccggttctctggtttttcagaattttgaggagagtatgtctggaatatacacttgttttctggagtacaagcccaccgtcgaagagatcgtgaagcgactacagctgaagtacgccatctatgcatatcgcgaaccccactactactatcagttcaccgcccgatatcacgccgccccctgcaattcgatatacaacatttcctttgaaaagaaactgctgcaaatactgagcaaactactgctcgatttatcctgtgaaattagtctgctaaaaagtgagtgccatagggttaaaatgcagagagcgggactacaaaatgagctgttttttgcatttagcgtaagctctctcgatacagaaaaaggacctaaaaggtgtaccgatcataattgtgagccatataagaggctgtttaaggcaaagaatttgatagagcggttctttaatcagcaggtggaaatcttaggaaggagagcagaacagttgccacagatatactacatcgaaggcaccctccagatggtttggattaacagatgcttccccggttacggaatgaacgtccaacagcaccccaagtgtcccgagtgctgtgttatatgctcacccggatcatacaatcctagagatgggatccattgcctccagtgtaactccagcttagtgtacggagctaaaacgtgtctgtag

SEQ ID NO: 12848 - RNA, 1392 nt, synthetic construct
  misc_feature 1..1392: note = source = /note="Description of Artificial Sequence: Synthetic coding sequence"
  source 1..1392: mol_type = other RNA
tgactggcactggtcctgtgcactgttgacagccggcctcccgcccagctagctctgtcccacgctggtaggttgctcgcgtctagcaccgcagccagcgtgcctaatactctgcgtttagaattacgagggcctcagccccgcgatgaaggattttactcatgctccgcccgttctccactgggccaagccaacacttctctcgagcttcggcttgagggcgttagggtcatcttagccccagaggccgccgtgcccgaaggggctcctataaccgtgacatgcgcagatcccgctgcccacgccccaactctctacacgtggtatcacaatgggcggtggctccaggaggggcctgctgcttccctatcattccttgtggctaccagggctcacgcgggagcatactcctgccaggcacaggatgcacaaggtaccagaagttcaagaccagctgcactccaggttttatacgccccccaagacgcggtgctcagctccttcagggattcccgcgcccgcagtatggccgtgatccagtgtaccgtggactcagagcctcccgccgagcttgctctaagtcatgatggcaaagtgttagcaacatcctccggcgtgcacagccttgcttcagggacaggtcatgtacaggtcgccagaaacgcactgcggctacaagtgcaggacgtacctgcaggcgacgatacctacgtatgtacggcccaaaaccttctcggttcaatctccacaattggtagactacaggttgagggcgcacgcgtggttgctgagccagggctggacgttcctgaaggcgctgcacttaacctgagctgtcgactgctcggtggcccaggacccgttgggaactccacattcgcgtggttctggaacgaccgccggctgcacgccgagcctgtacccaccttagctttcacccatgtcgcaagagcgcaggccggaatgtatcactgtctcgccgagctgccgaccggcgcagcagcatcagctcccgtaatgttgagggtcctgtatcccccaaaaacgcctacaatgatggtgtttgtggaacctgaagggggcctcagaggaatactggattgccgggtggacagcgaacctctcgctagcctgacgctacatctgggtagcagactggtggcttcatctcagccccagggagcccctgccgagccgcacattcatgttctggcaagccctaatgcactcagggttgacattgaggcactgaggccttctgatcagggcgaatacatttgttccgcgtctaacgtacttggttccgcctccacctcgacctactttggcgtcaggggagagggacgcgggctccacttaccggggcactccgcgcagaaaccatcatcctag

SEQ ID NO: 12849 - RNA, 1398 nt, synthetic construct
  misc_feature 1..1398: note = source = /note="Description of Artificial Sequence: Synthetic coding sequence"
  source 1..1398: mol_type = other RNA
atgaagttccaaggacctctggcttgtctgttattggcactctgcttgggctccggcgaggccggaccccttcaaagtggggaagagtctacagggacaaatatcggagaagccctcgggcacgggttgggggacgctctgtccgagggggtgggcaaagcaatcggcaaggaagcgggcggggcggcaggaagcaaggtatcggaagccctcggccagggaactagagaggctgtcggcactggtgtcaggcaggttccaggatttggcgtggccgacgcactcgggaacagagttggagaggcggcccacgctctcggtaacactggccacgagatcgggagacaagctgaagacgtgattaggcatggtgccgatgcagtgcgcggttcatggcaaggcgttccaggccacaacggcgcttgggagacatctggcgggcatggaattttcggatcccagggtgggctaggaggacagggacagggaaatcctggtggactgggtactccctgggtgcatggctatcccggcaattcagctgggtccttcggaatgaatccccagggggcaccgtggggacagggagggaacggcggccctccaaactttggaactaatacacagggcgccgtggcccagcctggctatggcagcgttcgtgcctcaaatcaaaatgagggctgcaccaatcccccaccgtccgggtcaggcggggggagctctaattctggtggctcgagcactggatccagctctggaaaccatggcggcagtggagggggtaacggacataagcctgggtgcgaaaagcctgggaatgaggcccgcgggtcaggagagagcggaatccaggggttccgcggtcagggagtgtcatccaatatgcgcgaaatttctaaggagggcaaccggctgctgggtggttccggagataattataggggtcaaggatcttcctggggcagtggtgggggcgacgcagttggtggggttaacacggtcaatagcgagacctccccgggcatgttcaacttcgataccttttggaaaaattttaagtccaaactgggctttattaattgggacgctataaacaaaaatcaggtgccacccccgagcacccgggcacttctgtacttttctaggctgtgggaagacttcaagcagaacacgccattcttgaattggaaagctatcatcgaaggtgctgacgcgtccagtctgcagaagagggctgggcgtgacgaccagaactataactacaaccaacatgcttatccaacagcatacggcgggaaatattcagtcaagacgcccgctaaaggtggggtttctccatccagttcagcatcgcgagtacaaccggggttattgcaatgggtaaaattttggtag

SEQ ID NO: 12850 - RNA, 2700 nt, synthetic construct
  misc_feature 1..2700: note = source = /note="Description of Artificial Sequence: Synthetic coding sequence"
  source 1..2700: mol_type = other RNA
atgctgttactactgctccttgcacctctctttctgagacctccgggcgccggcggtgcccagacccctaacgctacttcagaaggatgccaaattattcacccaccttgggagggcgggattagatataggggcctgaccagagaccaggttaaggcaatcaacttcttgcccgtggattacgagatcgagtatgtttgtcgaggggaacgtgaagttgtgggaccgaaagtgagaaagtgccttgctaatggaagttggactgacatggacacaccatcccggtgtgtgaataggacgcctcattcagaaagacgcgccgtttacattggagcactgttccctatgagtggaggatggccaggcggacaggcatgccaacctgctgttgaaatggcgctcgaggacgtcaatagtaggcgggatatcctcccagactacgagctgaagcttatccatcacgattccaagtgcgacccgggacaggcaactaaatatttgtacgagctgctttataacgacccgataaaaattatcttgatgcctggctgttcatccgtgagcaccctcgtcgctgaagctgcgcggatgtggaacctgattgtgctatcctatgggtcatccagtccggcgttgagcaatcggcagcgcttccccacctttttccgaacgcacccatcagccactcttcacaacccaacccgagttaagctgtttgaaaagtggggctggaagaaaatagccaccatacagcagaccaccgaagtctttacatccaccctggacgacttagaggagcgggtcaaggaagctggcattgaaattacattccgccaaagcttcttcagcgatcccgctgtgcccgttaaaaacttgaaaaggcaggacgcgaggattatcgtgggactgttttatgagactgaagctcgcaaagtgttttgcgaggtgtataaagaacgcctgtttggtaaaaagtatgtgtggtttcttatcggctggtatgcagacaattggttcaaaatttacgatccatccattaattgtacagtagatgagatgaccgaggccgtggaggggcatattacaacagaaattgtcatgctcaatcccgcgaacacacgatcaatttccaatatgacctcccaggaattcgtggagaaattaacaaaacgccttaagagacatccagaagagacaggaggcttccaggaggcacccctcgcctacgatgcaatctgggccttggcccttgccttgaataaaacttctggaggaggtggccgctctggcgtgcggctggaggattttaattacaataatcagaccatcaccgaccagatttaccgggctatgaactcgagcagcttcgagggagtgtccggccacgtcgtgtttgatgcatctgggtcccgtatggcctggactctcatcgaacagctacaggggggtagttataaaaaaatcggctattacgactctacaaaagatgatctttcctggtccaaaacggacaaatggataggcggcagtccgcccgccgatcagacccttgtcattaagacttttcggttcctgagccagaagctgttcatctctgtgagcgtgttgagcagcctagggatagtgctggctgtggtctgtctgtcctttaacatctataactcacacgtccgatatatccaaaactcccaaccaaacttgaacaatctgaccgccgtgggctgtagcctggctttggccgctgtgttcccactcggccttgacgggtatcatattggaagaaatcagtttcctttcgtgtgtcaggcgaggctgtggctcttaggactgggctttagccttggttacgggtcgatgttcactaagatctggtgggtgcataccgtctttaccaaaaaagaagagaagaaagaatggagaaaaactttggaaccttggaaactttacgcgaccgtgggcttgctggtaggcatggatgtcctgaccctggcaatttggcagattgtggatccgctgcatcgaaccatcgagacctttgcaaaagaagagcctaaggaggatattgacgtgtcaatcttaccacaactggaacattgctcctcccgcaaaatgaatacatggctgggcatattctacggatacaaagggctgctgctgctactagggatatttctcgcttatgaaactaagtccgtcagcactgaaaagattaacgatcatagagccgtggggatggccatttacaatgtggcagtgctttgtttgataacagcacccgtgaccatgatattatcatcacagcaagatgctgcctttgcatttgcatctcttgccatcgtgttcagctcttacataaccctggtggtgttgtttgtgcctaagatgagacgcctaatcacacgcggtgagtggcagtctgaagcacaggatacgatgaagacgggtagcagtaccaacaacaatgaggaggaaaagtctcggttgttggagaaagaaaatcgagagctggagaagatcattgccgaaaaggaagagagagtctcagaactgcgacatcagcttcagtctaggcaacagctacggagccgcagacatcctccaacccccccggagcccagtggaggcttgccacgaggacccccagaaccacctgatcgattgtcatgcgacgggtcccgagttcacctgctgtacaagtag

SEQ ID NO: 12851 - RNA, 381 nt, synthetic construct
  misc_feature 1..381: note = source = /note="Description of Artificial Sequence: Synthetic coding sequence"
  source 1..381: mol_type = other RNA
atgtggtatgtaagcacccgcggcgtggctccacgagttaatttcgaaggcgccctgttctctggctacgcgcctgatggaggcttatttatgcctgaagaacttcctcagctggacagagggacactgtgccaatggtcaaccctgtcttaccccggccttgtgaaggaactctgcgcgctttttatcgggagcgaactattgccaaaggacgagctgaacgacctaatcgaccgggccttctcccgatttagacacagggaagtcgtgcacctttccagattgcgaaacggtcttaatgtgctagagctgtggcacggcgtaacgtatgcctttaaggatctgagcctgagttgcacaactcaatttctgcagtattag

SEQ ID NO: 12852 - RNA, 147 nt, synthetic construct
  misc_feature 1..147: note = source = /note="Description of Artificial Sequence: Synthetic coding sequence"
  source 1..147: mol_type = other RNA
atgcctcctttcctgattaccctgtttcttttccattcatgttgcctgcgagctaacggccatctacgcgagggaatgacattattgaagaccgaatttgctttacatctgtaccaaagcgtggccgcgtgcagaaatgaaacctag

SEQ ID NO: 12853 - RNA, 390 nt, synthetic construct
  misc_feature 1..390: note = source = /note="Description of Artificial Sequence: Synthetic coding sequence"
  source 1..390: mol_type = other RNA
atggcagccggatctgcccctatgcaactgcaccttagagccacaatcaggatgaaagacggattatgcgtcccccgaaaatggatctatcacctcaccgaaggaagcaccgaccttagaactgaggggagacccgacatgaagacggaactgttttcaagttcatgtcccggtggcattatgttaaacgagactgggcagggttaccagcgatttctactgtacaatcgatccccacacccccccgagaaatgcgtggaagagttcaagagccttacaagctgcttagatagcaaggccttccttcttaccccccgaaaccagggtaagggtctgaagtctcacaagactggattgggccttaccaaatcaagcggggttaccggctag

SEQ ID NO: 12854 - RNA, 462 nt, synthetic construct
  misc_feature 1..462: note = source = /note="Description of Artificial Sequence: Synthetic coding sequence"
  source 1..462: mol_type = other RNA
atgacaatacatatcttaatcctgctgcttctgcttgctttcagcgcccagggggatctcgatacagccgcccggcgtggccagcatcaggtaccacagcatagaggacacgtttgctacctgggtgtatgtcgtacgcatagattagctgaaatcatatattggattcgttgcctgcatcagggggccctcggcgagggccaaccccgggcgcctggcccactccaattgtgggcaccccccgtggcccggggcggatcaccagcgagatttccagggttcagaccagccgcccgaggcctggcacagtgtcctgcaagatgggtgacttctggaactgctaggcccctcctcggcttcagtttaccaatctgtatgctggagcttttgctgcacatctcatccccactcacacccgcccccgagacagtctttcctagcccctctccaggttgtgactag

SEQ ID NO: 12855 - RNA, 450 nt, synthetic construct
  misc_feature 1..450: note = source = /note="Description of Artificial Sequence: Synthetic coding sequence"
  source 1..450: mol_type = other RNA
atgggttggttgactcgaatcgtgtgtcttttttggggggtccttctgacagcaagagctaactatcagaatgggaaaaataacgtcccgagactgaagttaagctacaaggagatgttagaatctaataacgttataacctttaatggactggctaatagctcaagctaccacacttttctgctagacgaggagcggagtaggctctacgtaggggccaaagaccacattttttccttcgacttggtgaacattaaggattttcagaaaatcgtttggccagtgagctacacaaggagggatgaatgtaaatgggccggcaaagacattctgaaggaatgtgcaaattttatcaaagttctcaaggcgtacaatcagacccatttatacgcctgcggtaccggcgccttccaccccatttgcacttatattgaaattggccatcattag

SEQ ID NO: 12856 - RNA, 543 nt, synthetic construct
  misc_feature 1..543: note = source = /note="Description of Artificial Sequence: Synthetic coding sequence"
  source 1..543: mol_type = other RNA
atggccgacatgcagaacctcgttgaacggctcgagagggctgtaggacggttggaagccgtttctcatacctccgacatgcacagaggctacgcagactccccatccaaagcaggagccgcaccctacgtccaggcttttgactctttgcttgccgggccagttgccgagtatttaaagatatccaaagagattggaggagacgtccaaaagcacgcagaaatggttcacaccgggcttaaacttgagagggcactgctggttaccgcgtcacaatgccagcaacctgctgaaaataaactgagcgatctcctggcaccgatctcagagcagataaaagaagtgatcaccttcagggagaagaacaggggatccaaactcttcaatcatctgtccgcagtcagtgagtcaatccaggccctcgggtgggtcgctatggccccaaagcccgggccctacgtgaaagaaatgaatgacgccgctatgttttatactaacagagtcctgaaagaatataaggatgttgacaaaaagcacgtttag

SEQ ID NO: 12857 - RNA, 630 nt, synthetic construct
  misc_feature 1..630: note = source = /note="Description of Artificial Sequence: Synthetic coding sequence"
  source 1..630: mol_type = other RNA
atgggacctgaagccttgtccagtcttttattgctattattagtggcatcgggagacgctgatatgaagggtcattttgatccagctaagtgtcggtatgctctcggaatgcaagatcgaacgatacccgactcggacattagcgcgtcctcaagctggagcgattccacagcagcacggcacagcaggctagaatcatcagacggggacggagcttggtgtccggctgggtccgtgttcccaaaggaggaggagtacctgcaagtggacctgcagaggcttcacctggtcgccctggtcgggacacaggggagacacgccggaggacttggcaaggagttttcacgtagctataggcttagatattctagagatggcaggagatggatgggatggaaggaccggtgggggcaggaggtgatctcaggtaatgaagatcctgaaggggtggtgctcaaggatcttgggccccctatggtggcaagattggtaagattttacccccgcgcagaccgtgtgatgtcagtgtgtctacgggttgagttgtacggatgcctttggagagacggtttactgtcatacaccgcaccggttggccagactatgtacttgagtgaagcagtgtactag

SEQ ID NO: 12858 - RNA, 630 nt, synthetic construct
  misc_feature 1..630: note = source = /note="Description of Artificial Sequence: Synthetic coding sequence"
  source 1..630: mol_type = other RNA
atggggccagaagcactctcctccttactcctccttctgctggtcgctagcggagatgcagacatgaaagggcactttgatccagcaaaatgccggtacgccctggggatgcaagatagaacaattccagacagcgacatatcagcctcgtccagctggtccgactctactgcagctcgacactcccgactcgaaagctcagacggcgacggtgcatggtgccccgcgggatctgtttttcctaaggaggaggagtacctgcaggtcgacctgcagcgtctccaccttgtggcactcgtaggaacacagggcagacatgccggaggattaggaaaggagttctccagatcttatagactgagatactcaagggacggtaggaggtggatgggttggaaggataggtgggggcaggaggtgatcagtggaaatgaggacccggagggtgtagtcctgaaggacttggggccccctatggtggcccgccttgtccgattttaccctcgagctgaccgtgtgatgtccgtatgtctccgggttgaactctacggatgcctgtggcgggatgggctgctcagttacactgcaccagtaggacaaacaatgtacctctcagaggccgtttactag

SEQ ID NO: 12859 - RNA, 2631 nt, synthetic construct
  misc_feature 1..2631: note = source = /note="Description of Artificial Sequence: Synthetic coding sequence"
  source 1..2631: mol_type = other RNA
atgggtcccgaggccctgagctctttgctgctgctgctgttagtcgctagcggggacgccgacatgaaaggccactttgatcccgctaagtgtagatatgccctggggatgcaggaccgtaccatcccagactctgatatctccgccagcagttcttggtctgatagcacggcagctcgccattcgaggcttgaatccagcgacggtgatggagcctggtgcccggccgggtccgttttccccaaggaggaagagtacctccaggtggatctccagcgactccaccttgtggccctggtgggcacgcagggaaggcatgcaggcggtcttggcaaagaatttagtaggtcgtataggttgcgatattccagggatggccgaagatggatgggctggaaagacaggtggggacaggaagtcatcagcggcaacgaggaccccgagggtgtcgtgctgaaggatcttggtcccccaatggtggctagactggtccgcttctatccaagggccgacagagtgatgagcgtatgtcttcgtgttgaattgtacggctgtctgtggcgcgacggcctgctgtcatacacagccccggtgggacaaacaatgtatctgagtgaggccgtatacctaaatgatagcacctacgacgggcataccgtgggcggtctgcagtacggaggtcttggtcagctagcggacggggtcgtggggctggatgacttccggaagtcccaggagctacgagtgtggcctgggtatgattacgtcggctggtctaatcactcgtttagctctggctacgtagaaatggagtttgaattcgaccgactgcgtgcattccaagctatgcaggtacactgcaataacatgcacacattgggcgcaaggctccctggcggggtggagtgtcgctttcgccgggggcccgctatggcgtgggagggtgagccaatgagacataatctgggcggcaatcttggagacccacgcgcacgcgccgtaagcgtaccccttggcggaagggtggctaggtttctgcaatgtcggttccttttcgcgggcccttggctcttattttccgagattagtttcatttctgatgttgtcaacaatagcagtcctgctttagggggaactttcccccctgctccttggtggcctccaggacccccccctaccaatttttcatcactggagctggagccgaggggacagcaaccagtagctaaggcagaaggatctcccaccgctatattgatcgggtgtctggttgcaatcattctgctgttactgctgattatcgccctcatgttatggcgccttcattggcgacggctcctcagcaaagcagagagaagggtgttagaagaggagctcacggtccacctaagcgtacccggtgacaccatcctgattaataaccgaccgggaccgcgggaacctcctccgtaccaggagcctcggccccgaggcaaccccccccattctgcaccgtgcgttccaaacggctcagcatactccggtgactatatggaacctgagaagccgggcgcacccttacttcctcctcctccccagaatagtgtgccccactacgctgaggctgatattgtaacactccagggtgtgaccggcggtaacacttacgctgttccggcgctgcccccaggcgctgtgggtgatggtccgcccagagtggattttcctcgtagtcgtttgaggttcaaagaaaagctgggtgaaggacagttcggcgaagtgcatctctgcgaagtagacagccctcaggatttagtctccctggattttcctctgaacgtacggaaagggcatccactactggtagccgtgaaaatactcagacctgacgcgactaagaatgcgcgcaatgactttctgaaggaagtgaagatcatgtcaagactcaaggacccaaatattataagactgctgggggtctgtgtccaagacgacccactatgtatgatcaccgactatatggaaaatggtgacctgaatcagttcctgtctgcacatcagctagaggacaaggcagcagagggagcaccaggggacggccaagccgcccaggggccaaccatcagttaccctatgctgctccacgtggccgcgcagatagcatccggtatgagatatctggctactctgaattttgtacatcgcgatctggccaccaggaattgcctagtgggtgaaaattttaccatcaagatcgcagatttcggcatgagccggaacctttacgcaggcgattactaccgcgtccagggcagagcagtgctcccaataaggtggatggcctgggaatgtatccttatgggtaaatttaccactgcttcagacgtctgggctttcggtgtaactctgtgggaggtattaatgctatgtagggcccaaccctttggccaattgaccgacgagcaggtaatcgagaacgccggagaattctttagagatcagggcaggcaagtatacctgtctcgcccaccagcttgcccccaaggtctatatgaactgatgctgcgctgctggagtcgggagagcgagcagcgccccccattctctcagctccacagatttctggcagaagacgcactcaatactgtttag

SEQ ID NO: 12860 - RNA, 2103 nt, synthetic construct
  misc_feature 1..2103: note = source = /note="Description of Artificial Sequence: Synthetic coding sequence"
  source 1..2103: mol_type = other RNA
atgttagccccattccttttgctccttacccactctaggtcaccgctctcttttcgcccgtgctcacatgtgcccggtgctttgatcgctcagaagccgatgggctcctcgaggttggcagccctcctcctgccccttctgttaatagtcatagacttatccgactccgccggcatcggcttccgccatctgccgcattggaatacacgctgccccctagcatcccacaccgatgatagttttacaggatcatcagcctacattccctgtagaacatggtgggcccttttctcgaccaaaccttggtgtgtgcgtgtctggcactgtagtcggtgcttatgtcagcatctattgtcgggaggctcagggctgcagcgtggattatttcacctcttagtgcaaaagtcgaaaaaatcttctacgttcaaattttatcggcgccataagatgcctgctcctgctcaacgaaagctccttcctagaagacatttatccgaaaagagtcaccatattagtatccccagcccggacattagtcataagggcttgagatccaaacggactcagcctagcgatccagagacctgggaatccctgcccagacttgactcccagaggcatgggggcccagaattctcgttcgatctgctgcccgaagccagagcaatccgagtcactatttcaagcggccccgaggtgtccgttagactatgccaccagtgggcgctcgaatgtgaggagctttcttccccatacgacgtacagaagatcgtttctggagggcacaccgtcgaactcccttatgagttcctcctgccttgcctgtgcattgaggcgtcttatcttcaggaagacaccgtgaggagaaaaaagtgtcccttccagtcttggcctgaagcatacggtagcgatttctggaaatccgtgcactttactgattactcccaacatactcagatggtaatggctctgaccctgaggtgcccactcaagctggaagccgcactttgtcaaagacacgactggcacaccctgtgcaaagacctcccaaatgccacagctcgggaaagtgacggctggtacgtgcttgagaaggtggaccttcatcctcagttatgtttcaagttttcctttggaaacagctcacatgttgaatgtccacatcagaccggctccctgacttcttggaatgtgtctatggacacccaagcgcagcagctgattctacacttttcatcgcgcatgcacgcaacttttagcgcagcttggtcactgccaggcctcggccaggacactttggtccctcccgtgtataccgtctctcaggcacgcggctcttcccccgtttccttagatcttattattccatttctgaggcccgggtgctgcgtattagtttggcggtccgatgtacagtttgcctggaagcacctgttatgtcccgatgttagttaccgccacctgggtctgctcatccttgccctgctggctctgcttacattgctcggggtcgtgcttgctctgacctgtcgaagaccgcaaagcggaccaggccccgcccggccagtgttactgctgcatgccgccgactccgaagcccagcgtcgcctggtaggcgctctggctgagctcctgcgagctgccctgggcggaggccgggatgtcattgtggacctgtgggagggcagacatgtggctcgcgtggggccattgccctggttatgggccgccaggacacgggtcgcccgggagcagggcaccgtcctgcttctgtggtcaggggccgatctgagacccgtgagtggacctgacccacgggctgccccactgctcgcgctcctacacgccgcgccacgaccactcctcctcctcgcgtacttttccagactgtgtgccaagggtgatatcccaccacccctaagagctttgccaagatatcggctgttaagggatctgcctcggctgttgagagccctggacgctagaccctttgccgaagctacctcatggggtagactaggggccaggcaaagaaggcagagtcggttggagctgtgcagcagactggaaagggaagccgcccgcttggcagatctggggtag

SEQ ID NO: 12861 - RNA, 1194 nt, synthetic construct
  misc_feature 1..1194: note = source = /note="Description of Artificial Sequence: Synthetic coding sequence"
  source 1..1194: mol_type = other RNA
atgaggtccttgttattactttcagctttctgcttgttggaggctgcactggcagccgaggttaagaagccagcagcagcggctgcaccaggcaccgccgaaaagttgagtccaaaggcagcaaccctggcagagagatcggctgggctagccttcagtctatatcaggccatggccaaagatcaagccgtcgagaacatactggttagccccgtggtggttgcctctagcctgggcctggtttcacttggcggaaaagcaacaactgcatcacaggcgaaagcagtactgagcgcagagcagctccgcaatgtgacgtggaagttgggcagcagactctacggtccatcctcggtatcttttgcagacgattttgtgcgatctagcaagcaacactacaactgtgagcactctaagataaattttcgcgataagagatctgctctgcaatcaattaacgagtgggctgcacagactaccgacggcaagttgccagaagttacaaaagatgttgagagaacagatggggcgttactggtgaacgccatgttcttcaagcctcactgggacgagaaattccatcacaagatggttgacaaccgcggtttcatggtgacaaggagctataccgtgggtgtgatgatgatgcaccggacagggctctataactactacgacgacgaaaaagaaaagttgcaaatcgtcgagatgccgctcgcccataagctatccagtttaattatcctgatgccacatcatgtcgaacccctggaacggctggagaaattacttactaaggaacaattgaaaatatggatggggaagatgcaaaagaaagccgtggcaatctcacttcccaagggtgtggttgaagtgacccacgatcttcagaagcatctcgccggccttggcctgacagaagcgatagataagaataaggccgatctatctaggatgagtgggaaaaaggatttatatctggcttctgtctttcacgccaccgctttcgaactggacactgacggcaaccccttcgatcaagacatatatggcagagaagaattacgttcgcctaaactgttctatgcagaccacccgtttatctttttagtgcgggatacacagagtgggagcctactattcatcgggaggctggtgcgcccaaagggggataagatgcgtgacgaactgtag

SEQ ID NO: 12862 - RNA, 612 nt, synthetic construct
  misc_feature 1..612: note = source = /note="Description of Artificial Sequence: Synthetic coding sequence"
  source 1..612: mol_type = other RNA
atggctgatatgcagaatctcgttgagagactggagcgcgcggttggccggctggaggcagtgagtcacacatctgacatgcaccgcgggtacgctgattccccttccaaagctggcgcggccccttacgtccaggcctttgactccctcctggcgggacctgtagcagagtacctcaagatatccaaagaaatagggggagatgttcagaagcacgccgaaatggtccacacggggctgaagctggaacgcgctcttctggtgacggcttcacaatgccagcaacctgcagagaataaattgtctgacctgctcgctccgatatccgagcagatcaaggaagttattacctttcgagaaaagaacagaggctcaaaactttttaatcatttgagtgcagttagtgaatccattcaagctctaggttgggtggccatggcacctaaacccggaccgtatgttaaagaaatgaacgatgcagccatgttttacacgaatagagtcctgaaagagtataaggatgttgataagaagcacgtagattgggtgaaggcttatttgtcaatttggacggagctgcaggcctatattaaggagttccacaccacctag

SEQ ID NO: 12863 - RNA, 1293 nt, synthetic construct
  misc_feature 1..1293: note = source = /note="Description of Artificial Sequence: Synthetic coding sequence"
  source 1..1293: mol_type = other RNA
atgagaaaattaatgaagcaggtgcaagaacagtgccctaatatcaccagaatctacagtatcggaaaatcctaccaaggtttaaagttgtacgttatggagatgtctgacaagccgggagagcacgagcttggagagccggaggttcgatacgtcgctggaatgcatggcaacgaggcgctgggaagggagctgctgcttcttcttatgcagtttctatgccacgagttcctacggggcaaccctagagtcactaggctcctgagtgagatgcgcattcacctgttgcccagcatgaatccagatggctatgaaattgcttaccatcgcgggagcgagttagttgggtgggcagagggccgctggaataaccaatcgatagatcttaaccataattttgccgacttaaatacccctctgtgggaagctcaagacgacggaaaggtccctcacatcgtgccaaatcatcatttacctttaccgacctactacaccttgccaaacgccacagttgcccccgagacacgagccgtaatcaaatggatgaagcgtataccctttgtgttaagtgccaatctacatggaggcgagctggttgtcagttacccgtttgacatgacccgaaccccttgggccgctcgggagttaactccaaccccagatgacgcagtttttcgctggctctctactgtttacgccggcagtaacctcgcaatgcaggatacttcacgcagaccctgtcatagccaggattttagcgtccacggaaacattatcaatggcgctgactggcacacggtcccgggatctatgaacgacttctcctatctgcacacaaactgtttcgaagtcacggttgaactgtcctgtgacaaattccctcatgagaatgaactaccacaggagtgggagaataacaaagacgctctccttacctatctcgaacaggtcagaatgggcatcgcgggcgtcgtcagggacaaggacacagagttggggattgcagacgctgtcattgctgttgacggcataaatcatgatgtaacaaccgcttggggcggagactactggaggctcttgacccccggggattatatggtgactgcctccgccgaaggctaccactccgtaactcggaactgcagggtgacctttgaggagggccccttcccttgcaactttgtcctaactaaaacacccaaacagagactgcgcgaattgctcgctgcgggcgccaaagttccgccagatcttcggcggcgcttagagcggctgagagggcagaaggattag

SEQ ID NO: 12864 - RNA, 1680 nt, synthetic construct
  misc_feature 1..1680: note = source = /note="Description of Artificial Sequence: Synthetic coding sequence"
  source 1..1680: mol_type = other RNA
atgtggactaacttctttaaacttagacttttctgctgtctgttggctgtgctcatggtcgttgtgttggtgatcaacgtgacccaggtagaatacctcgatcacgagacagtctcggcaaccttcattgatagcagtggacaattcgtctcctcccaagtaactggaatttcacgcaatccatactgtggctatgaccagcagactttaagttcacaagagcgaatggaagaggacagtctgttagctgcccttcaccgccaggtgccagacgtggggcctgtcccatttgtcaagtccaccgatccgtcctctagctacttcgtcattctgaattctgcagccttcttcaaggtgggctcccagctcgaggtcctggtccatgtccaagattttcaacgcaaacccaagaagtatggaggtgactacctccaggcaaggatccactccctgaaactgcaggctggggccgtcggaagggtcgttgactaccagaatggtttttacaaagtgttctttacactcctttggccaggcaaagtgaaggtcagcgtgtctcttgtgcaccccagcgaaggtatccgggtactgcaacgccttcaggaggacaagccggatcgggtctattttaagagcctcttcagatctggcagaatatcggagacaacagagtgtaatgtgtgtctgcccgggaatctccccctttgcaactttactgacctatacacaggcgaaccctggttctgcttcaaaccaaagaagctgccctgtagcagccgtatcacgcacttcaaaggcgggtatctaaagggccttctcactgccgcagaaagtgccttcttccagagtggagttaacatcaagatgcctgtgaactcttcaggcccagattgggtcacagtgatccctagacggatcaaggaaaccaactcactggaactgtcccaggggagcggcaccttcccctcgggttactactataaagatcaatggcggccacgcaagttcaaaatgagacagtttaacgatcccgataacatcaccgaatgcctccagaggaaggttgtgcacctgttcggcgattctacaatacgtcaatggtttgagtaccttactacctttgtgcccgacctcgtggagtttaatctgggctctccaaagaacgtgggccctttccttgccgtagaccaaaagcataatattctcctgaaataccggtgccacgggccacctatcagatttaccactgtttttagcaacgagttgcactatgtggccaatgagcttaacggaatcgtgggcgggaaaaataccgttgtagctatagcagtgtggagtcacttcagcactttccctctggaagtatacatccgccgtctaagaaatatccggcgagccgtagtgcgcctcctcgatcgctcaccaaagaccgtcgtcgttattcgaaccgccaacgcccaagagttagggccagaagtgtctcttttcaactccgactggtataacttccagctcgacacaattcttcggcgcatgtttagcggggtgggggtatatttagttgacgcatgggaaatgacactggctcactacttaccacataaactccaccctgatgaggttattgttaagaatcagcttgacatgtttctgtcatttgtgtgccctctggagacctag

SEQ ID NO: 12865 - RNA, 8199 nt, synthetic construct
  misc_feature 1..8199: note = source = /note="Description of Artificial Sequence: Synthetic coding sequence"
  source 1..8199: mol_type = other RNA
atggagcaaacagattgtaaaccgtaccagcccctgcccaaggtaaaacacgaaatggacctcgcatatacctccagtagcgatgagtccgaggacggcaggaaaccgagacagtcctacaattctcgtgaaacattacatgagtacaatcaggaactccgcatgaattacaactcacaatcacgaaagagaaaggaagtggaaaagtccacacaggagatggaattttgcgagacatctcacacactctgttcaggttaccagaccgacatgcacagcgtgtcgcgccatggataccagctggagatggggtccgacgttgatactgagaccgaaggagccgcttctccagaccatgccttacgcatgtggatacgcggaatgaagagcgagcattcatcatgcctgtcttctcgggcaaactccgcactttccctgaccgatacggaccacgaaagaaagagcgacggggagaacggcttcaagttttcacctgtgtgttgtgacatggaggcccaggcaggaagcacccaggacgtgcaatcatccccccacaaccagttcacctttcggccactacctcccccacccccacctccccacgcttgcacatgtgcccgaaagccacctcccgcggcggacagtcttcagcgccgctctatgaccaccaggtcccagccttcaccagcagcacctgctccccctacctcaacccaggatagtgtccatctgcataatagttgggtcctgaattctaacatccccctcgagactcggcactttttgtttaagcacggatctggctcatctgctattttttctgccgcctcacaaaattatcctttgactagcaatactgtgtattctccaccacctaggccattacctcggagcacattctcccgccctgcttttactttcaacaagccatatcggtgctgtaattggaaatgtactgctctgtccgcaacagccatcacagttactctggccctcctactcgcatacgtcattgccgttcatcttttcggcctcacatggcaactgcagcctgtggagggcgagttatatgcaaacggggtatctaagggcaatcgggggaccgaaagtatggataccacctattctcctattggcggaaaggtttcggacaagtccgaaaagaaagttttccagaaagggagggccattgataccggcgaggtcgacatcggggctcaggtaatgcaaactataccccctggtctcttctggcgttttcagattaccattcaccatcctatctacctgaagtttaatatctccttggccaaggattcactgctaggcatttatggccgcaggaatatccccccaacccacactcagttcgacttcgtcaagttgatggatgggaagcagctggttaaacaggacagcaagggtagcgacgacacacagcactctccacggaatctgatcctgacatctctgcaggagacagggttcattgagtacatggaccagggcccatggtatcttgctttctacaacgacggcaaaaaaatggaacaagtcttcgtgttgaccactgcaatcgaaattatggatgattgctccaccaactgcaacggaaacggagagtgcattagtggacactgtcactgctttcccggatttttaggccccgattgcgctagagactcctgccccgtgctgtgcgggggaaatggcgaatatgaaaaaggacactgcgtttgtcgacacggttggaagggaccggaatgcgacgtgccggaagagcaatgtatcgatcccacttgtttcggtcacggcacatgtattatgggcgtttgtatctgcgtgccggggtataaaggggaaatctgtgaggaggaagactgtctggaccctatgtgtagtaatcacggcatctgtgtgaaaggcgagtgtcattgctccacgggatgggggggagttaactgcgagactcctctgcccgtgtgccaagaacagtgtagcggacatgggacctttttgctcgacgccggagtatgttcgtgcgatcctaaatggaccgggagcgattgctctacagagctgtgtacgatggagtgcggctctcacggagtctgttccagagggatttgtcaatgtgaggaaggctgggtgggccccacttgtgaggaaagatcttgtcatagccactgcactgaacacggacagtgtaaagatggcaagtgcgagtgcagccccggttgggagggagaccactgtactatcgctcattatctggacgcagtaagagacggctgccccgggctgtgcttcgggaatggtaggtgtaccctagatcagaacggctggcactgtgtctgtcaagtcgggtggtccggtaccgggtgcaacgtcgtgatggagatgctttgcggcgataacctcgacaatgacggggacggcttgacggactgcgttgaccctgattgttgtcagcagtctaactgctacatctccccactctgccaggggtctccggatcccctggatctgattcagcaatcccagactctgttttcccagcatacctcccgcctgttttacgatcgaatcaagtttctcattggcaaagattcaacacatgtcattcctccagaggtaagtttcgacagccgcagagcgtgtgttataaggggacaggtcgtggcaatcgacgggactccactggtcggcgtcaatgtgagcttcctgcatcatagtgattacggctttacaatatcacggcaagatggcagtttcgacttggtggctatcggtgggatctcggtgatcctgatctttgaccgctcaccatttctccccgaaaagcgcacgctgtggctgccatggaaccaattcattgtggtagaaaaagtaacaatgcaaagagtcgtgagcgaccccccatcctgtgatatatccaacttcatatctccaaatccaatcgtgctcccctcaccccttacatcatttggtggctcctgtccagaaagagggacaatcgtaccagaactgcaagtcgtccaagaggagattcccattcctagctcttttgtgagactttcctacctgtcaagcaggacacccggctacaagacattattgcgcatcctcctgacacactctacaatacctgtcggcatgattaaggtacaccttaccgttgcagttgaggggcgcttgactcagaagtggtttcccgctgccatcaacctggtttatacatttgcctggaacaaaacggacatctacgggcagaaagtctgggggctggcagaggccctggtgagtgtgggatatgaatacgagacgtgcccagactttattctctgggagcagaggacagtggtgttgcagggattcgaaatggatgcttctaacctgggaggttggagcctgaataaacatcacatcctcaacccacaatccggaattattcataagggaaatggcgagaatatgtttatttcacaacaaccacctgtgataagtaccattatggggaatggtcatcaacgcagtgttgcatgtacgaattgcaatggtcctgcccacaataataagctgttcgcccctgtggctttggcctccgggcccgacggttctgtatacgtcggcgactttaacttcgttcggcgtattttccctagcggaaattctgtatcaatcctggagcttcgcaatcgcgacactcgacattcaacatcgcccgcgcacaagtattacctggctatggatcctgtgagcgaaagtctttatctgagcgacaccaatactcgcaaggtgtataaactgaagtctctagtagagaccaaagatttaagtaagaattttgaggtggtggccgggacaggagaccagtgtttgccattcgaccagtcccattgtggggatggtgggcgcgccagcgaagccagtttaaattccccacgaggcatcacagtggacagacatgggtttatctacttcgtcgacggcaccatgatacggaagatcgatgagaacgccgtcataacaacagtcatcgggagcaacgggttgacgtccactcagccactgagttgcgatagtggaatggacattacacaagttcgtttagaatggccaaccgatctcgctgtgaatcccatggataattctctgtatgtgctggacaataacattgtactccagatcagtgaaaaccggagagtgcggataatcgccggtcggcctattcactgccaggtgcccggtatagatcattttctggttagcaaagtagctatccattcaaccctagagtctgcgcgcgcaatctctgtgtcacatagtggcctgttatttatcgccgagaccgacgagaggaaggtgaaccggatccaacaggtgacgaccaatggggagatctacatcatcgctggggccccaactgattgcgactgtaagattgaccctaattgcgactgtttttcaggtgacggaggctacgctaaggacgctaagatgaaggctccctctagcctagcagttagccccgatggaaccttatacgtggccgaccttgggaacgttcgaattcgcaccatcagcagaaaccaagctcatttgaacgatatgaatatttacgagattgcctcacccgccgaccaagagctctatcagtttacagtgaacggaacgcaccttcataccctgaatcttatcacgagggattatgtttataactttacgtataacagcgaaggggatcttggcgccatcaccagctccaatggtaactcggtgcacattcggagagatgcaggaggcatgcctttatggctcgttgttccaggcggccaagtctattggctgactattagttccaacggtgtccttaaaagggtatccgcacagggctataaccttgctctcatgacctatccaggaaatactggcctcttagctaccaagagtaacgagaatggctggacgacagtgtacgagtatgatcctgaaggacatctgaccaatgctacatttcccaccggcgaagtcagcagctttcactctgatctggagaagttaacgaaggtcgaactggacacgtccaaccgagaaaacgtcctgatgtccacaaacctgacagccaccagcactatctatattcttaaacaggagaatacacagtcgacctaccgcgtcaaccctgatggctctctgcgcgttacatttgcctccggaatggaaattggcttgagcagcgagcctcatatcctggcaggcgccgtgaaccctacactgggcaagtgcaacatcagcttgccaggcgaacacaacgcgaacttgatcgagtggcgccagcgaaaagagcagaacaagggcaacgtgagcgccttcgagcgaagactccgggcccataacagaaacctgctcagcatcgactttgaccacatcacgaggaccggtaaaatctatgatgaccaccgaaagtttacactaagaatcctttacgatcagaccggccgacccatcctctggtccccagtgtcccggtacaatgaagttaatataacttattcccctagcgggctggttaccttcattcaacgcggtacatggaatgaaaagatggaatacgatcagagtggcaagatcatttccaggacctgggccgacggtaagatctggagttacacttaccttgagaagtccgtcatgctactgttacatagccagaggagatacatcttcgaatatgaccagcctgactgtctcctctctgtgactatgcctagtatggtgcggcactctctgcaaaccatgttgagcgtcgggtactatagaaacatctacactccacctgacagcagtacctctttcatccaggactattctcgagacggtcgcctcctgcagaccctccatctgggaactggcagaagggtcctttacaaatacaccaaacaggctcggttgtccgaagtcctgtatgacacaactcaggtgacgctaacatacgaggagagcagtggggttataaagaccattcacttgatgcatgacggcttcatttgcacgattagatatagacagacaggccctttgatcggacgacaaattttcaggttttccgaagagggtctggtgaacgcccgcttcgactattcgtacaataattttcgggttactagtatgcaggcggtcattaatgaaactccgctccccatagatctgtatcgctacgttgatgtctcaggccgcactgaacagttcggtaaattctctgtcattaactacgatttaaaccaggtaataacaaccacagtgatgaagcatactaagatcttttccgccaatggccaggttattgaagtgcagtatgagattcttaaagccatagcttactggatgacaatccagtatgacaatgtgggaaggatggtgatatgcgatatccgcgtaggggttgacgcaaacattactcgatacttttacgaatatgacgctgacggccagctgcagacggtgtcagtgaacgataaaactcagtggcgctacagctacgatctcaatgggaatattaatctccttagccacggtaagtccgcccgtttgacgcccctaagatatgacctccgggaccggatcacaaggttaggcgagatacagtataaaatggatgaagacggctttctgcgacaacgcggtaacgatatctttgaatacaatagcaacggtctgttacagaaggcctataacaaagcgagcggttggaccgtacagtactattacgatggactcggtagacgggtcgccagcaaatcttctttggggcagcatctccagttcttctatgccgacctgactaatccgatcagggttactcacctgtataatcacacatctagcgagatcacatctctgtactacgacctccagggccacctaattgctatggaactctcctctggggaagagtattacgtcgcctgcgataatacaggaacaccactggcagtcttctcttcacggggacaagtgattaaagagatcctgtacactccgtatggcgatatttatcacgatacatatcccgattttcaggtgattattggttttcacggtgggttatatgacttcctgactaaactggtgcatctcggccagagagattacgatgtggtggctggccgctggacgacaccgaaccatcatatctggaagcaacttaacctactcccaaagccattcaatctgtatagttttgaaaacaattatcccgtcggaaaaatccaggacgtagcgaagtataccaccgacattcgatcttggctggaactctttggcttccagctccataacgtgctgcccgggtttccgaaacccgagctggaaaacctggaactgacctacgagttactgcgcttgcagaccaagactcaggaatgggaccccgggaaaacaatactgggcatacagtgcgaactccagaaacagctgagaaatttcatttccctcgatcagctaccaatgaccccaaggtataacgatgggcgttgcctggagggcggcaaacagccacgctttgccgcagtgccctccgtgtttggaaagggtatcaaatttgcaataaaggatggcattgtcaccgcggatatcatcggggtcgccaatgaggattcacgtaggttggctgcaatacttaacaacgcccattacctggaaaacctgcatttcactattgagggccgcgacactcattacttcatcaaacttggatcattggaagaagatctggtgttaataggcaatacaggcggacggcggatcctggaaaatggggtaaacgtcaccgtcagccaaatgactagcgtccttaacggaaggaccaggcgcttcgccgacatccagcttcaacatggagcactctgcttcaatatccggtatggaaccaccgtagaggaggaaaagaaccatgttctcgaaatcgcccgccagagggctgtggctcaggcatggacaaaggagcagcggagactgcaggagggagaggaagggattcgcgcgtggaccgagggcgaaaaacagcagctcttatcaaccggacgggtccaaggttatgatgggtattttgtgctttccgtggaacagtaccttgaactttccgattctgcaaacaatatccattttatgcgacagtcagagataggcagacgatag

SEQ ID NO: 12866 - RNA, 264 nt, synthetic construct
  misc_feature 1..264: note = source = /note="Description of Artificial Sequence: Synthetic coding sequence"
  source 1..264: mol_type = other RNA
atgaaagtgctactgttgacaggcctcggcgctctgttctttgcctactattgggacgataacttcgaccctgcctctttacagggagcacgcgtgttgctgaccggagctaatgccggagttggagaagagcttgcttatcactatgctagattaggctcgcacctggttttgactgcacacactgaggctctgctccagaaggctcgatggttgactttagtagtatctacgctggggggccgcggaaaatggattacatag

SEQ ID NO: 12867 - RNA, 1233 nt, synthetic construct
  misc_feature 1..1233: note = source = /note="Description of Artificial Sequence: Synthetic coding sequence"
  source 1..1233: mol_type = other RNA
atgcgcgcatgtattagcctggttctagcggtgctctgtggcttggcatgggccggcaagatcgagtcctgcgcctctaggtgtaacgagaaattcaaccgcgacgctgcctgtcaatgcgatcgacggtgtctgtggcacggcaactgctgcgaggattacgaacatttatgtacagaagatcataaagaatctgagccactcccccagcttgaggaagagacagaggaagccctagccagcaacctgtattcagcccctacgtcttgccagggccgatgctatgaggcctttgacaaacatcaccaatgtcactgcaatgcgcgttgtcaggaattcggcaattgttgtaaggatttcgagagtctttgtagcgaccacgaagtatcacactcctctgacgcaattaccaaggaggagatacagtctatctctgaaaaaatctaccgcgccgacaccaacaaggcccaaaaggaagatattgtgctgaattctcagaactgtatcagcccctccgagactagaaaccaggtggaccggtgtccaaaaccactcttcacctacgtcaatgaaaagctattctctaaacccacctacgcagcgtttatcaaccttctcaacaattatcagagggctactgggcacggcgagcacttctccgcacaagagctggccgaacaagacgccttcctgcgcgagattatgaaaaccgccgtgatgaaggaactttatagttttctgcaccaccagaataggtatgggtctgagcaggaatttgtcgacgatctgaaaaatatgtggtttggcctttattccaggggaaatgaagagggggactcctctggcttcgaacatgtgtttagtggcgaagtaaagaaagggaaagtgaccggatttcacaattggatccgattttacttagaggaaaaggagggtctggtggactattattcacacatttatgacgggccttgggatagctaccctgacgtcctggctatgcagtttaactgggatgggtattataaggaggtagggagtgctttcatcgggtcctcacctgaatttgagttcgcactgtactcattatgtttcattgcacgcccagggaaggtgtgtcaattaagtctaggcggataccccctcgcggtccgcacttatacatgggataaatcaacctacggcaatggaaaaaagtacatcgccaccgcctatatcgtgagttctacttag

SEQ ID NO: 12868 - RNA, 351 nt, synthetic construct
  misc_feature 1..351: note = source = /note="Description of Artificial Sequence: Synthetic coding sequence"
  source 1..351: mol_type = other RNA
atggcagcgggaagtgcacctatgcagctgcatctgcgagctacaatccgaatgaaagatggtctctgtgttccccggaaatggatttatcatctcacagaaggttcaactgacctacgaaccgagggtcgaccagatatgaaaacagaactgttctcatccagttgtcctggcgggattatgctcaacgagaccggacaggggtaccaaaggttcctcttgtataacagatccccacatccaccagaaaaatgcgttgaggagttcaaatcgctaactagctgtctcgattccaaagccttcctgctaaccccccgtaaccaggaggcctgcgagctgtcaaacaactag

SEQ ID NO: 12869 - RNA, 1200 nt, synthetic construct
  misc_feature 1..1200: note = source = /note="Description of Artificial Sequence: Synthetic coding sequence"
  source 1..1200: mol_type = other RNA
atgagcgcccgcgggcgctgggaagggggcggcagacgcgcctgccggggaagccttggcttggcacgggcccaaggcgcagaacgagtaacttcaagcgaacaaagaccagctatggcaagtctgggacttctgctgctgctattgctcaccgcattgccaccactttggtctagctcactacccggcctggacaccgcagagtccaaagctacaattgctgatctgatcttgtcagctctggaaagggcaaccgtattcttggaacaaagactgccggaaattaatttagacggcatggtcggagtaagggtcctggaggagcagttaaagtcggtgagagaaaaatgggcacaagagccgcttcttcaaccccttagcctgagggtcggcatgctgggcgagaaactagaggccgctattcaacgcagtctgcattatctcaaactgtctgaccctaaatatctgcgagaatttcaactgacactgcagcctggcttctggaagcttccacacgcgtggatccacaccgacgcaagcctggtctaccctacctttggtccccaggacagcttctccgaggaacggagcgacgtctgcctcgtgcagctactaggtacgggaactgattcatcggagccctgcggactctcagatttatgtcggtctctgatgacaaagcccggatgtagcgggtattgcttgagccaccagcttctcttctttctctgggcccggatgcggggttgtacccaggggcccctccagcagtcacaagattatattaacctgttctgcgcaaatatgatggacctgaataggagagcagaagccattgggtacgcatatcccaccagggatatctttatggagaatatcatgttttgcggcatgggcggattttcagatttttataaactgcgatggttggaggccattttgtcctggcagaagcagcaggaaggctgttttggcgaacccgacgctgaagatgaagagctcagcaaagccatacagtatcagcaacacttcagtcgacgggtgaaaaggagagaaaaacagtttccagacgggtgctctagtcacaatactgcaacggcagttgccgcacttggcgggttcctgtatattctggcagaatatccacccgctaaccgcgagccacatcccagtaccccccctcctccaagcagtcggtag

SEQ ID NO: 12870 - RNA, 510 nt, synthetic construct
  misc_feature 1..510: note = source = /note="Description of Artificial Sequence: Synthetic coding sequence"
  source 1..510: mol_type = other RNA
atgctttcttcagtcgtgttctggggactcatcgcactgatcggaacatcgcgaggctcataccccttttcacatagcatgaagccacacctgcaccctaggctctatcacgggtgctacggcgacattatgaccatgaagacatctggtgccacatgcgatgctaactctgttatgaactgtggtattagagggtccgaaatgttcgcggaaatggacctgcgcgccattaaaccctaccagacactcatcaaggaggtcggacagaggcactgcgtcgatccagcagttatcgccgccattatttctagggagagtcacggggggagtgtgcttcaggacggatgggatcatagaggcctgaagtttgggttgatgcaactggataagcaaacctaccaccctgttggtgcatgggattccaaagagcatctatcacaggccacggggatacttacggaaagaatcaaggcaattcagaagaaatttcctacctggagtgtggcttag

SEQ ID NO: 12871 - RNA, 468 nt, synthetic construct
  misc_feature 1..468: note = source = /note="Description of Artificial Sequence: Synthetic coding sequence"
  source 1..468: mol_type = other RNA
atgactagtctcaaatgtggtgagaacctgtacatgtcatccgcttccagttcatggtcacaagcaattcagtcctggttcgatgaatataacgactttgacttcggtgtcggtcctaagactcccaacgccgttgtgggccactatacacaggtcgtgtggtatagcagttaccttgtaggctgcggcaacgcctattgtccaaatcaaaaggtgctgaagtattattatgtatgtcaatattgtcccgcggggaattgggccaacaggctgtacgtcccatatgagcagggagctccttgtgcaagctgtcccgacaattgtgacgacggactgtgcactaatggttgcaagtacgaggacctctattctaactgcaagagcctaaagttaacactgacttgcaagcaccagctcgtgcgtgattcttgcaaagcctcatgcaactgttccaattctatctactag

SEQ ID NO: 12872 - RNA, 2886 nt, synthetic construct
  misc_feature 1..2886: note = source = /note="Description of Artificial Sequence: Synthetic coding sequence"
  source 1..2886: mol_type = other RNA
atgctcttactgttgctgctggcccccctcttcctcaggcctcctggagcaggtggcgcccagactccaaacgctacttctgaaggatgccaaattattcacccaccttgggaaggcggaatccgctatcgcgggctgactagggatcaagtcaaggccataaatttcttgccagttgactatgagatagagtatgtgtgtaggggcgagagagaggtcgtgggacctaaagttcgcaaatgccttgctaacgggtcctggactgatatggatacaccaagtagatgcgtgagaatatgcagcaagtcctatctgactctcgaaaatggcaaagtgttcctgacaggaggggacctacccgccttggacggagccagagtcgacttccggtgcgacccggactttcacctcgtgggcagttcacgtagcatttgctcccagggacagtggtctacaccaaaaccacactgccaggtcaacaggaccccgcacagcgagcgccgagccgtctatatcggcgcactcttccctatgtcgggaggctggccagggggacaggcttgccagccagctgtcgagatggccctggaggacgtgaatagcagaagggacatcctacccgattatgaattgaagctcatccaccatgacagcaagtgcgacccgggtcaggcgacaaagtatctgtatgaactgttgtacaacgaccctataaagataatcctgatgcccggttgctctagtgtttctactcttgttgccgaagccgcccgaatgtggaatctgatcgtgctgtcttacggctcatctagccccgcactctcgaacaggcaacggtttccaacattcttcagaacccacccctccgctacattacataacccgactcgcgtgaaactcttcgagaagtggggctggaagaaaatcgccactatacaacaaacaaccgaggtctttacgtcaacccttgatgacttggaagagagggtgaaagaggccgggatcgagatcaccttcaggcagtccttctttagcgaccccgcagtccctgtgaagaatctgaaacggcaagatgctcgcatcatcgtcggcctgttctatgagacggaagcacggaaggtgttctgcgaagtgtacaaggagaggctgttcggaaaaaagtacgtgtggtttttaattggttggtatgccgataactggtttaaaatttatgatcccagtattaactgcaccgtcgatgagatgacagaagcagtcgaggggcatatcaccacggaaattgttatgttgaaccctgcgaacactaggtccatctccaatatgacaagccaggaatttgttgaaaaactgactaaacggctgaaaaggcacccagaagaaaccggcggcttccaggaggcccccctcgcatacgacgccatctgggcattggctctggccttgaataagacatcaggcggaggaggaaggtctggagtcagactagaagatttcaactataacaatcaaactattacagaccagatttatcgcgcaatgaattcaagctctttcgagggcgtgtcggggcacgtagtgttcgatgcttctggaagcagaatggcctggactctaattgaacagctccagggggggagttacaaaaaaatcgggtattacgattctacgaaagacgacttgtcgtggagcaagactgataagtggatcggaggatcgccgcctgctgatcaaacactcgtaataaagaccttcagattcttgtcacaaaaactttttattagtgtttccgtgctgtccagcctggggatagtccttgcagttgtgtgcttgtcatttaatatctataactctcacgtgagatacatccagaattcccagcctaacttgaataacctaacagcagtcggatgtagcctagcgctcgccgccgtgttcccgctaggattagatggctatcacattggccggaatcagttccccttcgtttgtcaggccaggttgtggctcctcggcctggggtttagtttaggctacggatcaatgttcaccaagatatggtgggtccacaccgtattcaccaagaaggaggagaaaaaggaatggcgtaagacccttgaaccttggaagctttacgctacagtgggactgctcgttggaatggatgtcttgaccctagccatctggcagattgtcgaccctctgcataggactatagagacttttgccaaagaggaaccaaaggaagacattgacgtttccatccttcctcagctagagcactgcagctcccgaaagatgaatacatggctcggaatcttttacggctacaagggattactgttgctcctggggatttttttagcttacgaaaccaagtctgtgagtaccgaaaaaatcaacgatcacagagcggtgggaatggccatctacaatgtggcagttctgtgcttgatcaccgcacccgtgacaatgattctgagttcacaacaagacgcggccttcgcctttgcctcccttgccatcgtcttttcttcttacattaccttagtggttctgttcgtaccgaagatgagaagactcatcactaggggggaatggcagtcggaagcccaggataccatgaagactggctctagtactaacaacaatgaggaggagaaaagcagattgctggagaaggagaaccgcgagctcgaaaagattatcgctgagaaggaagagagagtcagtgagcttcgtcatcagttacagtctcgtcagcagctcaggagcaggagacaccctcctaccccaccggagccttctggcggacttccacgcggaccccctgagccccctgatcgactgagttgtgatggctctcgcgtgcatcttctgtacaaatag

SEQ ID NO: 12873 - RNA, 444 nt, synthetic construct
  misc_feature 1..444: note = source = /note="Description of Artificial Sequence: Synthetic coding sequence"
  source 1..444: mol_type = other RNA
atggccggtccatggacttttacactgctgtgtggccttctagcggccactctgatccaggccaccctatcgcctaccgccgttctgatcctgggacctaaggtgatcaaggaaaaactaacgcaagagctgaaagaccacaacgccacttcaattcttcaacagttaccacttctatctgccatgcgcgaaaaacccgccgggggaatacccgtcctgggatcgctcgttaacaccgttttgaagcatatcatatggttgaaagtgatcactgcaaatattcttcaactacaggtaaagccaagcgccaacgatcaggagctgttagtgaaaatccccctggatatggtggctggctttaacaccccacttgtcaagactatcgtagaattccacatgacaactgaggcacaagcaacaatccgcatggacaccagtgcctag

SEQ ID NO: 12874 - RNA, 948 nt, synthetic construct
  misc_feature 1..948: note = source = /note="Description of Artificial Sequence: Synthetic coding sequence"
  source 1..948: mol_type = other RNA
atgaaggtgcttttgctgaccggcctaggagctctgttcttcgcttactattgggacgataattttgaccctgcttcactgcaaggagcccgcgtcttactgaccggcgcgaatgctggtgtgggtgaagaactggcttatcattatgctcgactgggctcacaccttgtgctgaccgcccacacagaagctctgttgcaaaaagttgtaggaaattgtcggaagcttggggcccccaaggtgttttatattgctgcagatatggctagcccagaggcgcccgaatctgtggtgcaattcgcactggataaactgggagggctagactatcttgtcttaaaccatatcggaggagcacctgccggaacacgggctcgtagcccccaggctacacgctggctcatgcaagtcaattttgtctcatatgtacaacttactagtagagccctgccttctctgacggactccaaaggttcacttgtcgtcgtgtcctccctgttaggtagggtccctacatcattcagtactccctactctgcggcaaagttcgcgctggatgggttcttcggatccctacgccgagagctggacgttcaggacgtgaatgttgccatcaccatgtgcgtactcgggctcagggaccgggctagtgctgctgaagccgtacgctcctctacttcgaggcctcgccagccggaacatcgaggggtccctctacagagccagacggccatgtttttgcctccaacagtgcctggcgcccgtacgttaacagaaaccccactccgaggatggccacagccaaagatgaaatcatcacggcagaaatcaaagacagaaaaaaacgacggacatctcgaaccagtaacagcctgggaagtgcaggttcccagagttcggcggctgtgccgtggtcttgccaggccacatctttttgggcatgattag

SEQ ID NO: 12875 - RNA, 285 nt, synthetic construct
  misc_feature 1..285: note = source = /note="Description of Artificial Sequence: Synthetic coding sequence"
  source 1..285: mol_type = other RNA
atgcagcacagtctcgtcttttttttcgcagtcattctccatttatcccacttactacaccttgacgccagcattcatccattcaggcttcccttctcttctaagcccttcctcttaatcccaatgtcaaacactacactgccacatacagcctggccactatcctttttgcatcagaccgtctcaacactgaaggctgtagcggtcacacattcactttggcacttgcagatccctgttgactgccaagcttgtaaccggaagagcaagaaaatctattgctag

SEQ ID NO: 12876 - RNA, 783 nt, synthetic construct
  misc_feature 1..783: note = source = /note="Description of Artificial Sequence: Synthetic coding sequence"
  source 1..783: mol_type = other RNA
atggaaaagtttaatacaatctcagtgtccaagtgcaacaaagagaccgtggcaatgaaggaaaaatgcaagtttggtatgacgtccaccatcccctctgggcatgtttggaggaacacctggaatcccgtaagctgcagcctggcgaccgtcaaaatgaaggagtgcttgcgcggcaaactcatttatctgatgggggacagcactatccgtcagtggatggaatacttcaaggcttcaataaacacactgaaatccgtagatctgcatgagagcggaaagttgcagcaccaactggcagtggacctggatcgaaacattaacatacagtggcagaaatactgttatccccttattggaagcatgacttatagcgtgaaagagatggagtatctgaccagagcaattgatcgaacaggaggggaaaagaataccgtcatagtgatcagcctcggccagcactttcgccccttccccatcgacgtgtttataaggcgcgccctgaatgtacataaagcaattcagcacctgctattaagaagtcccgacacgatggttatcatcaagaccgagaatattcgcgaaatgtataacgatgcagaacgcttctccgactttcacggttacatccagtatttgattatcaaagatatcttccaagacctctcagtgtccattatcgatgcatgggatatcaccatcgcgtacggcactaataacgtgcacccaccccaacacgtggtagggaaccaaatcaatatattactgaattacatctgctag

SEQ ID NO: 12877 - RNA, 1644 nt, synthetic construct
  misc_feature 1..1644: note = source = /note="Description of Artificial Sequence: Synthetic coding sequence"
  source 1..1644: mol_type = other RNA
atgagttcaaacactatgctccagaagaccctgttaatattaatctcattttcagtagtgacttggatgattttcatcatctcacagaactttaccaagctgtggtccgccctaaacttatcaatctctgttcactattggaataattcagcgaagagtctcttccctaaaacaagcctaatccccctaaagccgttaactgaaactgagctgcggattaaggaaataattgagaagctcgatcagcagatccctccaagaccatttacccacgtaaatacaacgacttccgcaacgcattccaccgctacaatcttgaaccctagagacacatattgtcgtggggaccagctggatatcctcctcgaggtgcgagaccacctgggacaacgaaaacagtatggcggagattttttaagggcaaggatgtcatctcccgcattgacagccggggcttctggcaaagtgatggacttcaataacggaacttacctggtatccttcactcttttttgggaaggacaggtctccctttcactactgctgattcacccttccgagggagccagcgcactctggcgggcccgaaatcaagggtacgataaaataattttcaaaggaaagtttgtgaatggtacctcccatgtcttcaccgagtgtggactgaccctgaacagcaatgcggagctttgcgagtatttagatgaccgcgatcaagaggccttttattgtatgaaaccccagcacatgccatgtgaggctctgacttatatgacgacccgcaatcgagaagtctcatatctgacagacaaggagaacagcctcttccaccggagcaaagtgggcgtggaaatgatgaaagataggaagcatattgacgttactaactgtaacaagcgagaaaaaattgaggagacatgtcaagtcggaatgaagccccccgtccccggaggctatacgctgcaggggaagtggataacaacattttgtaaccaggtgcagctcgacacaatcaagataaacggatgcctcaagggcaagctcatttatttacttggtgactccacattgagacagtggatctactattttcccaaggttgttaagactctgaagtttttcgacttgcacgagaccggcatattcaagaagcatttactgctggacgccgaaagacacactcagatacaatggaagaagcattcctatccattcgtgacttttcagctgtactcattaatagaccatgattatattccccgagagattgaccgcctttcaggtgacaagaatactgcaatagtgatcacgttcggacagcatttccgtccctttcccattgacatattcattcgccgggccatcggtgttcagaaggcaatagagagactgtttctgagatctcctgcaacgaaggtgatcataaaaactgagaatattagggagatgcacattgagacagaacggtttggcgactttcatggatatattcattacctcataatgaaagacatcttcaaagatctgaatgttggcataatcgacgcctgggatatgacaatagcatatggaacagacacaattcaccctcccgatcacgtgatcggcaaccagattaatatgtttcttaattatatatgctag

SEQ ID NO: 12878 - RNA, 399 nt, synthetic construct
  misc_feature 1..399: note = source = /note="Description of Artificial Sequence: Synthetic coding sequence"
  source 1..399: mol_type = other RNA
atgctgatgttattcgtgtttggcgtgctattacatgaagtctccttaagcgggcagaatgaagcgccacccaacactcattccatcccaggcgaacccctttataactatgcttcaattcgcctcccagaagaacatatcccattcttcctgcataacaaccgtcacatcgctacagtctgtcgcaaagactccctctgtccatacaagaagcacctggaaaaactaaaatattgctggggctatgaaaagagctgcaagcctgaattcagatttggttatcctgtgtgctcctatgtcgacatgggttggaccgatacactggagtccgccgaggacatcttttggaagcaggccgattttggctacgctcgggaaaggctcgaagagatgcactag

SEQ ID NO: 12879 - RNA, 861 nt, synthetic construct
  misc_feature 1..861: note = source = /note="Description of Artificial Sequence: Synthetic coding sequence"
  source 1..861: mol_type = other RNA
atgggctcagcgctgttcgtcaaaaaagaactccagctccaggcaaacttcctgggtaacgtcaaaagactctacgaggctgaagttttctcaacggatttcagcaatccctccatcgcacaggcccgaatcaactctcacgtgaaaaagaaaacccagggcaaggtcgtagacataatccagggactggatctcctaacagctatggtgttagttaaccacattttctttaaggctaagtgggagaaaccttttcaccctgagtatacccgcaaaaacttcccctttctggtaggagagcaggttactgtccatgtgccaatgatgcatcagaaagagcagtttgcctttggggtcgacacagaactaaactgcttcgtcctgcagatggactacaagggcgacgctgtcgctttttttgtcttacccagcaagggtaaaatgcgccagctggagcaggccctgtctgctagaacgttacgtaagtggtctcacagtctacagaaaagatggattgaggtttttatccccaggttttctatcagtgcgagttataatttggaaactattctcccaaaaatgggaattcaaaatgtatttgataaaaatgccgattttagtggcattgccaaaagggattcattgcaggtatccaaagccacccacaaagctgttctggatgtgtccgaggaaggaaccgaagccactgcagccacgacaaccaaatttatagtcagaagcaaggacggaccgtcctactttaccgtgtcatttaatcgaacttttctcatgatgatcaccaataaagccacagatgggatcctcttcttgggcaaggttgaaaaccctaccaaaagttag

SEQ ID NO: 12880 - RNA, 60 nt, synthetic construct
  misc_feature 1..60: note = source = /note="Description of Artificial Sequence: Synthetic coding sequence"
  source 1..60: mol_type = other RNA
atggggtggttgaccaggattgtttgcttgttttggggagtgcttctaacggccaggtag

SEQ ID NO: 12881 - RNA, 1197 nt, synthetic construct
  misc_feature 1..1197: note = source = /note="Description of Artificial Sequence: Synthetic coding sequence"
  source 1..1197: mol_type = other RNA
atgaaattccagggccctcttgcctgtctcctcttggcactctgtctggggagcggggaggctggacccctccaatcaggagaggagtccactggaacaaatattggcgaggcattgggacacgggttaggagacgccctctctgagggagtcgggaaagctatagggaaggaggcagggggagctgcgggtagcaaagtgtctgaggcccttggtcagggaactcgcgaagctgtcggcacaggagtgcgccaagtgccaggttttggcgtagcagacgcgctaggtaatagagtcggagaggctgcccatgccctagggaacaccggacacgagattggacggcaagcagaagacgtcatcagacacggagcagacgctgtaaggggtagctggcaaggggttccaggacacaatggggcatgggagacatctgggggacacgggattttcggttcccagggaggactgggcgggcaaggacaaggtaacccagggggccttggaacaccttgggttcacgggtacccaggtaattcagctggaagtttcggaatgaacccgcagggagctccttggggccagggaggaaacgggggaccaccaaatttcggaaccaatacccaaggggccgttgcgcagcccgggtacggtagtgtgcgcgcaagtaatcaaaacgaaggatgcaccaatcctccccccagcggatccggtggtggatctagcaattcaggcggtggtagtgggagccagagcggatcctcgggatctggcagtaacggggacaataacaatggatctagctccggggggtcctcaagtggctcgagctcagggggatcatccggcgggtcatctggtggttcttccggcaactccggcgggtcaaggggagacagtggctccgaatcctcctggggatcatctacaggctcaagtagcggcaatcacggtggatcaggcggtgggaacggacacaaacctggatgcgaaaaacccggaaacgaagctcgcgggagcggcgagtctggcatccagggtttccgcgggcaaggagtgtccagtaatatgcggaatagcgaaaccagtcctggtatgtttaattttgatactttttggaagaacttcaagagtaagttgggctttattaattgggacgccattaataaggatcagcggtccagtaggatcccatag

SEQ ID NO: 12882 - RNA, 81 nt, synthetic construct
  misc_feature 1..81: note = source = /note="Description of Artificial Sequence: Synthetic coding sequence"
  source 1..81: mol_type = other RNA
atggcacccaagaaactatcctgtctccgatcactgttgttaccccttagcctcacacttctcttacctcaggcagattag

SEQ ID NO: 12883 - RNA, 696 nt, synthetic construct
  misc_feature 1..696: note = source = /note="Description of Artificial Sequence: Synthetic coding sequence"
  source 1..696: mol_type = other RNA
atggcccaattatttcttccgctgctggctgctctggtcttggcacaggctcctgctgctcttgcagacgtgctggagggagattcatcaggtatctacagatgtgaagtccagcatggcatagacgattcaagcgacgcagtagaggtaaaggtgaaaggcgtcgtctttttataccgcgagggctcagctcgctacgccttcagtttttcgggtgcccaggaggcgtgcgcacgaatcggcgcccacatcgcaacgcccgaacagctctatgcagcttaccttgggggctatgaacaatgcgacgctggctggctctccgaccaaaccgttaggtaccccattcagactcctagagaagcctgttacggagacatggatggctttccaggcgtgcggaactacggagtcgtagatcccgacgatctctatgatgtgtactgctatgctgaagacctcaatggtgagttattcttgggtgatcccccagagaaattgaccctggaggaggcccgtgcctactgtcaggagaggggagccgaaattgcaactacaggacaactttacgctgcatgggacgggggtctcgaccactgctctccaggatggctcgctgatgggtccgtacggtacccaattgtcaccccaagccaacgctgtggaggcgggctcccaggagtaaagacgctgttctag

SEQ ID NO: 12884 - RNA, 600 nt, synthetic construct
  misc_feature 1..600: note = source = /note="Description of Artificial Sequence: Synthetic coding sequence"
  source 1..600: mol_type = other RNA
atggacgagctgttacccctgatcccggtgctggaacaatataagacagacgctaaactgatcactcagtttaaggaggaaattcgcaatctaagcgccgtactaacgggcattcaggaggaaatcggggcctacgattatgaagaacttcaccaaagagtgttgtccctcgagacacgactccgggattgcatgaagaaactaacttgcgggaaactaatgaaaatcaccggccccgttaccgtgaagacatctggtacaaggttcggcgcctggatgacagatcccctggcctctgagaagaataatcgagtttggtacatggatagctacactaacaataaaatagttagggagtataagagcatcgctgattttgttagcggagcagaatctcgaacttataatctaccgttcaagtgggctggcactaaccatgtagtttataacggatcactctactttaacaaatatcagtctaacatcatcattaagtatagcttcgatatgggcagagtcctggctcagcgttcactggagtacgccggcttccacaacgttaccccgactcatggtgtggattccctgaccagtacgtag

SEQ ID NO: 12885 - RNA, 609 nt, synthetic construct
  misc_feature 1..609: note = source = /note="Description of Artificial Sequence: Synthetic coding sequence"
  source 1..609: mol_type = other RNA
atggctgacatgcaaaacttagtcgaacggttggagcgggctgtgggtcgtctggaggccgtcagtcacacaagtgacatgcatcgcggctacgccgactctccctcaaaggcgggcgcggccccctatgtgcaggcattcgactctctcctggcgggaccagttgccgagtatctgaagatctctaaggaaatcgggggtgacgtacagaaacacgcagaaatggttcacactggtctgaagctcgaaagagctcttcttgtgaccgccagtcagtgtcagcaacccgctgagaacaagctgagtgatctcctggcaccaatttctgagcaaatcaaggaggtgattacatttagggaaaaaaaccgcggatcaaaacttttcaaccatctttcagctgtctctgaatctatacaggcactgggctgggtggccatggcaccgaaaccaggaccctacgtcaaggagatgaacgatgcggcaatgttctatactaacagagtacttaaagagtacaaagatgtggacaaaaagcatgttgattgggttaaagcatatctatctatctggaccgagctgcaagcatacataaaagagttccatacctag

SEQ ID NO: 12886 - RNA, 2886 nt, synthetic construct
  misc_feature 1..2886: note = source = /note="Description of Artificial Sequence: Synthetic coding sequence"
  source 1..2886: mol_type = other RNA
atgctccttctcctgcttctggctccattgtttctcaggccacccggcgctggaggagcacagaccccaaatgccacatccgagggctgccaaatcatacatcccccctgggaaggcggtatcaggtatcgcggactgacccgagatcaggtgaaagcgataaacttcctgcctgtggattatgaaattgaatacgtttgccgcggggagagagaggtggttggccctaaagttaggaaatgcctggccaatgggtcttggacagacatggacacacccagtagatgtgtgcgcatctgctccaagtcatacctcacgctggaaaatggcaaggtgttcctcacaggaggcgatctccctgcattagatggcgcgagagtggacttcaggtgtgatccggacttccacttggttggcagcagtcgcagcatttgttcccagggccaatggagtaccccaaagccccattgccaggtgaaccggactccacactcagagaggagggcagtttatataggagctctgttccctatgtctggaggttggcccggcggccaggcgtgccagcctgctgtagaaatggccctggaagacgtgaactctcgtcgcgacatcctcccggactatgaacttaaactaatccaccacgactcaaaatgtgatcctggccaagccaccaagtacctgtacgagttactttacaacgatcccatcaaaatcatcttgatgcctggctgtagcagcgtgtctacactggttgctgaagccgctcggatgtggaatctgatagtattaagctacggttccagctcccccgctcttagcaacagacaaagatttcccaccttcttccgcactcatccctctgcaaccctccacaaccccactcgcgtcaagctgttcgagaagtggggatggaaaaagattgccactatccagcagacaactgaggtattcacttctacactggacgatctggaggaacgcgtaaaagaggcagggattgaaattacgttccgtcagtcatttttctctgaccccgcagtgccagtaaaaaacctgaagcggcaggacgcacgcattatagtcggactgttttatgaaacggaagcacggaaagttttctgtgaggtctataaggaaagactgttcgggaaaaaatatgtgtggtttctgataggttggtacgctgataattggtttaagatttacgatccctccatcaattgtactgtggatgaaatgaccgaagccgtagaaggtcacattactaccgaaattgtgatgcttaatcctgctaatactaggtccatttcaaatatgacctcacaggagttcgtggaaaaacttaccaagcggctgaagcggcatcccgaggagaccggagggttccaggaggcccccttggcttatgacgcgatttgggccctggccctggctctaaataaaactagtgggggcggcggaaggtcaggtgtcaggctggaggattttaattataacaatcaaacgataaccgatcagatctatagggccatgaattcctcttcattcgagggggtgtccggccatgtcgtatttgacgcaagcggatcccgtatggcatggactctcatagaacagctccaaggcggctcctacaagaaaataggatattatgactctacaaaagatgatctcagttggtccaagaccgataagtggatcggcggatctcctcctgcggatcagacccttgtgattaaaacttttaggtttctcagtcagaagctgtttataagcgtgtcagttctatctagtctaggaatcgtgctggccgtggtgtgcctgagctttaacatttataattctcatgtgaggtatattcagaactcccagcccaatctgaacaatctcaccgctgtgggctgtagcctggccctggctgctgtttttcctttaggattggatggttaccacatcgggagaaaccaatttcccttcgtttgccaggccagactctggctcctgggcctaggttttagtctcggatacggcagtatgttcaccaagatctggtgggtccacacagtgtttacgaagaaggaagaaaagaaagaatggagaaaaaccctggagccctggaaactctacgccaccgtgggcctattagtgggcatggacgtgttaaccctggcaatctggcaaatagttgacccactgcatcggaccatagagacctttgcaaaggaggagcctaaagaagatatcgacgttagcatccttcctcaactggagcactgttcaagtcggaaaatgaacacatggcttggaatcttctacggatataaagggcttctgctgctcctaggcatcttccttgcgtacgaaacgaagagcgtcagcacagagaagattaacgatcatcgtgctgttgggatggcaatctacaacgtggccgtactctgtctgataactgcccccgtaacaatgatattgagttctcagcaggatgcagccttcgccttcgcatccctggcgattgtgttcagcagctacattactctagtggtcttattcgtccccaagatgaggcgtctcatcacacgaggggaatggcaaagtgaagctcaggacactatgaagacaggttccagcacaaacaataatgaggaagagaagagccgcctattagagaaagagaatcgggaacttgagaagataattgccgaaaaagaagagcgggttagcgagcttagacatcaactgcagtcccgccaacagttgaggagccgtcgccacccgccaacacctcctgaacccagtgggggtctcccacggggcccaccggagccgcctgacagactgtcatgtgacggctctcgagtacacctgctttataaatag

SEQ ID NO: 12887 - RNA, 351 nt, synthetic construct
  misc_feature 1..351: note = source = /note="Description of Artificial Sequence: Synthetic coding sequence"
  source 1..351: mol_type = other RNA
atggccgccggtagcgcaccaatgcaattacacctgagagccacaatcaggatgaaagacgggttatgtgtgcccagaaagtggatttatcacctaacagagggtagtaccgacctaaggactgagggaagacctgatatgaaaacggaattattttcctcgagttgtcccggtggaattatgctaaacgagacagggcagggatatcaacgatttctgctctacaataggagcccccaccctcccgagaagtgtgtggaagagtttaaatccctgactagctgcctggactcgaaggctttcctgcttacacccaggaaccaagaagcctgtgagcttagtaataattag

SEQ ID NO: 12888 - RNA, 2334 nt, synthetic construct
  misc_feature 1..2334: note = source = /note="Description of Artificial Sequence: Synthetic coding sequence"
  source 1..2334: mol_type = other RNA
atggccgcagccggactcgtcgctgtagccgcagccgccgagtactcaggaaccgttgcaagcggagggaatctccccggtgtgcactgtggaccctcatctggcgctggccctgggttcggtccagggtcctggagtaggagtctcgacagggcgctcgaggaagccgcagtgactggagtgttgagtctgagcgggcgtaaactgagagagttcccacggggtgcggccaaccacgatcttaccgacactacgagggccgatctgtcacgtaaccggctcagcgaaatccctatcgaagcatgtcacttcgtgagtctggagaacctcaacttgtaccagaattgtatacgttacattcctgaagcgattctaaacttgcaggccttgacatttcttaacatcagcaggaaccagctctctacactgccagtccatctctgtaacttacctcttaaggtgctcattgcctcaaacaataaactggtctctttgcccgaagaaatcggacatttacgacatttgatggaactggacgtgtcttgtaatgagattcagaccatcccaagccaaattggcaacttagaagctctgcgtgacctgaacgtccggaggaaccatctcgtgcacctcccggaggaactagccgaactgccccttattcgtttggatttcagctgcaataagattaccacgatccctgtatgctaccgaaatctgagacacttgcagactattacactcgacaataatcccctccaatctcctcctgcacaaatctgcattaaaggcaaagtgcacatattcaaatacctcaacatccaggcctgtaagatagcaccggacctaccggattacgatcgccggcccctcggttttgggtcatgccacgaagagctgtactctagccggccgtacggcgcactcgacagcgggtttaactctgttgacagcggtgacaaaaggtggtcaggtaatgagccaacagatgagttcagtgatctgcctcttcgcgtggcggagatcaccaaggagcagcgcctgaggcgggagtcccagtatcaagagaacagaggcagcctcgtcgtaacaaatggcggcgtggagcacgatctggaccagatcgattacattgacagttgtactgccgaagaggaggaggcagaagttagacaacccaagggcccagacccagactctctgagctcacagttcatggcctacatcgagcagagaagaatttcacacgagggtagcccagtgaaacccgtggcgattcgcgagtttcaaaagacagaagacatgcgccgatacctccatcagaaccgcgttcctgctgagccttccagcttgctctcgctctccgcaagccacaatcagctgtcacatactgatctagaactccaccagaggcgcgagcagctggtggaacggacacggagggaagcgcaacttgcggcattgcagtatgaagaagagaagatccggactaagcaaatccagcgggatgccgtgctggatttcgtcaagcagaaagctagtcagtccccacagaaacaacatccattactcgacggagtggacggcgagtgtccttttccatcccgtcgcagccagcacactgacgattcagccctatgcatgtccctctcaggattgaaccaggtcggatgcgccgctaccctgccccactccagtgctttcactcctcttaagtccgatgatcgcccaaatgctttactgagttcacctgctacagagacagtacatcattcgcccgcttactccttccctgcagctattcagcgcaaccagccacagcggcccgaatcttttctgttcagggcaggggtgagagccgagaccaacaaggggcatgcctctccattgccaccaagtgcagcacccacaaccgactccacagactccatcacaggccagaacagcaggcagagagaggaagagctggaacttatcgaccagctccggaagcatattgagtatcgactgaaagtatcacttccctgcgatctcggagccgccttgacagacggtgtggttctgtgccacctggctaaccacgtacggccccgcagcgttcctagcatccacgtgccctccccagccgtgcctaagttgacaatggccaaatgtaggcgaaatgtagaaaattttcttgaagcgtgccgaaagatcggggttccacaggagcagctttgtctcccattacacattcttgaagaaaaaggtctctcacaggtggctgtcacagtacaggcattgttagagttagcccctccgaaacagcagcagcaccagctctcagccgtctag

SEQ ID NO: 12889 - RNA, 834 nt, synthetic construct
  misc_feature 1..834: note = source = /note="Description of Artificial Sequence: Synthetic coding sequence"
  source 1..834: mol_type = other RNA
atgttgcatcccgagaccagtcctggcagagggcatctgctggccgtacttctggctcttcttggtacaacctgggcggaggtgtggccgccacagctccaggagcaggcgcctatggctggagctctgaatcgaaaagagagctttctcctgctttcactccacaatcgcctgcgcagctgggtgcagcccccagccgcagatatgcgtcgtttattagtgtgggcgacaagctctcagctgggatgtggcagacatctttgtagcgccggccaaactgctatagaagctttcgtctgtgcctactcacctggaggcaattgggaagtaaatggaaagacaattatcccttataagaagggagcttggtgcagcctttgtactgcatctgtgtctgggtgctttaaagcatgggaccacgcaggtgggctttgtgaagtacctcggaacccgtgcagaatgtcttgtcagaaccacggacggcttaacatcagcacttgccattgccactgccccccaggatataccggacggtattgccaggggcacctgccgaacagtaacatgccccactcagctatggggacgaagccaaaaaccccgggcgtccctgctattggtagtcttgtgaggtgttccctgcagtgcgtccacggtcgatttagggaagaagagtgttcttgtgtttgcgatatcggatacggcggggcacagtgtgctagcgaatcttgtcccagagcccccaaagagcccgcccccctgaaaactcctctacagtggggtatctcttcacaggagcccgcagtttgcctgtcctttcaactgatacagtag

SEQ ID NO: 12890 - RNA, 456 nt, synthetic construct
  misc_feature 1..456: note = source = /note="Description of Artificial Sequence: Synthetic coding sequence"
  source 1..456: mol_type = other RNA
atgtctgacctcctgttgctcggtctgataggaggactcaccttactccttctgctgactctacttgccttcgccgggtacagtggccttctggctggggtcgaggtgtccgctggctcaccccccatcaggaatgttacagtggcttacaagtttcacatgggcttatacggagaaacaggtaggctctttactgaaagctgctcaatcagcccaaagcttcgatccattgctgtatactacgacaatccacatatggttccaccggacaagtgtcggtgcgctgtcggctctattttgtccgagggtgaagaatcccccagccccgaactcatcgacctgtaccaaaagtttggatttaaagtgttctccttccctgccccttcacatgttgtaaccgccacattcccctacaccactatactgagtatttggctcgcaaccagaagggtatag

SEQ ID NO: 12891 - RNA, 390 nt, synthetic construct
  misc_feature 1..390: note = source = /note="Description of Artificial Sequence: Synthetic coding sequence"
  source 1..390: mol_type = other RNA
atggcagcgggcagcgccccaatgcagctccatctgagggctacaattcggatgaaagatggactatgcgtccctagaaaatggatctaccatctgacagagggaagcacagacctgagaaccgaaggcagaccagacatgaaaacagaactttttagttcttcttgtcccgggggcataatgctgaacgaaacaggacaaggatatcagcggttcctgctctacaatagatccccacatccccctgagaagtgcgtcgaagaattcaagtccttgacttcatgcctggacagtaaagctttcctgcttacaccacgaaaccaaggaaagggtctcaaatctcacaaaacagggctaggactcaccaagtcatctggcgtgacgggttag

SEQ ID NO: 12892 - RNA, 390 nt, synthetic construct
  misc_feature 1..390: note = source = /note="Description of Artificial Sequence: Synthetic coding sequence"
  source 1..390: mol_type = other RNA
atggccgctggtagcgcaccaatgcaactccacctcagagccactataaggatgaaggacggactgtgtgtgcctcgaaaatggatttaccatttgactgagggttcaacggatttacgaaccgagggtagacctgatatgaagaccgaattgtttagctcgagttgccccggcggcataatgcttaacgaaaccgggcaaggataccaacgcttcctgctctataaccgctccccacaccctcctgaaaaatgtgtcgaggaattcaagtccttgacctcttgccttgactcaaaggccttcctattgacaccaagaaaccagggaaaggggctgaagagccacaagaccggacttgggctgacaaagtcgtcaggcgtaacgggctag

SEQ ID NO: 12893 - RNA, 891 nt, synthetic construct
  misc_feature 1..891: note = source = /note="Description of Artificial Sequence: Synthetic coding sequence"
  source 1..891: mol_type = other RNA
atggaggcccttctgctcggcgccggtttgctgctaggcgcatacgtgcttgtctactacaacctggtgaaggcacccccttgcggtggcatgggcaacctcaggggtcgtaccgcagtggtaaccggcattagttcgtgtggcaggacacgggaagccttcaatctgttgttacgcgttaaccacatagggcctttcctgctgactcacttgctgctgccatgcctaaaggcgtgtgcacctagtagggtggtggtggttgcctctgcagcacattgtcgaggacgactggattttaaaaggttggataggcctgtcgtcggctggaggcaagagcttcgggcatacgccgataccaagctagctaatgtattatttgccagggaattagccaatcagcttgaagccactggcgtcacctgttatgccgcccatcctggacctgttaattccgagctgtttttgagacatgttcccggctggttaagacctctcctcaggccactggcctggctcgtactgagggcaccgcgcggcggcgctcagacccccctatattgcgctctgcaggaaggcattgagcctcttagtggtcggtatttcgccaactgccatgttgaggaggtcccccccgccgcgagggacgatagagcggcgcatagactctgggaggcctctaagcgactggccggtctaggccccggagaagatgctgagcccgacgaagacccgcaatcagaggattccgaggccccttcctctctgtcaaccccacatccagaagagccgacagtcagccagccctacccaagcccacagtccagccccgatttgtctaaaatgacacatagaattcaggccaaagttgaacccgaaattcaattatcctag

SEQ ID NO: 12894 - RNA, 567 nt, synthetic construct
  misc_feature 1..567: note = source = /note="Description of Artificial Sequence: Synthetic coding sequence"
  source 1..567: mol_type = other RNA
atgttccatcaaatttgggctgccttgctctatttctacggtataattctgaattctatctaccagtgtccagagcattcccagctgacaaccttaggcgtggatggtaaggaattccccgaagtgcacttagggcaatggtactttatagcaggcgcagcacctacaaaagaagagctggctacttttgatcctgtggataatattgttttcaacatggcagcaggtagtgctccaatgcagctgcatctgagagctacaattcgaatgaaagacgggctgtgtgtgcctcgcaaatggatctaccacctcactgaaggaagtacagacttgcgaaccgaaggcaggcccgacatgaaaaccgagttgtttagtagttcttgtccgggaggaatcatgctgaacgagaccggccagggataccagcgctttttgctttataacagatccccacatcctcctgagaaatgcgtagaggagttcaaaagcctgacatcttgtctagactcaaaggcttttttattgacacctaggaatcaggaggcttgcgaactgtccaataactag

SEQ ID NO: 12895 - RNA, 978 nt, synthetic construct
  misc_feature 1..978: note = source = /note="Description of Artificial Sequence: Synthetic coding sequence"
  source 1..978: mol_type = other RNA
atgcaggggcgcgtcgctggctcgtgtgcacccctgggcctcctcctagtgtgtctgcaccttcccggcctgtttgcccgctcaattggggtagtcgaggagaaggtgagccagaacttgggaaccaatctgccccagctgggccagccatccagtacgggcccttcaaattccgagcaccctcagcctgcgctagatcctagaagcaacgatctcgctagagtgccattgaaactgtccgtgcctgcctctgatggcttcccacctgctggaggaagtgctgttcagagatggccaccctcctggggcctgcctgcaatggacagttggcctcccgaagacccctggcagatgatggctgccgcggccgaagaccgcttaggcgaagcccttcccgaagagctctcatatttatcctcagccgccgcactggcacctgggagcggcccccttccaggagaaagctcccctgatgctactggactgtcccctaaggctagtctcctccatcaagattccgagtcgcggagactgccacgatctaattccctcggtgcaggggggaaaatactctcccagaggccaccgtggagcttaattcatcgtgttcttcccgaccatccttggggaaccctgaacccttcggtgtcatggggcggcggagggcccggaacaggctgggggacccgtccgatgccccaccctgaaggaatttgggggatcaacaatcagcctcccggcacctcctggggcaacataaatagataccctggaggatcttggggtaacattaacagatatccaggtggctcatggggcaatatcaatagatacccaggtggctcctgggggaatatccacctctaccctggaataaataatccgttcccacccggggtccttcggccaccaggatcaagctggaatatccctgctggatttcctaacccaccttcccctagattacagtgggggtag

SEQ ID NO: 12896 - RNA, 2631 nt, synthetic construct
  misc_feature 1..2631: note = source = /note="Description of Artificial Sequence: Synthetic coding sequence"
  source 1..2631: mol_type = other RNA
atggggcccgaggcgctgtcgtctctgctgctgttgcttttggtcgcctctggtgacgctgatatgaagggacatttcgaccctgcaaaatgccggtacgccctgggtatgcaggacaggacaatacccgacagcgacatctctgctagctcaagctggtctgatagtactgctgctcgccacagccggttggagagttctgatggcgacggagcttggtgcccggccggatctgtgtttcctaaggaagaggagtacctgcaggtcgacctccagagacttcacttagtggccttggtaggaacacaaggccggcacgccggaggtttgggaaaagagttttcgcgaagctatcgtttgaggtattcaagggatggaaggcgatggatgggttggaaagaccgctggggccaagaggtgatttccggcaacgaagacccagaaggagttgtgctcaaagacttgggtccaccaatggtcgctcggcttgtgagattctatcccagggccgaccgagtgatgagcgtttgcctgagggttgagctctacggctgtctctggagagatgggctgctgagctacactgctcccgtggggcagactatgtatttatctgaggccgtgtacctgaatgacagtacctacgatggccatacagtgggtggcttacagtacgggggattagggcagctcgccgatggagtggtcggccttgacgacttccgaaagagccaggaactacgcgtctggcccggctatgattatgtcggatggtctaaccactctttttcttccggttatgtagagatggaattcgaattcgaccgactgcgcgcatttcaggcaatgcaagtgcattgtaacaacatgcatacccttggcgcacgattgccaggtggcgtagagtgccgcttcagacggggaccggcgatggcttgggaaggagagccaatgcgccataatctgggaggaaatctaggcgacccaagggcgcgcgcagtctccgtcccgctgggtggcagagtcgcgcgcttcttacagtgccgtttcctcttcgccggcccgtggctcctgtttagtgagataagcttcatttctgatgtcgttaacaattcctcgcctgccctcggtggcacatttcctccagccccttggtggccccccggaccccctcctacgaatttcagctctctcgagcttgagccacgcggccagcaacccgtggccaaggctgagggctctcctactgccatccttattggatgtctggtcgcaattattctgctgttgcttctcatcatcgcccttatgctgtggagactacattggcgcagactgttgtcaaaagccgagagacgcgttctagaggaagaattaactgtacatttaagcgtgcctggagacaccattctgattaacaacagacccggtcccagagagccaccaccctaccaggaaccaagaccaaggggcaatcccccccactctgctccatgtgtcccaaacggtagcgcatactcgggcgactacatggagcctgagaaacccggggcgccactgctcccccctcccccacagaactctgtgccccattatgcagaggctgacattgtcaccctacaaggggttacaggtgggaacacctatgccgtgcccgctctccccccaggggcggtcggcgatggtcctcctagggtcgacttcccacggagcaggctcagattcaaagaaaagctcggggagggccagttcggggaggtccatttgtgtgaggttgactctcctcaggatctggtctctctggactttccactgaacgtccgcaagggccatcccttgttagtggctgtaaagattctgaggcctgacgcaactaaaaacgccaggaatgatttcctcaaggaggtcaagatcatgtcccgacttaaggatcctaacattattaggcttttgggtgtgtgcgttcaagacgaccctctgtgtatgatcacagattatatggaaaacggcgatttaaaccaatttctttcagcccatcaactcgaagacaaggccgctgagggggcccccggcgacggtcaggctgcccagggacctaccatctcctatcccatgttgttgcacgttgctgctcagattgcgtctggtatgcgatacctcgctactctgaattttgtccatcgtgacttggctactcggaattgtctggtcggggaaaacttcaccatcaagatagcagattttggcatgtccagaaacctgtatgccggagattactacagagtgcaggggcgagcagttcttcctatccgctggatggcgtgggagtgtatcctgatgggcaagttcaccaccgcgagcgatgtttgggcctttggagtgacattatgggaagttcttatgctctgtcgcgcccagccttttggacagctgaccgacgagcaagtgattgagaatgctggcgagttctttagagaccaggggcggcaggtgtatttatctcggcctcccgcctgtccacaaggattatacgagctgatgctgcgttgctggtcgagagagtcagaacaaagaccgccatttagtcaactgcatagatttctagctgaggatgcgctaaacacggtttag

SEQ ID NO: 12897 - RNA, 1482 nt, synthetic construct
  misc_feature 1..1482: note = source = /note="Description of Artificial Sequence: Synthetic coding sequence"
  source 1..1482: mol_type = other RNA
atggccctcctcgcagggggattatctagggggctgggatcccaccccgcagccgcaggaagggacgcagtcgttttcgtgtggctcctgctttctacgtggtgtactgctccagcccgtgccattcaggtcactgtttctaatccctaccacgtggtcatactcttccagccagttacactaccttgcacctaccagatgacatctacccccactcagcctattgtgatttggaagtacaaatctttttgccgggaccgtatcgctgatgccttctcacccgccagcgtggacaatcagctcaacgcccagctggctgccggtaacccaggatataacccatatgtggaatgccaggatagcgtgcgcacagtcagagtggtcgccactaagcaggggaacgccgtaactcttggggattattatcagggaaggcgcataaccatcacaggcatgtacgctgctgggaaggccgcgacatctggcgtgccctccatctatgcaccaagcacttatgctcatctgagtcccgctaaaactcccccccccccagcaatgattccgatggggcccgcctataacggctatcctggtgggtatcccggggatgtggacagatccagtagcgccggcggacagggctcgtatgttcccttattacgagacacggattccagcgttgcctccgaggtgcgatctggctacagaattcaggctagccaacaggacgactccatgagagtattgtattatatggaaaaggagctcgctaatttcgaccccagtcggcctggccctccatccggcagagtggaaagagccatgtctgaggtaaccagcttacacgaggatgactggcgctccagaccttctcggggccccgctctgacaccaatcagagatgaagagtgggggggccattcaccgcgcagcccgcgggggtgggaccaggagcccgcacgagagcaggcgggcgggggttggagggcaagacgcccccgagccagatccgtggacgctctggatgacttaaccccaccttctactgccgaatctggcagccgctctccgaccagcaacggtggccgaagcagagcctatatgcccccaagatcacgctcaagggatgacctgtatgatcaggatgattctcgtgacttccctaggtcaagggacccacactacgatgatttcagatccagagaacgccccccagcggaccccagatctcatcaccatcggaccagagatccaagagacaatggctcaagatctggtgatctgccatatgacggacgccttttggaagaagccgtccgaaaaaaggggtcagaggaaagaaggcggccccataaagaagaggaggaagaggcctactacccacccgctccgcccccatactcagagaccgatagtcaggccagcagagagcggaggttaaagaagaacctagccctgagtagagagtccctggttgtgtag

SEQ ID NO: 12898 - RNA, 1788 nt, synthetic construct
  misc_feature 1..1788: note = source = /note="Description of Artificial Sequence: Synthetic coding sequence"
  source 1..1788: mol_type = other RNA
atggacttcttgttggctctcgtcctggtatcgtccctatacctgcaggccgccgccgagttcgatggccgctggccaaggcagattgtcagcagcatcgggttgtgccgttatggaggtcggatcgattgttgttggggttgggcgcggcaatcttgggggcagtgtcagccggtgtgccagccgaggtgcaagcacggagaatgcattgggcccaacaaatgcaaatgccatcccgggtacgctggcaaaacttgtaatcaagacgagcacattcctgcaccactggaccagggatctgagcagcctctgttccagccgttggatcatcaggctacctcccttccctcacgcgatctgaacgagtgcggactgaaacctcgcccgtgcaaacaccgctgcatgaacacttatgggtcgtacaaatgttattgcttaaatggctatatgttgatgcccgacggttcctgtagttccgccctgacatgttcaatggctaattgccagtacggctgtgacgtggttaaaggacagatccgctgtcaatgccctagtcccggcctccaactggcaccagacggaagaacctgcgtagatgttgacgagtgtgccacaggccgggcgtcctgtcctagatttagacaatgcgtgaatactttcggcagctacatctgcaaatgccacaaggggttcgatttgatgtacatcggaggaaagtatcagtgccacgatattgacgagtgctcactgggacagtaccagtgttcatcctttgccaggtgttataacatcagagggagttataagtgtaaatgtaaagagggctatcaaggtgatggactcacttgcgtgtacatccccaaggtgatgatagagccatctggacctatccatgtgcccaaaggcaacggaacaatactgaagggtgatactggaaacaataactggattcctgatgtcgggtccacgtggtggccccccaagaccccctatattccccctatcatcaccaaccgtccaacgagcaagccaacaacgaggcctacaccaaaaccaaccccaatccccactcccccaccgccacctcctctccctactgaactgagaacgccacttcccccaacaactcccgaaaggccaacgactggtctgactactattgccccggcggcctctacaccacctggcggaattacggtggacaacagggttcagacagacccgcagaaaccacgcggtgatgtgttcatccctcgtcagccgtcaaacgatctgtttgaaatattcgaaattgagcgcggtgtgtccgcagatgacgaggccaaggatgatcccggagtattggtgcactcatgtaactttgatcacgggttgtgcggatggatcagagaaaaagacaatgacttgcattgggagccaatacgagatccggccggtggtcagtatctgaccgtgtctgcagctaaagcccctggaggtaaagctgctcgccttgtcctgccgttgggcaggctgatgcacagtggggacctctgcctctccttcagacataaagtaactggactccacagtgggacccttcaagtcttcgtccgcaaacatggggcacatggagcagccttatgggggcgcaacgggggtcatgggtggagacagactcaaattacactacgcggcgccgatatcaagagcgtggtattcaaaggagagaagcgaaggggacataccggagagattggactcgatgatgtgagtttgaaaaagggccactgttcagaagaaaggtag

SEQ ID NO: 12899 - RNA, 210 nt, synthetic construct
  misc_feature 1..210: note = source = /note="Description of Artificial Sequence: Synthetic coding sequence"
  source 1..210: mol_type = other RNA
atgaagaatcaagataagaagaacggagctgcgaaacaaagtaatcctaagagttccccaggtcaaccagaagcaggctcatttgatagtctggaccttgaaaaagtcagtttggggcgcgctctcgccggtcggagtgagctgggaatcagttgtcttgaacagggaacatggcgcatgtttctgcgaggaatgatgtgttggtcatag

SEQ ID NO: 12900 - RNA, 483 nt, synthetic construct
  misc_feature 1..483: note = source = /note="Description of Artificial Sequence: Synthetic coding sequence"
  source 1..483: mol_type = other RNA
atggcccgcgactatgaccatctgttcaaactgcttatcatcggcgatagcggcgttggaaaatcttcgcttctattgcggtttgcagataacacattctccggatcctatattaccacgatcggagtggatttcaaaatccgaactgtagagattaacggcgaaaaagtgaagctgcaaatttgggacactgccgggcaggaacgctttagaacaattaccagcaccgcggaaactgccctgcgatcgctcccccagcctgaagctcacgggggttcctctggtgattcccttagtttcgtcccactgtttaaggaattctcaccctgcttctgtataggcagatgccatagacacttcctgccgaggccacccagggtacccagacgctgttggacgtccccaccattcccaaccggagccccttcctctccagccaaagcccccggccccggagaagatgccgctaggagggctgactag

SEQ ID NO: 12901 - RNA, 360 nt, synthetic construct
  misc_feature 1..360: note = source = /note="Description of Artificial Sequence: Synthetic coding sequence"
  source 1..360: mol_type = other RNA
atgaataagatattgtcctccaccgtatgctttgggctcctaacactgctcagtgtcttatctttcctgcagtctgttcatggaaggccttacctgacccagggtaacgagatttttcccgacaagaagtacaccaaccgcgaagagctcttacttgcacttctcaataagaatttcgactttcagcgacccttcaataccgacctggccctgcctaataaactcgaggaactgaaccaactggaaaagcttaaggagcagctagtggaagagaaggattctgaaacttcgtacgctgttgatggcctgtttagttcacatccgtccaaacgggcgtgtttttggaagtactgcgtatag

SEQ ID NO: 12902 - RNA, 2514 nt, synthetic construct
  misc_feature 1..2514: note = source = /note="Description of Artificial Sequence: Synthetic coding sequence"
  source 1..2514: mol_type = other RNA
atgtttaagtgctggtctgtggtgttagtgcttggatttatttttttagagagcgagggcaggcctactaaggaaggcggatacggcttgaaaagctatcagccactcatgcgattgagacacaaggagaaaaatcaggaatcttcaagagtaaaggggttcatgatccaagacggaccgtttggctcctgtgaaaataagtactgcggtctgggccgccactgcgttacctctcgcgaaaccgggcaggctgaatgtgcttgcatggacctatgcaagagacactacaaacccgtgtgtggatccgatggggagttctatgagaaccactgtgaagtgcacagggcggcctgtctgaagaagcagaagatcaccatcgtccacaacgaggattgcttctttaaaggagacaagtgtaaaacaaccgagtatagtaagatgaaaaacatgctccttgaccttcaaaaccaaaagtatattatgcaggagaacgaaaatcctaacggtgatgacatcagccggaaaaagctgctggtggaccagatgttcaaatacttcgatgccgattccaatggtctcgtagatataaacgaactgacacaggtgattaagcaagaggagctcggaaaggacctcttcgactgtactctctatgtgctgcttaagtacgacgattttaacgctgataagcacctcgcccttgaagaattctaccgtgccttccaagtaatccaattgtccctccctgaagatcagaagctctcaatcaccgcagccacagtcggacagtctgccgtgctgtcgtgcgcaatccagggaacactcaggcctcctataatatggaaaagaaataatatcattcttaataaccttgacctggaagatataaacgattttggagatgatggctccctttatataacaaaggtgacaacaacacatgtcggcaactacacatgttatgcagatggttacgagcaggtgtatcagacccacatttttcaggtgaacgttcctccagtgatcagggtctaccctgaaagccaggcccgcgagccgggggttaccgctagcctccgctgtcatgcagaggggattcccaaacctcagctgggctggctgaaaaatggcatcgacatcacccctaaactcagcaagcagctgaccctgcaggccaacggatctgaagtgcacatctccaacgtgaggtatgaagacaccggtgcctatacctgcattgcaaagaatgaagctggcgttgatgaagacataagtagcctgttcgtggaggactccgccaggaagacaaggcttgggatcggcaatatgttttatgttttttacgaagacgggattaaggtcatccagccgatcgaatgtgagttccagcgccatattaaacccagcgaaaaattgttagggttccaggatgaggtgtgtcctaaagcggagggtgacgaggtccagcgctgcgtttgggcaagtgcagtgaacgtaaaagataaatttatatacgtcgcgcagcctacccttgatagggtcctgatagttgacgtacagagccagaaagtagtacaggcagttagtacggatccagtccccgtgaaactccactatgacaagtcccatgaccaggtttgggtgctatcttggggtactctcgaaaaaacttcaccaactctgcaggtaataaccctggcctcgggtaatgtacctcatcataccatccatactcaacccgtgggtaagcagttcgatcgggtcgacgacttctttatccccactacaactctgatcattacccatatgcgctttgggtttattttacacaaagacgaggctgccctgcagaagatcgatttggaaactatgtcctatatcaagaccatcaatctcaaagattacaagtgcgtgcctcagagcctggcctatacccacctgggcggctactacttcattggctgcaagcctgattcaaccggggctgtctcacctcaggtgatggtggacggcgtaaccgattccgtgatcggctttaacagtgatgtgaccgggacaccttacgtgagccctgatgggcactacctagttagtatcaacgacgtaaaaggcttagtgagggtgcagtacattactatacgcggggagatccaagaggcattcgacatctacacaaatctacacatttccgatcttgcattccagccgtcatttacagaggcccaccagtacaacatatacggttcgtcatctacccagacagatgtcttattcgtcgagctcagtagcggcaaggtcaagatgataaagagccttaaagagcctctgaaagccgaagagtggccctggaacaggaaaaacagacagatacaggactctggtttatttgggcagtatcttatgacaccctccaaggattccctcttcattctggacggccgactgaacaaactgaactgtgagattacagaggtcgaaaaggggaacacagttatttgggtcggtgatgcctag

SEQ ID NO: 12903 - RNA, 648 nt, synthetic construct
  misc_feature 1..648: note = source = /note="Description of Artificial Sequence: Synthetic coding sequence"
  source 1..648: mol_type = other RNA
atggccgacatgcaaaatcttgtggaacgcttagagcgagccgtcggacgcctggaagctgtctcacatacttcggatatgcacagaggttacgcagattctccatctaaagctggggccgccccctatgtacaggcctttgactcacttctcgcaggtcctgttgccgagtacctgaaaattagcaaggagatcggcggcgacgttcagaagcacgcagaaatggtgcacacagggcttaaattggagcgcgccctgctggtaaccgcttcccaatgtcaacagcccgcagagaataagctaagcgacttgctagcccctatttccgaacagataaaagaagttataacgtttcgggagaagaacagaggctcgaaattatttaatcatctgtcggcagtgagcgagtccatccaagctctggggtgggtggccatggcgccgaaacctggaccctacgtgaaagagatgaacgacgccgccatgttctatacaaatcgagtccttaaggagtataaggacgttgacaaaaagcacgtggactgggtgaaggcttatctttcaatttggactgagctgcaggcctacatcaaggagtttcatacaacaggtctcgcctggtcaaaaactggcccagtggcaaagtag

SEQ ID NO: 12904 - RNA, 3837 nt, synthetic construct
  misc_feature 1..3837: note = source = /note="Description of Artificial Sequence: Synthetic coding sequence"
  source 1..3837: mol_type = other RNA
atgaggctcctgctccttgtgccattgctgctggcaccagctccgggatcttctgctcccaaggtgcgaaggcagtccgatacctggggaccttggtctcagtggagtccttgttcgcgcacatgcggggggggggtgagttttagagaacggccgtgttattctcagaggagagatggagggtcatcttgcgtgggccccgcccgcagccaccggtcctgtcgtacagaatcctgccccgacggagcgagagatttccgggccgaacaatgtgccgaatttgatggtgctgaatttcagggcagacgctatcggtggttgccctattattccgcccctaataagtgtgaactcaattgtatcccaaaaggggagaacttctactacaagcatcgcgaggcagtggtcgatggcacaccctgcgaacctggcaagcgagatgtgtgtgttgacggcagctgccgcgtggttggctgtgatcacgagctcgatagttcaaagcaggaagataagtgtctgagatgcggtggagatggaacaacctgttatcctgtggcaggaacatttgacgccaacgaccttagtcggggctataaccaaatcttaatcgttcccatgggggccacctcaatattgattgatgaggccgctgcctcccgaaacttccttgccgttaagaacgtgcggggcgaatattacttgaacggacactggaccatcgaagccgccagggctctgcccgcagcctctacgattctacactacgagcgtggtgctgagggcgacctggctccagaaaggctgcacgcccgggggccgacatccgaaccgctcgtgatcgaacttatctcccaggagcctaatcctggtgttcattacgaataccatttacccctcaggaggccctcaccaggtttctcatggagccacgggagctggtctgattgttctgcggagtgtggtggcggccaccagtccagactcgtattctgtacaatcgaccacgaggcctatcccgaccacatgtgccagcgccaaccacgacctgcagaccgccggtcctgtaacctccacccctgtcctgaaactaagcgatggaaggccggcccttgggctccctgttctgccagttgtggagggggcagtcagagtagaagtgtgtattgcatttcatcagacggcgccgggattcaagaagccgtggaagaagcggaatgtgctggactgcccggcaagcccccagcgatccaagcatgcaatttgcaaaggtgcgctgcctggtctccggaaccatggggcgaatgctctgtatcttgcggcgtgggcgtaaggaagaggtccgtgacttgtcgcggtgaacgaggatcccttcttcacacggccgcgtgcagcttagaggatcgaccaccactcaccgaaccttgcgttcatgaggactgcccactgttaagtgatcaagcgtggcacgtgggaacctggggcctgtgctctaaatcatgcagttccgggacgcgtcggcggcaagtcatctgcgcaattgggccgccatcccattgcggatccctgcagcacagcaaaccagttgacgtggagccatgtaatacccaaccctgccacttaccccaggaagtgcccagcatgcaggatgttcatactccagccagcaacccctggatgcccctgggtccacaggagagccctgcttccgactcgagaggacaatggtgggccgcacaggaacatccatctgccagaggcgaccaccgcggggagagaggcgaccctaggggggatcagggaacccacctctctgccctgggccctgcaccgtctctccagcagcccccctatcaacagcccctaaggagtgggtccggccctcacgattgccgccacagcccccacggctgttgccctgacggccataccgcatctctgggccctcagtggcagggctgcccgggcgctccgtgccagcagtcgcgctacggctgttgccccgatcgggtttccgttgccgaagggccacatcatgccggctgtacgaagtcatatggtggcgacagtacgggaggtatgccaaggtctcgggccgtggcatcgaccgtccataatacccatcagcctcaggcacagcaaaacgagcctagcgagtgccggggatctcaattcgggtgttgctacgacaacgttgccactgccgcaggacccctcggagagggttgcgtgggccaaccatcacatgcttatccagtgcgctgtctgctccccagcgcccatgggtcttgtgctgattgggcagccaggtggtattttgtagccagtgtgggtcaatgtaatagattctggtacggggggtgtcacggtaacgctaataattttgcatccgaacaggagtgtatgtccagctgtcagggctctctgcacggcccccgtcgaccccagcctggtgcctctgggcggagcacccacaccgatggcggggggtcctctcccgcgggcgaacaggagccatcacagcacagaacaggagcagccgtgcagaggaagccctggccttcaggcgggctatggcgccaggaccagcaacctggacccggagaggcacctcacactcaggccttcggagagtggccctggggccaggaactgggatcaagggccccaggactggggggcgatgcggggagtcctgcacctccattccatagctcttcctaccggatctctctggccggtgtggaaccctcactcgttcaagctgccctcggacaactggtaagactctcctgcagcgatgacaccgccccagagtcccaggctgcatggcagaaggacggtcagcccatttcatccgatcgccaccggttgcagtttgacggatccctcatcatccaccctctccaagccgaagatgccggtacgtactcctgtggatcaacaagacctggacgcgactctcaaaagattcagctgaggatcatcggtggggatatggccgtcttgtcagaggccgaactcagccggtttccacagccccgggatcctgcccaggactttggccaggctggcgcagccggccccttgggcgcgattcccagctctcaccctcagcccgctaacagactccggctagaccagaatcagccgagggtggtggatgcctccccaggacagagaatacgaatgacatgccgggctgagggttttcctcctcccgcgatcgaatggcagcgcgacggccagcccgtgtcttctccccgccatcagttgcaacctgacgggtcattagtaatcagtcgcgtggccgttgaagacggaggcttctatacctgcgttgcctttaatggacaggaccgcgaccagaggtgggtccaactgagagtgctgggtgagctaaccatcagtgggctaccaccaactgtcaccgttccggagggagacactgctagacttctgtgcgtggtcgccggggaaagcgttaacatccggtggagcaggaacggactgccggtacaggcagacggacaccgggtgcatcaaagcccagatggaactctgctcatttataacctccgcgccagagacgagggatcgtatacttgttctgcctatcaaggttcgcaagccgtgtctcggtctactgaggtgaaggtggtgtcgccagccccaacagcccaaccgagagatcctggccgcgattgtgtggaccagcctgaattggcgaattgtgatctgatcctgcaggcccaactttgcggaaatgagtattatagctcgttctgttgcgcatcctgctcccgctttcagccacacgctcaacccatttggcagtag

SEQ ID NO: 12905 - RNA, 546 nt, synthetic construct
  misc_feature 1..546: note = source = /note="Description of Artificial Sequence: Synthetic coding sequence"
  source 1..546: mol_type = other RNA
tgaaagggacatgcctcacccttacccccttctgctgcaccaaccaccgattcaactgattctatcaccggccaaaatagtagacagagagaggaagaactcgagctcattgaccagttgcgcaaacatatagagtatagacttaaggtcagtcttccttgcgacctcggagctgcccttacagatggagtcgtactgtgtcacctagcgaaccacgtcaggccacgctccgtcccctctatccacgtgcccagtcccgctgttccaaaacttacaatggctaagtgtagacgcaatgtggagaactttttggaagcttgccggaagatcggagttccacaggacaatctctgttccccgtctgacatcctgcagctcaatcttagcgtaaaaaggaccgtcgagaccctactatctctaggggctcatagcgaagagtctagttttgtgtgcctatctctacagctccttggcttcgtcgcgttttactgcacagtaatgctgaccttatgcgtgctgtactattggctttttcccgctcgatag

SEQ ID NO: 12906 - RNA, 804 nt, synthetic construct
  misc_feature 1..804: note = source = /note="Description of Artificial Sequence: Synthetic coding sequence"
  source 1..804: mol_type = other RNA
atgggaccagaagcactatcgagcctgctgctgttgttactagtcgccagtggtgatgccgatatgaagggccatttcgatccagcaaagtgcaggtatgcactgggtatgcaggacagaacaatcccagactcagatattagcgcctcttcctcttggtcagatagcacggcggccaggcactcccggcttgagtctagtgacggcgatggggcttggtgtccagccggctcagtgtttccgaaagaggaggaatacctgcaagtggaccttcagagacttcatttggtcgcgctggtaggaacccaaggcagacacgcagggggtttggggaaagagttctcaagaagctacagattaagatattcccgcgatggaaggcgatggatgggttggaaggacaggtggggccaggaggttatctctgggaacgaagatccagaaggggtcgtcctgaaggacctgggcccacctatggtagcaagactggtgcgcttctatccccgcgccgatagagtaatgagtgtgtgcctaagagttgaactttatggatgtctgtggcgggatgggctactatcttacacagcaccggtcggccagaccatgtacctaagcgaggccgtgtatttgaatgactctacctatgacggccacactgttgggggcctgcaatatgggggcttggggcagctggcagacggagtcgttggcttggacgacttccgcaagagtcaggaactgcgtgtgtggcccgggtatgactacgtggggtggtctaaccattccttcagctccggctactag

SEQ ID NO: 12907 - RNA, 345 nt, synthetic construct
  misc_feature 1..345: note = source = /note="Description of Artificial Sequence: Synthetic coding sequence"
  source 1..345: mol_type = other RNA
atggcacccaagaaactctcctgcctaagaagtctcctgttaccattgtccctgactctccttttgccacaggctgacacaagatcttttgtggtcgataggggacatgatcgcttcctcttggacggtgctcctttccgttatgtgtccggcagcctacactatttcagagtgccaagagtcctgtgggcggacaggctcctcaagatgcgatggagcgggcttaatgcaatacagttctatgtaccctggaattaccacgaaccccagcccggtgtgtacaattttaacggtagtcgggatttgatcgccttccttaacgaagccgccctggccaatctgtag

SEQ ID NO: 12908 - RNA, 507 nt, synthetic construct
  misc_feature 1..507: note = source = /note="Description of Artificial Sequence: Synthetic coding sequence"
  source 1..507: mol_type = other RNA
gcaccccgcatggaaatgtttcagggtctcctgctcctgctgctgcttagcatgggaggcacgtgggcttcaaaagaaccccttcgtccgagatgccgaccaatcaacgccacgctcgccgtagaaaaagaaggttgccctgtttgtattaccgtgaataccactatttgcgccggttactgtcccaccatgactcgggttcttcagggggttctgccagctctaccccaggtggtttgtaattaccgtgacgtccgtttcgaatccattcggctcccaggatgtcctagaggagtgaacccggtcgtgtcctacgcagttgcactgtcctgtcaatgtgccctatgtcgaaggtctacaacggattgtgggggccctaaagaccatccattgacatgcgatgatccaagattccaggacagctctagctccaaggcccctccccccagtttgcccagcccttccaggctgccgggtccatccgacacccctatccttcctcagtag

SEQ ID NO: 12909 - RNA, 1203 nt, synthetic construct
  misc_feature 1..1203: note = source = /note="Description of Artificial Sequence: Synthetic coding sequence"
  source 1..1203: mol_type = other RNA
atggagactcaagaacttcggggtgctctggccctgctcctgctgtgctttttcacaagcgcctcccaagacctccaggtgatagatttactgacagtcggcgagagtcgccagatggtggctgtggccgaaaagattcgaacagctcttctgacagcaggcgatatttaccttctgtctactttcaggctgccaccaaagcaagggggcgtgctcttcggactatacagtcgacaggataatactcgatggttggaggcaagcgtggtcgggaagatcaacaaggttactaatgctctccattctatcctgggggaaggcaacgtgcctgaccctaagcatcattacggggttagcgggtttcatgagcaacggtctcattgtagcccgaatccatgcttccggggggttgactgcatggaagtgtacgagtatcccgggtatcgctgcggaccatgcccaccaggtcttcagggaaacggtacacactgtagcgacatcaatgaatgcgcccacgcagacccatgtttccccggttcttcttgtattaacacgatgcccggcttccattgcgaagcttgtccacggggctataaaggcactcaggtgagcggagtgggaatcgactatgcacgggcctcaaaacaggtatgcaatgatatagacgagtgcaatgacggtaataacggcggctgtgacccaaattctatatgtacaaacaccgttggaagctttaagtgcgggccttgtaggctgggatttctagggaatcagtcacagggatgtctacccgcccggacctgccactcgccagctcatagcccatgccacattcacgcacattgcttatttgaaaggaacggtgcggtctcgtgccagtgcaacgtgggatgggccggaaatggcaatgtctgcggaacagacaccgatatcgatggataccctgatcaggcgctcccctgtatggataataacaaacattgtaagcaggataattgccttcttactcctaattctggacaagaggatgcagataacgacggggtgggagatcagtgcgacgacgatgctgacggcgacgggatcaagaatgtcgaggcttccccaatggattggaccattgctttaaagagcccaacacattacagacagaccggtatgcggaccggctgggaaatgcttgctacagccgctctgaaatag

SEQ ID NO: 12910 - RNA, 618 nt, synthetic construct
  misc_feature 1..618: note = source = /note="Description of Artificial Sequence: Synthetic coding sequence"
  source 1..618: mol_type = other RNA
atgatgcgtacgcttattacaacgcatcccctgccattgctcttactaccgcaacagctgttgcagctggtacagttccaagaagtggatacagacttcgacttccccgaagaagataagaaggaagagtttgaggaatgcctggagaagttctttagcacaggccctgcacgaccaccgactaaagaaaaagttaagcgtagggtgcttattgagccgggtatgcctctaaatcatatcgagtactgcaatcacgaaataatgggaaaaaatgtgtattataaacacagatgggtcgctgaacactactttctcctcatgcaatacgatgagcttcagaaaatctgttacaacagatttgtgccctgtaagaacgggattcgaaagtgtaatcgctcaaagggtctagtagaaggagtgtattgtaatttgaccgaagccttcgaaatccctgcttgcaaatatgaatccctgtatcgcaaggggtacgtgctgataacctgcagttggcagaacgaaatgcaaaaacggattcctcataccataaacgatctcgtggaaccccctgaacacagaagttttttgtccgaagatggcgtgttcgtgatctcgccatag

SEQ ID NO: 12911 - RNA, 177 nt, synthetic construct
  misc_feature 1..177: note = source = /note="Description of Artificial Sequence: Synthetic coding sequence"
  source 1..177: mol_type = other RNA
atggacctgctacagtttctcgcatttctgttcgtgctgcttctgtccgggatgggcgctacgggaacacttagaacaagcctcgacccctcactggagatctacaagaaaatgtttgaagtgaaacgcagagaacaactactggccctgaaaaacctggcccaactgaatgactag

SEQ ID NO: 12912 - RNA, 450 nt, synthetic construct
  misc_feature 1..450: note = source = /note="Description of Artificial Sequence: Synthetic coding sequence"
  source 1..450: mol_type = other RNA
atgaaggtcatagccattttgactctcttactgttctgttcccccacccacagcagcttctggcagtttcaaaggcgagtcaagcacataaccgggaggtccgctttcttttcctactacggctacggttgttactgcggattgggtgacaaagggatccccgtggatgataccgacagacactctcccagctctccctccccctatgaaaaattaaaagaattctcatgccagcctgttctgaatagttatcagtttcacatcgtcaatggagccgtggtgtgtggctgcactctcggccctggagcgtcatgtcattgccgcttaaaggcgtgcgaatgcgataagcaaagcgtgcattgtttcaaagagtctctgcccacttatgagaagaacttcaagcagttctcctcacaacctcgctgcggaagacataaaccctggtgctag

SEQ ID NO: 12913 - RNA, 237 nt, synthetic construct
  misc_feature 1..237: note = source = /note="Description of Artificial Sequence: Synthetic coding sequence"
  source 1..237: mol_type = other RNA
atgggctccggcctgcccctggtacttttattgacgcttttaggttcttcacacggcactggccccggcatgacgttgcagctgaaattaaaggagagcttccttaccaactcttcctatgaaagttcatttcttgagcttctcgaaaagctgtgtctgctcctccatcttccatccggcacgtccgttacccttcaccatgcccgatcacagcatcacgtggtatgtaacacgtag

SEQ ID NO: 12914 - RNA, 1461 nt, synthetic construct
  misc_feature 1..1461: note = source = /note="Description of Artificial Sequence: Synthetic coding sequence"
  source 1..1461: mol_type = other RNA
atgatttcaccaagtccttcgcaggaggaacttcagaccacactggaagagaccgatcagtcaactcaggaaccatttaccaccaagatacctagaactacagagcttgctaaaaccacccaggcaccccacagattctatacaactgtgaggcctcgtactagcgataaaccccatatcaggcctgtgctgaataggacaaccacacgaccaacaagaccgaaacccagcgggatgccaagtggcaacggggttggtactggcgtaaaacaggcacctcggccaagtggcgctgatcgcaacgtatctgtagactccacccatccaacaaagaagccaggcacaagaaggcccccccttccccctaggcctacacaccctaggcgaaagcccctgccaccaaataacgtcaccggcaagcctgggagcgcagggatcatcagctcaggacctataacgacacctccccttcggtcaactcctagacctaccggaacacctcttgagagaatcgagacagatattaaacagccaacggttccagcctccggagaagagttggagaacatcaccgactttagctcttcccccactcgcgaaaccgatccattgggcaagcccagattcaaaggacctcatgtgagatatattcagaagccggataatagcccctgtagcattacagacagcgtaaagcggttccctaaagaggaggccacggaaggaaacgccacttcccctccccagaatccacctacaaacttgacagtggttacggtggaaggatgtccgagtttcgtgatacttgattgggaaaaacccctgaatgataccgtgacggagtacgaggttattagccgagaaaacgggagctttagtgggaagaataagagcatacaaatgactaaccagacattcagtactgttgagaatctgaagcccaatacttcatacgaattccaagtaaaaccgaagaatccactgggagagggacctgtgtctaacactgtcgcttttagcactgaatccgccgacccacgcgtgtccgagcctgtgtccgctgggagagatgccatttggactgaaagaccatttaattctgactcttattccgagtgtaaagggaaacaatacgtcaaacgcacatggtacaagaagttcgttggggtgcaactgtgcaattctctgcggtataagatttacctctccgacagtttaacgggcaagttctataacatcggtgatcagagaggccacggtgaagatcattgccagtttgtggatagcttccttgacgggaggacaggtcaacagttaacatcggaccaactgcctatcaaagaggggtatttccgcgcagttagacaggaacccgtccaattcggtgagatcggagggcatacacagattaactacgtgcaatggtacgagtgcggcacgacaataccaggaaagtggtag

SEQ ID NO: 12915 - RNA, 243 nt, synthetic construct
  misc_feature 1..243: note = source = /note="Description of Artificial Sequence: Synthetic coding sequence"
  source 1..243: mol_type = other RNA
tgaaacggccctgttctgtggttcaaggggaccggccctaatagaaagctcatttacaactttaaacaagaacagaatccccgcccccccaagaatagacctgccggacgtgccggaagccgggcccaccatgacgcgcatacgtgcctgtccgccctgcctgagcggaactccaccaattattttgtccagccatgctgctgcctaaggttgctgggtctgactggtctactatcaaagtag

SEQ ID NO: 12916 - RNA, 1341 nt, synthetic construct
  misc_feature 1..1341: note = source = /note="Description of Artificial Sequence: Synthetic coding sequence"
  source 1..1341: mol_type = other RNA
atgctgcaccccgagactagtcctggacgtggacacctgctcgccgttctgctggcgctgctgggaacgacctgggctgaggtgtggccaccacagttacaggagcaagcaccaatggccggcgcccttaatcgcaaagagagcttcctcctgctctcccttcacaataggctcaggagttgggtgcaaccaccagctgcggacatgagaagactggactggtcggatagtctggcccagcttgcccaggcacgggcagcattgtgcggaatccctaccccttcactcgcgtcaggcctgtggagaacactccaggtgggctggaacatgcagctgttacccgctgggctcgcatcgttcgtggaagttgtctccttatggtttgctgaggggcagaggtatagccacgctgcaggtgagtgtgcccggaatgccacctgcacccactatacccagttggtttgggcaacctcatcccaattggggtgtggtaggcacctgtgtagcgctggtcagacagccattgaggccttcgtttgtgcttacagcccgcgaggcaactgggaagtaaatggaaagacgatcatcccatacaaaaaaggtgcgtggtgctcactatgtaccgccagtgtaagcgggtgcttcaaagcctgggaccatgcaggaggtttatgtgaagtgccgaggaacccttgccggatgtcgtgtcagaaccacgggaggctcaacatatccacctgccattgccactgtccacctggatatactggaagatactgccaagtaaggtgttctctgcaatgtgtgcatggccgtttcagggaagaagagtgcagttgcgtctgtgatatcgggtacggaggagctcagtgtgctacaaaagtgcatttccctttccatacctgtgacttaagaatcgacggtgactgttttatggtctcctccgaggccgatacgtactatcgagcgaggatgaaatgtcagcgaaaaggaggcgtcctcgctcaaatcaagagccagaaggtgcaggacatactagctttttatctcggaaggttagagacaacaaacgaagttattgactccgattttgagactaggaatttttggataggactgacttacaagaccgcaaaggactcattcaggtgggcaacgggcgagcaccaggcattcacctcattcgcttttggccaacccgataaccacggattcggaaattgtgtcgagctgcaggcctcagcagcttttaattggaacgatcagcgatgtaaaacaaggaaccggtacatttgtcagtttgcccaagaacatatctcacggtgggggcctgggagttag

SEQ ID NO: 12917 - RNA, 432 nt, synthetic construct
  misc_feature 1..432: note = source = /note="Description of Artificial Sequence: Synthetic coding sequence"
  source 1..432: mol_type = other RNA
atgcaggctgcttgctggtacgttctgtttcttctccaacctacggtctatctagtcacctgtgctaacttgacaaatgggggtaagtctgaacttctgaagtccgggtcttctaagagcacgctcaagcacatttggacggaatcttccaaagatctgtcaataagtcgactgctaagccagacctttcgtggcaaagaaaacgataccgaccttgatcttcgctatgacactcccgaaccttactcagaacaagatctatgggactggctccgaaactcaactgacttgcaagaacctagaccaagggctaaacgcaggccaattgtgaagacaggtaagtttaaaaagatgtttggctggggagacttccactctaatattaaaacagtgaagctcaaccttctgatcactgggaaaattgtggactag

SEQ ID NO: 12918 - RNA, 783 nt, synthetic construct
  misc_feature 1..783: note = source = /note="Description of Artificial Sequence: Synthetic coding sequence"
  source 1..783: mol_type = other RNA
atgcagggagaaccattcgcatgcttgacccaccaggagcctcttcccaagatgttcaagctgttaagccgggcgtacgccgacgtgcatcctatgatgatggaccggtctgaaaataggtgtggcggaaattttctgaaaaggggctctatcataaacggcgccgactggtattcttttactgggggaatgagtgattttaactacctgcatacaaattgctttgagattactgttgaactgggttgcgtaaagtttccgcctgaagaagccctttacatactttggcagcacaataaagaaagcttactcaatttcgttgagaccgtgcataggggaatcaagggagtggtgaccgacaagttcggcaaacccgtgaagaatgcccgaattagcgttaagggcatcagacacgatatcactactgctccagacggcgactattggcgcctcctgcctcccgggatccatatcgtgattgcccaggctcctggatatgcaaaagtgattaagaaggtgatcatccccgctcggatgaaaagggctggtcgggtcgatttcatcctgcaacctctcggaatgggcccaaagaacttcatacacggtctccggagaacaggccctcacgatcctcttggtggtgccagctccctgggcgaagctacagaaccggaccccctgagagctcgccgccagccctccgcggatggaagcaagccatggtggtggtcctattttacttctttgtctacccacagacctcggtggctcttgaagtactag

SEQ ID NO: 12919 - RNA, 882 nt, synthetic construct
  misc_feature 1..882: note = source = /note="Description of Artificial Sequence: Synthetic coding sequence"
  source 1..882: mol_type = other RNA
atgtcaagcgggggaggctctagggggctattagcatggctcctcctcttgcagccatggccaggccaaaattgggcaggaatggcagctccacgcttgcccagtcccctgctatctgaggaaggcggcgagaaccctgaagcatcacccgcccccggcccagaggcggggcctccccttaatctcttcacttccttcccgggagacagcttgctctgtggccggacacctttacgaatcgttggcggtgtggatgccgaggaaggtcggtggccctggcaagtgtcagtgagaaccaaaggtcggcatatatgcggaggtaccctagtgactgccacatgggtgctgactgccggtcattgcatttcaagtagatttcactattccgtcaagatgggcgatcgcagtgtgtacaatgaaaacacctcagtggtcgtgagcgtgcagagagcttttgtccaccccaagttctccaccgtcaccacaatccgcaacgacctggcactactgcagctgcagcaccccgtgaattttacttctaacatacagcccatctgcataccccaagagaattttcaagtagagggcaggacgcggtgttgggtcactgggtgggggaagacacccgagagggagaagctcgcttccgagatcctgcaggatgtggatcagtatattatgtgctacgaagagtgtaataaaatcatccagaaggccctgtcttcaaccaaggacgtcattataaaaggaatggtgtgtggctataaagaacaaggtaaggactcatgccagggtgactccggggggagattggcttgtgaatataacgacacatgggtgcaggttggcattgtgagttggggaattgggtgcggaaggtag

SEQ ID NO: 12920 - RNA, 870 nt, synthetic construct
  misc_feature 1..870: note = source = /note="Description of Artificial Sequence: Synthetic coding sequence"
  source 1..870: mol_type = other RNA
atgtttgtgttactatacgtcacctcctttgccatctgcgctagtggacagccccgcggaaatcagctcaagggcgaaaactactccccccgctatatttgttccattccagggctgccgggccctcctgggccacccggtgccaacggctctccaggaccccacggaaggatcgggctgcccgggagggacggtcgtgacggacgtaagggcgagaaaggtgagaagggaactgcaggtctacgcggcaagaccggaccactagggctcgcaggcgaaaagggcgatcagggcgagactggtaaaaaaggaccaattggtcctgagggagagaagggcgaagtgggaccaataggccctccaggtccaaagggggatcgcggcgagcaaggagacccaggcctcccgggagtttgtcggtgcggcagcatcgtgctaaagagtgcttttagcgtcggcatcacaacaagctatcctgaggagagactgcctatcatttttaacaaggtcttgtttaacgagggtgagcactacaacccagctactggtaaatttatctgcgcattcccgggcatctactatttcagttacgacatcaccctggctaataaacatttggcaatcggactcgttcacaacgggcaatacaggatcaaaaccttcgatgctaatacggggaaccacgacgtggcctctgggtccacagtgatatacctgcagccagaggacgaggtgtggttggagatatttttcactgatcagaatggactcttctcagaccctggatgggcagattccctgttttctggattcttgctttatgtcgacactgactacctggattcgatatccgaagacgacgagttgtag

SEQ ID NO: 12921 - RNA, 2742 nt, synthetic construct
  misc_feature 1..2742: note = source = /note="Description of Artificial Sequence: Synthetic coding sequence"
  source 1..2742: mol_type = other RNA
atggggcctgaggccctgtcctcattactccttctgctcctggtggcaagcggcgatgccgacatgaagggccactttgatcctgccaaatgtcgctacgcccttggaatgcaggatcggacaattccagactctgacataagcgcctcaagtagctggtctgacagcacagccgcccgccattctaggcttgaatccagtgacggcgacggcgcctggtgcccggccggcagtgtgttcccgaaggaagaagagtatttacaggtggacttacagaggctacatctggtagctctcgttggtacccagggacgacacgctggcggactcgggaaagagttcagccgcagctatcgcctacggtactctagagatgggaggcgctggatgggatggaaagacaggtggggtcaagaagtaataagcggaaacgaagatcccgaaggagttgtcctgaaagatctcggtcctccgatggttgcacggttagtgagattctatcctagagcagacagagtcatgtctgtatgtctacgcgtagagctctacggctgtctttggcgcgacggccttctgtcttacactgcgccagtgggacaaactatgtacctcagcgaggcagtgtatctgaatgacagtacttatgacggccacaccgtaggaggtctgcagtatggaggactggggcagttggctgatggagtggtgggccttgacgactttaggaagagccaggagcttagggtctggccgggctacgactacgttgggtggagtaatcactccttcagtagtggctacgtcgaaatggagttcgaatttgatcgactgcgagcctttcaggcaatgcaggtgcactgcaataacatgcataccttgggcgcccgcttaccagggggggttgaatgcagatttaggagaggcccagcaatggcgtgggagggcgagccaatgcggcataatctggggggcaacttgggcgatccccgtgctagagcggtgtctgtgcctttaggtggtcgcgtagcgagattcctacaatgccggttcctcttcgctggtccttggttgctcttcagtgaaatatcctttatatccgacgttgtgaacaattcctcccccgcgctaggtggaacgttcccacccgcgccatggtggccgcctggacccccccccactaacttttcctcgctggaacttgaaccccgaggccagcagcccgtagcaaaggcggaaggcagcccaaccgccatcctcatcggatgcctagtggctatcatcctccttctgttactcataattgcactgatgttgtggcggctgcactggcggcgactgctctctaaggccgagagacgggtattggaggaggaactgaccgttcatctgtccgtgccaggtgacacaatactaatcaataataggcctggccccagagaaccccccccctatcaagaaccgagaccacgcgggaatccccctcatagcgcaccctgcgtgccgaacggatctgccctgctgctttctaaccccgcctatcgcctgttactcgccacttacgcccggccaccccgcggacccggaccaccaacacccgcttgggccaaaccaacaaatacacaggcctactccggtgactatatggaacccgaaaagcctggcgcccctctgctgccccccccgccccagaacagcgtgccccattacgctgaagccgacatcgtgactctgcagggggtaacaggggggaacacctacgcagtacccgcccttccacccggggcggtcggggacggccctccacgggtcgatttccctcggtcacgcctgcgctttaaggaaaagttgggtgagggccagtttggcgaggtacacctttgtgaagtggacagccctcaagacctggtgtcgttagacttccccctcaatgtccgtaaaggacatcccctgctggtggccgtcaagatcctgcggcctgatgcaacaaaaaacgctcgcaatgattttctgaaagaagtaaagatcatgagcaggctcaaggatccaaatatcatacgactgcttggggtgtgtgtccaggacgacccgttgtgcatgattacggattacatggaaaacggcgacctgaatcaattcctgtccgcccatcaactcgaggacaaagcagctgagggtgctcctggcgatggtcaagctgctcagggacctacaatttcatacccgatgctgctgcatgttgctgcccagattgcctccgggatgcggtacctggctactttgaactttgtgcatagagatcttgcaacacgcaactgtctggttggcgagaattttacaatcaagattgctgactttggcatgtcaagaaacctctacgccggtgactactacagagtacaaggtcgagcagtgctgcccatccggtggatggcttgggaatgcatactgatgggcaaatttaccacggccagtgacgtctgggccttcggcgtgaccttgtgggaggtcctgatgttgtgccgggcccaacccttcggacaactcaccgacgaacaagtgatcgagaatgctggagaatttttccgggaccagggtcggcaagtctatttatccaggccccctgcatgccctcagggcctgtacgagttgatgctccggtgctggagtagagaaagcgagcaacgcccccccttcagtcagctgcacaggtttctcgcagaagacgctttgaatactgtttag

SEQ ID NO: 12922 - RNA, 1089 nt, synthetic construct
  misc_feature 1..1089: note = source = /note="Description of Artificial Sequence: Synthetic coding sequence"
  source 1..1089: mol_type = other RNA
atgcgtaccttgtttaatctcctttggctcgcccttgcttgttcgcctgttcataccacactgagcaaaagtgacgccaagaaggcagcatccaaaactctgttagagaaatcacaattcagtgacaaaccggtgcaagataggggactcgtggttacagatctgaaggctgaatccgtagtgctggagcatcgttcatactgcagtgccaaagccagggacagacatttcgctggcgacgtgctgggttacgtaactccttggaattctcacgggtatgacgtgactaaagtcttcggatcaaagtttactcagatatcacccgtttggctgcagttgaaacgccgcggtcgcgagatgttcgaggtcacaggcctgcacgatgtcgatcaagggtggatgagagccgtacgaaaacatgctaaaggcctccatatagtaccacgcctgctcttcgaagattggacgtacgatgactttcgcaacgtgcttgacagtgaagatgagatcgaggagctgagcaaaaccgtggttcaggtggcaaagaatcaacactttgacggctttgtggtggaagtttggaatcagctgctcagccaaaaaagagtaaccgatcagttggggatgttcactcacaaggagtttgaacagctggcccccgttctcgacggtttctctctcatgacttacgattattctaccgcgcaccagccaggcccaaacgcacctctgagctgggtgcgggcatgcgtgcaggttttagaccctaaaagtaagtggcgatcaaagattctgctcggcctcaacttctacggcatggactacgcaacttctaaagatgcaagggaaccagttgtgggcgcccggtatatacagacactgaaggatcatcggccacgaatggtgtgggattcacaggcctcagaacacttctttgaatataaaaaaagtcggtccgggcggcacgtcgtcttttatcccaccctgaagtcactccaggttaggctggaactcgctcgcgaactcggcgttggtgtgagcatctgggaactcggccaaggcttggactacttctatgatttattgtag

SEQ ID NO: 12923 - RNA, 1350 nt, synthetic construct
  misc_feature 1..1350: note = source = /note="Description of Artificial Sequence: Synthetic coding sequence"
  source 1..1350: mol_type = other RNA
atgaagttccagggaccgctggcttgcttgctgttagccctgtgcttgggatcaggcgaggcaggacccctgcagtcgggggaagagtcaacaggtaccaacataggggaagctcttggccacggattaggcgacgctttgtccgagggagttgggaaggctattggcaaagaggccggcggcgccgcaggatccaaagtgagtgaagctttaggtcagggtacacgcgaagctgtgggcactggcgttcgacaggtgcccggctttggcgttgcagacgctttgggcaatcgcgtcggggaggcagcacacgctctgggcaacactggacacgagattggacgacaggctgaggacgtcatcagacacggggccgacgcggttagagggtcctggcagggcgtccccggacacaacggagcctgggagacttccggaggccatggcatttttgggtcccagggtggcctaggcggacagggacaaggtaatcccggagggctgggaactccgtgggtacatggataccctggtaactcagctggtagcttcggtatgaatcctcagggtgccccgtggggacaggggggcaacggtggcccccccaacttcggcactaatacacaaggcgcagttgcccagccaggctatggctctgtgagggcttcaaatcagaatgagggatgcactaatccccctccctccggaagcgggggtgggtcaagcaatagcggtggctcctctactggatcttcaagcggcaaccacggaggcagtgggggcggcaacggccataaaccaggctgcgaaaaaccgggcaacgaggcaagaggttccggtgaatcaggcatccagggccaaggcagttcttggggaagtggaggcggggacgcagttggaggcgtaaatactgtaaatagcgagacgtcccccgggatgttcaattttgacactttctggaagaatttcaaatctaaactcggattcatcaactgggatgctataaataagaaccaagtcccacctcctagtacgcgcgcacttttatattttagtcgactctgggaagattttaagcagaatacacctttcttaaactggaaagctatcatcgaaggtgccgacgccagctccctgcagaaaagagccgggcgagacgatcagcccggggcgggctggcaagaggttgccgctgtgacgtccaagaactacaattacaatcagcatgcgtaccccaccgcatacggggggaaatactccgtcaagacccctgccaaaggaggcgtgtctccctctagcagtgcttcccgggtgcaaccagggctcttacagtgggtgaagttctggtag

SEQ ID NO: 12924 - RNA, 735 nt, synthetic construct
  misc_feature 1..735: note = source = /note="Description of Artificial Sequence: Synthetic coding sequence"
  source 1..735: mol_type = other RNA
atgtggggagccccactcccccgccgaccagtatgggatgtgaggtcagcttcagccggtcctcagccctgccttggaggcaaaatgaaacttaatcttgtccagatattcttcatgctgctgatgcttttgcttggcttaggcatgggtctgggcctgggactccacatggctaccgccgttctcgaagaatcagaccaaccacttaatgagttctggtcatctgatagtcaagataaagccgaagctacagaggaaggtgacgggacacagaccactgagacactggtcttgtcaaataaggaagtggtgcagcccggttggccagaagatcccatcctaggggaggacgaagtgggcgggaacaagatgcttagagcctccgctctcttccagagcaataaagactatctacggctggatcagacagaccgagagtgcaacgacatgatggcccacaagatgaaggagcccagtcaatcatgcatagcgcagtatgcttttattcatgaggaccttaacactgtgaaagccgtatgcaactctcccgtaatagcctgcgagttaaaaggcgggaaatgccacaagtcctccagaccctttgacctgaccctctgtgagctgtcccagcccgaccaggtcacacctaattgcaattatctgacttccgtaataaaaaagcacatcattatcacgtgtaacgatatgaaacggcagcttcctacaggacagtag

SEQ ID NO: 12925 - RNA, 1728 nt, synthetic construct
  misc_feature 1..1728: note = source = /note="Description of Artificial Sequence: Synthetic coding sequence"
  source 1..1728: mol_type = other RNA
atggcgtcctggctacggagaaaattgcgcgggaagcgccgaccagtgatagcattttgtctcctgatgattctttcagccatggcagttacaagattccctccccagagaccatcagctggcccggatccaggccccatggagccgcaaggagtgacaggcgccccagctacccatattcgacaggctctgtcctcttcaaggcgccagcgtgctaggaacatgggcttttggcgcagcagagctctgccccgaaatagcattcttgtatgtgctgaagaacaagggcatcgtgcaagagtcgacagatccagggagagccccggcggggacctccgccacccaggaagggttcgtagggatatcaccctaagtggtcatccccgcctttctactcaacacgtggtgctcttacgcgaggacgaagtcggggaccccggaacgaaggacttagggcacccacagcacggttcccctatccaggaaacccaaagcgaggtggtcactttggtttcacccttgccaggatcggatatggcggccctccctgcttggcgggctacatcagggctcaccctgtggcctcatacggccgaaggccgtgaccttcttggcgccgaaaatagggcccttacaggaggccagcaggccgaggatcctacactcgctagtggagctcaccaatggcccgggtctgtcgagaagctccagggctcagtttggtgtgacgctgagaccttactaagctcatcaaggactggcggacaggctccaccctggttgaccgatcacgatgtgcagatgctacgtttgctagcacagggggaagtggtggacaaggcacgggttcctgcacatggccaagtgctgcaggtgggcttctcgaccgaggccgctctccaagatctcagttcaccccgcctgagtcaattgtgtagtcagggcctgtgtggcctcataaagcggccaggcgacttaccagaggtgttatctttccacgtggaccgtgtgctgggcctgagacgttctcttcctgctgtggctcggaggtttcactcccccctgttaccatataggtatactgacggtggtgctaggccagttatctggtgggcacccgatgtgcagcatctgagcgaccctgatgaggaccagaactctcttgcgctcggctggttgcagtatcaggccctgctggcgcattcatgtaattggcccggtcaagcaccctgccccggcatacaccacactgagtgggcccggctggccctcttcgacttcctactgcaagtccacgatcgcctcgatcgttactgctgcggttttgaacccgagccttctgacccgtgcgtggaggagcggttgagggagaagtgtcagaatcctgcagaacttagactggtccacatcctcgttagaagcagcgacccctcacacctggtctatattgacaacgccggcaatttgcagcaccctgaggataagctgaacttccgactgcttgagggaatcgacggctttccagagagcgcggtcaaagtgttggcaagtgggtgcctccagaatatgctacttaagagcttgcagatggacccggtattctgggaaagtcagggaggtgctcagggccttaagcaggtcctgcagaccttagagcaacgcggtcaggtgcttcttgggcacatccaaaaacacaacctgacactctttcgcgatgaagatccttag

SEQ ID NO: 12926 - RNA, 390 nt, synthetic construct
  misc_feature 1..390: note = source = /note="Description of Artificial Sequence: Synthetic coding sequence"
  source 1..390: mol_type = other RNA
atggctgctggttcagcgcccatgcagctgcatttacgagccactattcgcatgaaggatggactttgtgttccaaggaaatggatctatcacctgaccgaaggcagtaccgatctgcgcactgagggccgtccagatatgaaaacagagctgttctcgagctcgtgcccaggcgggatcatgctcaacgaaacaggacaggggtatcagcgcttcctgctctataatcgcagcccgcaccccccggagaagtgtgtggaagaattcaaatctttaaccagctgtctagatagtaaggcattcctcctgacacctaggaaccaaggaaaaggactgaaatctcataagactgggctggggctgaccaagtcgagtggcgtgacaggttag

SEQ ID NO: 12927 - RNA, 567 nt, synthetic construct
  misc_feature 1..567: note = source = /note="Description of Artificial Sequence: Synthetic coding sequence"
  source 1..567: mol_type = other RNA
atgtttcaccaaatctgggctgcgctgctgtacttctacggtattatacttaacagcatctaccaatgtccagaacattcccaattgaccaccctgggagtagatgggaaggaattccctgaggttcatcttggtcagtggtattttatcgcaggggctgcccctacgaaggaggagttggccacttttgacccagtggacaacatcgtatttaacatggccgccggcagtgcaccaatgcaactccaccttcgagctaccattcgaatgaaagacggactgtgcgttccacggaaatggatttaccatctgacagaagggtctacagatctgcggacggaaggcagacccgacatgaagacagagctgttctcatcctcttgccccggaggcatcatgctcaacgagacaggacagggctaccagcgctttctgctgtacaatcggtctccgcatccccctgaaaagtgcgtcgaggagttcaaaagcctcacgagctgtcttgactctaaggcatttttactcaccccacgcaaccaagaggcttgcgaattatccaacaactag

SEQ ID NO: 12928 - RNA, 2676 nt, synthetic construct
  misc_feature 1..2676: note = source = /note="Description of Artificial Sequence: Synthetic coding sequence"
  source 1..2676: mol_type = other RNA
atgttaccaaccgaggtgccacagtcgcaccccggaccatccgctttgctattgctacagctgttgctcccacccacatctgcttttttcccaaacatctggtctctcctcgcagcccccggcagcatcacccatcaagatttaaccgaggaagcagccctgaacgtgaccctacagctgtttctagagcaacccccacctggtcgacctcctttgcgcctggaggattttctgggcaggacattgcttgctgatgatctgttcgcagcttactttgggccgggctcttcacgccggttccgggccgcgttgggagaggtgtcacgcgcaaacgctgcacaggactttttaccgacgtcaagaaatgacccagacctgcacttcgatgctgagcgcctgggacagggaagggcgcggctcgtcggggctctgagggagaccgttgtcgcggccagagccctggatcatactctggctagacaaagactgggagccgcactgcatgccttacaggacttttactcacactcaaattgggtggaactgggcgagcagcagcctcatccacacctgttatggccgaggcaggaattgcagaaccttgcacaggtagctgatcccacatgcagcgactgtgaagagctgagctgtccccgcaattggctcgggtttacccttcttacaagcggctactttggcacccaccccccgaaacctcctggcaagtgctcgcatggcgggcattttgataggagtagctctcaaccgccgcgaggtggtatcaataaagactctacatccccaggattctccccccatcatatgctgcacctccaagccgccaagctggctctcttggcctctatccaggcgttctccctactaaggtcccgcctgggcgacagagatttttcaaggttgttggacattacaccagcaagttccctgagctttgtactggatacaactgggagcatgggagaggaaatcaatgccgcaaagattcaggcacggcatttggtagaacagcgccgcggctcccctatggaacccgtgcactacgtcctggtccctttccacgatcccggctttggaccagtgtttactacctccgatcctgatagcttctggcaacagctgaatgagatccacgccctgggaggcggcgacgagcccgagatgtgcctgagtgccttacagctggctctactgcacacaccgcctctgtccgacatatttgttttcaccgacgccagccccaaggatgcattcctgactaaccaagtagaaagcctgacacaggagcgtcgttgccgcgtgacctttcttgttaccgaagacacgagcagagtccaggggagagcacggcgggagattctgtcaccattaagatttgaaccatacaaggccgtggccctggcttcagggggggaagtgattttcacaaaggatcagcacattagagatgtggccgcaatagtaggagagtctatggccgccttggtgactctgcccctggaccctcccgtggtagttcctgggcagccattggtgttctctgtggatgggctcctccagaaaatcactgtccgcatacatggcgacatcagctccttttggataaagaatcctgctggggttagccagggacaggaggaagggggaggaccactcggccacacgcgacgctttggccagttctggatggtcactatggacgacccaccacagaccggaacgtgggaaatccaggtgaccgccgaagatacccccggcgtccgggtgcaggcccaaacatctctcgatttcctcttccactttggcattcccatggaagatggtccacatccaggactgtatcctcttacccaacccgtcgctggattacagactcagctgctggtagaagtcaccggtctcgggtctcgcgccaatcccggcgatccccagccacatttttcacacgtcattctacggggagtccctgagggcgccgagctggggcaggtgcctcttgaacccgtaggaccccccgagaggggtcttctggctgcttctctaagccctacgttactgtcaacgccccgcccctttagtctggaactgatcggccaggatgccgctgggagacggctgcatcgcgctgcccctcaacctagcacagtggtcccagttctgctggaactctcaggcccttccggctttctcgccccaggttcgaaggtgccactgtccctacggattgcctcctttagcggtccccaagatctcgacttgaggacatttgtgaacccatcgttctctctgacctcaaacctctctagagcacatctcgagctgaatgagtccgcatggggcaggttgtggctggaggtgcccgacagtgccgcccctgattccgttgtgatggtaactgttacggcgggcggtagagaggctaaccccgtcccccctacacacgcgttcctgcgcctgctggtgtccgctcccgcgcctcaggatcgccacactacacccacaggatccagcgatccaatcttaacaacagctacacctgccttttctccctttacgttggtgactcagggaagggctggggcaggactggcagcggggtccccctggtggggcaccgtgggtggagtgcttctactactcgggcttgcatcatggtag

SEQ ID NO: 12929 - RNA, 2742 nt, synthetic construct
  misc_feature 1..2742: note = source = /note="Description of Artificial Sequence: Synthetic coding sequence"
  source 1..2742: mol_type = other RNA
atgggcccagaagcactaagctccctgttgctgctcttactggtggcaagcggcgacgcagatatgaaaggccatttcgatcctgctaaatgccggtacgccctgggcatgcaggaccgtaccatcccagattcagacataagtgcctctagttcttggagtgactcaaccgctgcaaggcactcccgattggagtcctcagatggcgatggggcctggtgtccagcaggctcggtgttccccaaagaggaggagtatctccaggtcgatctccagcgacttcacctggtcgcattggttggtacccagggcaggcacgcaggcgggctgggaaaagagttctctcgaagttacaggctcaggtactcaagagatggacgccggtggatgggatggaaggataggtggggtcaggaggtgataagcggtaacgaggatcccgagggagtggtgctcaaggatctgggtccacccatggtggcacggctagtgcgattttaccctagagctgaccgcgtaatgtctgtgtgtctgagggttgaattgtacggctgcctttggagagatggtctcttgagttacacagcccctgtgggccaaacaatgtatctgagtgaggcagtgtacctgaacgattcaacatatgatggacataccgtgggggggctccagtacggcggactgggccagctggcagacggagtggtgggtctcgatgacttccgaaaatcacaggaattgcgggtgtggccaggctacgactatgtgggttggtctaatcatagtttctcttccggttacgtggaaatggaatttgagtttgacaggctccgagcctttcaagctatgcaggtgcattgtaacaacatgcacacactgggtgctaggctgccaggcggagtagagtgccgcttccgcagaggacccgcaatggcatgggagggagagcccatgcggcacaaccttggcggcaatctaggcgaccctagagccagggcggtctcagtccctctgggaggtagggtggcccgctttctgcagtgtaggtttctgttcgccgggccgtggcttctcttctccgaaatctcctttatctcagacgttgtcaacaatagtagtcccgctctcgggggaacgttcccccccgccccatggtggcctcctggaccaccccctactaatttttcttctctcgagctagaacccagaggacagcagccagtggcaaaggctgaggggtcacctactgcaattttaatcgggtgcctggtggctatcattctgctcctgctgcttatcatcgccctgatgctgtggaggcttcattggcggaggcttttaagcaaagccgaacgcagggtacttgaggaagagctgaccgtgcatttgtctgtgccaggagacacaatccttatcaacaacaggcctggcccaagggaaccaccaccatatcaggagcccagaccaagaggcaatccgccacattcagccccatgtgtcccaaatggttctgcccttctccttagtaatccagcttaccggttacttcttgctacatacgccaggcctccgcggggaccggggcctcctacccctgcatgggccaagccaacaaatacccaagcttactctggcgactatatggagccggagaagcctggagcccccctgctccctcccccaccgcaaaattcagtgccgcactacgctgaggcggatatcgtaacactgcaaggagtcacaggcggaaatacttatgccgttcccgctcttccccctggcgccgtgggcgacggcccgccgagagtggatttccccagatctcgcttgagatttaaggaaaaattaggagagggccaatttggagaggttcatctgtgcgaagtggattctcctcaagacttggtttccctggactttccactgaacgtaaggaagggccaccctcttctggtcgctgtaaagattctgagacccgatgccaccaagaatgcccgtaatgacttcctgaaggaagttaagattatgtctcgactgaaagacccaaacatcattaggttactgggagtctgtgttcaggatgaccctctgtgtatgatcactgactacatggaaaacggcgaccttaatcaattcctctccgctcaccagttagaagataaggcagccgagggcgccccaggagacggtcaggccgcccagggacccacaataagctaccccatgctcctgcacgtggccgcacagattgcttccggaatgcgatatctggccaccttgaacttcgtccacagagatctcgcaactagaaattgtctggtgggagagaactttaccatcaagattgctgatttcggtatgtcacggaacctgtacgcaggcgactattaccgcgtgcagggacgggccgtcctgccaatacgctggatggcatgggagtgcatactaatgggcaaatttaccactgccagtgatgtctgggcatttggagtgaccctgtgggaggtgctgatgctatgcagggcacaaccattcggacagctgacggatgagcaggtaattgaaaacgcaggcgaatttttccgcgaccaaggacgacaggtatatctttcccgaccccccgcctgcccccagggactctacgaactcatgcttagatgctggagccgagagagtgagcagaggcccccctttagtcaactccataggttcttggccgaggatgccctgaatacagtgtag

SEQ ID NO: 12930 - RNA, 453 nt, synthetic construct
  misc_feature 1..453: note = source = /note="Description of Artificial Sequence: Synthetic coding sequence"
  source 1..453: mol_type = other RNA
atgcgctttatggctggccctgccggttctcagagtcttggacccctctgttttcactctagcccccaggccttatacacggtgctcctaatcgtccttgtgatgatgtctcttgtctttggaaaatttgttcctgtcaactgggaaccccctcagcctctcccatttccaaaatacctccgctgctataggtgcctcctggaaactaaggaactgggttgtctccttgggtctgatatctgcttgacccctgctggtagctcttgcataaccctgcataaaaagaattcttcggggagtgacgtgatggtaagcgactgccggtctaaggaacagatgagtgattgtagtaacacccgaacttcacctgtctctggattctggatcttttcacagtattgttttttggacttctgtaatgacccccagaatagaggactctatacaccatag

SEQ ID NO: 12931 - RNA, 192 nt, synthetic construct
  misc_feature 1..192: note = source = /note="Description of Artificial Sequence: Synthetic coding sequence"
  source 1..192: mol_type = other RNA
atggggcccgaagccctgtcctctttgttgctgctgttattagttgcttccggcgatgcggatatgaagggccactttgatccagccaagtgccgatacgcccttggtatgcaagacagaacaattccggacagtgatatttccgcctcttcttcatggtctgatagtactgcagccaggcattccagatag

SEQ ID NO: 12932 - RNA, 1212 nt, synthetic construct
  misc_feature 1..1212: note = source = /note="Description of Artificial Sequence: Synthetic coding sequence"
  source 1..1212: mol_type = other RNA
atgcaggggactccaggtggcgggactagacccggacctagccctgtggatcgacgcactctgctcgtttttagcttcatactggcagctgccttaggacaaatgaattttaccggtgatcaagtgctgagagtgctggcaaaagatgagaagcaactatccctcctcggagatctggaagggctgaagccgcaaaaggtggacttttggcgaggtcccgcgaggccgtccctcccagtcgatatgagggtgcccttttccgagctgaaggatatcaaggcttatctcgagtcacacggtctcgcatattccataatgatcaaggatattcaggtcctgctcgatgaggagagacaggcaatggcaaagagcagacgccttgagcggtcaacaaactcgttttcttacagcagttaccataccctcgaagaaatatattcctggattgacaattttgtcatggaacattccgacatcgtctcaaagattcaaattgggaatagttttgaaaaccagagtatcctagtgctcaaatttagtacaggtggctctaggcaccctgctatctggatcgacacagggattcattcaagggaatggatcacccatgcgaccggaatatggaccgccaataagatcgtaagcgactacggcaaggaccgcgtacttacagatatactaaacgctatggatattttcatagagcttgtgactaatcccgacggcttcgccttcactcatagcatgaatagactgtggcggaaaaacaaaagcattcggcctggaattttctgcattggcgtggatctcaaccgcaactggaagagcggctttggcggtaacggctcaaattctaacccttgttccgagacataccacggtccatcaccccagtccgaaccagaagtggcagctatcgtaaattttatcacggcccacggaaattttaaggcactcatttcaattcacagctatagccagatgctcatgtacccctacggacgcctgcttgagccggtgtccaatcagcgcgagcttatgtggcctgtggggtctccctccaccgggcctatgactgtggcatctagcactccctctgccctaagttcaggcactctcgggtcaatggcgtcttgttgccgtccacatcggagttcacctcgcccaagacgaaggggctggaggtttggcccttcgtggtccaccccttag

SEQ ID NO: 12933 - RNA, 1542 nt, synthetic construct
  misc_feature 1..1542: note = source = /note="Description of Artificial Sequence: Synthetic coding sequence"
  source 1..1542: mol_type = other RNA
atggctccagccagaactatggcccgcgcccgtctcgcacccgcagggataccagccgttgccctgtggctgctgtgcacattgggcttgcagggcacccaggccggacctccccccgcccctccaggactgccagccggggccgactgccttaatagctttacagctggggtgcccggctttgtgctggatacaaacgcaagcgtgtccaatggcgcaaccttcctggagtcgcctacagtccgcagaggctgggactgcgtgcgggcatgctgtacaacacagaactgtaacctggcactggtggagctccagccagacagaggtgaagacgcaatcgctgcctgtttcctgattaactgtctctatgaacagaattttgtgtgtaaatttgcacctagagagggattcatcaactacttaacccgcgaggtgtaccgctcttatagacagcttagaacccagggattcggaggaagcgggatccctaaagcctgggccggcattgatctgaaagtacaacctcaggagcctctagtgcttaaagacgtcgaaaatacagactggcggcttcttagaggcgatactgatgtcagggttgagaggaaagatcctaatcaggtagagctatggggtctgaaggagggtacttacttgttccaactcacagtcacctcgagcgaccatcctgaggatacagcaaacgttactgtaaccgtgttatcaaccaagcaaaccgaagactattgccttgcctccaataaagtaggcaggtgtagaggctcattcccccggtggtactatgaccctaccgaacagatctgtaaatcatttgtttatggcggctgtctaggcaacaaaaataactatttacgagaggaagagtgcatcctcgcctgccggggcgttcaaggcccttctatggaaaggaggcaccctgtttgttcaggtacttgccaaccaacacaattccgctgttctaacggttgttgtatcgactctttcttggagtgtgatgacacaccgaactgccctgatgccagcgatgaggctgcctgcgagaaatatacgtctggttttgatgaactgcagcggatccatttccccagcgataaaggccattgtgttgacctgccagataccggactttgcaaggaaagcatcccccggtggtactacaatcctttctcggagcattgcgctaggtttacttacgggggatgttatggcaataaaaacaactttgaggaggaacaacagtgtctagagtcatgcagaggaatctcgaagaaggatgtgtttggtttgcggcgcgaaatacccataccctctacgggctccgtggagatggccgttgctgtctttctggttatatgcatcgtcgtggtcgtagccattcttggttattgctttttcaaaaatcagagaaaggacttccacggacatcaccaccatccgcctccaaccccagctagcagtacagtgagcacaacagaagatactgagcacctggtttataaccacacgacaagaccactttag

SEQ ID NO: 12934 - RNA, 798 nt, synthetic construct
  misc_feature 1..798: note = source = /note="Description of Artificial Sequence: Synthetic coding sequence"
  source 1..798: mol_type = other RNA
atggccccatggtcccacccatccgctcagcttcaacctgtgggtggcgacgctgtctctccagctctcatggtacttctttgccttggcctgtcactgggcccgcgcactcacgttcaggctggtaatctgagtaaagcaaccctctgggcagagcccgggtccgtgatctcccggggaaattcagtcacaattagatgtcaaggtacgctggaagctcaggagtatcggctggtgaaagaggggtcgcccgaaccctgggatactcaaaatccactagagccaaaaaataaggcacgcttctcaattcccagcatgactgagcaccacgctgggcggtatcgctgctactactattccccagccggctggtctgaaccttccgacccattagagttggtggttacggggttttacaacaaaccaactctgagtgcattaccctcgcccgtggttacttccggcgaaaacgtgaccctgcagtgtggttccagactgaggtttgatcgctttatcttgacagaagaaggcgaccataaattgtcttggactctagattcacagctgacgccatcaggacagtttcaggccctatttccggtcggtcccgtcacaccctcacaccgctggatgctgcgttgctacggctctcgtcgccatattctccaagtttggagtgaacccagtgacctcctggaaataccggtgagcggcgaagaggccactgtattctccagcactatccagggctcgcagacaggttgcggagaactgtatcgtcaggggagcccttgttag

SEQ ID NO: 12935 - RNA, 795 nt, synthetic construct
  misc_feature 1..795: note = source = /note="Description of Artificial Sequence: Synthetic coding sequence"
  source 1..795: mol_type = other RNA
atggaaaaacctatcctgaaaaatcttaacgagatgctttgcccaatcattgcttctgaagtgaaagctctcaatgctaatctgagtaccttagaggtgcttaccaaaattgataactatacactcctcgactattcgcttatatcatctcctgagattacagaaaactatctcgatttaaacctcaagggcgtcttctaccccctcgagaatctgaccgacccaccattctcgccagtgccttttgtgctgcctgagagatcaaatagcatgctttacataggcatcgcagaatatttcttcaagtcggcgtcctttgcccatttcacagccggagtgttcaacgtgaccttaagtacagaggagatcagtaaccattttgtccagaattctcaaggtctcggcaatgtcctgagccgcgtggccagtaccagcgtggggctagtgattctcggtcaaagattggtgtgctctttgtccctcaacaggtttagactggctctcccagaatccaatagatctaatatcgaggtactgcgttttgagaacatactgagcagcatcctgcattttggtgtcttacctcttgcgaacgccaaactccagcaggggttccccctgtcaaatccacacaaattcctgttcgtgaatagcgatatcgaggtcctcgaaggctttcttctcatcagcacggatctcaaatatgaaacctcttccaagcagcagccatcgtttcacgtgtgggaaggactaaatcttatatctcgccaatggcgcggtaagtctgcaccatag

SEQ ID NO: 12936 - RNA, 117 nt, synthetic construct
  misc_feature 1..117: note = source = /note="Description of Artificial Sequence: Synthetic coding sequence"
  source 1..117: mol_type = other RNA
atgaacaagatactgtcctctaccgtttgcttcggactgctaactttactgtctgttctgagcttcctccaatccgtgcatggacgaccctaccttacccaaggcaacgagatatag

SEQ ID NO: 12937 - RNA, 567 nt, synthetic construct
  misc_feature 1..567: note = source = /note="Description of Artificial Sequence: Synthetic coding sequence"
  source 1..567: mol_type = other RNA
atgtttcatcaaatatgggctgccctactttatttctacggcataatccttaattccatataccagtgccccgagcactcacagctgaccacccttggcgtcgatggtaaggaatttcctgaagtccaccttggccagtggtactttatcgctggagcagcccctacgaaagaggaactcgcaacattcgaccccgtggataatattgtgtttaacatggccgctgggtccgcacctatgcagctgcacctgcgcgcgaccattagaatgaaggatggcctgtgtgtgccacgtaaatggatctaccacctgactgaaggttccacagacctgagaacagaaggacgccctgacatgaagactgaactgttttcctcttcttgtcccggaggaattatgttgaacgagaccggccagggctaccagcggtttttgctctacaatagatcccctcaccccccggagaaatgcgtagaagagttcaaatcgctcaccagttgtctggattctaaagctttcctgctaaccccaaggaaccaagaagcctgtgagctgtctaacaactag

SEQ ID NO: 12938 - RNA, 600 nt, synthetic construct
  misc_feature 1..600: note = source = /note="Description of Artificial Sequence: Synthetic coding sequence"
  source 1..600: mol_type = other RNA
atggaaactttcccattactcctcctttcattaggcctggttctagccgaggccagcgagtccaccatgaagataataaaagaggaattcacagacgaggagatgcagtacgatatggccaagagtggacaggaaaaacaaacaatagaaatcttgatgaatcccatccttctggtgaagaatacatctctttccatgagtaaagacgatatgagtagcaccttgctgactttccgatctctgcactacaatgatcctaaagggaattcctcaggaaacgacaaagaatgctgtaatgatatgacggtgtggagaaaggtaagcgaagccaatggctcatgcaaatggtcaaacaacttcatacgatcctccaccgaagtgatgagacgtgtgcatcgggctccgagctgcaaattcgtccagaacccaggcatctcctgctgtgaaagtcttgaacttgaaaacacagtctgccagtttactaccggaaaacaattcccgcgctgccagtaccattcggtgacatctctcgaaaaaattcttaccgttttaaccggccactccctgatgagctggcttgtgtgtggctctaagctgtag

SEQ ID NO: 12939 - RNA, 30 nt, synthetic construct
  misc_feature 1..30: note = source = /note="Description of Artificial Sequence: Synthetic coding sequence"
  source 1..30: mol_type = other RNA
atggccccaaaaaaattgtcctgtctatag

SEQ ID NO: 12940 - RNA, 831 nt, synthetic construct
  misc_feature 1..831: note = source = /note="Description of Artificial Sequence: Synthetic coding sequence"
  source 1..831: mol_type = other RNA
atggccccctccccactgcagcgtcttcactgcggaccaagccctagtccgaggcccactgaggtacccagagggactgtgtctgtgtcctgccggtatctaaagaattccctgcatgtattcgtctctgggggcgctattggaactagctccccagccttgcttgagtgtcaggagggcgtgggcccagctagaccctccttactagttcctccccctcccaggccccggcgactcgatctggctagaacactgccagcagaaagaaccgactcccagtcgctgtatattgtatacatcgcccttcccggtcgtacccctcgcccggctctggccttcgcgttcttgatgccagcatgttgcaaccgaccctcacctagaccttctcctgcccacctcactgcctcttcagttctgcggcggcaacgtcatgtgctggctgcctctgctgcctccccttgtcagtggtctggtctaagggtcgcccacagcctgagacaggtggtgtctctgtgtcctagatgcacgggctcttgtccctttagcggcgcatgtgcttcatcactgccctctcctcttagctgtcctcactcccactctgggtcctggggaacatggtcgcaaggaaggccctgcagttctaccgaggtagctggactggcgctctggcctactgatttcctaagctgtctgctagacgcatccgaactgcagactcaggggtcccacggattctcctttacacccaccggtttttcttcaaaccggaaggttggcgtaggctcttgtcgcgatggagctgggcgaggcgcaatgggaggtctgttctag

SEQ ID NO: 12941 - RNA, 678 nt, synthetic construct
  misc_feature 1..678: note = source = /note="Description of Artificial Sequence: Synthetic coding sequence"
  source 1..678: mol_type = other RNA
tgagccgaccttccatcctgctggggcgcggggccttgttataccggccataaagttggggcgctgagaagagatacagttatctgttgttgtcggcacggggactattccacaccatgtctatttactccaggaaaacccagccggaacccttccccttggaagcgcaccctatggacattgtctgcaccttgggccggtcccgcgggttggacgggcgaggagcagaatgctaccaaaacaggcctcataaccaggagacctcgacccctgcgccgaagaccacaccccgcccctgcttcacctcttccagaaatcatacggggcaacatcccaagaatgcttggaaagttcgtccccgttaattgggaacctccgcagcccttgccctttccaaagtacctccgatgttacaggtgtctccttgagactaaggaactgggatgcctacttggttccgacatttgtctgacaccagcaggctcatcatgtatcactctgcataaaaagaactcttccggatcagatgtcatggtgtctgattgtagaagcaaagaacagatgagcgattgttccaatactaggactagccctgtcagcggcttctggattttcagtcagtactgctttctggacttctgtaatgaccctcaaaatagaggactctacactccctag

SEQ ID NO: 12942 - RNA, 534 nt, synthetic construct
  misc_feature 1..534: note = source = /note="Description of Artificial Sequence: Synthetic coding sequence"
  source 1..534: mol_type = other RNA
atggtccccgccgctggggcgcttctctgggtcctgctccttaacctgggacctcgcgcagccggcgcccagggactaacccagacacctacggaaatgcagagagtgtcactgagattcggtggacccatgactagatcgtaccggtcaacagctaggaccgggttgcctaggaagactaggatcatcctcgaagatgaaaatgatgcaatggctgatgccgaccgcctcgccgggccagccgccgctgaactcctggcagccaccgtgagtacaggcttctcgcggtcctctgcgataaatgaggaggacggatccagcgaagagggcgtagtcattaatgcaggaaaggacagtacatccagagagctcccgtcagcaacccctaatacagccggcagcagcagtaccaggtttatcgcaaactctcaagaacccgaaatcagattaacgagcagcctccctcgatctcccgggcgcagcacggaagacttgcctccctgccatctgctccggatttgtggatggtgttag

SEQ ID NO: 12943 - RNA, 912 nt, synthetic construct
  misc_feature 1..912: note = source = /note="Description of Artificial Sequence: Synthetic coding sequence"
  source 1..912: mol_type = other RNA
atgctccaccccgaaacatcacctgggagaggccatctcctcgctgtattacttgccctgcttggtactgcctgggccgaagtctggcctccacagctgcaagagcaggctccaatggccggggcactcaatcgaaaagagtcctttctacttctttctctccacaatcgcttgcgatcctgggtacagcctcctgcagctgatatgcgtagactggactggtctgactccctggcacaactcgcgcaggcccgagccgccctctgcggaatcccaactccgtctctagcctctggcttgtggaggactctccaggtgggatggaacatgcaattattacccgcaggtttggctagttttgtggaagtcgttagtctgtggttcgctgaaggccaacgctactcccatgctgcaggtgaatgcgcgaggaacgcgacctgtactcattacacccaactggtgtgggccaccagcagtcagctcgggtgcggacgtcatctgtgttccgccggccaggccgccattgaggcctttgtttgcgcatatagcccacgcggaaactgggaggttaacgggaagaccatcgtgccttacaagaagggagcctggtgtagtttgtgtactgcgtccgtgtcaggttgctttaaggcatgggatcacgccggtggattatgcgaggtgcccaggaacccctgtagaatgtcttgccagaatcacggaaggctgaatatcagcacatgccactgtcactgccctccagggtacacagggaggtactgtcaagttcggtgctcactgcagtgcgtgcacggccggttccgggaagaggaatgttcctgtgtgtgcgacatcgggtacggcgagcctagtgtaccacctaggtgcatttttccgagcacccctgtcacatag

SEQ ID NO: 12944 - RNA, 1482 nt, synthetic construct
  misc_feature 1..1482: note = source = /note="Description of Artificial Sequence: Synthetic coding sequence"
  source 1..1482: mol_type = other RNA
tccgaagcagtgtatctgaacgactcaacttacgacggccatactgtcggtggattgcaatatggcggactgggacagctggcagacggggtggtcggcctggatgattttaggaagtcccaggagcttcgagtttggcccggatacgactatgttggatggtctaaccactctttcagctctggctacgtggaaatggagttcgagtttgacagattgcgagcgttccaagccatgcaagtccactgcaacaacatgcacactctcggtgctcgtctcccaggtggggtggagtgcagatttcgcagaggacctgccatggcttgggagggtgaaccaatgaggcataacctcggcgggaacttaggcgatcctagagcccgcgcggtgtccgtgcctctcggaggcagagtggcaagatttctgcagtgccgatttctgtttgccggaccttggctgctgttctcagagatttcgtttatctcggacgtggttaacaatagcagccctgcattgggtgggaccttcccacccgctccttggtggccacccggcccacctcccaccaacttctcttcccttgaattagaaccaaggggacagcaacctgttgcgaaggctgagggttcgccgactgcaatcctgattgggtgtctggtagctattatactactactgttgttgattatcgctttaatgttatggcgtctccactggcgacgcttactttctaaggtgctcgagtctcatccgcgcaccagatctcccggcctggtcgggattcgcccaactcctcttccggtgtcaccgatggcgctgagatgctgttctcccatccagccaactgcaagcttttggcccttgacccccgtgccgctggaggctcgggcaccaccccacccacctgggcccaatccacctaccccccggggcgtcaccggcggcaacacatatgcagtgccagctttaccacctggtgccgtgggtgatggacctcctcgagttgactttcctaggtctagactcagattcaaagagaaattgggtgagggtcagtttggtgaggtgcacctttgcgaagtggactcaccccaggacttagtttcgctggatttcccactgaatgtgcggaagggacaccccctcctggtggctgtgaagatactgcgccccgatgcaacgaaaaatgccaggaacgattttttaaaggaggtaaaaatcatgtccagattaaaagatccgaacatcatcaggctgctcggggtatgcgtgcaagatgatccactgtgtatgatcacagattatatggaaaacggcgatctcaatcagttcctgtcagcccatcaactcgaagacaaagctgcagaaggcgccccaggagacggacaggccgctcaaggaccaaccatctcctatccaatgctgttgcacgtggctgctcagattgcgtctggcatgcgatatttggcaactctgaattag

SEQ ID NO: 12945 - RNA, 807 nt, synthetic construct
  misc_feature 1..807: note = source = /note="Description of Artificial Sequence: Synthetic coding sequence"
  source 1..807: mol_type = other RNA
atgaaacagatactccacccagccttggagacgaccgacccatgctcaactgggttcgtctttcccgctatgaccctttttcctgttttgctttttcttgtcgctgggctgctgccttcctttccggctaacgaagataaggatcccgccttcaccgccctgctgaccacccagacgcaagtccagagggagatcgtcaacaaacataacgaactgcggcgtgctgtgtcaccaccggcgaggaacatgttgaagatggaatggaacaaagaggctgctgccaacgctcagaagtgggccaatcagtgtaactacagacatagcaaccctaaagaccgcatgacctctctaaagtgcggggagaatctttatatgtcgagcgccagtagtagctggtcgcaggctatccagtcttggtttgatgaatacaacgatttcgattttggagtgggcccgaagacaccgaacgcagtagttggccattacactcaggtcgtgtggtatagctcttacttggtcggctgtggaaatgcctattgtcccaaccagaaggttctgaagtactactatgtttgccaatactgcccagccgggaactgggccaacaggctgtacgtgccctatgaacagggagcaccatgtgctagttgccctgacaattgcgacgacggactgtgtactaatggctgtaaatacgaagacctgtattcgaattgcaaaagtctcaagctgaccttaacctgtaaacaccagttggttcgtgacagctgcaaggcatcttgtaactgcagcaactcaatatattag

SEQ ID NO: 12946 - RNA, 372 nt, synthetic construct
  misc_feature 1..372: note = source = /note="Description of Artificial Sequence: Synthetic coding sequence"
  source 1..372: mol_type = other RNA
atgctcccaaaatcgagaagggctttgactatacaggagatagccgctctagcacggtcctctctgcacggtatttcccaggtcgtcaaagatcatgtgaccaaacccaccgccatggcccaaggacgtgtggcccatctcatcgaatggaagggctggtcgaagccatcagactcaccggctgccctggaaagcgcttttagtagctattccgacctgtcagagggtgagcaggaggcccgattcgccgctggcgtggctgaacagttcgcgattgccgaggctaaactgagagcctggagttccgtggatggggaagattcaacggacgacagttatgacgaagatttcgcaggaggcatggatacatag

SEQ ID NO: 12947 - RNA, 726 nt, synthetic construct
  misc_feature 1..726: note = source = /note="Description of Artificial Sequence: Synthetic coding sequence"
  source 1..726: mol_type = other RNA
atgggggccgtgatgggcacattcagttccctgcagaccaagcagagacgcccgtctaaggataaaatagaggatgagcttgagatgacaatggtgtgccatcgcccggaggggctcgaacagctagaggcacaaactaatttcactaaacgggagctgcaggtcctctatcggggcttcaagaacgagtgcccttccggagtggttaatgaagacacttttaaacagatctatgctcagtttttcccacacggtgctctaccgtgcctggagggctctccctgtgttgaattcttgccaccatctccagccttactcttttgcctcgtcgacgccagtacctatgcacactatttgttcaacgccttcgacacaactcagacaggctccgtcaagtttgaggacttcgtgaccgccctatcgattttacttcgcggcactgttcatgagaaactcaggtggacattcaacctgtatgatattaacaaggatggatatatcaataaggaagagatgatggatatcgtaaaagctatttacgacatgatggggaaatacacttacccagtactgaaggaagatactcccaggcagcacgtagacgtgttttttcaaaaaatggataaaaataaggacggaatagtcaccctggacgaatttctagaatcatgtcaagaagatgataacatcatgcgatcactgcaattatttcagaacgtcatgtag

SEQ ID NO: 12948 - RNA, 630 nt, synthetic construct
  misc_feature 1..630: note = source = /note="Description of Artificial Sequence: Synthetic coding sequence"
  source 1..630: mol_type = other RNA
atggggcctgaagccctctcttccctcctactgttgcttcttgtggcttccggagatgccgatatgaaagggcactttgacccagccaaatgtagatacgccctgggaatgcaggaccgcaccattcctgattcagacatttccgctagtagctcctggtccgactctacagctgctaggcactccagactagagagcagtgacggcgacggcgcatggtgcccagccggaagcgttttccccaaggaggaggaatacttgcaagtagacctacagcgactccatttagttgcgctggtgggaactcagggacgacacgccggcggcttaggaaaagagttctccaggtcctataggctgaggtactctagggatgggaggcgttggatgggctggaaggataggtggggacaagaagtgatctcagggaatgaagatcctgaaggggttgtgcttaaggacctcgggccgcccatggttgcaagattggtgaggttctatccacgagctgacagagttatgtcagtatgtttgcgcgtggagttgtatggctgcctgtggcgggatggtctcctctcctatactgcacctgtgggacaaacaatgtatctgagtgaagccgtttattag

SEQ ID NO: 12949 - RNA, 312 nt, synthetic construct
  misc_feature 1..312: note = source = /note="Description of Artificial Sequence: Synthetic coding sequence"
  source 1..312: mol_type = other RNA
atgagacaacgcctgctgcctagcgtcaccagtctcttacttgtggcgctgctgttcccaggttcatctcaggcaaggcacgttaaccactccgcaaccgaagccctgggagagctgagagagagagcacctgggcaagggaccaacggatttcagctccttagacacgctgtgaaacgtgatcttctccctccgagaacacctccttaccaagttcacataagccaccaggaagccaggggaccttcttttaagatttgcgttggattcctaggacctagatgggcgaggggctgctctaccggtaattag

SEQ ID NO: 12950 - RNA, 426 nt, synthetic construct
  misc_feature 1..426: note = source = /note="Description of Artificial Sequence: Synthetic coding sequence"
  source 1..426: mol_type = other RNA
atgaaaaccggattattttttctttgcttgttaggcacagccgcagcaatacccacaaacgcaagactactctcagatcactccaagccgaccgcagagacagtagctccagacaataccgccataccaagcttgcgtgcagaggccgaggaaaatgaaaaagaaactgctgtttctactgaggatgactcccatcacaaagccgaaaaatccagcgtcctgaagtcaaaagaggagtcccacgagcagagcgccgaacaaggaaaatcgagcagtcaggagctaggcctgaaagaccaggaggactctgacggtcacctgtctgttaacctagagtatgcccctacagagggcacactggacatcaaggaggacatgtccgagccccaggaaaagaagctctccgaaaacaccgattttttgtag

SEQ ID NO: 12951 - RNA, 642 nt, synthetic construct
  misc_feature 1..642: note = source = /note="Description of Artificial Sequence: Synthetic coding sequence"
  source 1..642: mol_type = other RNA
atgcgacttgccggtcccttacgcatcgttgtgctagtcgtctccgtgggcgtgacctggatcgtcgtgtcaatcctgctggggggccccggttcaggttttccaagaattcagcagctctttacatcaccggagtcgagtgtgacagccgcgcctagagcaagaaaatacaaatgcggcctcccacagccgtgccccgaagaacaccttgcattccgggtcgttagcggtgcagcaaacgtgatcggacccaagatttgtctcgaggacaaaatgctgatgtctagtgtcaaggacaatgtggggcgtgggctgaacattgccctcgtgaatgacgtaaacgatctgttgaagttcatcagacctctccacgaaggcactctggtgtttgtggcttcttatgatgatcctgccaccaaaatgaacgaggagacacgtaagctatttagcgaactgggaagccgaaacgccaaagagctggcattcagagattcctgggttttcgtgggcgccaagggcgtgcaaaacaaatctccattcgaacaacacgtgaagaactccaagcactctaacaaatatgaagggtggcctgaggcacttgagatggaagggtgtatcccccggagatccactgcaagctag

SEQ ID NO: 12952 - RNA, 2700 nt, synthetic construct
  misc_feature 1..2700: note = source = /note="Description of Artificial Sequence: Synthetic coding sequence"
  source 1..2700: mol_type = other RNA
atgttattacttctgctgctcgctccactgttcttgaggccacctggtgccggcggcgctcagacaccaaacgctacatcagaagggtgccaaattatccaccccccatgggagggcggcatccggtatagaggcttgacccgggatcaggtaaaagctataaatttcctcccagtggactacgagattgaatacgtgtgcagaggagaaagagaagtcgtcggccctaaagttcgtaagtgtctggcaaacggcagttggaccgacatggatacaccgagccgatgtgtaaaccggacacctcattccgagaggcgggccgtgtacattggggcactctttccaatgagcggagggtggccgggtggtcaggcctgccagcctgcggtcgaaatggcactggaagatgtgaacagcaggcgcgatatactgcctgattacgagttgaagctgatccaccacgatagcaaatgcgaccccggacaggccaccaaatatctgtacgagctattgtataatgaccctatcaaaattattttaatgcccggttgttccagtgtttccaccttggtcgcagaggctgcaagaatgtggaacctcattgttttgtcttatggctccagcagccctgcactgagtaaccgtcagcgcttccctactttcttccgcactcatccatctgccacgttgcacaatcctactagggttaagttgttcgaaaagtggggttggaaaaagattgcgacaattcagcagacaaccgaggtatttactagcacactggacgatttggaggaacgcgtcaaggaggccggaattgagatcacatttagacagagcttcttttccgatcctgccgtgccagtgaagaacctgaagcgtcaggatgcccgcatcatcgtcggtctgttctatgaaacggaggcacgaaaagtattctgcgaagtctataaagaaagactattcggaaagaaatacgtttggtttctgataggctggtacgctgacaactggtttaaaatatacgatccatctattaattgcacagtcgatgaaatgacggaggctgtcgaagggcatattactacagaaatcgttatgctgaacccggcaaacaccagatcaatctccaatatgacctctcaagagtttgtcgaaaagttgactaaacgactaaagcgccatccagaagaaactgggggcttccaggaagcccccttggcttatgacgctatttgggccctggcgcttgcattgaataagacgagtggcgggggcggaagatccggtgtgaggctggaagatttcaattacaataatcaaactattacagatcagatttatagagccatgaactcttcctcattcgagggggtatctggccatgtggtttttgacgcatctggcagccggatggcctggacacttattgagcagttgcagggtgggagctacaagaagatcgggtattacgactccactaaggacgacctgtcatggtccaagacagacaagtggattggaggcagcccaccagcagaccagacgctagtcataaagactttcaggttcctctcacaaaaactgttcatttcggtgtcagtgctgtcttcactgggcatagtgctcgccgtagtatgcttaagtttcaatatttataattcccacgtgcggtatatccaaaacagtcagcccaatctgaacaacctcaccgctgttgggtgctcactggcgttggcagccgtattcccactgggacttgacggttaccacatcggtcgcaaccaattcccttttgtttgccaggctcgcttgtggctcctgggccttgggttctcgctaggctatggatctatgttcaccaaaatatggtgggttcacaccgtgttcaccaaaaaggaagagaagaaagagtggcgaaagacattagaaccttggaaattatacgcgacagtagggttactggtgggcatggatgtgctgacattagcaatatggcagattgtcgatccacttcatcgcaccattgagacttttgcaaaagaagagcccaaggaggatatcgacgtgtccatcctgccccagctcgagcattgcagtagccgaaaaatgaacacctggcttggtatcttctacggatacaagggcctacttctgctcttgggaatcttcttggcgtatgaaaccaaaagcgtatccacggagaagatcaatgaccaccgcgcagtggggatggccatctataacgtcgctgttctttgccttatcacagccccggttactatgatactgtcctcacagcaggatgccgccttcgcgttcgccagtctcgcaatcgtgttctctagctacatcactctggtcgtgctgtttgttcctaagatgcgacgcctaattactcgcggagaatggcaaagtgaagcccaggacaccatgaaaacaggtagctctacaaacaataacgaggaagagaagagccgtcttttggaaaaagaaaatcgtgaactggaaaagatcatcgctgaaaaagaggagagagtctcagaactgaggcaccagctccagagccgccagcagcttcggagcaggaggcacccccccaccccccccgaaccttcgggaggtctgcccaggggccccccagaaccacctgatagactgtcttgcgacggatcaagggttcacctgttatacaagtag

SEQ ID NO: 12953 - RNA, 192 nt, synthetic construct
  misc_feature 1..192: note = source = /note="Description of Artificial Sequence: Synthetic coding sequence"
  source 1..192: mol_type = other RNA
atgggccctgaggctctcagcagtcttctcttgctccttctggttgcctccggggatgctgacatgaaaggacattttgaccccgccaaatgccgctacgcccttggaatgcaggacagaaccattcctgactcagatatcagtgcgtcttcatcgtggtctgacagtactgcggctcgccacagcaggtag

SEQ ID NO: 12954 - RNA, 489 nt, synthetic construct
  misc_feature 1..489: note = source = /note="Description of Artificial Sequence: Synthetic coding sequence"
  source 1..489: mol_type = other RNA
gacgaagatcgatacaccacttgttggccaaaaacatggcttgcaaaggactgccccgctttaagaattatatccgtggaatacgatacctctctcagtgactggcgcgctcggtgccccatggaaaggaaaagtattgctttccgctctaatgaactgcttagaaaactgagagccgctggtgttggagaccgacccgttgtgtggattagtcatagcatgggcggcctgctagttaaaaaaatgttgttagaagctagtactaagcccgagatgagtaccgtgataaataatacccggggcatcatcttttatagcgttcctcatcacggctcaaggttggcagagtatagcgttaatattcggtatctgttatttcccagtctagaagtcaaggagctgtccaagggaaacaccttctgtcataaaggaaactggggttacatcaacataagctacaccgaaaaaaaaaaaaagttcctgccatag

SEQ ID NO: 12955 - RNA, 1083 nt, synthetic construct
  misc_feature 1..1083: note = source = /note="Description of Artificial Sequence: Synthetic coding sequence"
  source 1..1083: mol_type = other RNA
atgcctgaattggtagtgaccgccctcttagctcctagcagattaagcctcaaactgttgagagcattcatgtggtcgttggtgtttagtgtcgcactggtggccgctgccgtgtacgggtgcatagccttgacccatgttctgtgtagaccgcgacgtgggtgctgcgggagaaggagatctgctagccctgcctgcctgagtgatcctagtctcggcgagcatggcttccttaacctcaagagctctggcttaagactccactatgtgtctgcgggccgaggcaacggtcctcttatgttgtttttacatggcttccctgagaattggttctcctggcggtatcagcttcgggaattccagtcccggttccacgtagtcgccgtggatttaaggggatacgggcccagcgatgcccctagagacgtcgattgttataccattgacctgctgctcgttgacataaaagacgtgattctgggtctcggctattcaaagtgtatactcgtcgcccatgattggggggctctcctggcctggcatttctcaatctactacccatctcttgttgaaagaatggtcgttgtcagcggcgctccaatgtccgtctaccaagactatagcttacatcacatatctcagttctttcgatctcattacatgttcctgtttcagctaccatggcttccagaaaagctgcttagcatgtccgattttcaaattctgaagacgactctgactcacaggaagaccgggatcccttgcctgaccccctccgaacttgaggccttcttgtataattttagtcagcccggaggactgactggtcccctaaattactacagaaacctatttcgcaacttcccattggaacctcaggaattgacaacacccaccctgttgctgtggggagagaaagatacctacctggagctcggtctggtcgaagcgattggtagcagatttgtcccgggccgcctggaagcacacatcctgcctggcatcggccactggatccctcaaagcaacccacaggagatgcaccagtatatgtgggctttccttcaagatctgttggattag

SEQ ID NO: 12956 - RNA, 678 nt, synthetic construct
  misc_feature 1..678: note = source = /note="Description of Artificial Sequence: Synthetic coding sequence"
  source 1..678: mol_type = other RNA
tgagcggatctgccaagttgctggggcgctggaccttgttataccggccacaaagttggcgccctgagacgagacactgtaatatgctgctgtcgccacggcgattattccacaccatgcctgttcactcccggtaaaccctccaggaacccatctccgtggaagcgaaccctttggacactttcagctccctgggctgggcccgcaggatggacaggtgaggaacagaatgctacaaaaacaggtctgatcacacgaagaccacgcccacttcggcggagacctcaccctgcccccgcatctccgttgcccgagatcatcaggggaaatatcccgagaatgcttggcaagttcgtccctgtgaactgggagcctcctcagcccctgcctttcccgaaatatcttcgttgttaccggtgcctactggaaacaaaggagttaggctgtctgttgggctcagacatttgtctcaccccagcaggatcctcatgcatcacactgcacaagaaaaactcttccggctcagacgttatggtttcggattgtagatcaaaggaacaaatgtctgattgcagtaatacaagaacctctcccgtctctggattttggatcttctcccagtactgctttcttgacttctgcaatgaccctcaaaaccgcggtttatataccccttag

SEQ ID NO: 12957 - RNA, 192 nt, synthetic construct
  misc_feature 1..192: note = source = /note="Description of Artificial Sequence: Synthetic coding sequence"
  source 1..192: mol_type = other RNA
atgaagcacgtattaaatctgtatctactaggcgtcgttttaaccttactgtccatcttcgttagagtgatggaatccttagagggcttgcttgagtccccgagtccaggcacttcatggacaaccagatcacagctggcaaacaccgaacccacaaaaggactaccagatcatccttcccgcagcatgtag

SEQ ID NO: 12958 - RNA, 5235 nt, synthetic construct
  misc_feature 1..5235: note = source = /note="Description of Artificial Sequence: Synthetic coding sequence"
  source 1..5235: mol_type = other RNA
atgcgattattatgggggctgatatgggcttcctccttctttaccctgagcctacagaagcctagattgttacttttctctccctctgtggtccatttaggcgtgccactctcggtgggagtacagctgcaagacgtgccccgcgggcaggtggtcaaagggtccgtgttcctgaggaatccatcccggaacaacgtgccctgttcccccaaagtcgacttcaccttgtctagtgaacgcgatttcgccctgctgagtctccaagtcccactgaaggatgcaaagtcctgcggcctccaccagttgctgcgtggacctgaagtgcagctggtcgcgcacagcccctggctgaaggatagcctgagtcgcaccactaacattcaaggcatcaacctcttgttctcttcacgacgggggcatttgtttttgcagaccgaccagcccatctataaccctgggcagagagtccgctaccgcgtgttcgccctcgatcagaagatgcggccttcgacagataccattaccgtgatggtggagaactctcatggactgcgcgttagaaaaaaagaggtttatatgcctagctctatctttcaggatgatttcgtgatcccagatatctcggagcccgggacatggaaaataagtgctcggttcagcgacggtctggagtccaactcatccactcagttcgaagtcaagaagtatgtcctcccaaacttcgaagtaaagatcacgccaggtaaaccctatatcctgacagttccgggacacctcgacgagatgcagctggacatccaggcacggtacatttacggtaaacctgtgcagggcgtggcgtacgtgcggttcggtctgctggatgaggatgggaaaaagactttctttcgcggccttgagtcccagacaaagttagtcaacggacaatcccacattagcctgtctaaagccgaatttcaggacgcccttgagaagcttaacatgggcattactgacttgcagggacttcgactgtatgtcgccgcagcaattatcgagtatccaggaggagagatggaggaggccgaactcacaagctggtatttcgttagctctcctttcagcttagacttgagcaaaactaagagacatctggtgcctggcgccccctttctcctccaagcacttgtcagggagatgagcgggtcccctgcctcgggaattcctgtaaaggtgagtgcaaccgtgtcatcaccagggtccgtgccagaggtccaggatattcagcagaacacggacggcagcggtcaggtgtctattcccatcattattccacaaacaatctccgagctccaactgagtgtaagcgccgggagcccgcacccagcgatcgcccgcctgactgtcgccgccccgccaagcggaggccccggctttctttctatagagcgaccagactcccgccctccaagagtcggggacactctcaacctgaatctgcgcgctgtggggtctggcgcaaccttttcacattactattatatgattttgtctaggggccagattgtctttatgaatcgagagccgaagaggacactgactagtgtgagtgttttcgtagatcatcacctagctccaagtttttatttcgtggctttctattatcatggcgatcatccagtggctaactcactgcgggtagacgtccaggcaggagcctgcgagggaaagcttgagctttctgtggatggggccaagcagtatagaaacggagagtctgtgaaactccacctggagacagatagcctcgcactggttgcactcggagcactggataccgcactctacgctgccggcagcaagtcccacaaacctcttaacatgggcaaagtgtttgaagcgatgaactcatatgacctgggctgcgggccaggcggaggggattctgccctgcaggtcttccaggcggcagggctggccttcagcgacggtgaccagtggactctgagccgtaaaagactgagttgccctaaggaaaagactacaagaaaaaaaaggaatgttaattttcagaaggccatcaacgaaaagctgggtcaatacgcatcaccaaccgctaaacgctgctgccaagatggagtcaccagactgcccatgatgcggagttgcgagcaacgcgcagccagggtccaacagccagactgccgagaacccttcctatcctgctgccaatttgcagagtcactgcggaaaaagtctcgtgacaagggacaggccggactccagcgggctcttgaaatccttcaggaggaagaccttattgatgaagacgatattcctgtgcgatccttcttccctgagaattggctctggagggtggagacagttgatcgctttcagattctgactctctggctgccagactcactcactacatgggaaattcacggtttaagtctcagtaagactaaaggtctttgtgtcgcgacgcccgtgcaacttcgcgtttttcgggagttccacctacatctgcggctgcccatgtccgtgcgacggtttgagcaactggagcttcggcccgtgctttacaattatctggacaagaatctgaccgtaagcgtgcacgtgtcaccagtggaaggcctctgtctcgctggcggcgggggcttggctcagcaggttctggtgccagcgggatccgcccgtcctgtagctttttcagtcgttcccacggcggccgcagccgtgtctctgaaagttgtcgccaggggcagcttcgagtttcctgtgggggatgcggtttcaaaggtcctccaaattgagaaggaaggggccatccatcgcgaagagctggtctatgagcttaaccccctcgatcatcgggggagaaccctcgaaatacccggaaatagtgatccgaacatgatccctgatggtgacttcaactcctacgtgagggttacagcctctgaccccttggatacattgggttctgagggggccctttcacccggcggagtggcatcgcttctgcggttaccccgagggtgcggcgaacagaccatgatatacctggcaccgacccttgccgcctcacgctatttagacaagaccgagcaatggtccaccttacccccagagaccaaagaccacgccgtggaccttatacagaagggttacatgcgtattcaacagttcaggaaagccgatggctcatatgccgcctggttaagtcgtgggtctagcacatggctgaccgcctttgtgctgaaagtgctgagcctggcccaggaacaggtagggggttccccagaaaagctgcaggagacctctaactggctgctgagccagcagcaggccgacggttcattccaggatcttagtcctgtcatccatcgaagcatgcaaggggggttagtgggaaatgatgagacagtcgcacttacagcgttcgtaacaattgctctgcaccacggactggcagtcttccaggatgagggcgctgagccactgaaacagcgcgtggaagcctccatcagcaaggcctcctcttttttgggtgaaaaggccagtgcagggctcttgggcgcacatgccgctgcgatcactgcttatgctctcaccctcacaaaggctccggccgatctccggggagtcgcccacaacaatctgatggcaatggcgcaggaaactggggacaacctctactggggctctgttactgggagtcagtcaaacgccgtctctcccaccccagctcctcgcaatccctccgaccccatgcctcaggcccctgcactatggatcgaaactacagcatacgcacttctacatttgctcctgcacgagggtaaagccgaaatggcagaccaggctgcggcttggctgacacgccaagggtcttttcagggcggcttccgttcaactcaagacaccgtgattgctctcgacgccctaagcgcctactggattgccagccacactactgaggaacgggggctgaacgtaactctatcatccacgggccgcaacggcttcaagtcacatgccctgcagctgaataacagacaaattcgtggcctcgaggaagagctgcaatttagcttaggttctaaaattaacgtgaaggtcggcggcaactcaaagggtactctgaaggtgctgcgaacgtataacgttcttgatatgaagaacaccacctgtcaggatctgcagatcgaggtgacagtcaagggacatgtcgaatacactatggaggcgaacgaggactacgaagactatgaatacgatgagcttcccgccaaagacgaccctgacgcacctctgcagcccgtaactccattacagctgtttgaaggacgaaggaaccggcggcgaagggaagcgccaaaagtcgttgaagagcaggagagtagagtacactacactgtatgcatatggaggaatggcaaagtgggcctttctggaatggccatcgcagacgtgacactcttgagtggatttcatgcgctacgagctgatctcgagaagctaacttctctgtccgacagatacgtgtctcattttgaaacagaaggtccacacgtgctcttgtacttcgactctgtgccgacaagccgtgaatgcgtgggatttgaggcagttcaggaagtgcctgtagggctcgtgcagcctgcttccgctactttgtacgactactacaaccccgaaaggagatgttccgttttttatggcgccccttccaaaagtcggctgctagccaccttgtgctcagcagaagtgtgtcagtgcgccgaagggaagtgtccgaggcaacggcgcgctctggaacggggcttacaagatgaggacggctacagaatgaagttcgcctgctattaccctagagtggagtatggcttccaagtgaaggttctgcgggaagactccagagccgctttcaggctgtttgaaacaaaaattactcaagtactgcattttactaaagacgtgaaagccgccgcaaatcagatgcgcaatttcctggtgagagcatcatgcaggctacggctggaacccggtaaagaatacctgattatgggattagacggggcaacatatgatctggaaggacatcctcagtacttgctcgactccaactcgtggatcgaggaaatgccaagcgagcgcttatgccggagcacaagacaaagagccgcctgcgcccagcttaatgattttctccaggagtatggcacccagggatgccaggtctag

SEQ ID NO: 12959 - RNA, 792 nt, synthetic construct
  misc_feature 1..792: note = source = /note="Description of Artificial Sequence: Synthetic coding sequence"
  source 1..792: mol_type = other RNA
atggcagatatgcagaacctcgtggaaagacttgagagagccgttggccgactagaagccgtgagtcacacgtccgacatgcaccggggatacgcagacagtccttccaaaggagccgccccatacgtacaggcattcgacagtctgcttgctggtcctgtagccgagtacctaaaaattagcaaagaaataggaggcgacgtgcagaagcatgctgaaatggtgcacacgggtctcaagctcgagagagcactgctggtaacagcctctcaatgccagcaacctgccgaaaataaattgtctgaccttctggctcccatatccgaacagatcaaagaggtgattacttttcgggagaagaatcggggttcaaagctattcaaccatctcagtgctgtgagcgaatcaatccaggctctaggctgggtcgccatggcccccaaacccggcccctatgttaaggagatgaatgatgctgccatgttttacactaacagggtgctaaaagagtacaaagacgtcgacaaaaaacatgttgattgggttaaagcgtacctctcgatttggacggaattgcaggcgtacatcaaagagttccatactactggactggcttggagtaaaaccggcccagttgccaaagagctgagcggtctgcccagtggaccatccgctggcagttgccctccacctcccccaccttgcccaccacccccacccgtcagcacaatttcttgttcctacgagagcgcatcccgctcttcactcttcgcgcagatcaaccagggttag

SEQ ID NO: 12960 - RNA, 501 nt, synthetic construct
  misc_feature 1..501: note = source = /note="Description of Artificial Sequence: Synthetic coding sequence"
  source 1..501: mol_type = other RNA
atgggccctgaggcactcagctctcttctgcttctgctactagtggcatcaggagacgcagacatgaaagggcattttgaccccgccaaatgccgatacgccctgggcatgcaagaccgcacaattcccgacagcgatatttcagctagctcaagctggtccgattctaccgctgcccgacattcgcgtctggagtcttccgacggcgatggcgcttggtgccccgccggtagcgttttcccgaaggaggaggaatacctccaggtcgatctccaaaggctccacctggtagctttggtgggtacacaaggccggcacgcaggaggcctgggtaaagagttctctcggtcttatcgtctcagatattcacgcgacggaaggcggtggatggggtggaaagacaggtgggggcaagaagtaatttccgggaatgaagatccagaaggcgtggtattaaaagacctcggcccgccaatggtcgcaaggctcgttcgattttag

SEQ ID NO: 12961 - RNA, 2349 nt, synthetic construct
  misc_feature 1..2349: note = source = /note="Description of Artificial Sequence: Synthetic coding sequence"
  source 1..2349: mol_type = other RNA
agtatcctgagggtagaagccgtagatgccgactgttcccctcaattttcccagatttgttcatatgagatcatcaccccagacgtcccgttcacagtcgacaaagatggctacataaaaaatactgagaagctcaattatggcaaggaacaccaatataagctgacggtcactgcttatgattgcggcaaaaagagggccactgaagacgtgctagtgaagattagtatcaaacccacctgcacaccgggttggcagggatggaataaccggatcgagtacgaacctgggactggggccttagccgtgttcccaaacatccacctcgagacttgcgatgagccagtggcatctgtgcaggcgactgtagaattagagacgtcgcacattggcaagggttgcgacagagacacctactcagagaagtcactacacagactctgcggtgcagctgccgggacagccgagctgcttcctagccccagcgggtccctgaattggacaatgggcctccccacagacaatggccatgactcagaccaggtatttgaattcaacggtacccaggcagtcaggattcccgacggagtggtgtcagtttcacctaaagagccgtttactatatctgtctggatgcgccacggtccattcggacgtaagaaggagactatcctctgctcctctgacaagaccgatatgaaccgccatcactactcactctatgttcacggctgtcgcctcatcttcctgttccgacaggaccccagcgaggaaaagaaatacagacctgcagagttccattggaagctgaatcaagtctgcgatgaagagtggcaccactacgtcctcaacgtcgaattcccaagcgtaaccctgtacgtggacggtacgtcacacgagccgttttcggtgaccgaggattatcctctgcacccctccaagatcgaaacccagctggtagtcggcgcatgctggcaagggggggacctgcacatgacacaattcttcagaggaaatctggcaggccttacactgcggagtggcaaactggccgacaagaaggtgattgactgtctctatacttgtaaagagggcctggatctccaggtcctggaagattccggaagaggcgttcaaattcaggcccatccctcacagctcgttttgactttggaaggagaggacctgggagagctcgataaggcaatgcaacacatatcctatttgaattccaggcagtttcccaccccaggcattagaagactgaagattacgtccaccattaagtgcttcaatgaggctacttgtattagcgttcccccggtagacggctatgtaatggttctgcagccagaagagccaaaaatctctctatcaggggtccaccacttcgccagggcagctagtgagtttgagtcttccgagggtgtgtttctctttcctgaattgagaatcattagcactattacccgggaggtcgagcctgagggggatggcgctgaagacccaaccgtgcaggagtccctggtatccgaggagatagtacacgatctggacacttgtgaagttaccgtggagggggaagaacttaaccacgagcaggaaagcttggaagtggacatggcacgcctgcaacaaaaagggattgaggtgagctcttccgaacttggaatgactttcaccggagtcgacacaatggcatcttacgaggaagtgctccatctgctgaggtaccgtaactggcatgcccgatctctcctcgatcgaaaatttaaactgatttgctcagagctgaacggcagatacatctccaacgagttcaaggttgaggtcaacgtgattcacactgcgaatccaatggagcatgcgaaccatatggccgcccaacctcagtttgtccatccagaacacagatccttcgttgacttatctggacacaacttggcaaatccccatccttttgccgtcgtgccgtctacagccacagtggttatagtggtgtgtgtctctttccttgtttttatgattatcctcggcgtgttcagaatacgggccgcccacaggaggaccatgcgcgatcaggacaccggcaaagaaaatgaaatggattgggacgactcagctcttacaattacagtgaaccccatggagacctacgaagaccagcactctagcgaggaggaggaggaggaggaagaggaagaagaaagcgaggacggcgaggaagaggacgatattacgagcgccgagtccgaatccagcgaagaagaagaaggcgagcaaggagatccccaaaatgctactagacaacagcaactggagtgggacgatagtacgttatcttactag

SEQ ID NO: 12962 - RNA, 531 nt, synthetic construct
  misc_feature 1..531: note = source = /note="Description of Artificial Sequence: Synthetic coding sequence"
  source 1..531: mol_type = other RNA
atggcacgacgtcactgcttttcctactggttattggtttgttggcttgtcgtcacagtggccgaagccttatcaacattttatctccaacaacacattaaccttcacatggacaaaaaacgctatctgaggctcctcgagatccacaagattatgcgtaccctgcctacagccaggagcctacactccccacttcacctcccccggggcgttcgatcgcagggaccttcacccagccagcggcaccctggagtacccagcattttcttccacgagggccccgaatctattctcggttttcagaccgatctttctagtctgcagggcgtgactactgttttccattccagtcactttatcgggcatactgtaacgctactgatcggcattagccctgaggaggatagtcgcgaggaggcccatctcagaaaggccgagcgtgaggagaaacccaagcacacagaggcaaaaaaaagcttatccttccgcaaaaaacaacagaaagacttttgcttcatcttccgaaactag

SEQ ID NO: 12963 - RNA, 1182 nt, synthetic construct
  misc_feature 1..1182: note = source = /note="Description of Artificial Sequence: Synthetic coding sequence"
  source 1..1182: mol_type = other RNA
atgaggactttgttcaatttattgtggttagccctcgcttgctctccggtgcacactaccctcagtaagtccgacgcaaagaaggcggcttccaagactctcctagagaaatcccaattcagcgacaaacctgtgcaggaccggggccttgtagtgacagatctcaaggcagagtctgtggtgttagagcacagatcttattgctccgccaaagccagagaccggcacttcgccggagacgtcttaggctacgtgaccccctggaactctcatggatatgacgttacaaaagtatttggatctaagttcactcagattagcccagtgtggttgcagctgaaaaggcgcggacgtgagatgttcgaagttacaggactgcatgatgtcgaccaggggtggatgcgggcagtgaggaaacatgctaagggcctccacattgtcccccgcttgttgttcgaggactggacttacgacgattttagaaatgtactggactcagaggacgagattgaagagctctctaaaacagttgtgcaggtagcaaagaatcagcattttgacggctttgtggtggaagtgtggaaccagcttctgtctcaaaagcgcgtggggctcattcacatgctgactcacctggctgaagcactgcaccaggccagactactggcactccttgtgattccgcccgcaataactccaggtacagatcagctggggatgtttacacataaagaatttgagcaactagcccctgtcttagatggcttctctctgatgacctatgactacagcacagcccaccaacctggccccaatgctccattgtcctgggtgcgcgcctgtgtccaggtgctggacccaaaatccaaatggagatctaaaattcttctgggtctgaatttctacggcatggactatgctacatctaaggacgcgagagagccagttgtgggcgcaagatacatccagactctgaaggatcataggccgagaatggtttgggactctcaggccagcgagcacttctttgagtacaaaaaatccagaagcggacggcacgtggtgttttacccaacactgaaatccctgcaagtgcgcctggaactggcgcgagaactcggcgtgggagtgagtatttgggaactgggccagggattggactacttctacgatttactctag

SEQ ID NO: 12964 - RNA, 324 nt, synthetic construct
  misc_feature 1..324: note = source = /note="Description of Artificial Sequence: Synthetic coding sequence"
  source 1..324: mol_type = other RNA
atgctaccctgcctggcactgctattacttatggaactgtcggtgtgcacagtagcaggagacggtggcgaagaacagaccctttcgacggaggctgagacctgggagggagcaggtccgagcattcagctgcagctgcaggaagtaaaaacaggtaaggcaagtcaattctttggcttgatggggaagcgagtcggggggcggccattgatacaacctagacgcaagaaagcgtatcagttggagcataccttccaaggattgctcggtaaacggtcactttttactgaaggacgggaagacgaggcccagggaagtgagtag

SEQ ID NO: 12965 - RNA, 1086 nt, synthetic construct
  misc_feature 1..1086: note = source = /note="Description of Artificial Sequence: Synthetic coding sequence"
  source 1..1086: mol_type = other RNA
atgggcatcatccagagcatactggccactagccgtgactgttactcatttaaaaagaaacccattccgaagaagcctactatgttggcgctggctaagatcctgctcatctcgacacttttctattccttactgtccgggtctcacggtaaagaaaatcaggacatcaacaccactcaaaatatagctgaggtgttcaagacaatggaaaacaagccaatatctttggagtccgaggcaaatctgaattccgataaggaaaacattaccacaagcaacttaaaggccagccactcaccccccctcaacttgcctaacaattcccacggcataacagacttttcctctaattcctcagctgagcatagtctcggttcccttaagccgacatccaccatttcgacctctccccctctgattcactcattcgtaagtaaagtgccgtggaatgccccaatagccgatgaagacctgctcccaatttcggctcaccctaatgcaacccccgccctgagttctgaaaatttcacctggtctctggtcaacgatactgtaaaaactccagataacagttctattaccgtgtcaatcttgtcgtctgaacccacaagcccatctgtgacccccctcatcgttgagccttccggttggttgactacgaatagcgacagtttcaccggcttcacaccttaccaggaaaagacaacactccaacctaccctaaagtttaccaataatagcaaattattccctaataccagtgatccccagaaggagaaccgcaacactgggatcgtgtttggcgctatcctaggcgctattctaggagtgtcgctcctcacactggtcggataccttctgtgcgggaagcgaaaaacagatagttttagccatcgaagactttacgatgatcgcaacgaacctgttctccgcctcgacaacgcccccgaaccttatgatgtgtcttttgggaattcatcctactataatccaaccttgaatgattcagctatgcctgagagcgaagaaaacgcccgcgacggcattccaatggacgatattccacctctgaggacctccgtctag

SEQ ID NO: 12966 - RNA, 279 nt, synthetic construct
  misc_feature 1..279: note = source = /note="Description of Artificial Sequence: Synthetic coding sequence"
  source 1..279: mol_type = other RNA
atgagaggtcctggccatcccctgttattggggctactgttagtgctcggacccagccccgaacagcgggttgaaatagtgccccgagatctgagaatgaaggataagtttctaaaacacctgactgggcctctctatttcagccccaagtgtagtaaacattttcaccgcctttaccataacacacgtgattgtaccatcccagcctattacaaaaggtgcgctagactactgacccggctcgcagtgtcacccgtctgcatggaagacaaacagtag

SEQ ID NO: 12967 - RNA, 1125 nt, synthetic construct
  misc_feature 1..1125: note = source = /note="Description of Artificial Sequence: Synthetic coding sequence"
  source 1..1125: mol_type = other RNA
tgacgcgtaaggcgcggaccattacctgcggatagacctcgcgctctgggtcctgctaggcgatgctctagacacccccaccccgcccctttccgggtgtgcagcgaaggggcagcacaccggctgcgaaggccagagcgcctgccgctccctagtagggccttgagacctaggccagcgcatacccctattctaggcccagccccacgtgcatgccctggcgctcctcgggcgtcagactctcctacctgcgctgcagctgccgccacggcgtggccaaggacacgggctgttgagagaaaagggtgccaagttgctgccgccgccggcgtgcgcggcacaggatgcccttctcgcgcagacctggagaaggattcctggaatgatacaaaggaggatgtgtttgtgcaccagaccgcaattaaaaaaaataatccacgtaaatatctgaggagcgtcggtgatggcgagacagtggagtttgacgtggtcgagggggagaagggagctgaggcagcaaatgtgaccgggcccggcggtgtacccgtgcagggctccaaatatgctgcggatcgcaaccattataggcgatatcccagaaggagaggcccgccccgcaactatcagcagaattaccaaaacagcgagtccggcgagaaaaacgagggttccgagtcggctccggaaggacaagcccaacaaagacgaccgtaccggcgaagacgctttccgccttactatatgagacgcccttatggaagacggccgcagtatagcaacccacctgtgcaaggtgaagtaatggagggagcagataaccaaggagccggagaacagggacgtcccgttcgccagaacatgtacagggggtatcgcccgagatttagaaggggaccccctagacagcgccagccacgggaggatgggaatgaggaggacaaagagaaccaaggggacgaaactcaggggcagcagccaccccagagacggtacagacggaactttaactataggcgaagacgaccagaaaatcccaagccacaggacgggaaagagacgaaagctgccgaccctcctgctgaaaatagctccgcccctgaagcagaacaggggggcgcagaatag

SEQ ID NO: 12968 - RNA, 420 nt, synthetic construct
  misc_feature 1..420: note = source = /note="Description of Artificial Sequence: Synthetic coding sequence"
  source 1..420: mol_type = other RNA
atggccctcagaatgctctgggcaggccaggctaagggcattctcggtggttgggggatcatatgcttggtcatgagtttgttacttcagcatcccggtgtctactccaaatgttattttcaggcccaggcgccttgtcattatgaaggaaagtacttcacactgggcgagtcatggttgcggaaggattgtttccactgcacttgcttacatcctgttggcgtcggctgttgtgacacgagtcagcatccaattgattttcccgccggctgtgaggtaagacaggaagccggcacctgtcagttctctctggtgcagaaatctgaccctcggctgccatgtaaggggggaggaccagacccagaatggggctctgccaatacaccagttccgggcgctccggcgccacactctagctag

SEQ ID NO: 12969 - RNA, 462 nt, synthetic construct
  misc_feature 1..462: note = source = /note="Description of Artificial Sequence: Synthetic coding sequence"
  source 1..462: mol_type = other RNA
cattattgcaaggagggttactatcgcgacatgggcaaacccattacacaccggaaggcatgcaaggcatgcgactgccaccctgttggcgcagcaggcaagacatgcaatcagaccacaggccagtgcccatgcaaggatggtgtgaccggaataacctgcaacagatgcgcaaaaggatatcaacagtcccggtccccaatagctccatgcatcaagattcccgttgcacccccgaccactgcagcctcatccgtggaggaacccgaggcagcccgtcaacccaacactttccaggcagaggggctgtcactgctcccaggagccgctgagaaagagggagcccggtgctggggatatagaagaaggctcggacatagggtcgcacaggctgagtgtaggggaccccggtcttgggcttgggggcgaattacatcctcattctcctttgctagcaactag

SEQ ID NO: 12970 - RNA, 213 nt, synthetic construct
  misc_feature 1..213: note = source = /note="Description of Artificial Sequence: Synthetic coding sequence"
  source 1..213: mol_type = other RNA
atgctcgttttgttcctgttgggaaccgtctttttgttgtgtccctactggggcgagctgcacgatccgattaagggccagtctatgtaccattattccaagctcagctgcatgacctcctgcgaagatattaatttcctgggatttactaagagagtagagttaatttgttgtgaccactctaactattgcaacctgccagagggggtgtag

SEQ ID NO: 12971 - RNA, 567 nt, synthetic construct
  misc_feature 1..567: note = source = /note="Description of Artificial Sequence: Synthetic coding sequence"
  source 1..567: mol_type = other RNA
atgttccatcagatctgggccgctctgctctatttctacgggatcattctgaactcaatctatcagtgccccgagcacagccagctgactacgttaggagtggacggaaaagagtttccagaggtacatctcggtcaatggtatttcatcgcaggcgccgccccaaccaaggaggaactcgccacgtttgatccagtcgataatattgttttcaatatggccgccggttcagcacccatgcagctgcatctcagagcaacaatccggatgaaggatggcctgtgcgtacccagaaagtggatttaccatcttacagaaggatctactgacctcagaacagaaggcaggccagacatgaaaacggaactgttcagttcaagttgtccaggcggtattatgcttaacgaaaccggccagggctatcagagatttctgctgtacaaccgctccccccaccccccagaaaaatgcgtcgaagagtttaaatctcttaccagctgcttagactcaaaggcttttctactgacccctagaaaccaggaggcctgcgaattgtcaaacaattag

SEQ ID NO: 12972 - RNA, 2316 nt, synthetic construct
  misc_feature 1..2316: note = source = /note="Description of Artificial Sequence: Synthetic coding sequence"
  source 1..2316: mol_type = other RNA
atggggtggttgacaaggatcgtttgtctcttttggggagtgctcttaaccgctagggcaaactaccagaacggaaaaaataacgtgcctcggctaaaattatcctacaaagagatgttggagagcaataacgtcatcaccttcaatggcctcgcaaatagttcctcataccacacattcttgctggacgaggaacgtagccggctgtacgttggtgccaaggaccatatcttctccttcgacctggtcaacattaaagactttcagaagatcgtgtggcccgtctcatacacgaggagagatgaatgcaagtgggcgggcaaagacattctcaaggagtgcgccaactttattaaggttcttaaggcctataaccagacacacctttacgcctgcggtacaggcgcctttcaccccatctgcacatatattgagatcggccatcaccccgaggataacattttcaagcttgaaaactcacacttcgagaacggacgcgggaaatccccctatgaccccaagttactgactgcctctctactaattgatggggagctctactccggtactgctgctgactttatgggccgcgactttgccatttttcgtaccctcggacaccatcatcctattcgaactgagcagcatgattcccgatggctaaatgatcctaaattcatctcagctcacttaatctcagaatctgacaaccccgaagatgataaggtgtatttttttttccgagagaatgctatcgacggcgaacatagcgggaaagccactcatgccaggattgggcaaatttgcaagaacgattttggcgggcacaggtccctcgtgaataagtggactacttttctgaaagccaggttaatctgttcagtgccaggcccaaacggaatagacacccactttgatgagttgcaggatgtgttcttaatgaacttcaaggatccgaagaatccggtagtatacggcgtgttcacgacgagtagcaatattttcaaaggatcagccgtctgtatgtattctatgtctgacgtgagacgagttttcctcgggccatacgcacaccgtgatggaccaaattatcaatgggttccataccaaggcagggttccctacccacgtcccggcacatgtcccagcaagaccttcggcgggtttgacagcaccaaggatttgcccgacgacgtgataacattcgccagatctcaccccgccatgtacaacccggttttcccaatgaataacaggcccatcgtgattaagacggacgtgaattatcaatttacacagatcgtggtggatcgagttgatgccgaagatggacagtacgacgttatgttcataggtaccgatgtgggaactgtcctcaaggttgtgagtattcctaaggagacttggtacgatttggaggaggtgttactggaagaaatgaccgttttccgagagcccacggccattagtgcgatggaattaagcacaaaacaacagcagctgtatatcggcagtaccgcaggggtcgcccaactcccattacatcgctgcgacatttacggcaaggcttgtgcagagtgctgtctggcccgagacccttattgcgcatgggacgggtctgcctgctcaaggtattttcccactgccaaaaggcgcacccggagacaggatattcggaatggagatcccttgactcactgttcggatctgcaccatgataaccatcacggccacagtccagaggagagaatcatctacggagtggaaaatagttcgacatttcttgagtgcagcccaaaaagccagcgtgcgctggtgtactggcagtttcagagacggaacgaggaaaggaaggaagaaatcagagtcgacgatcacataattagaacggatcagggcctgctgctccgaagcttgcaacaaaaagacagcggcaactacctgtgtcacgccgtggaacatggttttatccaaacactactgaaggtgaccctggaggtcatcgacacggagcacctcgaggaacttttgcacaaagacgatgatggggacggatccaagactaaagagatgtcaaactcaatgacaccttcccagaaagtatggtatcgagacttcatgcaattaatcaaccacccaaacctgaatacaatggacgagttctgtgaacaagtttggaagcgggatcggaagcaacgccggcagcgccctggacacacgcccggcaattccaacaagtggaagcacctccaggaaaataagaaaggtcggaatcgccgaactcacgagtttgagcgagcgcctcgatcagtatag

SEQ ID NO: 12973 - RNA, 1014 nt, synthetic construct
  misc_feature 1..1014: note = source = /note="Description of Artificial Sequence: Synthetic coding sequence"
  source 1..1014: mol_type = other RNA
atggccagacctatgatcaaagaggcacgcatggcctccttgttgctggagaacccttactacggctgtaggaaacccaaagatcaggttcggagtagtctgaaaaatgtttctgatctgtttgtgatggggggggccctggtactcgaatcggctgcgctcctgcactggttggagagagagggttatgggcctctgggaatgaccggtatctctatgggaggccacatggccagtctggccgtctcaaattggcccaaacccatgcccttgattccgtgtttaagctggagcacagcctccggtgtctttaccacgggagtgctttctaaatcgattaactggagagaacttgagaaacaatattacacgcagaccgtctacgaggaagagataatccatatgttagaatattgtggcaccgactcgtttaagatggggcaggaatttgtgaaacattttacttctagcgccgataaactgacgaacctcaatctggttagtagaacacttaatcttgacatcagtaaccaagtggtgtcccagaagccagccgactgtcacaattcctccaagacttccgtgagcgccacctccgaaggccttctcttgcaggacacaagtaagatgaaacgttttaaccagacactgtcaactaacaaatccggttacaccagccgcaatcctcagtcctaccacctactcagcaaagaacagtctcgaaattcactcaggaaagagagtcttatttttatgaaaggagtgatggacgaatgtactcatgtcgctaacttttccgtccctgtcgacccatcactgattatcgtcgtacaagctaaggaagacgcctacattccaaggaccggcgtgcgctcactgcaggaaatatggcccggctgcgaaataagatacttggaaggtggtcacatatcagcctatctgttcaaacaggggctttttcggcaagcaatttacgatgcatttgatcgttttctgcacaagtacgccaactag

SEQ ID NO: 12974 - RNA, 462 nt, synthetic construct
  misc_feature 1..462: note = source = /note="Description of Artificial Sequence: Synthetic coding sequence"
  source 1..462: mol_type = other RNA
atgggacccgaggcactctcaagcttattgctgctgttacttgtcgcatccggggatgcagatatgaagggccactttgatccggccaaatgtagatacgccctgggcatgcaggaccgaacaatacctgacagcgacatctctgcgtcaagctcctggtcggactcaaccgctgcaaggcattcaaggctggagtccagcgatggagacggggcctggtgcccagctgggagcgtttttccgaaggaagaagaatacttgcaggttgatctgcagcgcctccaccttgttgccctggttggtactcaaggtcgccatgccggaggattgggcaaggaattttcccgttcctatagattgcggtattctagagatggtaggagatggatgggatggaaggatcgctggggtcaagaggtcatctccggcaacgaagatcccgagggagtcgtgcttaaatag

SEQ ID NO: 12975 - RNA, 345 nt, synthetic construct
  misc_feature 1..345: note = source = /note="Description of Artificial Sequence: Synthetic coding sequence"
  source 1..345: mol_type = other RNA
atggacaagtcactactgctggaactccctatcttactctgctgctttagagccctgagcggctccttgtcaatgagaaacgacgctgtgattgaaatagtacaatgtagaatgtgccacctgcagtttcctggagagaagtgttcccggggcagaggaatttgcactgccacaaccgaggaggcctgcatggttgggagaatgttcaagagagacggtaacccatggctaacattcatgggatgtttaaagaactgcgccgatgtgaaagggatacgatggtcagtttatctggtgaacttccgatgttgccgatcgcacgacctctgtaatgaagatctgtag

SEQ ID NO: 12976 - RNA, 630 nt, synthetic construct
  misc_feature 1..630: note = source = /note="Description of Artificial Sequence: Synthetic coding sequence"
  source 1..630: mol_type = other RNA
atgggcccggaggcgttatcatctctccttctgctgctcttggtagcttccggtgatgccgacatgaaaggacactttgaccccgcgaagtgtagatacgctctgggaatgcaggacaggaccattcccgacagtgacattagtgcatcctcctcttggtcggattccaccgcggcaagacactcaaggctcgaatcttcagatggtgacggcgcgtggtgtccagccggcagtgtttttcccaaggaagaggaatacctgcaagtcgaccttcagagactgcacctggttgctctagtcggcacccaaggaaggcatgccgggggcctcggaaaggaattttccagatcctaccggttgcgttactcccgggacggacgaaggtggatgggctggaaggacaggtggggccaggaagtgatctcaggcaacgaggaccccgagggtgtagtcctgaaagatctgggacctcccatggtggccagactggtaagattttatcccagagcggacagggtgatgagcgtttgtctgcgagtcgagctgtacgggtgcctctggagggacggactgttaagctacacagctcctgtaggccagacaatgtacctgagtgaagccgtctactag

SEQ ID NO: 12977 - RNA, 639 nt, synthetic construct
  misc_feature 1..639: note = source = /note="Description of Artificial Sequence: Synthetic coding sequence"
  source 1..639: mol_type = other RNA
gatttcggttactgccccagggtatactgcgaaaatcagccaatgctccccataggcgttcttgtcatggtagggtttactgtcggaaaggttcccgtgcccgatatccggacatgccatttttgcttggtggaagatccctctgtcggttgcatttctgggagtgaaaagtgtactattagctcatcttctctgtgtatggtcatcactatttactatgacgtcaaggttaggttcattgtacgagggtgcggtcagtacatctcatacaggtgccaggagaagagaaatacctatttcgctgagtattggtaccaggcccaatgctgccagtacgactactgcaattcatggagttctccacagctacagtcttctttacctgagccccatgacaggcccctggcattgcctctgagcgactcccaaattcaatggttctaccaggccctgaatctatccctgcctcttccaaatttccacgctggtacagagcccgacggcctggatccgatggttaccctgagtctgaacctgggcctgtccttcgctgaactacgccggatgtatctgtttctgaactcatcaggcctgctcgtgcttccccaggctggcctgctgacgccccatccatcatag

SEQ ID NO: 12978 - RNA, 240 nt, synthetic construct
  misc_feature 1..240: note = source = /note="Description of Artificial Sequence: Synthetic coding sequence"
  source 1..240: mol_type = other RNA
atgaagctacactcccttatctctgtgctgttgctgttcgtcacattaattcccaagggcaagactggtgtaatccctggacaaaaacaatgcatagctctgaaaggcgtgtgccgcgataaactttgctcgaccttagacgatacaattggaatatgtaatgaaggaaagaaatgttgtcgacggtggtggatcctcgagccttacccaacccctgtcccgaaaggcaaatcgccctag

SEQ ID NO: 12979 - RNA, 1620 nt, synthetic construct
  misc_feature 1..1620: note = source = /note="Description of Artificial Sequence: Synthetic coding sequence"
  source 1..1620: mol_type = other RNA
atgagtgaaccccaggagaagaagctctcggaaaatacagacttcctcgcgcccggagtgtcttcattcacagatagtaaccagcaggagtcgatcactaaacgcgaggaaaatcaagagcagccaaggaactatagtcaccatcagctgaacagaagcagcaaacatagccagggactgagagaccaggggaaccaggagcaggatccaaatattagcaacggcgaggaagaggaggaaaaggaaccaggggaagtggggactcacaacgacaaccaggaacgaaaaactgagctgccaagagagcacgcaaactccaaacaagaagaggacaacactcagtcagacgatatcctcgaggaaagcgatcagcctacccaggtctctaaaatgcaagaagacgaattcgatcagggaaatcaggaacaggaagataacagcaacgccgagatggaggaggaaaacgcatctaacgtgaacaagcatattcaagaaaccgagtggcaatcccaagagggcaagaccggcctagaagctataagcaaccacaaagagacagaggaaaagactgtgtctgaggctctgctgatggaacctacagatgatggcaatactactccccgtaaccacggtgtcgacgatgacggagacgacgacggagatgatggcggcaccgacggtccaagacattcagcttctgatgattattttatcccttcccaggcgtttctggaggctgaacgcgctcagagtattgcttatcatttaaaaattgaggaacaacgagagaaggtacacgagaatgaaaatatcggcactactgaaccaggagagcaccaagaagcgaagaaggccgagaacagtagcaatgaagaggagaccagttctgagggtaacatgagagttcacgccgtcgattcttgtatgagcttccagtgcaaaagaggccacatctgcaaagctgaccagcaggggaagcctcactgcgtttgtcaggatcctgttacatgccctccaactaaacccctggaccaggtatgtgggactgacaaccaaacttacgcttcaagttgccacctgttcgcgacaaaatgtaggctcgaggggaccaaaaaggggcaccagctgcagctagattacttcggggcctgtaaaagcatcccaacatgtacagattttgaggtcattcagttcccccttcgcatgagagactggttgaagaatatcctgatgcagctctatgaagccaatagtgagcatgcagggtatctgaatgagaaacaacgtaataaggtgaaaaagatctatcttgatgagaagaggcttcttgccggcgaccatccaatagatttgctgctgagagatttcaaaaaaaattatcatatgtacgtctatcctgtacattggcagttcagcgaattggaccagcatcccatggaccgagtcctgacacactctgagctggcgccccttcgtgcctctctggtccccatggagcattgcatcacacggttctttgaggagtgcgaccctaataaagacaagcacattacactgaaggagtggggccattgtttcggaattaaggaagaggatatagacgaaaatctgcttttttag

SEQ ID NO: 12980 - RNA, 2535 nt, synthetic construct
  misc_feature 1..2535: note = source = /note="Description of Artificial Sequence: Synthetic coding sequence"
  source 1..2535: mol_type = other RNA
atgggcccaggagccccgttcgcaagagttggttggcctctgccattactggttgtgatggcagctggcgtggcaccggtctgggcaagtcacagcccccacctccccagacctcacagccgtgtccccccacacccaagctctgaacggagggcagtgtacatcggagctctgtttcccatgagcggaggatggccgggcggccaagcctgtcagcctgcagtcgaaatggctctagaagatgtcaactccagaagggatattctgccagattacgagttgaaactaattcaccacgacagcaagtgcgaccccgggcaagcaacaaagtacctctatgaactcctatataatgatcctatcaaaatcatccttatgcccggatgttcctcggtcagcacgctagtggctgaggctgctaggatgtggaatctaatagttctttcctacggtagctccagtccagccttgagtaatagacagcgcttcccgaccttcttccgcactcacccgtccgcaacactgcacaatccaactagggtgaaattgtttgagaagtggggttggaaaaagatcgcgaccatccaacagacaaccgaagtcttcacatcaaccttagatgaccttgaagagcgagttaaggaggctggtattgaaatcaccttccgccaatccttcttctccgaccctgccgtgccagtcaaaaatctgaagcgacaggacgctaggattatagttggcttattttacgaaactgaagcaagaaaggttttttgcgaagtttacaaagagcgcctgttcgggaaaaagtacgtttggtttctgatcggctggtatgcggataattggtttaagatctacgacccaagtataaattgtacagtagatgaaatgacagaggccgtggagggccatatcaccaccgaaatcgttatgcttaatccagccaataccagaagtatctctaacatgactagtcaggagtttgtggaaaagctgacaaaaagactgaaaagacacccagaagaaaccggtggtttccaggaggctccacttgcttatgatgccatctgggccctagcgctcgcattaaacaagacttcaggtggtggcgggcgctctggagttaggctagaagactttaattataataaccagactattacagaccaaatctaccgtgcaatgaactcatcatcttttgaaggggtgtcaggacacgtcgtgttcgacgcctcaggctcgcgcatggcctggacacttatcgagcagcttcaaggaggaagttacaaaaaaataggctattacgattcaaccaaagacgacctatcgtggtccaagacagataagtggatcgggggcagcccgcccgctgaccaaacccttgtaataaagacatttcgctttttgtctcagaaactgtttatcagcgtgtccgtcctcagctcccttggcattgtgttggcagtggtgtgcctgtcttttaatatctataactctcacgtgaggtatatccaaaatagtcaaccaaatctcaataatctcacagcagttggttgttccttagcgttggctgctgtgttccccctaggattagacgggtaccatatcggaaggaatcagttcccatttgtttgccaggctcggttatggctgctcggacttggcttttcactcggctacggctctatgttcaccaagatctggtgggttcacacagtgtttaccaagaaagaggaaaagaaagagtggagaaaaactctcgaaccatggaaattgtatgccacggtgggcctgctggtcggtatggatgtgcttaccctggctatctggcagattgtggaccccctccacagaaccatcgagactttcgcgaaggaagaacctaaagaagacatcgacgtgtcaatcttacctcagctagaacactgcagcagtcggaagatgaacacttggttggggattttttatgggtacaagggcctgctcctactgctgggaatcttcctggcctatgagaccaagtccgtttccactgaaaaaatcaatgaccacagggccgtcggcatggctatctacaatgtcgcagtcttgtgcctgatcacggcccctgtgaccatgatcctgtcttcgcagcaggacgcagcctttgctttcgcgagcctggcgattgtgttctccagctacataactctcgtggtacttttcgtccctaagatgaggaggttaattaccagaggcgagtggcaaagcgaagcacaggacaccatgaagactggcagtagcacaaataacaatgaagaggaaaagtctcgcttattagaaaaggaaaatcgagagctcgaaaagatcatcgccgaaaaggaggaacgggtgtcagagctgcgccaccagctgcaatctcgacaacagctgagatcaagaagacatcctccgacacctcccgagcccagcggcgggctgcctagggggccaccagagcctccagatagactttcctgcgatggctccagagtgcatctgctgtacaagtag

SEQ ID NO: 12981 - RNA, 993 nt, synthetic construct
  misc_feature 1..993: note = source = /note="Description of Artificial Sequence: Synthetic coding sequence"
  source 1..993: mol_type = other RNA
atgcagctatttttgttactctgtctggtactcctgagccctcagggtgcttccctgcaccgccatcaccccagggaaatgaagaaacgcgttgaagatcttcacgtcggagcaaccgtggctccttcatccagacgcgacttcacctttgatctactgggtaatgcactgttcaccgacctcgttgtggaccttcaggacaccttcgtcagcgccatgaagaccttatatctcgcagacaccttccccacgaattttagagattctgcaggcgctatgaaacaaatcaacgactacgtggctaagcaaacaaagggaaagatcgtagatctgttaaagaacctggactccaatgcggtagttatcatggtcaattatatcttttttaaggctaagtgggagacgtcattcaaccacaaaggtacccaagagcaggatttctatgtcacttcagagacagtggtgcgagtcccaatgatgagccgcgaagaccaatatcactacctattagatcgcaatctatcgtgtagagttgtaggggttccatatcaagggaacgctaccgcactatttatactgccgagcgaaggaaagatgcagcaagtcgagaacggtttgagcgaaaagacactacgtaaatggctgaaaatgtttaagaagcgccagctcgaactgtatctcccaaaatttagcatcgaaggatcatatcagttggaaaaggtccttccctccctggggattagcaatgtgttcacctcacatgcggacctgagcggcattagcaaccactcaaatatccaggtcagcgaaatggtccacaaagctgtggtggaggtcgatgagagtggtactagggccgcagccgcaacagggacaattttcacctttcggtctgctcggctgaactcgcagaggctggtcttcaatcgaccattcctgatgtttatcgtggacaataatatccttttcctcggtaaggtcaatcggccatag

SEQ ID NO: 12982 - RNA, 2676 nt, synthetic construct
  misc_feature 1..2676: note = source = /note="Description of Artificial Sequence: Synthetic coding sequence"
  source 1..2676: mol_type = other RNA
atgctcccgacggaagtaccgcagtctcaccctggacctagcgccctgctcttactgcagctgttgctgccccctaccagcgctttttttcctaatatctggtccctgctggccgccccagggagtatcactcatcaggacttaactgaggaggcagcgctcaatgtcacgctgcagttatttctggaacagccgccgccaggtaggcctccgctgcgacttgaagactttctgggacgcacactgctcgctgatgacctgttcgcggcttacttcgggcctggcagctctagacggttcagagctgcgttaggggaagtcagtagagctaatgcagcccaagacttcctgcctacctcaagaaacgacccggacctacactttgatgcagaaaggctcggacagggcagggcccgactagttggagctcttagagagactgtggtggccgcgcgtgccctagaccatacgttggcccgccaaagactcggtgccgccctacacgctctgcaagatttttattctcacagtaactgggtggagctgggtgaacagcagcctcatccacatttgctctggcccaggcaggagctgcagaatcttgcacaggtcgctgaccccacatgctcggactgcgaagaactgagctgcccgcgtaactggcttgggtttactctgcttacatcaggttattttgggactcaccccccaaagcctcctggaaagtgtagtcacggtggccacttcgatagatctagctcccagcccccacgcggtgggattaacaaagacagcacctcccccggctttagcccacaccacatgttgcatctgcaggcagccaagctcgcgctcctcgccagcattcaggctttcagtctgcttagatctagattaggagacagggacttcagtcgcctgttggacattacacccgccagcagcctaagttttgtgttggataccaccggatcaatgggggaggaaatcaatgccgcaaagatccaggctcgccatctggtggaacagcgcaggggttctcccatggaacccgtgcattatgtcctggtgccctttcatgacccaggcttcgggcccgtattcacgacttccgatcccgatagcttttggcagcagttgaatgaaatccacgctcttggcggaggagacgagcccgaaatgtgtctgtcagccctccaactggctctccttcacactcctccactctctgatattttcgtgtttactgacgcttccccgaaagacgcctttttgaccaaccaggtagagagtctaacccaggaacgtcgatgtcgggtcactttccttgttaccgaggacaccagccgcgttcagggcagagccaggcgcgaaattctctccccacttagattcgagccctacaaggccgttgcactcgcatctggcggcgaggttatcttcactaaggaccagcacattagggatgtcgccgctatcgttggcgagtccatggcagcgctcgtcacactccccctggatcccccagtagttgttcctgggcagccactagttttcagtgtggacgggctgctgcagaaaatcaccgtacgcatccacggtgacatttcctcattctggatcaaaaaccccgcaggagtctcgcagggacaggaagagggtggcggacccctaggacatacacgccgttttgggcagttttggatggtcaccatggacgatcctccccagactggtacctgggagatccaggtcacagcagaagacacgcccggcgtccgggttcaggctcagacttctctggacttcctcttccatttcggaattccaatggaggatggtccccaccccggcctttacccgctcacccaaccagttgcaggtctccagacccagctcttggtggaagttacagggctgggctctcgggcgaatcccggggacccacagccacactttagtcatgttattctgagaggtgtccctgagggtgccgagcttggccaggtcccactcgaacctgttggtcctcctgagcgtggtctccttgctgcctccctttcaccgactttgctctccactccccggccattttctttggagctaatcggtcaggacgcagccgggcgacggttgcacagggctgccccccagccctctaccgtggtgcccgtactactggagctcagcggcccttcaggtttcctagccccgggtagtaaagttcccttaagcctccgcattgccagcttcagtggcccacaggatctggaccttcgcacttttgttaaccctagttttagccttacgtctaacctaagtcgagctcacctcgaactcaacgagtccgcatggggccgcctgtggcttgaggtgcccgacagtgccgcacccgacagcgtcgtcatggtgacagttactgccggcggtcgcgaagctaatccggtgccgccaactcatgcttttttgaggctgcttgtctccgctccagctccccaggatagacataccacaccaaccggctcctctgatcctattttgaccacagctactccagctttctcaccttttaccctggtgactcagggcagggcaggcgcaggcctcgctgctggaagtccctggtggggaaccgtcggcggagtgttactcctcctcggccttgcttcctggtag

SEQ ID NO: 12983 - RNA, 708 nt, synthetic construct
  misc_feature 1..708: note = source = /note="Description of Artificial Sequence: Synthetic coding sequence"
  source 1..708: mol_type = other RNA
atgaagtacgtattttacctgggggtgctcgctggcactttcttctttgccgactcaagtgtacagaaagaagatcccgcgccatacctggtttacctgaagagtcatttcaacccctgcgtcggtgtgctcattaagcctagctgggtcctcgctcccgcccattgttaccttccaaaccttaaagtgatgttaggaaatttcaagagtagagtacgagacgggacagaacagacaattaaccccattcaaattgttagatactggaattacagccactctgcgccacaagacgacttaatgctgatcaaactggccaaacctgcgatgctcaatccaaaagtgcagccgcttactctcgcaacaactaatgttagacctggaaccgtctgtctgctgagcggcctcgactggagccaagaaaattctggaaggcatccggatctgcgccagaatctagaggctcctgtgatgtcggatagggagtgccaaaagaccgaacagggaaaaagccacagaaattccctgtgcgtgaaattcgtgaaggtgttctcaagaatttttggggaggtggcagtggctaccgtcatatgcaaagataagttgcagggtatcgaagtggggcattttatgggcggggacgtgggtatctacactaatgtgtataagtatgtttcgtggatcgagaatacggcaaaagataaatag

SEQ ID NO: 12984 - RNA, 1386 nt, synthetic construct
  misc_feature 1..1386: note = source = /note="Description of Artificial Sequence: Synthetic coding sequence"
  source 1..1386: mol_type = other RNA
atgtcactggacatccagtcacttgacatccagtgcgaggaactgtcagacgcacgttgggccgagttactgccgctccttcagcagtgccaggtcgtacggctcgatgactgtgggctgaccgaggcaagatgcaaagatatatccagcgccctgagggtgaatcctgccctggccgaacttaacctgcggtcgaacgagttgggagatgtgggcgttcactgtgtgctgcaaggcctgcagacccctagctgcaagatacagaagctttccttgcagaattgttgtcttacaggagcaggctgcggagttctctcttccacattgcggacacttccaactctgcaggagcttcacctgagtgacaatctgctcggcgatgcaggcttacagcttctgtgcgagggcctgttggatcctcagtgccgcttggagaagcttcaacttgagtactgttccctctcggcagcatcgtgtgagcctttagcttccgtgctgcgcgccaagccggatttcaaggagctgaccgttagcaataacgatattaatgaagcaggtgtaagggttctatgtcaaggccttaaggattctccatgccagctggaagccctgaagctcgaatcttgtggcgtgacatctgacaactgcagagatctgtgcggcatcgtggcctcaaaggcctcactgcgagaattagccctgggctccaacaaacttggggacgtgggaatggccgagctgtgccccggcctcctccatcccagctcaagattgcgcaccctgtggatttgggaatgcggaatcaccgcaaagggttgtggagacttatgtagggtcctcagagctaaggaatccttgaaggagttgtcactggccggcaatgagttaggcgacgaaggtgcccggctgctctgtgagaccttgctcgaacccggctgtcagctggagtcactgtgggtcaagtcctgcagctttaccgccgcttgttgctctcattttagctcagtcctcgctcaaaaccgttttctgctcgaactccagataagcaataatagactcgaggatgccggtgttagggaactgtgtcagggactgggccagcccggatccgtgttgagagtgctgtggctggccgattgtgacgtatctgactcatcatgctcgtccctggctgcaaccctgctggccaatcattcgttgagagaactggacttaagtaacaactgcctcggcgatgctggcatcctgcagctcgtggaatccgtcaggcaacccgggtgtctgctcgaacaactggtcttatacgatatttactggtctgaagagatggaagataggctgcaggcgctagaaaaagataagccatctttacgcgtgatcagttag

SEQ ID NO: 12985 - RNA, 2676 nt, synthetic construct
  misc_feature 1..2676: note = source = /note="Description of Artificial Sequence: Synthetic coding sequence"
  source 1..2676: mol_type = other RNA
atgctgcctactgaagtaccacaaagtcatcccggaccaagtgctctcctcctgttacagctcctcctgccaccaacctcggcgttcttccccaacatttggtccttacttgcagcacccgggtccatcacacatcaggatctgaccgaggaagccgccctcaatgttacactacaactttttttggagcagcccccacccggccgtccccccttacgtctggaggacttcttgggccggactttattggccgatgatctctttgccgcatattttggaccaggtagctccaggcggttcagggcggcactaggcgaagtttctcgcgccaatgcagcccaggatttcctacccacttcaagaaacgatccggacctccattttgacgctgaacgcttaggccagggcagagcacgattagtcggcgctctgagagaaaccgtggtggctgccagggctttagaccacacgctggcacggcagcggctgggcgccgccctgcacgctttgcaagacttctatagccactccaattgggtggagctcggagagcagcaaccccaccctcatctgttatggccgaggcaagagctacaaaacctggcccaggtagccgacccgacatgcagcgattgtgaggagctgtcctgtccgagaaactggctaggattcacccttctgacttccggatacttcggaacccaccctcccaagccccccgggaaatgttcccatgggggtcacttcgacagatcatcctcacaaccaccgcggggtggaatcaacaaggactcaacttctcccgggtttagcccgcatcatatgctccatctccaagccgctaagttagcactgctagcatcaatacaagccttctcactgcttaggagccgactgggcgatcgggacttttccaggcttctcgatatcacaccagcatcatccctgagtttcgtcctggatacaaccgggagtatgggcgaggaaatcaacgcagccaaaattcaggcaaggcatttagtagaacagaggaggggatccccaatggagccggtgcactatgttctggtgccatttcatgaccccggatttggtcccgtttttaccacttctgaccccgacagcttctggcagcaactgaacgaaatacatgcgcttggcggtggagacgaaccagagatgtgtctgtcagcactgcaactggccctcctccacacacctccactatccgatatttttgtcttcacagacgcctcacccaaagatgcctttctgacaaaccaggtcgagagcttaacccaggagagaaggtgtcgcgtcacattcctggttaccgaggacacctccagagtgcagggccgtgcccgccgggagatcctctcaccactgcgatttgaaccctacaaagccgtggcactggcatcaggcggagaagtaatttttactaaagatcaacacatccgggatgtcgcagcaattgtgggtgaaagcatggcagcactagtgaccttgccgcttgacccaccagtggtggtgcccgggcagcccctcgtcttctctgtggatggactcctgcaaaagattaccgttcgaatacatggcgatatatcttccttttggatcaagaatccggcaggcgtatctcagggacaggaggaaggtggtggccctcttggccacacaagacgctttggccagttctggatggtcaccatggatgacccaccccagaccgggacatgggagatacaagttacagccgaagacactccaggggtgcgggtgcaggcccagacctccctcgacttcctattccattttggcatccctatggaggatggaccccatcccggactgtacccactcactcagcccgtagctggcctgcagacgcagcttctcgtcgaagtaaccggcttagggtcccgcgctaacccaggcgatccacagccacatttctcacatgtcattctgcgaggcgtgcccgagggtgccgagttaggccaagttccacttgagccagtcgggccccctgaaagaggactgctggccgcctcactgagccctacacttctgagcacccctcgccctttttctcttgaactaatcggccaagacgctgcgggtagaaggctgcaccgagcggctccacagccttcaacagtggtgccagtcttgttggagctatcaggaccatcaggctttctggcccccggcagtaaggttcctctctctcttaggattgcctccttcagcggaccgcaggacctcgacctgcggaccttcgtgaacccttctttttctcttacatctaatctgtcccgtgcccacttggaactgaatgagtcagcgtggggtcgcttgtggctggaggtgccagactctgctgctcctgatagtgtcgtcatggtgacagtgactgcaggggggagagaggcaaaccctgtcccacccacacacgcctttctgcggctgctggtttctgcccccgcccctcaggaccgacataccactcccactggttctagcgatcctatactaacaaccgcaacaccagccttctctccctttacattagtaacacaaggccgggccggcgccggtctggccgccggaagtccatggtggggaacagtcgggggcgttctcctgctgcttggactagcatcttggtag

SEQ ID NO: 12986 - RNA, 501 nt, synthetic construct
  misc_feature 1..501: note = source = /note="Description of Artificial Sequence: Synthetic coding sequence"
  source 1..501: mol_type = other RNA
atggggcccgaagcgcttagttcattgctgctgctgctgcttgtcgcgtccggggacgccgatatgaagggccattttgatccagccaagtgccgatatgctttaggtatgcaggatagaaccatacccgacagcgacatctccgccagttcctcttggtcagacagtactgcagcgagacactccagattggaaagcagtgatggcgacggggcgtggtgtccagctggaagtgtgttccccaaggaagaagagtacctacaagtggacctgcagaggctgcatctcgtcgccctggtcggaacacagggacgtcacgcaggcggcctcgggaaagagttctccagaagttaccggttacgctacagccgcgacggacgcagatggatgggctggaaagatcggtggggccaagaagttatatccggaaatgaggacccggaaggtgtggttttgaaagacctgggacccccgatggtagcccgattagtgagattttag

SEQ ID NO: 12987 - RNA, 420 nt, synthetic construct
  misc_feature 1..420: note = source = /note="Description of Artificial Sequence: Synthetic coding sequence"
  source 1..420: mol_type = other RNA
atgcaggccgcttgttggtacgtgctgttcctcctgcagcctaccgtgtaccttgtgacatgtgccaatctaacgaatggagggaaatctgagctactgaagtccggcagttcaaagtctaccctgaaacatatatggacagagagctctaaagatctgtcaatctccaggttactgtcccaaacctttagaggcaaggaaaacgacacagacctcgatctccgctacgacacaccagaaccatactcagagcaggatctttgggattggttacgtaactcgaccgacttgcaggaaccacgaccaagggcaaagaggcgccccatagtaaagacaggcaagttcaagaagatgttcggctggggagactttcattccaacatcaaaaccgtcaagctcaatctgctgatcacaggatag

SEQ ID NO: 12988 - RNA, 2412 nt, synthetic construct
  misc_feature 1..2412: note = source = /note="Description of Artificial Sequence: Synthetic coding sequence"
  source 1..2412: mol_type = other RNA
atggctgctgccggactggtggctgtggctgccgcggcggagtactctggcaccgtcgcttccggaggcaatctgcctggcgtgcattgcggaccgagcagtggggcaggtccgggattcggcccagggtcttggtcacggtctctcgacagagcactggaggaagccgcagtcacaggggtgctgagcctgagtggcagaaagctgagagagttccctaggggcgctgcaaatcacgacctcaccgacacaacaagggctgatctgtccaggaataggctgtccgagataccaatagaggcctgtcatttcgtcagtctcgagaatctgaacctctaccagaattgcattcggtatattccagaggctatcttgaacctccaagctttgactttcttgaatatttctaggaatcaactttcgactctacctgttcatctgtgtaatctgccactcaaggttttaatcgctagcaataataagctcgtctcccttcctgaagaaataggacaccttcgccaccttatggaacttgacgtcagttgtaacgagattcaaaccattccgagtcaaattggaaatctggaggctcttcgcgatcttaatgtgcgtagaaaccatctggtccacctgcctgaggaattggctgagcttcctctcatccggctggattttagctgtaataaaatcacgactattcctgtttgctaccgcaaccttcgtcatttgcagacgatcactctggacaataaccccctgcaatctccaccagcacaaatttgtattaagggcaaagtgcacattttcaagtacttaaatatccaggcgtgcaaaatcgcccccgaccttcccgactacgacagacgaccccttggctttggcagttgccacgaagaactctattctagtagaccttatggtgctcttgattcagggtttaactccgtcgacagtggggacaaaagatggtccggcaacgagcccaccgatgagttctccgaccttcccctgcgagtggccgagatcactaaagagcagcgtttgaggagagagtcccaatatcaggagaaccggggctccttagtggtaactaacggcggggtcgagcatgacctagaccagatagattatatcgatagctgtaccgcggaggaggaggaggcagaggtgcgtcaaccaaaaggaccggaccccgactcactgtcatcccaattcatggcctacatcgagcagcgccggatcagtcatgaggggagtccggtaaagcccgtcgcaattcgggaattccagaaaaccgaggatatgcgccgctacctccaccagaaccgagtccccgcagaaccatccagtttactcagcctgtccgcatcccacaatcagcttagccacacggacctggagctacaccagcggagagaacagcttgtggagcgaactcggcgggaggcccagctagccgcactgcagtacgaggaagaaaagattaggactaaacagatccaacgtgacgccgttttagacttcgtgaagcaaaaagcatctcagtcaccccagaaacagcaccccctgctggatggcgtggatggtgaatgcccctttccgagtcgcagatcacagcataccgatgattccgcactctgcatgtccttatccggtcttaatcaagtcggctgcgccgctactcttccacattccagcgctttcactccactgaagtccgacgataggcccaatgcattgttatcaagcccagccaccgagacggtacaccatagcccggcatacagcttcccagccgcaatccagcgaaaccagcctcagagaccagaaagttttctgttccgagcgggagtgcgtgcagaaaccaataaaggacacgcttcccctctgcctccttcagccgcgccgacaacggactcaactgattctattaccgggcaaaactccaggcagcgcgaagaggaactcgaattaatagatcaactgcgaaaacatatagagtaccgactgaaagtgtcactgccatgcgaccttggggccgccctgactgacggagtggtcctgtgccacttagctaaccacgtacggccaaggtcagtgccaagcatccatgttccaagcccagctgttcctaaacttacaatggctaagtgtcggagaaacgtcgagaactttctggaggcatgcaggaagataggggtaccacaggataacttgtgtagcccttctgatatcctacagctgaatctgagcgttaagcgtacagtcgaaacgctgttgtcacttggcgcacattccgaggaatcttctttcgtgtgcctcagtctgcagctgctcggcttcgtggcattttattgtactgtgatgcttactttgtgtgtcctgtactactggttgtttcccgcaaggtag

SEQ ID NO: 12989 - RNA, 633 nt, synthetic construct
  misc_feature 1..633: note = source = /note="Description of Artificial Sequence: Synthetic coding sequence"
  source 1..633: mol_type = other RNA
atgtataaagctcgcccacctgctgggtccggaggccccggggccgaacctcctgcgatggccgcccctcgtgggcgggctgccccttggaccaccgccctgctgcttcttctggcctctcaagttctgtcacccggttcctgtgctgatgaggaggaggtccccgaagaatgggtcttgcttcatgtcgtgcagggacagatcggtgctgggaattacagttacctgagactcaatcacgaaggaaaaattgtgctgcgtatgcgatcactgaagggcgatgcagacctttatgtatccgcaagctcattacatccctctttcgacgattatgaattgcagagcgccacctgtggacccgatgcagttagcattccagcacattttaggagaccagtcggcataggagtttatggccacccctcacatttggagagtgagttcgagatgaaagtgtactacgacgggacagtggagcagcaccccttcggagaagccgcctatccagccgatggcgccgacgccggtcagaagcacgcgggcgcgcccgaagacgcatcacaggaggaagaaagtgtgctgtggaccatacttatttcaatcctcaaactagtcctcgagattttgttctag

SEQ ID NO: 12990 - RNA, 486 nt, synthetic construct
  misc_feature 1..486: note = source = /note="Description of Artificial Sequence: Synthetic coding sequence"
  source 1..486: mol_type = other RNA
tgatgtccaactgagattattgctttcggagatcggctggaggaatttaggtcaatcaataccgaagtggtggcctgctctgtcgatagccaatttactcacctggcttggattaataccccgcgccggcagggtgggctcggccctattcgaatcccccttttatctgatttaacacatcaaatctccaaggattacggcgtctatcttgaggatagtgggcacactctccgcggtcttttcattatcgacgacaagggaattcttcggcaaattacactgaatgacttgccagttgggaggagcgtggatgaaacattgaggctggtccaggcatttcagtataccgacaaacacggagaagtatgccctgccggttggaaacctggatcggaaacgatcaagcccgaagatactatgaaagcatggtggcccagagaatcttacaaccctcgtagtagttggaaagcagaagtgtttagatag

SEQ ID NO: 12991 - RNA, 2886 nt, synthetic construct
  misc_feature 1..2886: note = source = /note="Description of Artificial Sequence: Synthetic coding sequence"
  source 1..2886: mol_type = other RNA
atgctccttctgttactgctggcccctctatttcttagacctcctggggcaggaggcgcccaaacccctaacgccacatctgagggctgtcagattatccatcctccctgggagggaggcatcagatacagaggccttactcgggatcaggtgaaggctattaacttcctgcctgttgactatgaaatagaatatgtatgccgaggggaaagagaggtagtaggcccaaaagtaagaaaatgccttgccaacggcagttggacagacatggatacgccatcgagatgtgtaaggatttgtagcaaatcataccttaccctcgagaatggcaaagtcttcctgacagggggggatcttccggcgttggacggcgctagagtggactttagatgtgacccggatttccaccttgttggatcgagccgcagcatctgcagtcaagggcagtggtcaacacctaaaccacactgccaggtcaataggaccccacactcggagaggcgggcagtgtatatcggagccctgtttccaatgtctggcggctggccaggcggacaggcatgtcagccagccgtcgagatggctctggaagacgtgaatagccgcagagatattctgcccgattatgaactaaaattaatccaccacgactctaaatgcgatccagggcaagcgaccaaatacctgtacgaactgctgtataacgatcctatcaagattatcctaatgcccggctgtagttccgtgagcaccttggtggccgaggctgctaggatgtggaatctgattgtcctgtcctatggcagcagttccccggccctgtctaatcgtcaacgcttccccaccttttttagaacccatccatccgctactcttcacaatcccacgcgcgttaagctctttgaaaagtgggggtggaaaaaaattgcgacaattcagcagactacggaggtgttcaccagcacactagatgatctggaggaacgagttaaagaggctggtatcgagataacctttcgtcaatcttttttctccgatccggctgtacctgttaagaacctaaagcggcaggacgcacggattattgtcggattgttttacgagacagaagcacgtaaggttttctgcgaggtgtataaagagagactcttcggtaagaaatatgtttggttcctgatcggttggtacgctgacaactggtttaagatctacgatccatcaatcaactgcactgtggatgagatgaccgaggcggtcgagggtcatataacgacggagattgtgatgcttaaccccgccaatactagatctatctccaatatgaccagccaggagtttgtagagaagctgactaagcgcttgaaaagacaccctgaagagacaggagggtttcaggaggcaccgctcgcctatgacgcaatctgggccctggccttggccctaaacaagacaagcggcggcggcgggcggagcggcgtgcgactcgaagatttcaattacaacaaccagaccatcaccgaccagatctatcgagccatgaattcttcttcttttgagggggtgtctgggcacgtagtgttcgatgcgtcaggatcccgtatggcctggactctgatcgagcagctccaggggggtagttacaagaaaattggatattacgatagcactaaagatgatttgagctggagcaagacggataagtggatcgggggcagccctccggcagaccagacactggtgatcaagactttccggtttttatcacaaaagctattcatctccgtatcggtgctgtccagcctggggattgtgctggccgtggtctgcctctcttttaacatatataacagccacgtgagatatatccagaattctcagcctaaccttaacaatctgaccgccgtaggatgttccctagccctcgctgcagtctttcccctgggactggatggataccacataggtcggaatcagtttcccttcgtgtgtcaggcaaggctgtggcttcttggcctgggattctccttgggctacggttctatgtttacaaaaatttggtgggttcataccgtgtttacaaagaaggaggagaaaaaggagtggaggaaaaccctggagccgtggaaattgtacgctacagtgggcttgctggtgggaatggacgtgttaacgctggccatctggcaaatcgtcgatcccttacatcgcacgattgagactttcgccaaggaagagcccaaggaagatattgacgtgtcgatcctgcctcaactagagcattgctccagccgaaagatgaacacctggctggggatattttacgggtacaaaggactgctgcttctgctcggaatcttcctggcttacgaaacaaaatccgtctcaacagaaaaaatcaatgatcaccgcgcagtgggtatggctatttacaacgtcgccgtcctctgcctgataacagcacccgtgactatgattctgtctagccagcaggacgcagcctttgcctttgcctcactagccatcgtgttcagttcctacatcacacttgtcgtgctgttcgtgcccaagatgcgccgactcattactcgcggagaatggcaaagcgaggcgcaggacacaatgaaaaccggttcatcaaccaataataatgaggaggagaaatcaagactgctcgagaaagaaaaccgcgaacttgagaaaatcatcgctgaaaaagaggaaagggtgtccgaactaagacatcagcttcaatcccggcagcagctgcgcagcaggcggcatcctcctactcctcctgagccaagcggcggactgccccggggtccccctgagccacccgaccggttgtcgtgcgatggatcccgcgtccacctgctgtataaatag

SEQ ID NO: 12992 - RNA, 2853 nt, synthetic construct
  misc_feature 1..2853: note = source = /note="Description of Artificial Sequence: Synthetic coding sequence"
  source 1..2853: mol_type = other RNA
atgacctggcgtatgggcccccgtttcaccatgttacttgccatgtggctggtgtgtgggtccgagccccatccccatgccacgatacggggcagccatggcggaaggaaggtgcctttagtgagccccgacagctcacgcccagcaaggtttctgcgccacaccggcaggagtcgggggatcgaacggtcaacattggaagagcccaacctgcaacccctacagcgccggagaagcgttcccgtcctcagactggctagaccaactgaaccccccgcccgatcagacatcaacggcgcagccgtacggcctgaacaacggccagctgctagagggagtccgagggaaatgattagagacgagggtagcagtgctcggagcagaatgttgcgatttccctccggcagttcaagtcctaatatcctcgccagttttgccggcaagaaccgggtctgggtgattagcgctccgcatgcctcagaagggtattaccgcctcatgatgagtcttctgaaggatgatgtctattgtgaattggccgaaagacatatccagcagatcgttttatttcatcaagcgggagaggaagggggtaaagtgaggcgcattaccagtgaaggccagattctagagcagcctctcgacccatcgttgatccctaaattgatgagctttcttaagttggaaaaaggaaaatttggcatggtcctgctgaagaaaaccctgcaggtggaagaacggtacccataccccgtgaggttagaagcaatgtatgaagtgatcgatcaggggcccattaggagaatcgagaagatccgccaaaaggggttcgtgcaaaaatgtaaagcctcaggcgttgaaggacaggtggtggccgaagggaacgacggcggcggcggagcagggcgcccctcacttgggagcgagaagaagaaagaagacccccggagagcacaggtcccccctactcgcgagagtcgcgtcaaagtcctgcggaaattggccgccactgctcccgcactccctcagccaccttctaccccccgcgccactacactgccccctgcccctgctactaccgttacacggagcacaagcagagctgttacggtcgccgcacgccccatgaccactaccgctttccccacaacacagagaccatggactccatcaccctcccacaggcctccaacaaccaccgaagtgattaccgcaaggcggccaagcgttagcgagaacttgtacccaccatctcgtaaagaccagcatagggagaggccccagaccacacggaggccaagcaaggccacctcactggaaagttttaccaatgcccctccaactacaatcagtgagccaagcacccgtgccgccgggcctggaaggtttcgcgataacaggatggaccgccgcgaacacggccaccgggacccaaacgttgtgcccggccctcccaaacctgccaaagaaaagccacccaagaagaaagctcaggacaaaatcctcagcaacgaatacgaggaaaagtatgatctttcaagacctacagcctctcagttggaggatgaacttcaggtgggcaacgttccccttaagaaggccaaggagtccaagaagcacgaaaagttggagaaacctgagaaagaaaagaagaaaaagatgaaaaacgagaacgccgacaaactgctgaagagtgagaagcagatgaaaaaatcagagaaaaagtccaagcaggaaaaggaaaagagcaagaaaaagaagggcggcaagacagaacaggacggttaccagaagcctactaataaacattttacccagagcccaaagaagtctgttgccgacctgctgggcagctttgaggggaagcgccgactgctgctgatcacagctcctaaagcggaaaataacatgtacgttcagcaacgcgatgagtacctagaatccttctgtaagatggccacaagaaagatatctgtcatcacaattttcggacctgtaaataactccacaatgaagattgatcatttccagctggacaacgagaaacctatgagggtcgtagatgacgaggacttggtcgatcagaggcttatctccgaactaagaaaggagtacggcatgacctataacgattttttcatggtacttaccgacgtggacttgcgcgtgaaacagtactacgaggtgccaatcacaatgaagtctgtgttcgatcttattgacacgttccagagccggattaaagatatggaaaagcaaaagaaggaggggatcgtttgtaaagaggacaagaaacagtcactagagaattttctgagcaggtttagatggaggcgtcgtctcctcgttatctctgccccaaacgacgaagactgggcttattcccagcagttaagtgccttatctggccaggcctgtaacttcggtctccgacatataaccattctcaaactgctcggggtgggggaagaagtgggcggagttttggagctgttccccatcaatggttctagcgtcgtggaaagagaggacgtgcctgcccatcttgttaaggacatcagaaattatttccaagtgtcccctgagtatttttcaatgctgcttgtgggcaaagatggaaatgtgaaaagctggtatcccagcccaatgtggtcgatggtgatcgtgtacgatctaatcgactctatgcagctgcgtagacaggagatggctatccagcagtcactgggaatgaggtgtcccgaagacgaatacgccggatatggttatcacagttaccaccagggctaccaggatggctatcaggacgattacaggcaccatgaatcctaccatcatggctacccatactag

SEQ ID NO: 12993 - RNA, 351 nt, synthetic construct
  misc_feature 1..351: note = source = /note="Description of Artificial Sequence: Synthetic coding sequence"
  source 1..351: mol_type = other RNA
atggcagctggctccgcaccgatgcagctacacttgcgggctaccattcgtatgaaggacgggttgtgcgtgccgcggaaatggatatatcacctgacagagggctcaacagatctgaggacggaaggcagaccggatatgaagaccgagctcttttccagcagctgcccaggaggaattatgctaaacgagacaggccagggctaccagagatttctgttgtacaataggtcaccccaccctcctgaaaaatgtgttgaagagtttaaatcgctgacatcctgcctggatagcaaggcttttctgctcactccacgcaaccaggaagcatgtgagctgagtaacaactag

SEQ ID NO: 12994 - RNA, 1251 nt, synthetic construct
  misc_feature 1..1251: note = source = /note="Description of Artificial Sequence: Synthetic coding sequence"
  source 1..1251: mol_type = other RNA
atgaaattccaaggccctcttgcatgcctgttgcttgcactctgcttgggcagcggtgaagcaggacccttacagagtggagaagaatcaacgggcactaacataggcgaagccctagggcacgggctaggggatgccctgtcagaaggggttggaaaggccatcgggaaagaggcagggggcgcagctggaagtaaggtgtctgaagcacttggtcaggggacaagggaggccgtggggaccggagtgcggcaggtgccgggttttggcgtcgctgatgcactgggtaatagggtgggcgaggcagcccatgcgctaggaaatacaggccacgaaatcggaaggcaggccgaggatgtgattcggcacggagctgatgcagtgagaggaagttggcagggtgtgcctggacacaatggcgcctgggagacaagcgggggtcatggcatttttgggagtcagggtgggcttggaggccaggggcagggcaaccccggaggacttggcactccttgggtgcacggctaccctggaaatagtgctggtagttttggaatgaatccgcagggtgccccatggggtcagggaggaaatgggggaccccccaattttggaacaaacacccagggagcagtcgcccagccaggctacggaagtgtgcgtgcctctaatcaaaatgagggctgcacaaatccaccccctagcgggtcggggggggggtctagcaactctggggggggctccggatcccagtcaggcagctctgggagtggctcaaatggtgataataacaacggaagctcgtctgggggaagctcttctgggagctcgtcggggggctctagtggcggcagcagcggcgggagttctgggaatagtggtggcagccgaggcgacagcgggagcgaatcttcttggggtagcagtaccggcagcagcagcggaaaccatggtggcagcggcggaggaaacggtcataaacccggctgtgaaaaacccggcaatgaggccaggggctcgggagagtccggaatacaggggttccggggacagggcgtgtcctcaaacatgcgggaaatttctaaagaggggaatcgcctgttaggcgggtctggagataattaccggaactccgagacgagtcctggaatgttcaattttgatactttctggaaaaatttcaaatctaaactgggcttcattaactgggacgcgataaataaggaccaaagaagtagccgtatcccctag

SEQ ID NO: 12995 - RNA, 150 nt, synthetic construct
  misc_feature 1..150: note = source = /note="Description of Artificial Sequence: Synthetic coding sequence"
  source 1..150: mol_type = other RNA
atggcaccaccatctgtgcctttagtcctcctgctagtcctgctgctgtccctggctgagacccccgcttcagcccccgcacatcgctcatctacattccccaaatgggttacaaaaacagaacgcggacgtcagcccctcagatcttag

SEQ ID NO: 12996 - RNA, 978 nt, synthetic construct
  misc_feature 1..978: note = source = /note="Description of Artificial Sequence: Synthetic coding sequence"
  source 1..978: mol_type = other RNA
atgcagggacgggtggctggtagttgcgctcctcttggcttattgctagtgtgcttacacctgcccggtttgtttgcccggtcgataggagtggtggaggaaaaagtatcccagaatttaggaacaaacctcccacagcttgggcagccttctagcacaggaccttctaacagcgagcacccgcagccagcactggatccacgatcaaacgaccttgcaagagtgccactcaagctgagcgtccccgcttcggacggtttcccacctgcaggaggcagcgcggttcaacggtggccaccgtcatggggattgccagcgatggattcctggccccctgaggatccatggcagatgatggccgccgctgccgaagaccggctcggagaggccctcccagaggaactgtcatacctatcgtcagccgccgccctggctccaggaagtggacctttacccggcgagagcagccctgacgcgacgggcctgtccccaaaagcctctctgttgcatcaagattcagaatcccggagactccccaggtcaaattctttaggggctggaggtaaaatcttgtcgcagaggccaccctggagtcttatccaccgagtgctcccagaccatccttgggggacgctgaacccttccgtttcttggggagggggagggcccggtactgggtgggggacgagacccatgccacacccagaaggcatatggggaattaacaatcagcccccaggcacttcttggggtaacatcaacaggtaccccgggggtagttgggggaacataaatcggtatccggggggatcctggggaaacattaatagatacccgggcggtagctgggggaatatccatctgtatcctggaatcaacaatcctttccccccaggggtgcttcgtcctcctggctcatcttggaatattccagcggggtttcctaaccctccaagtcctagactccaatggggatag

SEQ ID NO: 12997 - RNA, 390 nt, synthetic construct
  misc_feature 1..390: note = source = /note="Description of Artificial Sequence: Synthetic coding sequence"
  source 1..390: mol_type = other RNA
atggccgccggtagtgcacccatgcaactccacctgcgagcaaccattcggatgaaggacggactctgtgtgccccggaaatggatttaccatttgacagaagggtccactgatcttaggactgagggccgaccagatatgaaaacggagctgtttagctccagttgcccaggaggcatcatgctcaatgaaaccggccagggatatcaaagattcctgttgtataatcggtcaccccacccacccgaaaagtgtgtcgaagagttcaagagtctcacatcatgtcttgatagtaaggcgtttctgctgactccacgtaatcaagggaaaggcttaaagtctcacaaaaccggattggggcttacgaaatcctctggagtgacagggtag

SEQ ID NO: 12998 - RNA, 1056 nt, synthetic construct
  misc_feature 1..1056: note = source = /note="Description of Artificial Sequence: Synthetic coding sequence"
  source 1..1056: mol_type = other RNA
atggcaggaatcccaggactcctgtttcttctcttcttccttctctgtgccgttggtcaggttagcccttatagtgccccatggaagcctacgtggcctgcatatcgactccctgtggtccttccacagagcacactcaacttagccaagcagtacctaagctacgagacactctatgccaacggcagtcggacagaaacacaggtaggaatttacatcctgagctctagtggagacggcgcccagcacagagactcagggagttccggaaaatcccgaaggaagaggcagatctacgggtacgactcaaggttcagtatattcgggaaggactttctactaaactatccctttagcacatcagtgaagctgtcaacaggctgtacaggaacgctcgtggccgaaaagcacgtgctgaccgcagcgcattgcatccacgatggcaaaacctatgtgaaaggcactcaaaagcttcgagtgggatttctgaaaccaaagtttaaagatgggggcaggggcgccaacgactccacctccgctatgcccgaacagatgaagttccaatggatcagggtgaaacgcacgcacgttccaaaggggtggattaagggaaatgcaaacgacattggcatggactacgactatgctctcctggagctcaagaaaccacataagagaaagttcatgaaaataggagtgtccccaccggcaaagcagctcccgggaggcagaattcatttttctgggtatgacaacgaccggcccgggaacctagtgtacagattctgtgacgtcaaggacgagacctacgatctgctctaccaacagtgtgacgcccaacccggcgcgagtgggtccggtgtgtatgtccgcatgtggaaacgccagcagcagaagtgggagcgcaagataatcggaattttctcgggacatcaatgggtcgacatgaacgggtcaccacaagattttaatgtggccgtgagaataactcccctgaagtatgctcaaatttgttattggattaagggaaactacctcgattgccgtgagggttag

SEQ ID NO: 12999 - RNA, 345 nt, synthetic construct
  misc_feature 1..345: note = source = /note="Description of Artificial Sequence: Synthetic coding sequence"
  source 1..345: mol_type = other RNA
atggagagaggtgccggcgccaaacttctcccactactgcttctgctgcgggcaacaggattcacttgcgcccaaacagatggacgtaacggttatacggctgtgatcgaagtgacctccggaggcccatggggcgattgggcatggcctgagatgtgcccagacggttttttcgcaagtggttttagtctgaaagtagagcctcctcaggggattccgggagacgatactgccctgaacggcatcaggctgcactgcgcaagggggaatgtgctgggaaacactcacgtggttgagagtcagtcaggcagatggggggctggtgtggaagatcctttgggctag

SEQ ID NO: 13000 - RNA, 825 nt, synthetic construct
  misc_feature 1..825: note = source = /note="Description of Artificial Sequence: Synthetic coding sequence"
  source 1..825: mol_type = other RNA
atgtggcggtgcccccttggccttttgttactcctgccactagccggccacctcgccctcggagcacaacagggcagaggccggcgggagctcgctcccggcctacacctacggggcatcagagacgccggagggagatactgtcaggagcaggatctctgttgtagaggacgggctgatgattgcgcgctgccttatttgggcgccatctgctactgcgaccttttttgcaaccgtaccgtttccgattgttgtccagacttctgggacttctgcctgggagtgcccccacctttcccacctattcagggctgcatgcacggggggaggatttatccagtgttgggaacatattgggataattgtaatagatggccacccttggaatgttgggatcttctgccgcctgcgcttccagggcccgtctgggctgcgctgggagccaaagaagagatggcaggaaaggacagaactgtatactgcccactgttgatgaaagcactgggtgctcgagtcggtgagtgtccaggatgtcagagcccccagagaatgctgcccgagtcatcccgtgtactcttgccgaggtgtgctgagggggagcagcctggagttcagagagggaaaggcagaatgagaaaggcctttcccgcactacaaaccccattagccctcccatctagtgcccccgcctcacccggagcagggaaaccgtctcacaccggctcttggctacctctgagacttctgaagcgccagcactggcgatgggagccatggaccgcctgcaaagaagcggtccagcacctcgtgatcacagagttatag

SEQ ID NO: 13001 - RNA, 438 nt, synthetic construct
  misc_feature 1..438: note = source = /note="Description of Artificial Sequence: Synthetic coding sequence"
  source 1..438: mol_type = other RNA
atggcgcaactgttcctaccactcctagccgctctggttttggcccaggctcccgccgccctggcagacgttctagaaggggacagtagtgaagatcgggccttcagggttagaattgccggtgacgccccattgcagggcgtgctgggtggtgcactgacaatcccgtgccacgtacactaccttaggccacccccaagccgaagggccgtactcggatctcctcgggtcaagtggacattcctttctcgtgggagagaggccgaagtccttgtagccagaggcgtgcgcgtcaaagtgaatgaggcctaccgatttcgcgtggccctcccggcttatccagcatccctgaccgatgtcagcctggcacttagcgaactacgccctaacgatagcgggatctatagatgtgaggtccagcatggaatcgacgattag

SEQ ID NO: 13002 - RNA, 567 nt, synthetic construct
  misc_feature 1..567: note = source = /note="Description of Artificial Sequence: Synthetic coding sequence"
  source 1..567: mol_type = other RNA
atgtttcaccaaatttgggccgctctcctgtatttctacggtattatcttaaactctatctaccaatgtcctgagcattcccagcttactaccctaggggtggacggcaaagaattccccgaggtccatctcggtcagtggtacttcattgcaggcgcagcccctacaaaagaggaattagcgacattcgaccccgttgacaacatagtctttaacatggctgcagggtcggctcccatgcagctgcacttgagagctaccattagaatgaaagacggactttgtgtcccacggaagtggatataccacctcacggaaggctcaaccgatcttagaaccgaaggcagacccgatatgaagacagaacttttctctagttcctgtcccgggggtataatgctgaatgagacaggccaggggtaccagaggttcctgttatacaatagatccccccatccccccgaaaagtgtgttgaggagttcaagagcctgacatcatgcttagacagtaaggctttcctcctgacccccaggaaccaagaagcttgcgagctctcaaataattag

SEQ ID NO: 13003 - RNA, 558 nt, synthetic construct
  misc_feature 1..558: note = source = /note="Description of Artificial Sequence: Synthetic coding sequence"
  source 1..558: mol_type = other RNA
atgggccccgccgggtgtgctttcaccctattactgctgctgggaataagcgatagagactatcattcagcgctgcaggaagcggaggtgccgatcatagaccgacaggcctgcgagcaactctataatcctattggaatattcttgcccgcactggaacccgtcatcaaagaggacaagatttgcgccggcgatacacaaaacatgaaggattcttgtaagggagattctggagggcccctcagttgccatattgatggagtgtggatccaaaccggagtagtgagctggggacttgaatgcggaaagtcactgccaggagtttatactaatgtgatatactaccagaaatggatcaacgcgacaatctcacgcgcaaacaacttggatttctcagattttcttttcccaattgtgctcctatctttggccttattgcgtccatcctgtgcgttcggccctaatacaatccacagagtcgggactgttgcagaggccgttgcatgtatccaggggtgggaagagaacgcttggaggttctctcctcgcggccgttag

SEQ ID NO: 13004 - RNA, 1653 nt, synthetic construct
  misc_feature 1..1653: note = source = /note="Description of Artificial Sequence: Synthetic coding sequence"
  source 1..1653: mol_type = other RNA
ccagcccccgcatctcgcaaactcttgccacgtcgccacctttccgagaagtctcaccacattagcatccctagtccagatatcagccacaagggactgcgctccaagcgaacacaacccagcgacccggaaacctgggaaagcctccccagattagatagccagcgtcatggggggccggaatttagttttgacctgcttcccgaggctcgggcaattagagttaccattagttccgggcccgaggtatccgtcaggctgtgtcaccagtgggcgctggaatgtgaagaactcagctccccatatgatgtccagaaaatcgtgtctggcggccacaccgtggagctgccgtacgaatttctgctgccatgcctttgtatcgaggccagttacctccaggaggataccgtccgcagaaaaaaatgtccatttcagtcatggccagaggcgtatgggtcagacttctggaagtcggtgcacttcacagattactcacaacatacccagatggtgatggccctaacccttagatgtcccctcaaactcgaagccgctttgtgccagaggcacgactggcacaccttgtgtaaagacttacccaacgcaacagctagggagtctgatggttggtacgttctggaaaaagttgatctgcatcctcagttgtgttttaagttttcgttcggcaattcaagtcatgttgagtgtccacaccagactggatcacttacttcttggaacgtctcgatggacacccaggcgcagcaactcattttacactttagttcgcgaatgcatgcaaccttttctgctgcatggtcactgccaggccttggccaggataccctggttcccccagtatatactgtgagccaggccagaggctcaagcccagtgagcctggatctcataatcccctttctacgccccggctgctgcgtgctcgtgtggcggtcagacgtgcagtttgcatggaaacatctgctctgccccgatgtgtcatatcgacaccttggactgcttattcttgcgctgctcgcactcctaaccctgcttggcgttgttcttgccctgacttgccgacgtcctcaaagcgggcccggtcccgcccgtcccgtgttgctattgcacgctgctgatagtgaagctcaaaggcggctggtcggagccttggccgagttgctacgcgccgcactgggcggtggacgagatgtgatagttgacctttgggagggaagacatgtggccagagttggacctctaccctggctctgggctgcgcgcacacgcgtagcacgggagcagggcacagtgttgctgctatggtctggagcagatctgcggccagtaagcggaccagacccacgcgcggcacctctgctggccctactgcacgccgctccgcgacctctgctgctgctcgcttatttctctaggctttgtgcaaaaggcgacattcctccccccctacgggccctccctcgctacaggttacttagggatttgccaagactcctgagagcgctggatgcccgccccttcgcggaggcgaccagctggggcagactcggggcgcgacagcgtcgacagtctagactggaactgtgctccagacttgagagggaagctgctcgtctcgccgacctgggatag

SEQ ID NO: 13005 - RNA, 816 nt, synthetic construct
  misc_feature 1..816: note = source = /note="Description of Artificial Sequence: Synthetic coding sequence"
  source 1..816: mol_type = other RNA
atgggtattgtgtgcgcgcagtgttcattcatcctcttactgtcaattatccgcgcccggcctcccccatttctgttttgccctctctccagccagcgaacagagtccccctacaagccggtacatctgggcctgggccccacagacaaagttgccgctatagcaatggctcgcattatcgacctcgtcccatgggacgacgggagtacacatgtatacgcctcaccagctatcctccttcccatggaacgacagagaaaccaactcgcaggagtgaagcaacaactgtaccatcccgccctgcctactctgcgccacatggaccgcgacacggtaaaagcctgtctccctgatgagcattgtcagtcaaccacatactgcagaaaagatgaatttgataacgcccattttacgctgctgggggtccctaataagcccctgcaatgcctggatatcacggctaccggccagaaactgagaaaccgatatcacgagggaaaattggccccaatcgcacccggaattaatagagtcgactggccatgtttcaccagagccattgaagactggtcacattttgtgtcctcggcaggagagtttaagctgccttgtttacggaagcgcgccgaaggcctctcagggtacgcggttcgctaccttaaacctgacgttacacaaacctggcggtattgtctctctcagaacccatctctcgatagatatggacagaaaccactcccattcgactccctcaacacgttccgctcttttggttcttcttattcaagagtaaactatctgactccttggcattag

SEQ ID NO: 13006 - RNA, 1743 nt, synthetic construct
  misc_feature 1..1743: note = source = /note="Description of Artificial Sequence: Synthetic coding sequence"
  source 1..1743: mol_type = other RNA
atgcacctcagcgctgtgtttaatgcactcctagtctctgtgctggccgccgttctgtggaagcacgttcgactgcgcgagcacgccgccacactggaggaagagctcgctctgagtcgccaggccaccgagcccgctcccgcgttaagaatagactacccaaaggctctgcagattttgatggaaggcggaacccacatggtgtgcacaggtcggacccacacggataggatttgcaggttcaaatggctgtgctactctaatgaggccgaggagtttatattctttcatggcaacacgtcagtaatgcttcctaatcttggaagccgccggttccagcctgccttgctggacttgtccaccgtggaagaccacaatacacaatatttcaacttcgtcgaactgcccgccgccgctttacgatttatgcctaaacccgtgtttgtgccagatgttgccctgattgccaacagattcaatcctgacaacttgatgcatgttttccacgacgacctcctgcccctgttctacactctaaggcagttccccggcctcgcacatgaagcccggctcttcttcatggagggctggggggaaggtgcccacttcgacctgtataaattgctaagtcctaagcagcctctgctgcgcgcccagctgaaaactctgggacgcctcctatgtttcagccatgcttttgtcgggctgtctaaaattaccacgtggtaccaatatggcttcgttcagcctcagggccctaaagcaaacattctcgtctcaggcaatgaaattcggcagttcgcaaggtttatgacagaaaagctaaatgtgtcgcacacgggcgtgccactcggcgaagaatacatcctagttttttcacgcacccaaaatagattaatcctgaatgaggccgagttgcttctggctctagcccaagagtttcaaatgaaaaccgtgacagtctctctggaggaccacaccttcgctgatgtggtgcgcctggtctccaatgcaagcatgctagtctccatgcacggggcgcagctcgtaacgactcttttcctccccaggggagccactgtggtggaactgttcccgtacgccgtcaatcctgaccattacaccccttacaagactctcgcaatgctgcctggcatggatctgcagtacgtcgcctggcggaatatgatgcctgagaacacagttacccaccctgagaggccgtgggatcagggtggaatcacacacttagacagagctgaacaggcacgcatcttacaatctagggaggtccccaggcatctttgttgccgcaaccctgagtggttatttaggatttaccaggacaccaaagttgacattcctagtttgattcagaccatacgccgggtggtgaaagggaggcctggccctaggaagcaaaagtggaccgtcgggctttaccccggaaaagttagggaggcgcgctgtcaggcaagcgtgcacggcgcctccgaagccagactcacagtgtcgtggcaaatcccatggaatctgaaatacttgaaagtgcgcgaagttaagtacgaggtgtggctgcaggagcagggcgagaacacctatgtgccctacattctggcactgcaaaaccacacttttacagaaaacatcaagccctttacgacctatctagtttgggtccgatgcatcttcaataagattctcctcggtccattcgccgatgtccttgtctgtaatacttag

SEQ ID NO: 13007 - RNA, 513 nt, synthetic construct
  misc_feature 1..513: note = source = /note="Description of Artificial Sequence: Synthetic coding sequence"
  source 1..513: mol_type = other RNA
atggagtttgtcgacgtaaccgaatctaatgcccgttgggtgcaagacttccggctgaaagcatatgcatcaccagcgaaactggaaagcattgacggggccagataccacgccctgttaataccttcatgtcctggtgctctcaccgatctggcaagctctgggtctctcgcccgaattctgcagcacttccacagcgagtctaaacctatctgcgccgtaggtcacggagttgccgcattgtgttgcgccaccaacgaagatcgctcatgggtctttgattcatatagcctgaccggcccgtctgtgtgtgaactcgtccgggcccctggatttgcacgcctccccctggtagttgaagatttcgtgaaggacagtggagcctgtttttcggccagcgagcccgatgcagtacacgtggtgttagacagacacttagtgacggggcagaacgctagctcaacagtgccagcggttcagaaccttctgttcctatgcggatcaaggaaatag

SEQ ID NO: 13008 - RNA, 1041 nt, synthetic construct
  misc_feature 1..1041: note = source = /note="Description of Artificial Sequence: Synthetic coding sequence"
  source 1..1041: mol_type = other RNA
atgcgcctgcttttccttgcggttttaagaccacataccggaaacgcggtgacagcccagagagtgcgtgctcatctggaggccgccggacatgtgtgcgtgttgaaagatgcctttgattttgagagtcggagtgaaattgccaacctcattttagctgaaaattgcgaggccgcactggctttacacctctaccgaggcggccggcttctgcagggtcacagaatcccctttggcgtaatcttcggcggaactgacgtgaacgaagatgctaatcaggcagagaaaaataccgtgatggggagagtactggaggaagcccgttttgctgtggctttcaccgagtctatgaaagaaatggcccaggcgcagtggccccacgcaaagggcaaggtgtacgtccagagccaaggaatcgcgaccacccctaatgccgcttttaattggaatacttttctgcagcgcagcgaaattaaccagagtgcagacaatctgcacatttttctgcttatctgtggcttgaggcaggttaaggatccactgtacttagtcgacgcatttagtgcctggcaccaggaggagcccaatgtgcacttagtgatcgtgggacccgaagtagacccggtcttcaccagagaagttaaagctaaggtgaaaagagctgcaggcgtgcgcctgattggagagatgccccaggaggatctgcatgctgtcgtaaagaactgctttgctgtagtgaacagctccgtgtccgaagggatgagcgcagccattctggaggccatggatttggaagtgcctgtgctcgcacgaaacattccaggaaacgccgcagtagtgaagcatgaggtcactggtttgctgttttctaaccctcaggagttcgtccacctggcaaagcgccttgtctctgaccctgctctcgagaaggaaattgtggtaaatggaagggagtacgtgcggatgtaccactcatggcaggttgaacgtgatacttatcaacaactgatacgaaaattagaagggagtactgaagactag

SEQ ID NO: 13009 - RNA, 1482 nt, synthetic construct
  misc_feature 1..1482: note = source = /note="Description of Artificial Sequence: Synthetic coding sequence"
  source 1..1482: mol_type = other RNA
tccgaggctgtgtaccttaatgactccacttacgatggacacaccgttggcggtcttcagtacgggggtctggggcagcttgctgacggcgtggttggcttggacgacttccggaagagtcaggagctccgagtgtggccaggctatgattatgtgggctggagcaaccattccttcagtagcggatacgtcgagatggaatttgagtttgatcgccttcgcgccttccaggccatgcaggtgcattgtaacaacatgcacaccctcggagcccgcctgcccggcggggtggaatgtaggttcagaagaggtccggcaatggcttgggaaggtgagccgatgcgacataacttgggagggaacttgggggatccacgcgcccgagctgtgtctgtaccactgggcggccgcgtggcaagatttttacagtgccgtttcctgtttgccggaccttggctcttattctcagaaatctccttcatctcagatgtggtcaacaattcatcaccagcccttgggggtacctttcccccggcgccttggtggccaccaggccccccacctaccaatttctcttctctcgagctagaacccagaggacagcaacctgtagccaaggccgaaggctcccccacagcaatcctcattggctgtctagtcgccataatcctgctgctcctgctgatcatcgccctaatgctgtggagactgcattggagaagattactctcgaaggtcctggaatcgcatcctcgcactagaagtcccggtctggttgggattcgtccaacccccttacccgtgtcacctatggccttgaggtgctgttcccccatccagcccaccgctagtttttggccacttaccccagtgcctctggaagcacgcgcacctcctcaccctcctggacccaatccccctaccccacggggtgttacaggaggaaatacatatgccgttccggctctgcccccaggggccgttggtgatggcccaccacgggtagactttcctagatcccgcctgagattcaaggagaagctgggcgaaggacagttcggagaagtgcacctctgcgaagtggactcccctcaggacctcgtgtctttggatttcccccttaatgtccgcaaaggacaccctctgttggtggctgtgaaaattctgagacccgatgcaacgaagaacgctcggaatgattttctaaaagaagtgaagatcatgagcaggctgaaggacccaaatattatcaggctcctcggtgtttgtgtccaggacgatcctctttgtatgataacagactatatggaaaatggagacttaaatcagtttctctcggcacaccagctggaagacaaagccgccgagggagcacctggggacggccaggcggcccaaggccccactatcagctaccctatgctcctgcacgtagccgctcaaatagcttccggcatgagatacctggccaccttgaactag

SEQ ID NO: 13010 - RNA, 354 nt, synthetic construct
  misc_feature 1..354: note = source = /note="Description of Artificial Sequence: Synthetic coding sequence"
  source 1..354: mol_type = other RNA
atgttaattttctggaccattacactgtttctgctcggggctgccaagggaaaagaagtctgctacgaagatctgggctgcttttctgataccgaaccatgggggggcacagccattcgacctctgaaaatcctgccctggtctcctgagaaaattggaacaagattcctgctctacactaacgaaaatccaaataatttccagattctcctgttaagcgatcctagcaccatcgaggcgagtaacttccaaatggatcgtaagacccggttcatcatacacggatttattgataagggggacgaatcatgggtgactgatatgtgtaaaccgggcgcatccccccgggcctag

SEQ ID NO: 13011 - RNA, 1581 nt, synthetic construct
  misc_feature 1..1581: note = source = /note="Description of Artificial Sequence: Synthetic coding sequence"
  source 1..1581: mol_type = other RNA
atgcaaggaccactacttttacctggactgtgcttcctacttagcctctttggagctgtcacacagaaaacaaaaacatcttgcgctaagtgtcctccaaacgcctcatgtgtgaataatacccattgcacctgcaaccatggatacactagcggctctggccagaagctgttcacgttccccctggaaacctgcaatgccatcgagacccaggccattaccgacaactgttccgaggaacggaaaacgttcaatttaaacgtacagatgaacagcatggatattcgctgttccgatatcattcaaggggacacacaggggccttcggcaattgccttcatttcctatagctctctcggaaacatcatcaatgctactttcttcgaggagatggataaaaaggaccaggtgtatttgaatagtcaggtcgtctccgccgccataggaccaaagaggaatgtatctttgagcaagtctgtgaccctaacgtttcaacatgttaagatgacacccagtaccaaaaaagtcttctgtgtttactggaaatccactggccaggggagccagtggagtcgggacggctgttttctcattcatgtcaataagagccacacgatgtgcaattgttctcatttgtctagcttcgcagttttaatggctctgactagccaagaagaggatcccgttctgacagtgataacatatgtgggattatcagtcagcctcttgtgcctgctactcgcagctctcactttcctcttgtgcaaggctatcaggaacaccagcactagcctgcatctgcagctgagtctttgcctgttcctggcgcacctcctgttcctggttggcattgataggacggagccaaaggtgctctgtagtatcatcgctggggccttacactacctgtatctcgcagccttcacctggatgctgctggaaggcgtccaccttttcctcactgcccgaaatctgaccgtagttaattatagttccatcaacagacttatgaagtggatcatgttccccgtgggctacggcgtcccagctgtcacagttgcaatcagtgccgctagctggcctcatttgtacggcacggccgataggtgttggctccaccttgatcaaggcttcatgtggtcctttctgggaccagtctgcgctattttctctgccaacctcgttctgtttatcctagtattctggatattaaaacgtaaactgtccagcttaaattctgaggtctcaacaattcagaatacccggatgctcgcgttcaaagccactgcacaattgtttatcctgggctgcacttggtgtctcggactattgcaggtgggccctgcagcacaagtgatggcctacctgttcaccataatcaattccctccaggggttcttcatatttcttgtatactgcttgctgtcccaacaggtccagaaacagtatcaaaaatggtttcgcgaaatcgtcaagtccaaatctgaatctgaaacttacacactctccagtaaaatgggccccgacagtaaaccatctgagggcgatgttttcccaggtcaggtaaaacgaaagtattag

SEQ ID NO: 13012 - RNA, 5832 nt, synthetic construct
  misc_feature 1..5832: note = source = /note="Description of Artificial Sequence: Synthetic coding sequence"
  source 1..5832: mol_type = other RNA
tgacctagtctggctggacggggggcagggaggatggcccctggcgctctccgcggaggttgtgaacagcgagctccagggggcggagctaggacggccgcgctgggaccttggccctggccatcacccgggccggcaccctctcccggcgctgcccccccacggtcccgaaagatgagtggcgcgttactgtggccattacttccattgctgcttctgttgctgtcggcccgtgatggtgtccgcgccgcccaaccccaggcccccggttacctgatagctgccccttcagtattcagagcaggggtagaggaggtcattagcgtgaccatcttcaactctcccagggaggtcacagtacaggctcagctggttgcccaaggagaacctgtcgttcagtcccaaggtgcaattctggataagggaaccatcaaacttaaagtcccaacaggtctcaggggccaggctctcctgaaggtgtggggtcggggatggcaggccgaagaggggcctttgttccacaatcagacctcagtgactgttgacgggcgcggcgcctctgtgtttattcagacggacaaacccgtgtatagacctcagcaccgcgttctcatctcaatttttaccgtgtcaccgaatttgagacccgtgaatgaaaagttggaggcttacatacttgacccacggggatctcgcatgattgagtggaggcaccttaagcctttttgctgcggcattaccaatatgtcattccccctcagcgatcagcctgtgctgggagagtggtttatatttgttgagatgcaggggcacgcttacaacaaatcattcgaggtacagaagtatgttctgccaaagttcgaactgctgatcgacccgcctcgctacatccaggacctcgatgcatgtgagactgggactgtgcgagcaaggtacacgtttgggaaaccagtggccggcgcccttatgatcaacatgaccgtaaatggtgtcgggtattattctcacgaagtgggtaggccagtactgagaactaccaaaatattagggagccgggacttcgacatttgcgtgcgcgacatgattcccgcagacgtgcccgagcatttccgcggtcgggtttcaatctgggcaatggtgacgtccgtcgatggatcccagcaggtcgcttttgatgatagcacacccgtacagagacaactggtagatattcggtattccaaggatacgagaaagcagtttaagccaggcctcgcgtatgtcgggaaagttgagctgtcttatcctgacggctcgccagcggagggggttaccgtgcagataaaagctgagcttacacctaaagacaatatttacacctcagaagtcgtgagccagaggggcctggtggggttcgaaatcccatctatcccaacgtccgctcaacacgtgtggctggagacaaaggttatggctctcaacggcaaaccagtgggcgctcagtatctgcccagctacctcagccttggtagttggtatagtccctctcagtgttacctgcagttgcagcctccatcacatcctttgcaggtgggagaggaagcctacttttccgtgaaaagtacttgcccatgtaatttcaccctgtattacgaagtggctgctagagggaatattgtgctgtccgggcagcaaccggcgcacactactcagcaaaggagcaagagagccgcgcccgccttggaaaagcccattagactgactcacctgagcgaaacagagcctcccccagccccagaagctgaagtcgacgtttgcgtgacatctctccacctggcggtcacccccagtatggtgccactcggccgcctactcgtgttttatgtgcgggaaaatggcgaaggtgtcgctgacagtctccagtttgcagtcgagaccttttttgaaaaccaggtgtccgtgacgtattcagcgaatgagactcaaccaggagaagtcgtcgacctgcgaattagagctgcaagagggtcttgtgtttgcgtggcggccgtggataagagcgtctacctgcttaggagcggtttcagactgaccccagcccaggtgttccaggaattggaagactatgacgtgtctgactcttttggtgtgagtagggaggatggccctttttggtgggccggtttaaccgcacagaggcgtaggcgaagcagtgtgtttccttggccgtggggaataactaaagactctgggttcgctttcacggagaccggcctggtggtgatgactgatcgggtctcgctcaaccatcggcaggatggcggattatacaccgacgaggcagtgcccgcctttcagccgcacaccgggagtctggttgcagtcgcaccttctcggcaccctcccaggacagagaagcgcaaaagaacatttttccctgagacttggatttggcattgtctgaacatcagtgaccctagcggcgagggaacgctcagtgttaaagtgcccgattccatcacttcatgggtaggcgaggccgtcgcactctcaaccagccaggggttgggcatcgccgaacccagcttgttaaaaacctttaaaccctttttcgtcgattttatgctgcctgcccttattattcgcggcgaacaggtgaaaatacccttatccgtctataactatatgggcacttgcgctgaagtttacatgaagttgagcgtacccaaaggaatacagttcgtgggtcatcctggaaagagacacgtgactaagaagatgtgcgttgcacccggggaagccgagcccatttgggtcgtcctgtcgttcagcgatttggggttgaataatatcactgccaaggctttggcttacggcgatacgaactgttgccgagacgggagatctagcaagcacccagaagagaaccatgccgacagaagagtgcctatcggtgtcgaccatgtgcggcgcagtgttatggtcgaggcggaaggcgtcccaagagcatacacatactccgcgttcttctgtccgtcagagagggtacatatctccacccccaacaagtatgaattccaatacgtgcagcgacccctcaggcttacccgcttcgacgtcgctgttagggcgcacaatgacgctcgtgttgctctgagcagcggcccccaggacaccgcgggcatgatagaaatcgttcttggcgggcaccaaaatacccggtcttggatctcaacatctaagatgggagagcccgtagccagcgcacatacggccaagatcctgtcgtgggacgagttccgtaccttttggatttcttggcggggcggtctcatccaggtgggccatggacccgaaccttccaacgagtcagtgatcgtggcctggaccttacccaggccccctgaggttcaattcataggtttcagcactggatgggggtccatgggagagtttcggatatggaggaagatggaagtggacgaatcctattcggaggctttcacgctcggtgttccccacggcgcaattccagggtctgagagggccactgcatccattattggagatgtgatgggccctaccctaaatcacctcaacaatctgctacgtctgccttttggctgcggggagcagaatatgatacacttcgcgcccaacgtgttcgtcctgaagtacctgcagaagacccagcagctgagtcctgaggtggagcgggagacaacagattaccttgtgcaggggtatcagagacaactgacgtacaaacgccaggacggctcgtactcagcatttggcgaacgggatgcaagcgggagcatgtggttaacggctttcgtattaaagtcctttgcccaggctagaagctttatcttcgtagacccacgggagctggccgctgccaaaagctggattatccagcagcagcaagctgacggatcattcctcgccgtcggacgcgtgctgaacaaagacatacagggtggaattcacggtactgtgccgctaaccgcgtacgttgttgtcgccctgttggagactggcacagcttccgaagaagaacgtggatccaccgacaaggcgaggcactttttagagagtgcagctccgctggcgatggacccctattcctgcgcattaactacatacgctctcaccctcctacgttctcccgctgctcccgaagcacttagaaaactgagatcacttgcaattatgagggacggagtgacgcattggagcctgagcaattcctgggacgtagacaaaggtacgttcctgagtttctctgaccgcgtctctcagtctgtggtctcagccgaagtggaaatgaccgcctatgcactactgacttacactctgctcggcgatgttgcggccgccttgcccgtcgttaaatggctgagtcagcagaggaacgctctcggaggcttctcctccacacaggacacctgcgttgccctgcaggctttggctgaatacgctattctctcttatgctggcggcatcaatctgaccgtctctctggcgtcaactaacctggactaccaggagactttcgaactccacagaaccaatcagaaggtattacagactgccgccattccttcactcccaaccggcttattcgttagtgccaaaggcgatgggtgctgcctgatgcaaattgatgtcacctacaatgtgccggatcctgtggctaagccagctttccagttgctggtgtcactccaggaacctgaggcccaaggccggcctccccccatgcctgccagtgctgctgagggttcccgaggagactggccaccggccgacgacgacgaccccgcggccgatcaacaccaccaagagtataaggttatgctggaggtgtgcacccgctggctccacgcaggctcatccaatatggcagtgctggaggtgcctctgttgagtggcttcagagccgacatcgagtcccttgaacagctcctgctggacaaacatatggggatgaaacgctacgaggtggccggtagaagagtgctcttttattttgacgagatccctagtcgctgtcttacttgcgttcgatttagagcattacgcgaatgcgtagtcggccgaacttccgccctccccgtttccgtttacgactattatgagccagccttcgaggctaccagattttataacgtctccactcactcccctctggcacgcgagctgtgtgcaggcccagcctgtaatgaggtggaacgcgcacctgcacgtggcccagggtggtttcctggagagtcaggccccgccgtggccccagaagaaggagcagctattgcacggtgcggctgcgaccatgattgcggagcccaggggaaccctgtgtgtgggagcgacggagtcgtgtacgcgtctgcctgccgcctgcgtgaagcagcctgccgccaggctgcaccgttggagcctgcgcctccttcctgctgtgccttagaacaaagactgcctgcaagctctagttcaacgtacggtgatgatctggcctcagtcgcacccggtccgcttcagcaagatgtgaaactgaatggggccggcctcgaggtcgaagattcggacccagaacctgaaggcgaagcggaggacagagttaccgccggcccgcggccccctgtatcttctggcaatcttgaatcatccacgcagagcgcatcaccttttcatcggtggggacaaacgcccgctccacaacgacattcaggcagagtggtgggagctcatcgacccggactgctcagtcctgttttcgtatacagtcccgctttccagagtgggggagaagaaggactgtggatgagtaatacctgtacgctacggtag

SEQ ID NO: 13013 - RNA, 456 nt, synthetic construct
  misc_feature 1..456: note = source = /note="Description of Artificial Sequence: Synthetic coding sequence"
  source 1..456: mol_type = other RNA
atggaggccaccggaaccgatgaagtagacaagttaaaaactaaatttatctccgcatggaataacatgaaatactcctgggtactcaagaccaagacatatttcagcagaaattcaccagtcctgctgttgggcaagtgctatcatttcaagtacgaggacgaggacaaaacccttccagcagaatcaggatgtaccattgaggatcacgtgattgcaggcaacgttgaggaattccggaaagatttcatctcccgaatttggctgacttatagagaagaattcccccaaatcgaagggtccgcactcaccactgactgcggatggggatgcacgttgcgaactggccaaatgcttctcgcgcagggcctaatcctgcatttcttaggcagagcatggacttggccagatgctctgaacatcgagaattcagactccgagtcctggaccagctag

SEQ ID NO: 13014 - RNA, 2616 nt, synthetic construct
  misc_feature 1..2616: note = source = /note="Description of Artificial Sequence: Synthetic coding sequence"
  source 1..2616: mol_type = other RNA
atgcgcaaaccaaggaggaagagcaggcaaaatgcagagggccggcgttccccctctccatattccctcaaatgctctccaactagggaaactctcacctacgctcaggcgcagaggatcgtagaggtcgatatcgacgggagattgcaccggatcagcatctatgatccactgaagatcatcacagaagacgaactgacagcacaagatatcaccgagtgtaattcaaataaggagaatagcgagcaaccacaatttccaggaaagagcaagaagccatctagcaagggcaagaaaaaagagtcgtgctcgaagcacgccagcggtacatcttttcacctcccacagcctagcttcaggatggtggattctggcatacagcccgaggctcctccgttgcctgccgcatattatcggtacattgagaaaccccctgaagatctagacgcggaagttgaatatgacatggacgaagaggatctggcttggctggatatggtgaacgaaaaaaggcgggtggatggacacagcctggtcagcgccgacactttcgaactgcttgttgaccgccttgaaaaggaaagctatttagagtctcgatcatccggagcccagcagtccctaattgacgaggacgccttttgttgtgtatgtctggatgacgaatgtcataactctaatgtgattctattctgcgatatttgtaatctcgctgttcatcaggaatgctacggagtgccatatatcccagaagggcagtggctctgtcgttgctgtctccaaagcccttcccgccctgtggactgtatactgtgtccaaataaaggaggagcctttaagcagacgagtgacgggcattgggcacatgtcgtgtgcgcaatttggatccccgaagtttgtttcgcaaatactgtgtttctggaacctatcgaggggatcgacaatattcctccagcaagatggaaactgacgtgttatatttgcaaacagaaaggccttggggccgccatccagtgccacaaggtaaactgctacacagctttccatgtaacttgcgcccagcgtgccggcctgttcatgaagatcgaacccatgagagagacatctctgaacgggactatctttactgtcagaaaaacagcttactgcgaagctcactctccaccgggcgccgctactgcccgccgcaagggtgattctccaagaagtatttctgagacaggtgatgaggagggcctgaaagaaggtgacggggaggaggaggaggaggaggaggtcgaagaggaggaacaggaggctcaaggaggggtgagtggctccctcaaaggcgtgcccaaaaaatccaagatgtccctgaaacaaaaaattaaaaaagagcctgaggaggcgggccaagacactccttcaaccttaccgatgctcgccgttccgcagattccttcctacaggttgaataagatttgttcaggactctcttttcagcgcaagaatcagttcatgcaacggttacataattactggctactcaagcgacaagcccggaatggtgttcctttaattagaagacttcacagtcatctgcagagtcagagaaatgccgagcaacgagagcaggacgagaagaccagtgcagttaaagaagagttgaagtattggcagaagcttcggcacgatttagaacgcgcgagattactgatcgagctgattagaaagagggagaagcttaagagagaacaggtgaaagtgcaacaggcggcaatggagcttgagctgatgccttttaacgttctgctgcgaactacactagacctactgcaagaaaaagatccagcccacattttcgccgaacccgtgaatctgagtgaggtgcctgattatctggaattcatcagtaaacccatggatttcagcaccatgcggcggaagcttgaatcccatctgtatcgcaccctggaagagttcgaggaagattttaacctgattgtgaccaactgcatgaaatataatgccaaagacacgatctttcatcgcgctgcggttagacttcgtgacctgggcggggcaatcttgaggcatgctaggcgacaggcggaaaacattggttacgatcccgaacgtgggacccacctcccagaatcgccgaaactcgaggatttctaccgttttagttgggaagatggaagatccctgctcctaccttttgaggatcgtggcgacctggagccattggagctcgtgtgggctaagtgtaggggctacccgtcctaccccgctttaatcatcgatccgaagatgcctagagagggccttcttcataatggagtgcctatcccagtgccccccctcgatgttctaaagttaggagagcagaagcaggctgaagcgggggaaaagctcttcttggtactgtttttcgataataagagaacatggcagtggctcccacgcgataaggtgctcccactgggcgtcgaggatactgtggataagttgaagatgcttgagggacggaaaaccagcatcagaaagtctgtgcaggttgcttacgatcgagcaatgatacatttgagcagggtgagaggaccccacagcttcgtgactagctcttacctgtag

SEQ ID NO: 13015 - RNA, 2700 nt, synthetic construct
  misc_feature 1..2700: note = source = /note="Description of Artificial Sequence: Synthetic coding sequence"
  source 1..2700: mol_type = other RNA
atgctgctccttcttctgctcgcaccgttgtttctgagaccaccgggcgccggaggcgcacagactccaaacgcgactagtgaaggttgccagatcattcacccaccgtgggaggggggtattaggtaccggggtctaacccgtgaccaagtaaaagccatcaatttcctgcccgttgattatgagatcgagtacgtgtgccgaggggagagagaagtggtgggacctaaggtgagaaaatgtttggccaatggcagctggacagatatggacactcccagtcgttgcgtgaacagaaccccccacagcgagagacgcgctgtttatattggtgctctgttcccaatgtcaggaggatggcccggcggccaggcctgccagcccgctgtcgaaatggctctggaagacgttaactctcgtcgcgatatccttcctgactacgagttgaaactgatccatcacgactctaaatgcgatcctggtcaggccacaaagtacctgtatgaattactttataacgaccccattaaaattatccttatgccgggatgttccagtgtaagcacccttgtggccgaggccgctagaatgtggaatctcatagtgctgtcctatggctcttcttcaccggccctcagcaaccgccagcggtttccaacatttttcagaactcacccttccgcaacattacataaccccactcgcgtgaaactctttgagaaatgggggtggaagaagatcgccaccatccagcaaaccaccgaggtgttcacctccacccttgacgatttggaagagcgagtaaaggaggccgggatagagattacctttcgacaatcgtttttcagtgaccccgctgttcccgtgaaaaatctaaagcgccaggacgcccggatcattgtaggtctgttttatgagacagaggctcgaaaagtattctgtgaagtgtataaggaacggttgttcgggaagaaatatgtgtggtttcttattggctggtacgctgacaattggttcaaaatttatgatccttccattaattgcaccgtcgacgaaatgactgaagctgtggaaggccacataacaacagagattgtgatgctgaatccagccaacacaagatctattagtaacatgacctctcaggaatttgtggaaaaactgactaaacgattgaagagacaccctgaggagaccggaggcttccaggaggctccgttggcttacgacgctatatgggcattagctctcgcactcaacaaaacttctggtggaggcgggagatctggcgtccggctcgaagatttcaactacaataaccaaacaatcacggaccagatttatcgcgcaatgaactccagctccttcgagggggttagcggtcatgttgtctttgacgcctccggatctcgcatggcctggacgctgatcgagcaactgcagggcgggagttataaaaagataggctactacgattccacaaaggatgatctgagctggagtaaaaccgataagtggatcggcggctcacctcccgcagatcaaaccttggtcattaagacatttcgcttcctgagtcagaagctgtttattagcgtttccgtcttaagctcactaggcatagtgctcgccgtagtttgcctctccttcaatatttataactcacacgttcgttacattcagaactctcagcccaacctcaataacctcacagctgtaggttgcagcttggcccttgccgcagtgttcccactgggtttggacgggtaccacattggaagaaaccaatttccgtttgtgtgtcaagcccgcttatggctccttggtcttggattctctctgggttatggttccatgtttaccaagatctggtgggtacacaccgttttcacgaagaaagaagaaaaaaaggaatggcggaagactctggagccatggaagctgtatgccaccgtggggctgctcgtgggcatggacgttttaacactagctatctggcagatcgtggatccattgcatcggactattgaaaccttcgcaaaggaagaacccaaggaggacatagatgtgagcatcctgccacagctggaacactgttccagcagaaagatgaacacatggcttggcatcttttacggctataaaggtctccttttgcttcttggcatttttctggcctatgaaaccaagtcagtctcaacagagaagatcaacgatcatagggccgtggggatggccatatacaatgtcgctgtgctctgcctgatcactgcccctgtgacgatgatcctgtcttcacaacaggatgcagcttttgcttttgcctcactagctatcgtcttcagcagttacatcacgttagttgtactgtttgtccctaagatgcgcaggctgataacccggggagagtggcagtctgaggcccaggatacgatgaaaacaggaagctcaaccaataataatgaagaagagaagtcgcggcttttagagaaagaaaacagagagttagagaagatcatagctgagaaagaagagcgggttagcgaactgaggcaccaactccagtcgcggcagcagctgagaagcaggcggcatccgcctactcctcctgagcctagcggcggactgccccgtggacccccggaacctccagacaggctgtcatgcgatggaagtagggtccacctactgtataagtag

SEQ ID NO: 13016 - RNA, 537 nt, synthetic construct
  misc_feature 1..537: note = source = /note="Description of Artificial Sequence: Synthetic coding sequence"
  source 1..537: mol_type = other RNA
atggaaacattcccgttgctacttttgtcgttgggattagttctagctgaggcatcagagagcacaatgaaaattataaaggaggaatttactgatgaggagatgcaatacgacatggccaagagcggccaagagaagcaaacgattgagattttgatgaacccgattctgttagtgaaaaatacaagcctcagcatgagcaaggacgatatgagctcaacactactgaccttccgctctctgcattataatgatcccaaaggcaactcatccgggaatgataaagagtgttgcaacgatatgacggtttggagaaaagtgagcgaagctaatggatcttgtaagtggtctaacaactttattcgttcttcgacagaggtgatgcgtcgcgtccatagagcaccctcttgcaaatttgtgcagaatcccggcattagttgttgcgagtcacttgagttggaaaacacagtgtgtcagttcacgacgggcaaacagttcccaaggtgccaataccatagcgtaacatccctcgaatag

SEQ ID NO: 13017 - RNA, 2184 nt, synthetic construct
  misc_feature 1..2184: note = source = /note="Description of Artificial Sequence: Synthetic coding sequence"
  source 1..2184: mol_type = other RNA
atgattctgtcacttcttttcagcctcggaggaccccttggctggggactgctcggggcatgggcccaggcctcatctaccagcctctccgatttacagtcttcgcggacccctggggtctggaaagccgaggcggaagacacaggcaaagaccccgtaggaagaaactggtgcccctatccaatgtcaaaactggtgactctgctcgcgttgtgcaagaccgagaagtttctgatccactctcaacagccttgtccccagggagccccggattgtcagaaggttaaggtgatgtatagaatggcccataagccggtgtatcaggtgaagcagaaggtgctgacaagcttagcctggcgatgttgccccggttacacaggcccgaactgcgaacaccacggaccgatggctgtatggtgctggcccgaacctgatagtcttcaggccaggctcggccagttgcagagaaacctgagcgaactgcacatgacgaccgcccgaagggaagaagagttgcagtatacattagaagacatgcgcgccactctcacccgtcatgtggacgaaattaaggagctgtactcagaatcagatgaaacattcgaccaaatctccaaagtcgaaaggcaggtcgaagaactccaggtcaaccacacagccctgcgagaactccgcgtgatcctgatggaaaagtctctcatcatggaggaaaataaagaagaggtcgagcgacagctgcttgaattaaaccttacccttcagcatttgcagggcggacatgcggatcttataaaatatgtgaaagactgtaattgtcagaagttgtaccttgatctcgatgtgattagagaaggccaacgcgacgccaccagggcactggaagagacacaggttagcctagacgaaaggcggcaactggacggttcttctctgcaagcattacagaacgccgtagacgctgtatccctggctgtggacgcccataaggctgaaggtgagagagccagggctgcaacatcacgcctgcggtcgcaagtgcaggcgttggacgatgaagtgggtgcattaaaagcagcagccgcggaggcgcgacacgaggtgcgccaattgcattcagccttcgcagcccttctagaagacgcactaaggcacgaagccgtgctcgcagcactttttggggaagaagtcctcgaggagatgagcgaacagactcccggtccactgccacttagctacgagcagatacgtgtcgccctgcaggacgccgccagtggactgcaggaacaggccctcgggtgggacgagcttgccgctagagtaacggcactggagcaagccagcgagccacctagaccggctgaacatttagaaccttcacatgacgcaggccgcgaggaagcagctacgaccgcactggccggtttggcccgtgaactgcagtctttatccaatgatgtaaaaaacgtgggccgttgttgcgaagctgaggccggcgcaggtgctgcctcattgaatgcctcactgcacggactacacaatgctctgttcgcgacccaacgatccctggagcagcaccagaggctgtttcactctctgttcgggaacttccaggggctgatggaggccaatgtgtctttagacctgggtaaattgcaaacaatgctaagccgcaaaggaaagaagcagcagaaagacttagaagccccacggaagcgagataagaaagaagccgagcccctcgtcgatatccgtgtgacaggtcctgtccccggtgccctgggcgccgctctgtgggaggctggttctcctgtggcgttctacgctagtttcagcgagggtaccgctgcacttcagactgtaaagttcaacactacttacattaacattggcagcagctatttcccagaacacgggtactttcgcgcgccagaacgtggcgtgtaccttttcgcggtgtctgtcgaattcgggcctggtcccggaaccggacagttagtgtttggaggacaccatcgaaccccagtatgtactactggccagggaagtggctctactgccacagtgttcgcaatggccgaacttcagaagggagagagggtgtggttcgaattaactcaagggagcatcactaagagaagccttagcggtaccgccttcggcggtttcctcatgtttaagacttag

SEQ ID NO: 13018 - RNA, 828 nt, synthetic construct
  misc_feature 1..828: note = source = /note="Description of Artificial Sequence: Synthetic coding sequence"
  source 1..828: mol_type = other RNA
atgggtagcgctccctgggcccccgtgctgttacttgcactgggactccgaggactccaggctggcggagagtggcggaggccacccgcgcattcacccgtgccagcccctccactgcggtttgcttccccccacagccctcaagggcctggcccccggctcccaggtgccctcctccctgctgcttctggcccactgcagttacgcgcactgcgtcagcaggatctgccaagcgcattaccaggcgtaggtcaggtgctcggaccaggtcgaggagcccacttattgctacattgggaacgcggacggcgcgtcggactgaggcagcaactagggctgagacgcggagcaggaggtagggctggcggttctacaggactcagaggcgccccattgctgcgtgaggttgcagcagttagatgcgccgtgcacgccgcccgggcacacggagctgcagacgggggtgctggtcctggccgcttgagaagagctgccccacgcgctacaaccaggccaaggggtccgggctgtcctaggcaccgactcaggtggaagctgtggggcgacgcacagtgtctcccggaagacgaagtctcccctcctggtggaggcggagctggcggacaaagagctagaagctcctgcggaagaccccgtagactgcaacccgtcttgcctggccgacatggaggttccctgagacacggacccttgggggtgagacatctccctgccgcggtgaggagggagggcccagacccagccctccacgtacgcccagaatgcttgcaccgcgccggacacgatgggttgccattgccccattag

SEQ ID NO: 13019 - RNA, 351 nt, synthetic construct
  misc_feature 1..351: note = source = /note="Description of Artificial Sequence: Synthetic coding sequence"
  source 1..351: mol_type = other RNA
atggcagctggatccgccccaatgcagctacacttgcgcgccacaataagaatgaaagacgggctgtgtgtaccccggaagtggatttaccacctcacagagggttcaaccgacctgaggactgaaggccgaccagacatgaagaccgagctgttttcctcttcttgtcccgggggcatcatgctcaacgagactggacagggctaccagcgattcctgctgtataataggagtccacatccaccagagaagtgcgtggaagaatttaaatcccttacctcttgcctggacagcaaggcctttttattaaccccacgcaaccaggaagcttgcgaattgtctaacaactag

SEQ ID NO: 13020 - RNA, 522 nt, synthetic construct
  misc_feature 1..522: note = source = /note="Description of Artificial Sequence: Synthetic coding sequence"
  source 1..522: mol_type = other RNA
atgcattggaagatgctcctcctgctgctattgtattataacgctgaagcaagcatgtgtcaccgctggtctagggcggtcctgtttccagctgcccaccgaccaaagcgtagttcctccctccccctgaatcccgtcctccagacatctctcgaagaggtcgaactcctctacgagttccttctcgccgagctcgaaattagccctgacctgcagatcagcatcaaagatgaagaactcgcttctcttagaaaggctagcgacttccgcacagtgtgtaataatgtcattcctaagtcaattcccgacattcggagattgtccgcaagccttagttcccaccctggcatcctcaaaaaagaagattttgaacgaacggtgttgacactagcttacacagcctacagaacggctctatcacatggtcatcaaaaggatatatgggcgcagtctctggtatctttgttccaagctcttaggcatgatctcatgcgctcatcacagcccggtgtccctccttag

SEQ ID NO: 13021 - RNA, 1482 nt, synthetic construct
  misc_feature 1..1482: note = source = /note="Description of Artificial Sequence: Synthetic coding sequence"
  source 1..1482: mol_type = other RNA
tccgaagctgtgtatctaaacgattctacatacgacggccatacggttggcggacttcaatatgggggtctgggacaactggccgatggagtggttggactcgatgatttccggaaaagccaagagctgcgggtttggcccgggtacgattacgtcggatggtcgaatcatagctttagcagcggatatgtagagatggagtttgagttcgaccgcctgcgggcattccaggcaatgcaggtgcactgcaacaatatgcacaccctgggcgccagactgcccggtggcgtcgagtgcagatttagacgtggaccggctatggcttgggagggcgaaccaatgagacacaatcttgggggaaatctgggcgacccacgcgctcgggcagtgtcagtcccactggggggtcgggtggcacggtttctccagtgtcgcttcttattcgcaggaccatggttactcttcagtgagataagtttcatcagcgatgtagtcaacaattcctcacctgccctggggggaacatttccaccagcaccttggtggccaccaggaccccccccgactaattttagctctctagagctggaaccaagagggcagcaaccagtggcaaaggcagaaggcagccctacggcgatcttaattgggtgcctggtcgccatcatcctgctcttgctgctcataatagcgctaatgctttggaggttgcattggaggcggctcctctctaaggtacttgaatctcaccctcgtacaagaagtcccggccttgtgggaatacgaccaacccttcttccagtaagccctatggctctacgttgttgctctccaattcaacccactgcttccttttggcctcttactcccgttccactcgaggctcgtgctcctccacatccaccaggacctaaccctccaacgccccgaggagtgaccggaggaaacacttatgctgtgcccgccttgcctcctggcgccgtgggcgatggaccccctcgcgtggatttccctcggtcccgcctgcgctttaaggaaaagctgggcgaaggacaatttggagaagttcatttgtgcgaagtggacagtccccaggacctagtttcactcgacttccctttgaatgtccggaagggtcatcctctcttggttgcggtgaaaatcctccggccagatgccaccaagaacgccaggaacgacttccttaaagaagtaaagattatgagcaggcttaaggaccctaacataatcaggctgcttggggtttgcgtgcaggacgacccgttatgtatgatcaccgattatatggagaatggcgacctgaatcaattcctgagcgcgcaccagttggaggacaaggctgccgagggagctcccggcgacggacaggctgcccaaggccctactatctcttaccctatgctgctccatgtggccgcgcagatcgcctctggcatgcgttatctcgcaactctgaattag

SEQ ID NO: 13022 - RNA, 639 nt, synthetic construct
  misc_feature 1..639: note = source = /note="Description of Artificial Sequence: Synthetic coding sequence"
  source 1..639: mol_type = other RNA
atgggtcttcacctccggccctaccgagtcggcctcctcccagatggactgctattcttattgctcttactgatgctgcttgccgaccccgctctgccagccggccgccacccacccgtagttctaggagataataatcgcattccggttattggccctttgaagatcagggagcagcagaggtctgccgtaagtacgagttggttgctgccttacaactacacatggtctccagagaaagtgttcgtgcaaaccccaaccataaattacactctacgcgactaccggaagttctttcaggacatcggcttcgaagatggttggttgatgaggcaggacaccgagggccttgtggaggctactatgccccctggagttcagctacactgtctttacggcaccggcgtgccaactcctgactcgttctattacgaaagtttccccgatcgtgatccaaagatctgtttcggcgacggcgacggaactgtcaatctgaaatcagctcttcagtgccaggcatggcaaagcaggcaggagcaccaagtcctgttgcaagagctccccgggtctgagcacatcgagatgcttgccaacgctacaaccctcgcttacctcaaaagggtcctccttggaccgtag

SEQ ID NO: 13023 - RNA, 654 nt, synthetic construct
  misc_feature 1..654: note = source = /note="Description of Artificial Sequence: Synthetic coding sequence"
  source 1..654: mol_type = other RNA
atgagcgacctccttctgctcggcctcattggcggactgacactgctgctgctcctgacactgctcgcttttgctggatactccggcttgctggcgggtgtcgaggtgtccgctggaagcccacccataagaaacgtaactgtggcctacaaattccacatggggctatatggtgagacaggccggctgtttaccgaatcttgctcaattagtccaaaactgcggagtatcgccgtctactatgataacccacatatggtcccccccgacaaatgtcgctgtgctgtgggttcaattctttctgaaggagaagaaagtccaagtcccgagctcatcgatctttaccagaaattcggctttaaggtattctccttccccgctccaagccacgtggtgaccgccaccttcccatatactacaatcttaagtatctggcttgcgacccggagagtccaccctgctcttgacacttacatcaaagaacggaaattatgtgcctatccccgactagaaatctaccaagaggatcagatccatttcatgtgtccactggcccgccagggagacttctacgtgcctgaaatgaaagaaacagaatggaagtggcgcgggctggttgaggccattgacacccaagtggacggcaccggctag

SEQ ID NO: 13024 - RNA, 345 nt, synthetic construct
  misc_feature 1..345: note = source = /note="Description of Artificial Sequence: Synthetic coding sequence"
  source 1..345: mol_type = other RNA
atgaagaccttcacatggaccttgggcgtactattctttctgttggtggacacaggacattgtaggggaggtcaatttaagataaagaaaattaaccagcgccggtacccacgcgcaaccgacggcaaagaggaggccaagaagtgtgcctacaccttccttgtccccgagcaacgaatcactggtcccatctgcgttaacacgaaaggccaggatgcttctactattaaggacatgatcacacggatggatctggagaacctgaaagacgtgcttagcagacagaaaagggagatcgacgtgttacagctggttgtggatgtagacggcaatatagtcaactag

SEQ ID NO: 13025 - RNA, 870 nt, synthetic construct
  misc_feature 1..870: note = source = /note="Description of Artificial Sequence: Synthetic coding sequence"
  source 1..870: mol_type = other RNA
atgtttgttctgctgtacgttaccagttttgccatctgcgccagtggacagcctagaggaaatcagctcaagggagaaaattactcacctcgttacatctgctccatccctggcctgcccggccctcccggacccccaggcgcaaacggatcgccagggccacacgggagaataggacttccaggccgcgacggtagggacgggagaaagggcgaaaagggagagaagggcacggcagggctacgcggaaagaccggtcctctaggattggcaggtgaaaagggcgatcaaggtgaaacgggaaagaagggtcccataggcccggagggtgaaaaaggagaagttggaccaatcggtccaccaggacccaaaggcgataggggagaacagggtgatcccggcctgccgggggtttgccggtgcggctccatagtgttgaaaagcgcttttagcgttggaatcaccacgagttaccccgaggagaggttgcctatcatttttaacaaggtgttgttcaatgagggagagcattataatccagccactggcaagttcatttgcgcttttcccggtatctactatttcagctatgacattaccctagcaaacaagcacttggcgatcggactggtgcataacgggcagtataggattaaaactttcgacgccaatacaggtaatcacgatgtggcttctggctccactgtaatttatctacagcctgaggacgaagtttggctggaaatctttttcaccgaccagaatggattattctctgacccaggctgggcagattccttgttttctggctttctgctgtacgttgatacagactatctggatagtataagcgaagacgacgagctctag

SEQ ID NO: 13026 - RNA, 1002 nt, synthetic construct
  misc_feature 1..1002: note = source = /note="Description of Artificial Sequence: Synthetic coding sequence"
  source 1..1002: mol_type = other RNA
atggtatcgaagtcacgctggaagttattagcgatgctggcactcgttttggtggtcatggtgtggtattcaatttccagggaggaccggtacattgaactcttctatttccccattcctgaaaaaaaagagccctgcctccagggcgaagccgagagtaaagccagcaaactctttggaaactatagcagagaccaacccatttttcttagattggaggactacttctgggtcaagaccccaagcgcttacgaactgccatacgggacgaaaggaagcgaggacttgctcctccgtgttctggcaattacctcctctagtattcccaagaacatacagagcttgcggtgcaggagatgtgttgtcgttggaaatggccaccgtttgcggaattccagccttggcgatgccatcaacaagtatgacgtggtaatccgactaaacaacgcccccgttgcaggatacgaaggagacgtggggagtaagactactatgaggttgttctaccctgaaagtgcacatttcgaccccaaggtcgagaacaaccctgatactctcctcgtcttagtagctttcaaagccatggatttccactggatcgaaacgatcttgtctgataaaaagagagtgagaaaaggcttctggaagcagcccccccttatttgggacgttaacccaaagcagattaggatcctgaaccctttcttcatggagattgccgcagataaattgctctcactgcccatgcagcagcctcgtaagattaagcaaaagcctactactggcctgttggccataaccctggccttacacctgtgtgacctagtccacatcgcaggattcggctaccctgacgcctacaacaagaaacagacaatacactattatgagcagataacattaaagtctatggcgggtagcggacacaatgttagtcaggaggccctcgcgattaaacgaatgcttgagatgggcgcgatcaaaaacctcacttctttttag

SEQ ID NO: 13027 - RNA, 531 nt, synthetic construct
  misc_feature 1..531: note = source = /note="Description of Artificial Sequence: Synthetic coding sequence"
  source 1..531: mol_type = other RNA
atgcgcctgctgatcctcacatgtcttgtggctgtggccctcgcaaggccgaagctgcctttaaggtaccctgaaaggttacagaacccgtctgaatccagtgaacccatccccctggagtcccgcgaggaatatatgaacggaatgaacaggagaaacatactgagagagaaacaaaccgacgagatcaaagatacacggaatgagtccacacagaactgtgtcgtcgcagagcccgagaaaatggagtcttctatcagttcatcttccgaggaacagttctgccgactgaatgaatacaatcagctccagctccaggcagcacacgctcaagaacagatccggagaatgaatgaaaactcccatgtgcaggtcccgtttcagcagcttaaccagttggccgcttacccttatgcagtctggtactacccacagatcatgcaatatgttccgtttcctcccttcagtgatatctccaaccctactgcccacgagaattacgaaaaaaataacgtcatgctccagtggtag

SEQ ID NO: 13028 - RNA, 279 nt, synthetic construct
  misc_feature 1..279: note = source = /note="Description of Artificial Sequence: Synthetic coding sequence"
  source 1..279: mol_type = other RNA
atgaaactttgcgtaacagtgttatcactactcgttctggtggccgctttctgctcacttgccctctcagccccaatgggtagcgatcctcctacagcttgttgcttctcttacaccgctagaaaactcccacgaaattttgttgtcgactattatgaaactagttcattgtgtagtcagcccgccgtggtctttcagacaaaaaggggcaaacaagtatgtgcggaccccagtgaatcatgggtgcaggagtacgtctacgatttagaactgaactag

SEQ ID NO: 13029 - RNA, 1656 nt, synthetic construct
  misc_feature 1..1656: note = source = /note="Description of Artificial Sequence: Synthetic coding sequence"
  source 1..1656: mol_type = other RNA
atgacttggcgcatgggccctcgcttcacaatgcttctcgctatgtggctcgtatgtggatcggagcctcacccccatgcaacaatcagaggcagccatgggggcaggaaggtgcctctggtttctcccgattcaagcaggccagcccgatttctccggcacaccggccgtagccgtgggattgaacgttccaccttagaggaacccaacctccaacctctccagaggcggagatcagtacctgtgctgagactggcaagacccagcagattcagggataaccggatggacaggagggaacacggacaccgagatcccaacgtagtccccgggcctcccaaaccagctaaagaaaagccgcctaaaaagaaggcccaagataagattctgagcaatgaatacgaggaaaaatacgacctgtcaagacccacagcctcacagctggaggacgagttgcaggtgggaaacgttcccctgaaaaaagccaaagaatccaaaaagcatgagaagctggaaaagccagaaaaggagaagaagaagaagatgaagaatgaaaatgcagacaaactcctgaagagtgaaaaacagatgaaaaagtcagaaaaaaagtctaaacaggagaaggagaagtcaaaaaagaagaagggcggcaaaactgaacaggatggctatcaaaaacccacaaataaacattttacacagagtcctaagaagtcagtggcagacctcctggggagcttcgagggaaaaaggcggttacttctcatcacagcgcccaaagcagaaaataacatgtatgtccaacagagggatgagtacctggaaagcttctgcaaaatggccaccagaaagatctctgtcatcacaatcttcggccccgttaataattccacaatgaagatcgatcactttcagctggataacgagaaacccatgcgtgtggtcgacgacgaggatctggtcgaccagcggctgatttcggaactacgcaaagagtatggtatgacatataacgacttctttatggtactaactgatgtcgacttgagggtgaaacagtactatgaggtgcctatcaccatgaagagtgtgttcgatctcatcgacacgtttcagagtagaatcaaagacatggagaagcagaaaaaggaagggatcgtttgtaaagaggataagaaacagagccttgagaatttccttagcagattcagatggcgccgaagactacttgtgatctcagccccaaacgatgaagactgggcctatagtcagcagctgtcagcactgtctggccaggcgtgcaatttcgggtccagcgtggtggaaagagaagacgtacctgctcatttggtgaaggatatcaggaattattttcaggtgtctcctgaatattttagtatgttgctcgtcggcaaagacggaaacgtgaaaagctggtatccaagccctatgtggtctatggtgattgtctatgatttaatagattccatgcagttgcgcagacaggaaatggctattcaacagtcattaggcatgcggtgccccgaagatgagtatgcaggctatggatatcacagctatcaccaggggtatcaagacggctaccaggacgactatcgccatcacgagagctatcatcatggttatccttactag

SEQ ID NO: 13030 - RNA, 1245 nt, synthetic construct
  misc_feature 1..1245: note = source = /note="Description of Artificial Sequence: Synthetic coding sequence"
  source 1..1245: mol_type = other RNA
atgggagtgtcaaaactggacatcttgtaccggagattacttctcacgaaattatttatccgggggtggggaaggccagaagacttgaaacgcctctttgagttcagaaagatgatcggaaatcgggagcggtgtcagaacctggtgagctctgattaccccgtgcacatcgataaaatcgaagaacaatctgactgcaaaattctggatggtcacttcgtgtcccccatggcgcactatgtccccgatatcatgccaatcgagagcgtgattgcccggttccagttcatcgttccgaaagagtggaactctaagtatcgccctgtttgtatacacctcgccggcactggtgatcatcattactggagacggcgcactctcatggcaaggccaatgatcaaagaggcacgcatggccagcctgctgctcgaaaatccttattatggatgcagaaaaccaaaagatcaggtcagaagctcactcaagaatgtgagtgatttattcgtgatggggggcgctctcgtactcgagtcagctgccctgcttcattggttagaaagggaaggttacggaccgctgggtatgacaggtatttcaatgggcggacatatggcttcgctggccgtctctaactggcctaaacctatgcctcttatcccgtgtctgtcatggagcaccgcttcaggggtctttacaactaccgacagcttcaagatgggccaggaattcgtgaaacatttcacaagctctgccgataagttgaccaacctgaacctcgtgtcacgaactctcaatctggatatctcaaatcaggtggtttctcagaaacctgcagactgtcacaactcctcaaaaacgtcagtaagcgcaaccagtgagggccttttactgcaagatacgtccaaaatgaagcgttttaaccaaacactgtccaccaataagtctgggtacacttcacggaatccacagtcctaccacttgctctccaaggagcagagccgaaacagcctccgcaaggagagtctaattttcatgaagggtgttatggatgaatgtacccatgtggcaaacttctccgtgccagtggatccttctctgatcatcgtggttcaggctaaggaagacgcatacattccaaggacaggcgtccgaagtctgcaggagatttggccgggctgtgaaattagatatctcgaaggtggacatattagtgcgtaccttttcaagcagggactgttccgatag

SEQ ID NO: 13031 - RNA, 912 nt, synthetic construct
  misc_feature 1..912: note = source = /note="Description of Artificial Sequence: Synthetic coding sequence"
  source 1..912: mol_type = other RNA
atgagtgaaccacagcctgatctggaaccgcctcaacacggcctctacatgctttttcttttagtgctggtgttctttttgatgggattagtgggctttatgatctgtcatgtgctgaagaaaaagggttacagatgcaggacgtctaggggatccgaaccggatgacgctcaacttcaacctcctgaggacgatgacatgaatgaggatactgtcgagaggatagtgcgatgtattattcagaacgaagcaaatgcagaggcacttaaggagatgctcggagactcggaaggggagggcacagtgcaattatcctccgttgatgccacatcttcactccaggatggggccccaagccaccaccatacagtacacttggggagcgcggcaccttgtctgcactgttcaaggagcaagcggccgccactggtgagacaggggagatccaaagagggcaagagtagaccgcggacaggggagacgactgtgtttagcgtgggccgttttagggttactcacatcgaaaaaaggtacggacttcacgaacacagagacggatctcccaccgatcgctcctggggctctggcggcggtcaggatccaggcgggggacagggcagcggcggcggccagcccaaagccgggatgcctgctatggagagactgcctccagagagaccacagccacaggtattagcgagtcctcccgtgcagaatggaggattacgagactcatccctgactccccgggctctcgaaggcaacccgcgcgcatccgctgagcctaccctgcgggcgggtggacgtggtccctctcccggcttaccaacacaggaagcaaatgggcaaccgagcaagccagacacgagtgaccatcaagtctcactcccacaaggcgcagggtccatgtag

SEQ ID NO: 13032 - RNA, 444 nt, synthetic construct
  misc_feature 1..444: note = source = /note="Description of Artificial Sequence: Synthetic coding sequence"
  source 1..444: mol_type = other RNA
atggggcccgaagccttatcaagtctcttgctgttgctgttagtggcgtctggggatgccgacatgaaaggccacttcgatcccgccaagtgtcggtatgcactggggatgcaggacagaaccatccccgattccgacatctcagcgtcgagcagttggtcagacagtaccgcagcccgccacagtagattggaatccagcgacggagatggtgcttggtgccccgccggtagcgtctttcccaaggaagaggagtacctgcaggtagatttgcaaagacttcacctggtggcccttgtcggcacacaaggacggcatgcaggaggactgggcaaagagttttctaggagttacagactgcgatattcccgcgatggtagacgctggatggggtggaaggaccgatggggtcaggaagtgatcagtggaaatgaggacccctag

SEQ ID NO: 13033 - RNA, 1173 nt, synthetic construct
  misc_feature 1..1173: note = source = /note="Description of Artificial Sequence: Synthetic coding sequence"
  source 1..1173: mol_type = other RNA
atgggcgctacaactatggaccagaaatcgctgtgggcaggggtagtcgtgttactgctgctccaaggaggatctgcctacaaactggtctgttactttaccaattggagtcaagacaggcaagagcctggaaaatttacaccagaaaatatagaccccttcctctgttctcatttgatctattcgtttgcatcaattgaaaataataaagtcataatcaaggacaaatcagaggtcatgctctaccaaactattaactcactaaaaacgaagaaccccaagctgaaaatcctgctgtcaatcgggggatatttgttcgggtctaagggctttcaccctatggtggactcctctacctcccgccttgaattcattaactccatcatattgttcttacgaaaccacaactttgatggtttggacgtgtcttggatataccctgaccagaaggaaaatactcattttacggttctaatccatgagctggccgaggcattccaaaaggactttacaaaatcgacaaaggaaagactgctcctgacagctggcgtttccgccggtcgacaaatgatcgacaattcataccaggttgaaaagctggccaaggacctcgacttcataaatctgctgtctttcgatttccatgggtcatgggagaagccattaattaccggacacaactcgccactctctaagggttggcaggaccgcggcccctcctcctactataatgttgagtacgctgtgggatattggattcataagggaatgccatctgaaaaagtagttatgggcatccctacttacgggcacagcttcacacttgcatccgcagagacaactgttggagcaccagctagcggccccggcgcagccggaccgatcactgaaagctccggatttctagcttactatgagatttgccagttcctgaaaggcgctaaaataactagactccaggatcaacaggtgccctacgccgtgaaagggaaccagtgggtgggatacgacgacgttaagagtatggagactaaggtgcagttccttaagaatcttaacctgggaggcgcgatgatctggagcatcgacatggatgatttcaccgggaaatcttgcaatcaggggccatatccattggtccaggccgtgaaacgctctttagggtccttatag

SEQ ID NO: 13034 - RNA, 297 nt, synthetic construct
  misc_feature 1..297: note = source = /note="Description of Artificial Sequence: Synthetic coding sequence"
  source 1..297: mol_type = other RNA
atgaataaacattttctcttcctctttctcctgtattgcctcattgtggcagtcacatctcttcaatgtattacttgtcacctacgcacacgaacggatcggtgtcgtcgcggctttggagtctgcacagcccagaagggcgaggcttgtatgttgttaaggatttatcaacggaatactctccaaataagttacatggtctgtcagaaattctgccgggatatgactttcgatctccggaatcgtacatacgttcatacttgttgcaactacaactactgcaattttaagctttag

SEQ ID NO: 13035 - RNA, 600 nt, synthetic construct
  misc_feature 1..600: note = source = /note="Description of Artificial Sequence: Synthetic coding sequence"
  source 1..600: mol_type = other RNA
atggcatggggcggagttcacacctgctgcttccacctgtgctgttgctgttcctggccccagggcgctgttcctgaagagctccacaagcacccaggacagactctgttgttgcaatgccagtattctcctaagagagggccatatcagcctaaatcctggtgtcagcagacttcacctagcagatgcacactgttagttacttcttcaaaaccatggaccgccgtgcaaaaatcacattacacaatctgggataaacctaatgcagggtttttcaacataacaatgattcagctaactcagaacgatagcggtttctactggtgcggaatttataatgcctcggaaaatataatcacggttctgcgtaacatttctttagttgtctcaccagcacccactacgtccccgatgtggaccctgccttggcttccaaccagcactgcttgggaaccccagatacaggaaattaaatttagagctcctacagactccacactgtggaaaagcagagccccggcatgcttaggctctggggggccgagatttttggtgctagttctctgtggattactgcttgcaaaggggttaatgctctag

SEQ ID NO: 13036 - RNA, 2025 nt, synthetic construct
  misc_feature 1..2025: note = source = /note="Description of Artificial Sequence: Synthetic coding sequence"
  source 1..2025: mol_type = other RNA
atgacaaccgacgacaccgaggtgcctgccatgactctagctcctggccatgccgccctggagacccaaacactatcagccgaaacctcttccagagcgtcgactcctgctggaccgatccccgaagcagagactcggggcgctaagcgaatttccccggcccgcgagacccgttcgttcaccaaaactagccccaattttatggtattgatcgcaacttcagtcgagacatccgccgccagtggtagtcccgaaggggcaggtatgaccacagtccagacaattactgggtcagacccaagggaagccatttttgacacactgtgtacagacgattcctccgaggaggccaagacgttgaccatggacatccttaccttggctcacacctccaccgaggccaagggccttagtagtgagtcatcagctagctctgactctcctcaccccgtcatcaccccttcccgagcgagtgagagcagtgcgtcttccgatggaccccaccctgttattactccatctagagcctctgagtcctcggcatcttcagatggtccccacccagttattaccccttccagagcgtcggagtcatccgctagcagtgacggtccccaccccgtgattactcccagtagggccagcgaaagcagtgcatccagcgacgggccacatcccgtgatcacgccaagccgtgccagtgagtcaagcgcgagttcagacggccctcaccctgtgatcacaccatcaagagcaagcgaatcaagtgcatccagtgatgggccccatccagtaatcacaccaagtagggcttctgaatcttccgcaagttcagacggaccccatccagttattacaccttctcgcgcaagcgaaagttccgcctcttccgacggccctcacccagtaataacaccttcccgggcttctgaatcctccgccagtagtgacggactgcatccggtgatcacgccatcacgagcctctgagagctccgcatcttcagacggacctcacccagttatcaccccctctagggccagcgaatcctcagcgtcctctgacggcccccaccctgtgattacacccagctggtcacctggctctgacgtgacactgctggccgaggccctcgttaccgttacgaatatcgaagttattaattgctctatcaccgaaattgaaaccacgacgtcttctattcctggagcatccgataccgacctgatccctaccgagggagtcaaggctagttccacgtctgatccccctgcactgcccgacagcaccgaagccaagccgcatattacggaagttaccgccagtgccgaaacactctccactgcagggacaacagaatccgccgcaccagatgccactgtgggtacacccctccctacgaactcggccaccgaacgcgaagtgaccgcccccggcgccacaacactctcaggtgctctagtgaccgttagccgtaaccccctggaggagacaagcgccctctctgtggaaactccttcttacgtgaaagtgtcaggggccgctcccgtgagtatcgaggccggttccgctgttggcaaaacaacctccttcgcgggtagttctgcttcttcatattcaccctctgaggcagctcttaaaaatttcacaccgtccgagacgccgactatggacatagccaccaagggtccattccctaccagccgggacccccttccttctgttccgcccacgaccacaaactcctctcgtggtaccaactcaaccctggccaagattacaactagcgctaagacaacgatgaagccaccaacagccacaccaacaactgccaggacgcgccccactactgacgtgagcgcgggggagaatggcggttttctattgctgcggctatcagtggcaagcccagaggacctaaccgatcctagagtagctgagcgactgatgcaacagctacacagagagcttcacgcccatgcccctcactttcaggtctcacttttgagagttcgtagaggctag

SEQ ID NO: 13037 - RNA, 738 nt, synthetic construct
  misc_feature 1..738: note = source = /note="Description of Artificial Sequence: Synthetic coding sequence"
  source 1..738: mol_type = other RNA
atgcaggctgcctggcttctgggggctctcgtagtgcctcaactcctgggttttggccacggcgcacgtggggctgagcgagagtgggaagggggctggggaggagctcaggaagaagagcgcgagagagaagctttgatgctgaaacatctgcaagaagctctgggcctccccgcgggacgcggcgatgagaaccccgcaggcacggttgaaggcaaagaggactgggagatggaagaagatcagggagaagaggaggaggaggaggccaccccaacacccagctctggccccagcccaagcccaactccggaggatatcgttacatacattcttggccgccttgctggccttgatgcggggttgcaccagttgcacgtcagacttcacgcactggacaccagagtcgttgaattgactcaggggcttcgtcagctgaggaatgcagcaggagacacaagagacgcagttcaagcacttcaggaggcacagggacgggccgaaagggaacacggacgtcttgagggctgtttaaaaggtctccgcctgggacataagtgctttctgctgtctcgagatttcgaggcacagccctctgccagccctcaccctctttcccctgatcaaccgaacgggggtaccctggaaaattgtgttgctcaagctagcgacgacgggtcttggtgggatcatgactgccaaagacgattgtattatgtgtgcgaatttcccttttag

SEQ ID NO: 13038 - RNA, 279 nt, synthetic construct
  misc_feature 1..279: note = source = /note="Description of Artificial Sequence: Synthetic coding sequence"
  source 1..279: mol_type = other RNA
atgatctggaggtcacgcgcaggggctgaacttttctctctgatggccttgtgggaatggattgccctgagcttacactgttgggtgctggccgttgccgccgtgagtgatcaacatgctacctcccccttcgattggctcttgtcagacaaaggtccgtttcatagatcccaggagtataccgatttcgttgatcggtcacgtcagggtttttctaccagatataagatttatcgcaacatgggacacatcagttgctacttgctgctttgggaatag

SEQ ID NO: 13039 - RNA, 177 nt, synthetic construct
  misc_feature 1..177: note = source = /note="Description of Artificial Sequence: Synthetic coding sequence"
  source 1..177: mol_type = other RNA
atggcagacatgcagaacctcgttgaaagactagaacgcgcagtcggccgtttggaggccgtgtctcacacatctgacatgcatagaggatatgctgacagtccaagcaaagcaggcgccgcaccttacgttcaggcattcgattcactgctggccggtcctgtggccgagtactag

SEQ ID NO: 13040 - RNA, 732 nt, synthetic construct
  misc_feature 1..732: note = source = /note="Description of Artificial Sequence: Synthetic coding sequence"
  source 1..732: mol_type = other RNA
atgggacctgaagccctgtctagcctgctgctcttattgctcgtcgctagcggcgacgctgatatgaaggggcactttgaccccgccaaatgcagatatgctctcggaatgcaagacaggactatccccgactctgatattagcgcctcctcaagctggagcgacagtaccgcggccagacactcaagactggagtcctccgatggagatggagcatggtgtccagcaggtagtgtgtttcctaaggaagaagaatatcttcaagtggatttgcagcgactccatctggtggccttggtggggactcaaggtcggcacgcaggcggactcggcaaggaattcagtcgttcataccgtttaaggtattccagagatgggcgaaggtggatgggctggaaagacagatggggccaggaggttatttctggcaatgaggaccctgagggagtggttctgaaggacttgggaccacccatggtggcaagactggtgagattttatccacgggccgatcgcgtcatgtcagtgtgtcttcgcgtagagttgtacgggtgtctctggcgagactgcagtatgggtgtttgggcaagttggcagatggtttggtggggctggatgaccctgggcagggtgcggagttgcggatccggccaggctatgactatgtgggacggtgccactactgcatcccctgtcgcaatgtggaggtggtccctcagcctcactggatag

SEQ ID NO: 13041 - RNA, 2535 nt, synthetic construct
  misc_feature 1..2535: note = source = /note="Description of Artificial Sequence: Synthetic coding sequence"
  source 1..2535: mol_type = other RNA
atgggccctggtgcaccgtttgctcgggttggatggccactccctctgctggttgttatggcagctggagtggcaccagtgtgggccagccactctccccatctacctaggccacattcacgggtccctcctcacccaagcagcgaaagacgcgcagtttacataggagccctctttccaatgtctggcggctggcccggtggtcaggcctgtcagcctgcagttgagatggctctcgaagacgtgaacagcaggagagatatactgcctgactacgagctgaaactcattcatcatgacagtaagtgcgatcctgggcaggcgaccaagtacctgtacgaacttctgtacaatgatcctatcaaaataatacttatgcctgggtgctcctccgtcagtaccctcgtcgctgaggcagcacgaatgtggaatttgattgtgctgtcatatggatcatcgagccctgcacttagtaatagacagagattccccactttcttcaggacccacccttctgcaactctgcataaccccaccagagttaaactgttcgaaaaatggggttggaagaagattgccacaatccaacaaacaacggaagtctttacaagcacattggatgatttggaggagcgggttaaggaggcagggatcgagatcacattccgccagagtttcttttcagatcctgcagtccctgtaaagaacttgaaaagacaagacgccagaataattgtcggactgttctatgagaccgaggcgcgtaaggtcttttgtgaggtctacaaggagagattattcggtaagaaatatgtttggtttcttattggctggtacgccgataattggtttaaaatctacgatccaagcattaactgcactgttgacgaaatgacggaggctgtcgaggggcatatcaccacagagatcgttatgctcaatccagcgaacacaaggagtatttccaacatgacaagtcaagaattcgttgaaaagttgacaaaacgcctcaaacggcatcctgaggaaacgggcgggtttcaggaggcccctctggcctatgacgcgatatgggctctagcattagcactgaataagacgagcggaggtggtgggcgctccggcgtgcgtctggaggacttcaactataacaaccaaactattactgaccagatttacagagccatgaattccagttcatttgagggagtgtccggacatgtcgtctttgacgcttccggatcacgaatggcttggaccctgattgagcaactccagggggggagctacaagaagatcggttactacgatagcaccaaggacgatctgtcatggtccaaaacagataaatggatcgggggatcaccaccggctgaccagacactcgtgataaaaactttccggtttctctctcaaaagctgttcatctccgtctccgtcttatcaagcctcgggattgtcctcgccgtggtttgcttatcctttaacatctacaattcccacgtgcgctacattcaaaactctcagccgaacctgaataacctgaccgcagttgggtgctccttagctctcgccgcggtgttcccactgggcctagacggctaccacattgggcgcaatcagttcccgttcgtatgccaagcccgcctgtggctcctgggactcgggttctcactcggctacggctctatgtttactaaaatctggtgggtccatacggtctttactaagaaggaagagaagaaagaatggcgcaaaactcttgaaccctggaaactttacgcaactgtcggtctcctagtcggcatggacgtcttgaccttagccatttggcaaatcgttgatcctctccatcgcacaattgaaacattcgccaaagaggaacctaaggaagatattgacgtctccattctcccacagctggagcattgctcaagccgtaagatgaatacatggcttggcattttttatggatataaaggcctgttactgctactggggattttcctcgcttacgaaacaaagtccgtctcaaccgagaaaatcaacgaccatagagcggtcggcatggctatctacaatgtagcagtgctctgcctgatcacggccccggtgactatgatcctgagcagccaacaggatgcggcctttgcctttgcctccctcgccatcgtttttagctcctatatcacgctcgttgtcctcttcgtgcccaaaatgaggcgcctcataacacgcggcgagtggcaaagtgaggcccaggacacaatgaaaacgggatcatcaaccaataacaatgaagaggagaaaagccgcctgcttgagaaggaaaacagggaattagagaaaattattgccgagaaggaggagcgtgttagcgagctgagacaccaattgcagagccgtcagcagttgcggagcagaagacatcccccaaccccacccgagccatccgggggactgccccggggacccccagagcctccagatcgtctttcctgcgatggaagtagagtgcatctgttatacaaatag

SEQ ID NO: 13042 - RNA, 921 nt, synthetic construct
  misc_feature 1..921: note = source = /note="Description of Artificial Sequence: Synthetic coding sequence"
  source 1..921: mol_type = other RNA
cgtcggacttgcgcaggaccaggtcgggctggcggcgccaggagtgcttcgtggatgtccagattgcgcgcattgctaggattgggtctccttgttgccggatcccgggtgcctcgcatcaaatcacagactattgcttgcaggtctgggcctacttggtggggccctcaaaggttaaactcaggtggacgttgggatagtgaggtcatggctagcaccgtggtgaaatacctgtctcaggaagaagctcaagctgtcgaccaagagctgtttaatgagtatcagttcagtgtggaccagcttatggaacttgctgggctgtcctgtgctaccgccatcgcgaaggcatacccacctacctctatgtctagatcccctccgaccgtcctggtgatctgtggccccggtaacaatggcggtgacggccttgtatgtgcacgccacttgaaactctttgggtacgagccaaccatctactatcctaagcgcccaaacaaacctttgttcacagctctcgttacacagtgtcaaaagatggatattcctttcctgggtgagatgcccgccgaacctatgactattgacgagctctacgagctcgttgtcgacgccatctttggctttagctttaaaggggatgtacgagaaccgtttcactccatcctgtccgttcttaaagggcttaccgtacctatagccagtatcgacatcccttctggctgggatgtggaaaaggggaatgccggcggaattcagccagacctccttattagcttaaccgctcccaagaagtctgcaacccaatttacaggaaggtaccattatctcggaggaagattcgttcccccagctctggaaaagaagtatcaattaaatctgcctccttaccctgatacggagtgtgtttatcggctgcagtag

SEQ ID NO: 13043 - RNA, 1137 nt, synthetic construct
  misc_feature 1..1137: note = source = /note="Description of Artificial Sequence: Synthetic coding sequence"
  source 1..1137: mol_type = other RNA
tgatactctggagattacatggaacctgaaaagcctggagcacccttgctcccccctccgccccaaaactctgtaccacattacgccgaggcggacatcgtcactctgcagggcgtaacaggtggcaatacctacgccgtgccagcccttccacccggcgctgtgggggacggacctcccagggttgatttcccacgctcacgtctgcgattcaaggagaagctaggcgaggggcagtttggagaagtacatctgtgtgaagtcgacagtccccaagacttggtatcccttgactttcccctgaatgtccgaaaaggccatcctcttctcgtcgccgtaaaaatcctgagacccgacgctaccaagaatgctagctttagcctgttctctcgcaatgatttcttgaaagaagtaaaaatcatgagcaggctaaaggaccctaatattatccgtctgctgggggtatgcgtccaggacgaccccctctgtatgattaccgactacatggagaacggggaccttaaccaatttctctccgctcaccagcttgaagataaagctgccgaaggggcaccaggcgatggccaggctgcccaaggcccgacaatttcttacccgatgctccttcacgtagctgcgcagatcgcctctgggatgaggtaccttgcaactttgaactttgtgcatcgcgatctggccacacggaactgtttagtgggcgagaactttactataaagatcgccgatttcggtatgtcgcgcaacctctacgctggagattattatagggtgcagggccgagccgtgctccccatcaggtggatggcttgggaatgcatcctcatgggcaaatttaccactgcaagcgatgtttgggcattcggcgttactctttgggaagtcctgatgttatgtcgcgcacagccctttggccagctcaccgatgagcaggtgatcgaaaatgcgggagaattctttagggaccagggaagacaagtgtatctgtcgagacctcccgcttgtccccagggcctctatgagctcatgttgagatgctggagtcgcgaatccgagcagcggcctcctttcagtcagcttcaccgatttctagcggaggacgccttgaacaccgtgtag

SEQ ID NO: 13044 - RNA, 762 nt, synthetic construct
  misc_feature 1..762: note = source = /note="Description of Artificial Sequence: Synthetic coding sequence"
  source 1..762: mol_type = other RNA
atggccccttggtcccacccgagcgcacagctgcagcccgtgggcggtgacgcagtatcgcctgcgcttatggtgctgctttgcctgggcaatctgagtaaggccaccctatgggctgaaccagggagtgtcatctcaagaggtaatagtgtgaccatacggtgccaagggaccctcgaggctcaggaataccggttggttaaagagggatccccagaaccgtgggacacacagaaccccctggaacctaagaataaggcacgcttctcaattccttcaatgactgaacatcacgccggcaggtaccgatgttactattactctcccgctggatggtcagagcctagcgaccccttggaactcgtcgttacaggcttttacaataaaccaacactttcagccctcccatcacccgtggtcactagcggagagaatgtaactttgcagtgtgggagcaggcttagatttgatcgattcattcttacagaggagggggatcacaaactatcttggactctggattcacaactcacacctagtgggcagtttcaggcactgtttcctgtagggccagttacaccatctcaccgatggatgcttagatgctacggtagccgcagacatatcctacaggtctggagcgagccttcagatttgctcgaaatcccggtgtcaggcgaagaggccacggtcttcagctcaaccatccagggcagccagaccggctgcggagaactgtatcgtcaaggctcaccatgctag

SEQ ID NO: 13045 - RNA, 288 nt, synthetic construct
  misc_feature 1..288: note = source = /note="Description of Artificial Sequence: Synthetic coding sequence"
  source 1..288: mol_type = other RNA
atgaggaagcctcggcgcaagagtcggcagaatgccgaggggcgcagaagtccctctccctattcccttaagtgttcccccacccgtgaaaccttgacttacgcccaagcccagcgcatcgtagaagtagacatagacggccgtttacatcgaatctcaatttacgaccccctcaagatcattacggaagatgagttgacagcccaggacatcaccgaatgcaatagtaacaaagagaattctgaacaaccacagtttcctggcaagtcaaaaaaacccagctcctag

SEQ ID NO: 13046 - RNA, 1311 nt, synthetic construct
  misc_feature 1..1311: note = source = /note="Description of Artificial Sequence: Synthetic coding sequence"
  source 1..1311: mol_type = other RNA
atgaagtttcagggacccctggcatgtttactgttagccctctgtttgggctctggcgaggcgggccccctacagtctggcgaagaatccactggaacaaacatcggggaggcccttggacacggattaggcgacgccttgtcagagggagtcggaaaggcgattgggaaggaggcgggcggcgctgctggatcaaaagtcagcgaggccctgggacagggaaccagagaagcggtcgggaccggagttagacaggtgcctggattcggtgttgccgatgcccttgggaacagggtcggcgaggctgcccacgccctgggcaacacaggccatgaaatcggaaggcaagcagaagacgtaatacgccacggtgccgacgcagtgagaggatcatggcagggagtgcctggtcataacggtgcctgggagacttccggtgggcatggtatttttggaagtcagggaggcctcggaggccagggacagggaaacccagggggtctcggtaccccctgggtgcacggctaccccgggaattctgccgggagttttggtatgaaccctcaaggcgctccttgggggcaaggcggaaacgggggacctccaaatttcgggacaaatactcaaggagccgttgcacagccaggctacggatctgtaagagcttctaatcagaacgaagggtgcactaatccaccaccaagcgggtctggcggtgggtcatctaatagcgggggtggctccgggagtcagagcggcagtagtgggtctgggtcgaacggggacaataacaacggtagctcctccggaggctcctcgagcggcagctcaagcggaggcagtagcggcgggtccagcggcgggtcgagcggaaatagcggcggaagtagaggagatagcggatcagagagtagctgggggagcagcacaggcagtagctccgggaaccacggcgggagtggcgggggaaatggccacaagcctggatgcgagaagccagggaacgaggccaggggatccggagagtctggcatccaaggcttccgcggccaaggggtgtcatcgaatatgagggagatctcaaaggaagggaacagactgctaggcggatccggggacaactatagggggcagggaagctcttggggatctggagggggcgatgccgtgggcggcgttaatactgtgaattccgaaacatcacctggcatgtttaactttgacacgttttggaaaaacttcaaatctaagctgggcttcatcaattgggatgcgattaataaggatcagcggagctcaagaataccttag

SEQ ID NO: 13047 - RNA, 240 nt, synthetic construct
  misc_feature 1..240: note = source = /note="Description of Artificial Sequence: Synthetic coding sequence"
  source 1..240: mol_type = other RNA
atgccagcatgtcgactgggtccactagctgccgcactgctcctatctctgctgctttttgggttcacactcgtgtcggggaccggggcggaaaaaacaggagtctgcccagaactacaggctgaccagaattgcacacaggaatgcgttagcgatagcgaatgtgcagataatcttaaatgttgttcagctgggtgtgctacattttgctctctgcccaatggtcaactggctgagtag

SEQ ID NO: 13048 - RNA, 2130 nt, synthetic construct
  misc_feature 1..2130: note = source = /note="Description of Artificial Sequence: Synthetic coding sequence"
  source 1..2130: mol_type = other RNA
atggggtgcctgtgggggctggctctgccattattctttttctgctgggaggtcggcgtatccggctctagcgcaggaccttccaccagacgagccgatacagctatgactacagacgacacagaagtccctgcaatgacactcgcacccggccatgccgctctagagacgcagacactttctgccgagacatcttctcgtgctagcaccccagccggtccgatccctgaagctgagacaagaggagcaaaaagaatttcgcctgcacgtgaaaccaggagctttacgaaaacttcccccaatttcatggtgcttatagctacgtccgtggagacgtctgccgcatcaggctcccctgagggagctggcatgaccactgttcagactataacgggcagcgacccacgcgaagccattttcgacactctgtgtaccgacgattctagtgaggaggccaagaccctgactatggacattctcaccctagcacacacatcaacagaagcaaagggcctaagttctgagtcctccgccagtagtgacagccctcatccagttattactccatccagggcaagcgagagctccgcatctagcgacgggccacacccggtcataacccccagtcgagcttccgaatccagtgcttcatccgatggaccacacccagtgattacaccgtcccgggcctctgaatccagcgcttctagcgacggcccccatcccgtcatcacgccaagtcgcgctagtgagagctcagcatcgtctgacgggccgcatcccgtgattaccccctcccgggcttccgaaagcagtgcaagctccgatggacctcacccggtcatcacaccaagtcgtgcctctgagagtagtgcctcttcagacggacctcacccagtcatcacaccgagcagagcttccgagagctcagctagctccgatgggccccaccctgtcataacaccatcacgggcatccgagtccagtgccagctctgacgggcctcatcccgtgataacaccatctagggcctctgagtcatcggcctcttccgatggcctgcatcccgttataaccccttcaagagcgtccgagtcttctgctagctctgacggcccacaccccgttatcaccccctctagggccagcgaaagctcagcaagctctgacgggccccatcctgtaattacaccctcttggtcccccggctctgatgtgactctgttggccgaggcgctggtcaccgtcaccaatattgaggtgattaactgcagcattacagaaattgaaactactacctccagcattcccggcgcttcagatactgacctgattcctactgaaggggtaaaagcgagctccacgtctgacccccctgcattaccggactccacggaggcaaaaccacatataactgaggtaacagcctcggccgaaactcttagcacagcgggaacgacagagtccgcggcacctgacgctactgtgggcacacctcttccaacaaattccgccacagaacgagaggtgaccgcgcctggcgcaaccactctgtctggggccctggtgactgttagccggaatcctttagaggagaccagcgctctctccgtcgagaccccctcctatgtcaaggtaagcggcgctgcgcccgtcagcatagaggcaggcagtgctgtggggaaaacgactagtttcgccggatcgagcgcctcatcatactcacctagcgaagctgccctcaagaatttcacaccatccgagaccccgactatggacatcgccaccaagggccccttccccacaagcagggaccccttacctagcgtcccccccactacgacgaacagctccaggggaaccaactcaacccttgcaaagatcacgactagcgccaagacaactatgaagccccctactgctactccaacgaccgcacgcacaagacccacaaccgatgttagcgcgggagagaacggagggtttcttttacttcgactaagtgtggcctcccctgaggacctgacagacccaagggtggcagagaggctcatgcaacagttacacagggaactgcatgctcatgctccccatttccaagttagtcttcttagggttcgacgaggatag

SEQ ID NO: 13049 - RNA, 2067 nt, synthetic construct
  misc_feature 1..2067: note = source = /note="Description of Artificial Sequence: Synthetic coding sequence"
  source 1..2067: mol_type = other RNA
atgctgcctactgaagttccacaaagccatccaggccccagtgctttactgctcctacagctgctccttcctccaaccagcgcctttttccctaacatttggtccctacttgccgcccccgggtcaatcacacaccaggacctgactgaggaggccgccctgaacgtcaccctgcaactttttctggagcaacccccaccaggccggccgcctctgcggttggaggatttcctgggacgtaccctcctggctgatgatctgtttgccgcgtacttcgggccaggatcatcccgccggttccgggccgcccttggcgaggtgtccagagctaatgcagcgcaggactttctgcccacctctcgcaatgatcctgacctccacttcgatgctgagcggctggggcaggggagagctcgactcgttggcgcactgcgtgagactgtcgtggccgctcgtgccctagatcacactttggcaaggcaaaggctgggcgccgccctgcacgcactccaagacttctattcgcactctaattgggtagagttaggcgaacagcagcctcacccccacctcctctggccccgccaagagctccagaacctggcacaggtggctgaccctacctgctctgactgtgaggagttgtcatgtccccgaaattggctcggattcaccttgcttaccagtggctacttcggcacccatccaccaaagccacccggcaaatgctctcacggcggccactttgatcgatcttccagtcaaccccctaggggcggtatcaacaaagattctacttcaccggggttctctccacaccacatgctgcacctccaggccgccaaattagcactattagctagtatccaggctttctctctgctcagatctagattgggcgaccgtgactttagccggctgctcgatatcacccctgcaagctcactgagttttgtcttggatacgactggatcgatgggagaagaaataaacgcagctaagatccaagcccgacacctggttgagcagcgccgcggctcaccgatggagcccgtgcattacgtgcttgtacctttccatgatcctggttttggcccagtctttacaacctcagacccagattcattctggcagcagctcaatgagattcatgcccttggcggcggagacgaacctgaaatgtgtctttctgccctacagctggcgctcctgcacaccccacccttgagtgacattttcgtgtttactgatgcgtcccccaaagatgctttcctgactaaccaggtagaaagtctcacacaggagagacggtgtcgagtaacgttcctggttacagaggatacatccagggtgcagggccgagctcggagggaaatcttgtcacctttgcgttttgaaccttacaaagctgtggcgttagccagcgggggagaagtaatctttaccaaggatcagcacatacgggacgtggcagcgatcgtaggagaaagcatggcagctcttgtgacattaccgcttgatcccccagtagtcgtgccgggccagccattggtgttttctgtggatggcctgctgcaaaaaatcactgttagaatccatggcgacatcagctccttctggatcaagaaccccgccggagtgagtcaagggcaagaagagggaggagggcccttaggccacacccggaggtttgggcaattttggatggtaacgatggatgacccaccacagaccggaacatgggagatccaggtcacagcagaggacactcccggtgtgcgggttcaggcacaaacctctctggacttcctgttccatttcggtattcctatggaagatggcccacacccagggttatacccccttactcagcccgtggccggcttacagactcagctactggtcgagagtcagtcatgggggtcttcagccgcttttctgccacggcacccctcccgcggtccccgaggatgcagaacaagaccaggcgccctgggcgcacgcgggacaagcggcgcccggtctcctcgaagcctggccgtagcgcatgccgccgttcacccttag

SEQ ID NO: 13050 - RNA, 1257 nt, synthetic construct
  misc_feature 1..1257: note = source = /note="Description of Artificial Sequence: Synthetic coding sequence"
  source 1..1257: mol_type = other RNA
aataaccttaatgtcgggtctgacactaccagtgaaacaagcttttctctaagcaaagaggcccctcgtgaacacctggaccaccaagccgctcaccaaccctttccgcgcccaagatttaggcaggagaccggacatccatcactccaacgagactttccccgctcctttttgctcgatcttccaaattttccagacctctccaaagctgacatcaacggccagaaccccaatattcaggttacaatcgaggtggtcgatgggccagacagcgaggctgataaagatcagcacccagagaataagccatcatggtcagtgcccagtccggattggcgggcctggtggcagcgaagtctgtcactcgccagggcgaatagcggggaccaagattataaatacgacagtacttcggatgacagcaatttccttaacccaccacgtggttgggatcatacggcccccggacatagaacctttgagaccaaggatcagcccgaatacgactcaacagacggggagggcgattggtcactctggtcagtgtgctctgttacttgtggtaatgggaatcagaaacgcactaggagttgtggttacgcctgcaccgccacagaatcccggacctgcgaccgacctaactgcccaggtatcgaggatacctttcgtacagctgccacagaagtctctttacttgcgggctctgaagaatttaatgctactaaactcttcgaagtggacactgatagctgtgaacgctggatgtcttgcaagagcgagttcctcaaaaagtacatgcataaagtgatgaacgacctgcctagttgtccctgttcttacccaaccgaggtggcttacagtaccgccgacatattcgacaggatcaagcgtaaagattttagatggaaagacgccagcggcccaaaggaaaaactggagatctataagcctactgcccgttattgcatcagatcaatgctgtcacttgaaagtacaaccttggccgcccaacactgctgttatggggataatatgcagctgatcactagagggaaaggggccggaacaccaaatctgataagcaccgagttttcagcagagttgcactataaggtagatgtgttaccttggataatctgcaagggggattggtccaggtataacgaagcacgccccccaaacaatggccagaaatgcaccgagagtcccagtgatgaagactatatcaagcagtttcaggaggcaagagagtattag

SEQ ID NO: 13051 - RNA, 693 nt, synthetic construct
  misc_feature 1..693: note = source = /note="Description of Artificial Sequence: Synthetic coding sequence"
  source 1..693: mol_type = other RNA
atgagattagcaggacctctgaggattgtcgttctcgtagtgtcggtgggtgtcacatggatcgtggtgtcaatcctcctcggcggaccaggaagcggctttccccgaatccagcagctcttcaccagtccagaaagttctgttaccgcggctcccagagcccggaaatacaagtgcggcctgccccagccatgccctgaagaacatctcgcttttagagtggtctctggggcggctaatgtcatcggtcctaagatttgcctggaagacaaaatgttgatgagcagtgttaaagataacgttgggcgaggcctgaacattgctttggttaatggagtgagcggggagctcatagaggcccgggcttttgacatgtgggccggagacgtaaatgaccttctgaaatttatccgcccactacacgaaggtactcttgtattcgtggctagctacgacgaccccgcaaccaagatgaacgaagaaactcgcaagctcttttctgaactcggttcaagaaatgccaaggaacttgccttccgcgattcatgggtctttgtgggggccaaaggtgtacagaataagagcccgtttgagcagcatgttaagaactctaagcattctaataagtacgagggatggcctgaagcactcgaaatggaggggtgtatcccgcgacgttctacggcttcttag

SEQ ID NO: 13052 - RNA, 192 nt, synthetic construct
  misc_feature 1..192: note = source = /note="Description of Artificial Sequence: Synthetic coding sequence"
  source 1..192: mol_type = other RNA
atggggccggaagcgctcagtagtctactcctactgcttttggtagcgagcggcgacgcagatatgaaagggcactttgatccagccaaatgccgctacgcgctagggatgcaagacagaacaattccagacagtgacatctcagcctcctcctcatggtccgactccaccgctgctcggcattcaagatag

SEQ ID NO: 13053 - RNA, 1014 nt, synthetic construct
  misc_feature 1..1014: note = source = /note="Description of Artificial Sequence: Synthetic coding sequence"
  source 1..1014: mol_type = other RNA
atgttgtcacttggtgcccacagcgtgaccaaaacccagatcctccagggccttggcttcaacctgactcatactcccgagtccgcaatacatcaggggtttcagcatttagtgcattcactgacggtgcctagcaaggatttgactctgaagatgggctccgccttattcgtaaaaaaagaactgcaattacaggcgaatttcttaggaaatgtcaagaggttgtatgaagccgaggttttttcaacagattttagcaatcctagtatcgctcaggcaagaattaatagccacgttaaaaaaaagacgcagggcaaagtggtggacatcattcaaggccttgacctcttgaccgcaatggtgctcgtgaatcatatcttttttaaggctaaatgggaaaagccatttcaccctgagtacacgagaaaaaactttccatttctagtcggcgagcaggttacagtgcacgtgccaatgatgcaccagaaggaacagtttgcattcggagtcgatacggagttgaactgttttgtactgcaaatggattataaaggcgatgctgttgctttcttcgttctgccaagtaaagggaagatgcgccagctggaacaggcactttcggctcgaacacttcggaagtggtcacacagcttacagaagcgctggattgaggtttttataccgagatttagtatcagtgcctcctacaatctggaaactatcctaccaaagatgggcattcaaaatgtgtttgacaagaacgccgacttctccggcatcgcaaagcgggatagtctgcaagtcagcaaagccactcataaagcagtgcttgatgtgagtgaggaggggactgaggccactgctgccacaacaacaaagtttatcgtgcgatccaaggacggcccttcctactttacagtgtctttcaacaggaccttcctcatgatgatcactaacaaagctactgatgggattctgtttctgggcaaggttgagaaccccacaaagagctag

SEQ ID NO: 13054 - RNA, 336 nt, synthetic construct
  misc_feature 1..336: note = source = /note="Description of Artificial Sequence: Synthetic coding sequence"
  source 1..336: mol_type = other RNA
atgttttttacaatttctcgcaagaacatgtcacagaagctgtcccttctactcctagtgttcgggctgatatggggactaatgctgcttcactacacttttcagcagcctcgacaccagtcatccgtcaagctgcgggaacagattctggatctatctaagcgatacgttaaagccctggccgaagaaaacaaaaatactgtggacgtggaaaacggggctagtatggcggggtatgccgacttaaagagaaccatcgctgtgctcttagacgatattctgcaaagactagtgaagttagagaataaagtggattatattgtcgtgaatggctag

SEQ ID NO: 13055 - RNA, 498 nt, synthetic construct
  misc_feature 1..498: note = source = /note="Description of Artificial Sequence: Synthetic coding sequence"
  source 1..498: mol_type = other RNA
atggaaatgtttcaaggcctgttactgctgctgttactatcgatgggtggtacttgggcatcaaaagagcccctgcgccctagatgccgtccaattaacgctactctggccgtcgaaaaagagggctgtcctgtatgtatcaccgtgaataccacaatctgcgccggatactgtcccaccatgacgcgagtcctgcagggcgttttacctgctttaccacaagtggtgtgcaactatcgagatgtacggtttgaaagcataagactccccggatgcccaagaggcgttaatcctgttgtaagctatgccgttgcactctcttgccaatgcgcattgtgtcgcaggtccactacagattgtggtggcccaaaagatcacccgttgacctgcgatgaccccagatttcaggacagctcgtcaagcaaagcccctccaccttccctgccctcaccctcgagactgcctggtccatccgacaccccaatcctgcctcaatag

SEQ ID NO: 13056 - RNA, 699 nt, synthetic construct
  misc_feature 1..699: note = source = /note="Description of Artificial Sequence: Synthetic coding sequence"
  source 1..699: mol_type = other RNA
atggtgctccttctggtaattctgatacctgtgcttgtgtcatctgccggcactagtgcacactatgaaatgcttggtacctgcagaatggtgtgcgacccttacggtggaaccaaggcaccttcgacggcagctaccccagatcggggcctaatgcagagcctcccgacctttatacaaggcccacccatgggccccccaggcgagaaaggagaacccggacgtcaaggactccccggacctcccggagcgcctggtctgaacgcggccggcgccattagcgccgcaacttacagcacagttcccaaaatcgcgttttacgccggattgaagagacagcacgaaggctacgaagtcctgaagtttgatgatgttgtaaccaatctggggaatcattatgatcccaccaccggcaaatttacttgttctattcctggcatctattttttcacataccacgtgctgatgcggggtggtgatggcactagcatgtgggccgatctttgtaaaaacaaccaggtgagggcttctgccatcgcgcaagatgcagaccaaaattatgattatgctagcaacagtgtggtgttacatttggaacctggcgatgaggtgtacattaaactcgacggagggaaagctcatggcggcaacaacaataagtacagtactttctctggtttcatcatctatgcagattag

SEQ ID NO: 13057 - RNA, 501 nt, synthetic construct
  misc_feature 1..501: note = source = /note="Description of Artificial Sequence: Synthetic coding sequence"
  source 1..501: mol_type = other RNA
atgggcccagaggcactcagctccctactgttactgttgcttgtggcctccggagacgctgatatgaaaggccattttgatcccgccaagtgtcgctatgcactgggcatgcaagatagaacaatccccgacagtgatatttcagcgtccagcagctggagtgattctaccgcagcgagacattctagactggagtccagtgatggtgacggtgcctggtgtcccgctggatccgtatttcccaaagaagaagagtacctgcaggtggatttgcaaagactgcatctcgtggccctggtagggactcaagggagacacgctggcgggctcggcaaagaattctcacgttcttacaggttgcgatacagccgtgatggccgaagatggatggggtggaaggaccgatggggtcaggaagtgatatcaggcaatgaggatcccgaaggtgtggtcctgaaagatttgggccctcccatggtcgcacgtctggtgaggttttag

SEQ ID NO: 13058 - RNA, 627 nt, synthetic construct
  misc_feature 1..627: note = source = /note="Description of Artificial Sequence: Synthetic coding sequence"
  source 1..627: mol_type = other RNA
atgatcattaaacacttcttcggcactgtcttagttctcctggcatcaacaacaatattctcccttgatctgaaactcattattttccaacaacggcaggttaaccaagaaagcctgaaacttttgaataagctccaaacactgtccatacaacagtgtttgcctcatagaaaaaacttcctcttgccgcagaagtctctgtcccctcagcagtaccaaaagggacatactttggcaatactgcatgagatgttgcagcagattttttccttgttccgggccaatatttcattggatgggtgggaggagaatcatacagaaaagttcctgatacaactccatcagcaactggaatacttggaagccctgatgggcctggaagccgagaagctgagtggtacgcttggatcagacaaccttcgcctgcaagtgaaaatgtatttcagacggatacatgactatctcgagaatcaggattactccacatgcgcatgggctattgtacaagtagagatttctagatgtctattcttcgtgttcagcttgactgaaaaactttctaaacaaggcagaccgttaaacgatatgaagcaggagctaactaccgaattccgcagtccaaggtag

SEQ ID NO: 13059 - RNA, 2241 nt, synthetic construct
  misc_feature 1..2241: note = source = /note="Description of Artificial Sequence: Synthetic coding sequence"
  source 1..2241: mol_type = other RNA
atgccttttcggcacaagcctgggtctgtctttagcgtggagggcgagaacttagatctggctatgtcaaaagaagaagtagtggctatgataggagatgggccatgtgtggtgaagacattgactaggcaccatctgtactgcgaaccccctgtggagcagccactccccagacaccacgccctgcgcgaggctcctgactctttgccggaattcacagtacagatgggaaatctgagattctctctcggccatgtgcagtacgatggagagtcccctggtgcatttccggttgcggcacaggtggggttgggagttggaacatccctcctggccttaggcgttatcattatcgtgcttatgtataggcgtaaaagtaagcaggccctgagagattataaaaaagtccagatacagctcgaaaacttggaatcctccgttcgcgatcgctgtaaaaaggaattcactgacttaatgaccgagatgactgatctcacgagtgacctattgggttccggtataccatttctggactataaagtgtacgcggagcgtatcttctttccaggccatagggagtcaccccttcacagagacctgggcgttcccgaaagtaggagaccgaccgtcgaacagggtcttgggcagttaagcaatctcctgaatagtaaactcttcttaactaagtttattcatacgctcgaatcccaacggaccttttcagcacgagatcgcgcatacgtagcaagccttctcactgtcgcactgcacgggaagctggagtatttcaccgatatcctccggacactcctttccgacctggttgcccaatatgtcgcaaagaatccaaagttgatgctgcgccgcaccgaaacagtcgttgagaagctgctaacgaactggatgtcgatctgtttgtacacgtttgttcgcgattctgtgggggagccgctctacatgttgtttcgcggaatcaagcaccaagttgacaaagggccagtggattccgtaacagggaaggccaaatataccctgaatgacaatagattattgagagaagatgtggaatatcgcccgctcacattgaatgcattgttggccgtgggtcctggcgctggcgaggctcagggcgttcctgtcaaagtcctcgactgcgatactatcagccaggcaaaggaaaaaatgctcgatcagctttacaaaggtgtgcccctaacacaaaggcctgacccccgcaccctggacgtggaatggaggtccggcgtcgcaggccaccttatcctctctgacgaagatgttactagtgaagtgcagggactttggcgcagactgaacaccttgcagcactataaagtgccggatggggctaccgttgccctcgtgccgtgcctgactaaacacgtgctaagagaaaatcaggattacgtgcccggcgagcgaactcccatgctggaggacgtggacgagggaggaatccgtccttggcaccttgtcaagccaagtgacgaaccagaaccaccacgccctagacgaggctcactccgagggggtgaacgcgagcgcgctaaggcgattcctgagatctacctgacccgtctgctgtcaatgaaaggtacgcttcaaaaattcgtcgatgatcttttccaggtaattctctctacatctcgacctgtgccccttgccgtgaagtatttttttgatcttttagacgaacaggctcagcagcacgggatatcggaccaggataccattcacatatggaagactaactcgctgcccctaaggttctggattaatattatcaaaaatccacagttcgtgttcgacgtgcagacctctgataatatggacgccgttttactcgttatcgcacaaacttttatggacgcatgtaccctggcagatcacaaactcggacgagactcacccatcaataagctcctatatgctagggacattcctcgctacaagagaatggtggagagatactatgcagatattcgccaaacagttcctgccagtgatcaggaaatgaattcagtgttggccgaactcagctggaactattccggggatcttggcgcgcgagtggcccttcatgagctttataaatacataaacaagtactacgaccaaattatcactgcactggaggaggacggtaccgcccaaaaaatgcagctcggctacagactgcagcagatcgcagcggctgtggagaataaagtgacagacctttag

SEQ ID NO: 13060 - RNA, 603 nt, synthetic construct
  misc_feature 1..603: note = source = /note="Description of Artificial Sequence: Synthetic coding sequence"
  source 1..603: mol_type = other RNA
atggcctggggaggagtgcacacatgctgttttcacctgtgctgctgctgctcctggcctcagggggccgtacctgaagagctccataagcaccctggccagaccttattgctgcagtgtcaatactcccctaagcgtggaccttaccaaccaaagtcctggtgtcaacaaacaagtcctagtaggtgcaccctcctggtcacctctagcaagccatggactgccgtgcaaaagagtcactatactatctgggacaaacccaacgcaggattctttaatattacaatgatacaactaacccaaaatgactccggtttttactggtgcgggatttataatgcttcggagaatatcatcacggttttgcgaaacattagcctagtcgtgtcgcccgctccaactacatctcccatgtggacgctgccctggcttcctacctccaccgtgctgattacttcacctgagggcactagtggccatccttctatcaatggttccgaaaccagaaaatctagggcccctgcctgtttgggttctggcggtcctaggttcttagttttagtgctctgtggcctgctgctggcgaagggactgatgctttag

SEQ ID NO: 13061 - RNA, 114 nt, synthetic construct
  misc_feature 1..114: note = source = /note="Description of Artificial Sequence: Synthetic coding sequence"
  source 1..114: mol_type = other RNA
atgggctggcttacgcggatcgtgtgtctattctggggcgtgctcttgaccgctcgggcaaattaccagaacgggaagaataatgtaccaagactgaaattatcatacaaatag

SEQ ID NO: 13062 - RNA, 525 nt, synthetic construct
  misc_feature 1..525: note = source = /note="Description of Artificial Sequence: Synthetic coding sequence"
  source 1..525: mol_type = other RNA
atgagactcctcgcgtttctgtctctccttgccctggtgctccaggaaaccgggactgcgagccttccgagaaaagaacgaaagagaagagaagaacagatgccaagagagggagactcgtttgaagtgctgcctttacggaatgacgtcctgaaccctgacaattatggtgaagtaattgacctttccaattatgaggagctcacagactatggcgaccaattgcccgaggtgaaggtaacctccctggcaccggccaccagcatctcgcctgctaaatcgaccacagctcctggaactccaagtagcaacccaaccatgacaaggcccaccacagcgggattgttactatccagccagcctaatcacgaagatatcccccctctgccaagacggaccgcatacctctatgcaaggtttaatcgtatttctcgaatccgcgcagaggattttaagggactgacaaagctcaaacgtatagatttatctaacaacttgatttcgtctattgataacgacgcctag

SEQ ID NO: 13063 - RNA, 657 nt, synthetic construct
  misc_feature 1..657: note = source = /note="Description of Artificial Sequence: Synthetic coding sequence"
  source 1..657: mol_type = other RNA
atgggtagggtcttcctcacgggagaaaaggctaatagcatcctgaaaagatacccccgcgcgaatggattttttgaggagatcagacagggaaatatagagagggagtgtaaagaggagttttgcacgttcgaagaggcccgtgaagccttcgaaaacaatgaaaaaacaaaggaattctggagcacgtatacaaaggctcagcagggagaaagcaacagggggtcagattggttccagttttatttgacattcccattgattttcggattattcatcatactgttagtaattttccttatatggcggtgttttctgcgaaataaaaccagaaggcagacagtcacagaaggtcacataccctttccgcagcaccttaacattattacacccccccctccccccgacgaggtattcgactcctcgggactatcaccaggatttctgggatacgttgtcggtagaagtgattctgtctccactagattgtccaactgcgacccccccccgacttatgaagaagctaccggacaggtcaatctacaacgctcagaaaccgaaccccacctcgacccgccaccagagtatgaggacatcgtgaactccaattctgcctccgctatcccaatggtgccagtggtgaccactataaaatag

SEQ ID NO: 13064 - RNA, 2535 nt, synthetic construct
  misc_feature 1..2535: note = source = /note="Description of Artificial Sequence: Synthetic coding sequence"
  source 1..2535: mol_type = other RNA
atggggcccggggccccgtttgcccgagttggctggccactccccctgttagttgtgatggccgccggggtggccccggtttgggcctctcacagtcctcaccttccccgtccacattcacgtgtacctccccaccctagctcagaacggagagccgtgtacattggcgccctgttccccatgtcaggtggctggcctgggggacaggcttgccaacccgccgttgaaatggcattggaagacgtcaatagtagacgcgatattctgccagattatgagctgaaactcattcatcatgatagtaagtgcgatcctggacaggcaacaaagtatctgtacgaattactctataacgacccaattaagataatcctgatgcctgggtgttcttcagtgtccactctcgtggctgaggccgccagaatgtggaatctcatcgttctgagctatggttccagttctcctgctctgtccaacaggcagcgattccctacctttttcaggacgcaccccagcgcaacgttgcataatcccacacgcgtgaaactgtttgagaaatggggatggaagaagatcgccaccattcaacaaactactgaagtgttcactagtacactggacgacctggaggagagagtgaaagaagccggcatagagatcactttccggcagtcttttttttccgatcccgcggtacccgtcaaaaatcttaagcggcaggatgcgagaattattgtgggcctcttttacgagaccgaagcccgcaaagttttctgcgaggtgtataaagaacgcctgttcggtaagaagtatgtctggtttctgattgggtggtatgcagataactggtttaagatatatgacccctcaatcaactgtacggttgacgagatgacagaggcagtggagggccacataacaaccgagatagtcatgctgaatcctgccaacacccgttcaatcagcaacatgacttcacaagagttcgtggaaaaactcaccaaacgtctgaagaggcaccccgaagagacgggtggtttccaggaagcgcctctggcatatgacgcaatttgggcactcgctctcgcactgaataagaccagtggaggtgggggccgatccggggtcaggctggaggacttcaactataacaaccagactataacagatcagatataccgggcaatgaattccagttccttcgaaggcgtttctgggcacgtggtgtttgacgcatcaggctcaaggatggcctggactctcatagagcagctccagggaggttcctacaaaaagatcggttactacgactcaaccaaggacgacctgtcctggagtaaaacggacaagtggatcggaggttcccctccagcagaccaaactttagttatcaaaacttttcgattcttatcccagaagctgttcatctcagttagtgtcttgagctcactgggcattgtcttggcagtcgtttgcctctcttttaatatttataacagccatgttcgctacatccaaaattcacaaccaaatcttaataatctaactgcagtcggctgctccctggctctcgctgctgtgtttccactgggactggatggttaccacattggacggaatcagttcccattcgtgtgtcaggctcgcctatggttactggggctcggctttagcctgggctacgggtctatgttcacaaaaatctggtgggttcatacagttttcactaaaaaggaggagaaaaaagaatggcgtaaaacactagaaccctggaaactctacgctacggtcggcctactcgtgggtatggacgtcctgaccctggcaatctggcagattgtggacccactgcataggacaatagagactttcgctaaagaagaacctaaggaagatattgacgtttcaatcctcccccagcttgaacattgttcctcacgaaaaatgaacacatggcttgggattttctacgggtataagggcctactgctgctgttagggattttccttgcctacgagactaagagcgtaagtaccgaaaaaatcaatgaccatagagcagttggcatggccatatacaacgtggctgtgctctgcttgatcacggctccagtgactatgatcctgtcaagtcagcaagacgcagcttttgcattcgcatcactagctattgtgttctcaagttacattactctggtggtcctgttcgtgcctaaaatgcgccgcctgatcacccgcggcgaatggcaatcagaggcccaggatacaatgaaaactggatcatcaacaaacaacaatgaggaggaaaaatctagactactcgagaaggagaatcgggagttggagaaaatcatcgccgagaaagaggaacgagttagcgaactgagacaccaactgcagagtagacagcagttaaggagtaggaggcatccacccaccccgcccgaacctagcggaggcctcccacgtggaccacccgagccccctgataggctgagctgtgatggtagtcgagtgcacctcctctataagtag

SEQ ID NO: 13065 - RNA, 2007 nt, synthetic construct
  misc_feature 1..2007: note = source = /note="Description of Artificial Sequence: Synthetic coding sequence"
  source 1..2007: mol_type = other RNA
atggaccttgtcctcaagcggtgtctactccaccttgcagtcattggagcgttgcttgcagtaggcgcaaccaaggtgcccaggaaccaggattggctcggggtgtcccgccaactgcgaaccaaggcttggaacaggcagctgtacccggagtggacagaagcccagaggctggactgttggcgtggcggccaggtgtcgttaaaggtgagcaacgacggaccaacactgataggtgccaacgcctccttctcgatcgctctaaactttccaggcagccagaaagttctgccagatggacaggtgatttgggttaataatacgatcatcaacgggagccaggtgtggggtggacaacccgtgtacccccaagagactgatgatgcctgcattttccctgatggaggcccttgcccaagcggatcttggagccaaaaacgcagcttcgtctatgtttggaaaacttggggccagtactggcaggtgctcggaggccctgtgagcggcttgtccatagggaccggccgcgctatgctgggcactcacacaatggaggtcaccgtttatcaccggcgaggcagtagatcttatgtcccactggcccattcaagctcagcctttaccataaccgatcaagtgcccttctccgtctcggtgtctcagttacgggcattggatggaggcaataagcacttcttgaggaaccagccactgacttttgcacttcaattacatgatccatcaggatacctggccgaagccgatctctcgtacacttgggattttggcgacagcagtggaacactgatctcaagagcattagtggttactcacacttacctggagcccggccccgtgaccgcacaggtagtattgcaggccgctattcccctaactagctgtggtagcagtcccgttcccggaacgaccgacgggcatcgacctaccgcggaagcacccaataccacggcaggccaggtgcccacaactgaggtcgtcggtacaactcctggacaggctcccaccgcggagccctctggcaccacgagcgtccaggtgccaactacggaagtcatcagtactgcacctgtacaaatgcccaccgcggaatccactggtatgactccagaaaaagtccctgtgtccgaggtaatgggtactacgctagcggagatgtctacgcccgaggccactggaatgacccctgccgaggtgtcaattgtggtcctgtccggtaccactgctgcacaggtcacaaccacagaatgggttgaaacaacagcccgagaactgcctattcccgagcctgaagggcctgacgcgtcaagcatcatgtctaccgagagcatcacgggaagtctgggcccactactggacgggacggcaacactgcggcttgtgaaacggcaggtgccgctcgattgcgtgctgtacaggtacggctccttctcggtaacactggacatcgtgcagggaatagagtctgctgagatcctgcaggccgtcccctcaggcgaaggggacgctttcgaactgactgtctcctgccaaggcggcttgccaaaagaagcctgcatggaaattagttcccctggctgccaaccacctgctcagcgcttgtgccagcccgtcctaccttcacccgcctgtcagcttgtcttgcatcagatcttgaagggcggtagtggaacgtactgtcttaatgtgtccctggccgacacgaattctcttgccgttgtttcaacacagttaattatgcctgtgcctggtatcttgctcacgggccaggaagcgggattaggacaggttcctctcattgtcggcatactgctagtgctgatggccgtcgtactggcaagccttatttaccgcagaagacttatgaaacaggacttcagcgtcccacaacttcctcactctagctcacactggctcagattgcctcggattttttgctcgtgtcccatcggagagaattcaccactgctttcagggcaacaagtgtag

SEQ ID NO: 13066 - RNA, 525 nt, synthetic construct
  misc_feature 1..525: note = source = /note="Description of Artificial Sequence: Synthetic coding sequence"
  source 1..525: mol_type = other RNA
atggccgacatgcagaatctggtggagagactggaacgcgctgtcggccgccttgaggccgtgagccatacatctgatatgcatcggggctacgctgacagcccttccaaagcaggcgctgctccctacgtccaggccttcgatagcctcctcgccggtcccgtcgctgaatacttaaaaatctcaaaagaaattggaggggacgtgcagaaacatgctgaaatggtccatacaggccttaagttggagagggccctccttgttactgcgtctcagtgtcaacaacccgccgagaataagctctctgatcttctggcgcccatctctgaacagatcaaagaggttatcacattccgagaaaagaatcgcggttccaaactgttcaatcacctgtcagcagtatctgagtcgattcaggctctgggatgggtggcaatggcgcccaaacccggaccctatgtgaaagagatgaacgatgcagccatgttctacaccaaccgcgtcctgaaagagtataaagattag

SEQ ID NO: 13067 - RNA, 1368 nt, synthetic construct
  misc_feature 1..1368: note = source = /note="Description of Artificial Sequence: Synthetic coding sequence"
  source 1..1368: mol_type = other RNA
atgcttcatcccgaaacttcccccggacgcggacaccttctggccgtgctgctcgccctcctgggaacggcatgggcggaggtctggcctccacagctacaagagcaggcacctatggccggcgcactgaatcggaaggaatcctttctgctactcagtttgcacaacaggctgaggtcctgggtgcagcctcctgcggcagacatgcgaaggcttgactggtctgactccctagcccagctggctcaagcaagagcagccttgtgtggaaccccaaccccttcactggcatcaggactttggagaactttacaggtggggtggaacatgcagctgcttcctgctggactggtttcctttgtcgaggtcgtatctttatggttcgcagagggccagcgatatagccatgcagccggcgagtgtgctagaaacgcgacctgcactcattacacacagctggtatgggctacgtcctcccagctcggttgtggcaggcacctgtgctctgcgggtcaggcagccattgaagcgttcgtgtgtgcttattcaccacgtggcaactgggaagtgaacggaaagaccattgtcccctacaagaagggggcctggtgttcactgtgcactgcttcagtctcgggttgcttcaaggcgtgggatcatgctggaggattgtgtgaagtgcccagaaacccatgtaggatgagttgccagaaccatggcagactgaacattagcacctgtcactgccactgcccccctggctacacggggagatactgccaggtgagatgctctttgcagtgcgtgcacggtaggttcagggaggaggagtgtagttgcgtctgcgacattggatacgggggagctcagtgtgcaacaaaagtgcactttcccttccacacgtgcgatttacgaatagatggggactgtttcatggtgtcctcggaggcagatacctattacagagctagaatgaagtgccagaggaaagggggcgtgttagcccagattaaatctcagaaggtccaggatatcttagctttttacctcggcagactagaaaccacaaatgaagtgatcgactctgatttcgaaactaggaatttctggatcggactaacttataaaactgccaaagactctttccgatgggccacgggagaacaccaggcctttacaagcttcgcattcggacagccggacaaccacggccttgtgtggctgtccgccgcaatgggatttggaaactgtgtagagttgcaggctagtgctgcctttaactggaatgaccagagatgcaaaacgcgaaaccgatacatttgccaatttgctcaagaacatatctcacgatggggccctggctcatag

SEQ ID NO: 13068 - RNA, 297 nt, synthetic construct
  misc_feature 1..297: note = source = /note="Description of Artificial Sequence: Synthetic coding sequence"
  source 1..297: mol_type = other RNA
atggtactggccatgcttggagccctgcacccacgagcgggcctgtcactctttcttcatttgatcctagctgtcgctcttttgcgatcacagcctctgcgctcccaacgctcagtgccggaggcatttagtgccccgctcgagttgtcacagccactctctggactggttgacgattacggtatcctccctaagcacccaaggccccgcggtcctcgccccttactgtctcgagcccaacagaggaaacgcgatggtcctgatctcgctgaatactactatgacgcccacctgtag

SEQ ID NO: 13069 - RNA, 2742 nt, synthetic construct
  misc_feature 1..2742: note = source = /note="Description of Artificial Sequence: Synthetic coding sequence"
  source 1..2742: mol_type = other RNA
atgggtccagaggcattgagctcattattattacttctcctggtggcaagcggagacgccgatatgaaaggacattttgaccctgccaaatgccgctatgctctgggaatgcaggaccgcaccatccccgattcggatatctccgcaagctccagctggtctgactctaccgcggctcgacattctaggttggagtcctccgatggcgatggtgcatggtgtccggcaggctctgtctttcctaaagaagaggagtatctgcaagttgacctccaacgactgcatttagtagctctggtcggcacccagggtaggcacgccgggggtctcggaaaggaatttagccggtcttacagattaagatattcgcgtgatgggcgaaggtggatgggatggaaggaccgctggggccaggaagtgatcagtggaaacgaggacccagaaggagttgttctgaaagatctgggtccccccatggtcgcgcgtttagttcggttctaccctagggccgatcgagtcatgtcagtgtgtctgcgggttgagctatacgggtgtttatggcgagacggcctattgagctatactgcacccgtcggtcaaactatgtacctttctgaggccgtgtacctgaacgatagcacatatgatggccacacagtcggaggactgcaatacggagggctgggacaacttgcagacggagttgttggcctggatgattttcgaaaatcgcaggagctgagggtttggcccggctacgattatgttggatggtcaaatcatagcttttcatctggctacgtggagatggagttcgagttcgaccgccttcgtgcttttcaggcaatgcaggtgcattgcaataacatgcatactctcggtgctcgactccctggtggagtggagtgtcgcttcaggcggggccctgcaatggcgtgggaaggagaacctatgcgtcataaccttggcggcaacttaggagacccccgtgcgcgagctgtctctgtgcctctgggcggtagagtggcaagatttctgcagtgccgcttcctttttgcaggcccctggctgctcttctccgagatttctttcatctccgacgtggtgaataattcaagccctgccttgggcggaacctttccacctgccccctggtggccccccgggccaccccccaccaattttagtagcttggagctggagcccaggggtcagcagcctgtagccaaagccgaggggagtcctaccgctattttgatcgggtgtctggtcgcaattatattgttgctactgctaattatcgccctaatgctgtggcgattgcactggagacgactgttatccaaggcggaacggcgggtactggaggaagaactgactgtgcatttgtccgtgcctggcgatactatcttaatcaataacagaccaggccctcgggagccacccccttatcaggaaccccgtccgcgcggaaatccaccccactcagccccgtgcgtgcccaatggatcagccttgctcctgtctaatcccgcctacaggctcctgcttgcaacatatgcccgaccaccacgcggcccaggacctcctacccccgcgtgggcgaagccaactaatacgcaggcctatagcggggattacatggaacccgaaaagccaggtgcaccacttctgcctcccccccctcagaactccgtgcctcattatgctgaagcagacattgttactctccaaggcgttacaggtggcaacacgtacgcagtgcccgctctgccaccaggcgcagtaggagacggaccaccacgtgtagattttcctcgttccaggctgcggttcaaagagaagcttggggaagggcagtttggcgaggttcacctctgcgaagtagatagcccacaggacctggtctccttagacttccccctgaacgtaagaaaaggtcatccgctcctggtggctgtcaaaattcttcgcccggacgccaccaagaacgcacggaatgactttctgaaagaggtgaaaataatgagccgtctgaaagatcctaacattattcgacttctcggcgtgtgcgtgcaggatgaccccttgtgtatgataacagattatatggagaatggtgatctaaatcagttcctgtccgctcatcagctcgaagacaaggccgcagaaggtgctccaggagacggccaagccgcacaaggtccgaccatttcctatccgatgctgttgcatgttgctgcccaaattgctagcggtatgcgttacctagccactctgaacttcgtccacagagaccttgctaccagaaattgcctggtgggtgaaaatttcactataaaaatcgcggacttcggaatgtccagaaacctgtatgctggcgattactaccgtgtacagggacgcgctgtgctgccgattaggtggatggcttgggaatgcattctcatggggaagtttaccaccgcctcagatgtgtgggcatttggcgtgaccttatgggaggtgctgatgctgtgcagggcacagcccttcgggcagcttaccgatgagcaggtcattgagaatgcaggcgagtttttccgcgatcagggacgccaagtatacctcagccggcccccggcttgccctcagggattgtatgagctaatgctgcgatgctggagtcgcgagtccgaacaaagaccaccattctcacagctgcacagatttctagctgaggatgcactgaatacagtctag

SEQ ID NO: 13070 - RNA, 678 nt, synthetic construct
  misc_feature 1..678: note = source = /note="Description of Artificial Sequence: Synthetic coding sequence"
  source 1..678: mol_type = other RNA
taagccgacttgccgtcatgctggggtgctgggccttgttacactgggcacaaagttggcgccttgcgccgggatacagttatttgttgctgtaggcacggtgattattctacaccttgcctgttcacccccggaaaaccttcacggaacccctcaccctggaaacggacactctggacactttctgctccttgggctggcccggccggatggactggcgaggaacagaacgccacaaaaacgggccttattacgagaagaccccggcccctgcgacgccggcctcaccctgcaccagctagcccgctacctgagattattcgtggtaacattcctcgcatgctcggtaagtttgtacccgtgaactgggaacctcctcagcccttgcccttcccaaagtatctgaggtgttaccgatgtttacttgagaccaaagagcttggatgtctcttaggctctgatatatgtctgacacccgccggtagcagctgtataaccctacacaagaagaactcttccggttccgacgtcatggtttcagactgtagatcaaaagaacagatgagtgactgttcgaacactagaacatcccccgtgtcaggattttggatatttagccaatattgctttctggacttttgcaatgaccctcagaacagaggcctgtataccccttag

SEQ ID NO: 13071 - RNA, 405 nt, synthetic construct
  misc_feature 1..405: note = source = /note="Description of Artificial Sequence: Synthetic coding sequence"
  source 1..405: mol_type = other RNA
atgcctcgctgcagatggttgagtttgatccttctcacgattcctttagctcttgtagcccgcaaggaccctaaaaaaaacgagacaggcgtattgaggaagttaaagcccgttaacgcatcgaatgcaaatgtgaaacagtgcctttggttcgctatgcaagagtataataaggagtccgaggataagtatgttttcctagtagttaagacactgcaggcccagctccaggtaacaaatctgctagagtacttaatcgacgtagagatagcccggtctgattgtagaaagccactcagtactaatgaaatatgtgccatacaggagaatagcaaacttaaaagaaaactgagctgctctttcctcgtgggggctctgccatggaatggggagtttaccgtttag

SEQ ID NO: 13072 - RNA, 1182 nt, synthetic construct
  misc_feature 1..1182: note = source = /note="Description of Artificial Sequence: Synthetic coding sequence"
  source 1..1182: mol_type = other RNA
atgcggacactttttaacctgttatggctggctttagcttgttcccctgtgcatactactctaagcaaatcggatgcaaaaaaggcagcttccaagactctgcttgaaaaatctcagttcagcgataaaccggtgcaagatcgggggctggttgttaccgatctgaaggcggagtccgtcgtgttggagcacagaagctactgttcggctaaagcacgcgaccgacacttcgcgggagatgttcttggctacgtaaccccttggaacagccacggctacgatgtcaccaaagtgtttggctccaaatttacccaaatcagccccgtatggctccaactgaaacgaagaggccgagaaatgtttgaggtaactggtttacatgacgttgatcagggttggatgcgagcggtgcggaaacacgcaaagggactgcatatcgtgcctagactgcttttcgaggactggacctatgatgacttccgcaacgtcctggatagtgaagacgagattgaagaactctcaaagacagtcgtgcaggtggccaagaaccagcacttcgatggctttgtcgtggaagtttggaaccaactgctgtctcagaagcgagtgggattgatccatatgttgacgcaccttgcggaagccctgcaccaggcaagacttctggccttactcgtcattccgccagccatcacccccgggaccgaccagcttgggatgtttactcataaagagtttgaacagctggcacctgtcctggatggcttcagcttaatgacatacgattattctacggcacatcaacccggccccaatgcaccactctcgtgggtcagagcttgtgtccaggtgttagaccccaaatcaaagtggcgctctaaaattctgctgggattaaatttctatggtatggactacgcaacttctaaggacgctagagagcctgttgtgggtgcccgctacatccagaccctcaaagaccatcgcccacgcatggtgtgggacagtcaggcttccgagcacttctttgaatacaagaagtcgcggtcggggcggcacgtggtgttttaccctaccttgaagtctctgcaagtgaggctggagctagccagggaattaggtgtcggggtgtccatatgggaactgggtcaggggttggactacttctacgatttattgtag

SEQ ID NO: 13073 - RNA, 678 nt, synthetic construct
  misc_feature 1..678: note = source = /note="Description of Artificial Sequence: Synthetic coding sequence"
  source 1..678: mol_type = other RNA
taggcggacctcccctcctgctggggtgccggcccatgttatactgggcacaaggttggagccttgaggagagatactgtcatctgctgctgtaggcatggtgattactccaccccctgcttgtttactcccggaaaaccatccagaaacccttccccttggaaaagaactctatggaccttatccgcgccctgggctggaccagcaggctggaccggagaggagcaaaacgccacaaagaccggtctcatcaccaggcggcccaggccacttagaagacgtcctcatccagcccctgcctccccattaccggaaattatacggggaaacattccacggatgcttgggaagtttgtccccgtgaactgggagccaccacaaccactgccatttcccaaatacctcagatgctacaggtgcctactcgaaactaaggaattgggctgtctgctgggatccgacatctgcttaacacctgcaggctcctcgtgtatcaccctccataaaaagaatagctcgggctctgatgtgatggtcagcgactgccgatctaaagagcagatgagcgactgcagcaatacacgcacgagcccggtgagtggcttctggatttttagtcagtattgtttcctggacttctgtaatgaccctcaaaaccgaggtctgtatacaccatag

SEQ ID NO: 13074 - RNA, 1410 nt, synthetic construct
  misc_feature 1..1410: note = source = /note="Description of Artificial Sequence: Synthetic coding sequence"
  source 1..1410: mol_type = other RNA
atgatgcgactcggtggaaggcttgtgttaaatacaaaggaggagcttgcaaatgagcggctgatgacactgaaaatcgccgaaatgaaggaagccatgcgtacccttattttcccaccttctatgcatttctttcaggccaaacatctcatcgaacggagtcaagtgttcaacattctgagaatgatgcctaagggagctgccctgcacttgcatgacatcgggatcgtaactatggactggctggttagaaatgttacataccggcctcactgtcacatttgctttaccccaagaggcattatgcagttccggtttgcccatccaacgcctagaccatccgaaaagtgctcgaaatggattctcctggaggactataggaaacgcgtgcagaatgttacagagttcgacgacagcctgttgcgcaatttcactcttgtaacccaacatccagaggtcatttacacaaaccagaatgtcgtgtggtccaagttcgagacaatatttttcacaataagcggcttgatccactacgccccagtatttcgagattatgtgttccgatccatgcaagagttttacgaggataacgtgctgtatatggaaatccgtgcccggctgctgcccgtgtacgagctgagcggcgagcatcatgacgaggagtggagtgtgaaaacttaccaggaggtggcacagaaattcgttgaaactcaccctgaatttattggcatcaaaattatatattccgaccacaggagtaaagatgttgcagtgatcgcagaaagcattagaatggctatggggttacgcataaaatttccaacagtggtggccggctttgacctggtgggacatgaagacacaggacattccttacatgactataaagaagcccttatgatcccggccaaggatggcgtgaaactgccctatttcttccatgcaggcgagaccgattggcagggcacatccatagatagaaatatcctggacgccctgatgctgaacactaccaggataggacatggctttgctctgtcaaagcacccggccgtccgcacatacagctggaagaaagacatcccaattgaagtgtgccctatttcgaaccaggtgttaaagttagtatctgatctcaggaaccatcccgtcgccacattgatggccaccggtcacccaatggtaattagcagtgacgacccagcaatgttcggggccaaaggactcagctacgatttctatgaggtgtttatggggatcggtgggatgaaggcagatctcagaacactcaaacagctagcaatgaactctattaagtactccacactgctggaatcagagaagaatacctttatggagatttggaagaagagatgggacaagtttatcgccgatgttgcgaccaaatag

SEQ ID NO: 13075 - RNA, 1137 nt, synthetic construct
  misc_feature 1..1137: note = source = /note="Description of Artificial Sequence: Synthetic coding sequence"
  source 1..1137: mol_type = other RNA
tgatactccggagattacatggagcctgagaaaccaggagctccactactaccacccccaccccagaattcagtgccccattacgcggaggcagacatagtgacgctccaaggcgtaactggcggaaatacatacgccgttcccgccttgccacctggcgccgtcggagatggaccaccccgagtggactttccacgcagtcgcctgaggttcaaagaaaagctgggcgagggccaattcggagaagtgcacttgtgtgaggtggactctccacaagatctagtctccttagatttcccgctgaacgttcggaagggccacccactattggtggccgtaaaaatattgcgtcccgatgctaccaagaatgcatctttttctttgttttctcgaaatgacttccttaaagaagttaaaatcatgtcgaggttaaaggacccaaatattatccgccttctgggagtttgcgttcaagatgatccactgtgcatgatcacagattacatggaaaacggagatttgaaccagttcctgagcgcccaccagctggaagataaggctgccgaaggggctccaggcgacggacaggcagctcaaggaccaaccatttcctatcctatgttactccacgtggctgcccaaatcgcatcaggaatgagatacctcgcaacactaaacttcgttcacagagatttagcaacacgtaattgtctggttggggagaacttcacaattaagatcgcggatttcggtatgtctcggaacttatacgctggggattattaccgcgtacaggggcgtgcagttctacctattagatggatggcctgggagtgtatcctgatgggcaaatttactactgcaagtgacgtctgggcgtttggcgtgacgctctgggaggtactgatgctctgcagagctcagccttttgggcaactaaccgacgagcaggtaatcgagaacgccggcgagtttttcagggatcaagggaggcaggtgtatctgagccgaccacctgcatgcccccagggtttatacgaactgatgcttagatgctggagtagggaatctgaacagcgcccacccttttcccaactgcatagattcctggcggaggacgctttgaatacggtatag

SEQ ID NO: 13076 - RNA, 678 nt, synthetic construct
  misc_feature 1..678: note = source = /note="Description of Artificial Sequence: Synthetic coding sequence"
  source 1..678: mol_type = other RNA
tgagccgacctgccatcttgctggggagctgggccctgttataccggccataaggtgggcgctctaagaagagataccgtgatttgctgctgcaggcacggggattattctacaccctgtttattcacgccaggcaagccctccaggaacccatccccctggaagcgaacgctgtggaccctcagcgccccgtgggccgggcctgccggctggacaggcgaggagcagaacgcaacaaagacgggattgattacaagaaggcctagacctctccggcgtcgcccacatcccgcccccgctagcccactgccagaaattatacgtggcaatattccaagaatgttaggaaaatttgttcccgtgaattgggaaccacctcaaccactccccttcccaaaatatctccgttgttatcgctgcctccttgagacaaaggaacttggttgtctcctcggatctgacatctgcctcacccctgcaggatccagttgtattactttgcacaaaaagaatagcagtgggagtgacgtgatggtgtccgattgtcgaagtaaggaacagatgagtgattgttctaatacgaggacctccccagtgtccggcttctggatcttttctcaatattgttttctggatttttgcaacgatcctcagaacagagggttgtacaccccgtag

SEQ ID NO: 13077 - RNA, 846 nt, synthetic construct
  misc_feature 1..846: note = source = /note="Description of Artificial Sequence: Synthetic coding sequence"
  source 1..846: mol_type = other RNA
atgcttcccaaaagcagacgggcacttaccattcaggagatagccgcattggctcgatcatcgttgcacggcatcagtcaggtcgtcaaagatcacgtcacaaaaccaactgccatggcccagggccgcgtggctcacctgattgagtggaagggatggtctaagccttccgatagtcccgccgcactcgaaagcgcattctcatcgtactctgacttgtccgaaggagaacaggaggcgcgtttcgctgctggagtggccgagcagttcgccatagcagaagctaagctgcgagcatggtccagcgtggacggggaagattccacagacgacagctatgacgaagactttgccggagggatggataccgatatggccggacagctccccctgggaccccacctgcaggatctgtttactggtcatagattcagccggcctgtgagacagggttctgtagaacccgagagcgattgttcccagacggtgagcccggacaccctttgttccagcctatgttctctcgaagacgggctgctaggaagcccagcaagattggcatcacagttactcggagatgaactgcttctggcgaaactgcccccaagtagagaatcagcctttcggtctctggggcccctcgaggcgcaagacagcttatataattcacctttgacagaatcatgtctctcaccagccgaggaggagccagccccatgcaaggactgccaacccctatgccctcctctgaccggtagctgggagcggcagcgtcaggcttctgacctggccagctccggtgtggtgtccctggacgaagacgaggccgaaccagaagagcagtag

SEQ ID NO: 13078 - RNA, 1110 nt, synthetic construct
  misc_feature 1..1110: note = source = /note="Description of Artificial Sequence: Synthetic coding sequence"
  source 1..1110: mol_type = other RNA
atgaaattccagggacccttagcttgcctacttctggccttgtgcttaggatccggagaagccggccctcttcagtctggggaagagagtactggaacaaacatcggggaagcactggggcatggcctgggagacgccttatctgagggagtcggaaaagcaatcggcaaggaggctggtggggcagcgggctccaaggtgagcgaagcacttggtcaggggacacgcgaagccgtcggcactggagtacggcaggtacctggattcggtgtcgcggacgcactgggcaaccgcgtcggggaggcggcacacgcgctgggcaatacgggacacgaaattgggaggcaggctgaagacgtcattaggcacggcgctgacgcagtgcggggcagctggcagggtgtaccaggacacaatggcgcgtgggagaccagcggcggacacggcatttttggaagccaaggcggtctgggtgggcagggccagggcaaccctgggggactggggacaccttgggtgcacggctatccagggaacagtgccggatcttttggtatgaatccgcagggggccccttggggacagggtggaaacggaggtccacctaattttggtaccaatactcagggggctgtcgcacaaccggggtatggctcggttcgggcttcaaatcagaacgaaggctgtacaaatcccccccccagcgggtccggtgggggatccagcaattctggcggcggtagcggctcacagagcgggtctagcggttccgggtctaacggcgacaataacaatgggagttcgtcagggggaagcagcagtggcagctcctcaggaggatcttctggcggaagtagcggcggcagcagtggcaacagtggagggagtagaggcgacagcggcagcgagtcttcatgggggagttcaaccgggtccagttcgggcaatcatggaggcagcggaggcggcaatggacataaaccgggcaattcagagacctctcctggaatgttcaactttgatactttttggaagaacttcaaatcaaagctggggttcatcaactgggatgctataaacaaagaccaaagatctagcaggatcccgtag

SEQ ID NO: 13079 - RNA, 420 nt, synthetic construct
  misc_feature 1..420: note = source = /note="Description of Artificial Sequence: Synthetic coding sequence"
  source 1..420: mol_type = other RNA
atgggacctgaggctctcagctctcttttgctgctgcttctggtagcttcaggtgatgcagatatgaaaggccactttgatccagccaagtgcagatacgccctggggatgcaagacaggactatcccggactctgacatatccgcatctagttcatggtcggattcaaccgccgccaggcattctcgcttggagagctctgatggagatggcgcatggtgccctgccggttcagttttccccaaggaagaggaatacttgcaagtggatctccagagactgcaccttgtagctcttgtgggcacccagggcaggcacgccggtggccttgggaaagagttttcacggtcatatagactgagatatagccgggacggccgccgctggatgggttggaaggacaggtggggacaagaatag

SEQ ID NO: 13080 - RNA, 516 nt, synthetic construct
  misc_feature 1..516: note = source = /note="Description of Artificial Sequence: Synthetic coding sequence"
  source 1..516: mol_type = other RNA
atgcggcacaaccttggaggtaacttgggcgatcccagagcccgcgctgtttctgtgccacttggtggaagagtcgccagattcttacaatgcagatttctgtttgcgggcccttggctcctcttttctgaaattagctttattagtgacgtggtgaataactcaagtccagctctgggcggcacttttcccccagctccttggtggccccccggccctccccccacgaatttttcctccctggaactcgaacctagagggcagcagccagtagccaaagccgaaggcagtcctactgccatcctgatcggatgcctagtggccattatcctgcttttactcctgatcatcgccctaatgctgtggaggctgcattggcgccgtctgttgagtaaagtgttggagagccatccacgtacaagatctcctggcctggtcggcattcggccgactcctctccctgtgtcacctatggcgctcgtgcatctatgcgaagtcgattccccgcaggactag

SEQ ID NO: 13081 - RNA, 192 nt, synthetic construct
  misc_feature 1..192: note = source = /note="Description of Artificial Sequence: Synthetic coding sequence"
  source 1..192: mol_type = other RNA
atgggcccagaagcgctttcttccctgttactgctgctactcgtcgctagtggcgatgctgatatgaaaggccatttcgaccctgctaagtgccggtacgctctcgggatgcaggacaggacaattccagactccgacataagcgcctcaagctcctggagcgactctaccgccgcacgccactcaagatag

SEQ ID NO: 13082 - RNA, 1137 nt, synthetic construct
  misc_feature 1..1137: note = source = /note="Description of Artificial Sequence: Synthetic coding sequence"
  source 1..1137: mol_type = other RNA
tgatattctggcgattatatggaacccgaaaaacccggcgctccactgttaccgccacccccccagaacagcgtgccacattatgccgaggccgacatagtcaccctgcagggtgtgactggcggtaatacttatgcagtgccagcgctgccacccggagccgtgggcgacggccctccccgagttgactttccccgcagcaggctaagatttaaagaaaaacttggcgaaggacagttcggcgaagtacatctatgcgaggttgatagtccacaggatctcgtgagtctcgactttcccttgaatgtgcgaaaggggcatcctctcctggtggccgtgaaaatcctcagaccggacgcaactaaaaatgccagcttctccctcttttcccgcaacgactttttgaaggaggtcaaaattatgtctcggctcaaagatcctaatataatacgattgctcggcgtctgtgttcaggatgatccactatgcatgatcacagactatatggagaatggcgacctaaaccagtttctcagtgcacaccagctcgaggacaaagctgcagaaggcgctccaggcgacggacaagccgcacaagggcccaccatcagttatcctatgctgctgcacgtcgctgcgcagatcgcctctgggatgcgctacttggccacgctcaacttcgttcacagggatcttgcaacacgaaattgccttgttggggaaaactttacaattaaaatcgccgactttggaatgagcagaaatctgtatgcaggcgattactatcgggtccaggggcgagccgtactacccatccgctggatggcctgggagtgtatcctgatgggtaaattcaccacagcaagcgacgtgtgggcgttcggcgtgacgctgtgggaagtgctgatgctgtgtcgcgcgcaacccttcggccaactgaccgacgaacaggtaatcgagaacgccggcgaattcttccgagatcaaggccgccaagtctatttgagcaggcctcctgcctgtcctcagggattgtatgagttgatgttgcgatgttggagcagagagtcagagcagaggccaccatttagccagcttcacaggttcctcgccgaggacgctctcaataccgtttag

SEQ ID NO: 13083 - RNA, 2535 nt, synthetic construct
  misc_feature 1..2535: note = source = /note="Description of Artificial Sequence: Synthetic coding sequence"
  source 1..2535: mol_type = other RNA
atgggaccaggggcccctttcgctagggtcggttggccactgcctctgctagttgtgatggctgcaggggtcgctccggtatgggcttcccactctcctcacctcccccggcctcattctcgagtaccaccccatccctcttcagaacggcgcgcagtatatatcggggccttattcccaatgtcaggcggctggccaggcgggcaggcctgccagcctgctgtcgagatggctttagaagatgtgaacagtagacgcgacatcctgcctgactatgagcttaaactgatccatcatgattccaagtgcgatccaggacaggcgactaagtacctttatgaactgttgtacaacgatcccatcaaaatcattttgatgccgggctgctcatccgtttctacacttgtcgctgaagctgccaggatgtggaacttgattgttctgagctatggctctagctctcccgctctttccaatagacaacgctttcccaccttctttaggactcacccctctgctactctgcataatcctaccagagttaaactgtttgagaagtggggatggaagaagattgccacaatccagcagaccaccgaggtatttacatccacgcttgatgacttggaggaaagggtaaaggaagctggaatcgagatcaccttccggcagagcttttttagcgaccctgccgtgcccgttaaaaacctcaaacgacaggacgcccgtatcatagtgggccttttttacgaaaccgaagcacggaaggtgttctgcgaggtgtataaagagaggcttttcggcaagaaatatgtgtggttcctgattggctggtacgccgacaattggttcaaaatatacgatccctcaattaattgtaccgtcgacgagatgacagaggctgtcgaaggccacatcacaactgaaattgttatgttaaaccctgccaatactcggtcaattagcaatatgacgagccaggagtttgtcgagaaactaactaagcggcttaagcgtcaccctgaggagaccgggggtttccaggaagcacctctcgcctacgatgccatctgggctttggcccttgctctgaataagacctctggagggggtggacgctctggggtaaggcttgaagacttcaattataacaatcaaaccattaccgaccagatttatcgcgccatgaactcctcgtctttcgagggtgttagcggacatgttgtatttgacgcatctgggtccagaatggcctggactttaatcgaacagttgcagggtggaagctataaaaagataggttactacgattccactaaggatgacctctcttggagtaaaactgataagtggatcggcggctcacctcccgctgatcagacgctggtcattaaaacattccgatttttgtcccagaagttattcatcagcgtaagcgtcttaagttctctaggtatagtcctcgctgtcgtgtgcctctccttcaatatatacaattcccatgtccggtacatccagaactcccagcctaatctgaacaacttgaccgcagtgggctgttccctggccctggctgctgtattcccacttggactagatggataccatattggcagaaatcaattcccatttgtctgccaagcacgactttggttactgggactgggcttctcattgggttatgggagcatgttcacgaagatatggtgggttcacacggtgttcaccaagaaggaggaaaagaaagaatggagaaagactttagagccctggaagctttacgccaccgtgggactgctggtggggatggatgttttgacgcttgcaatttggcagatcgtcgatcccctgcataggacaattgaaactttcgctaaagaagaacccaaagaagacattgatgtgtccattcttccccagctcgagcactgctcttccagaaagatgaatacatggctggggattttctacggctacaaaggcctcctgttgctgctgggaatcttcctggcatacgagaccaagagcgtgagcactgaaaagatcaacgaccaccgggcagttggtatggctatctacaatgtagcagttctgtgtttgatcaccgcccctgtgaccatgatcctgtcatcccaacaggacgctgccttcgctttcgcgagccttgcaattgtttttagtagttatatcaccttagtggtgctctttgttccaaagatgcggcggcttatcactcgtggcgagtggcagtccgaagcccaggacacaatgaagactggaagttccacaaataacaatgaggaggagaagtctcgactcttagagaaggagaatagggaactcgagaaaataattgccgagaaggaagagagagtgagcgaactcagacaccaactacagtctcgtcagcaacttcgctcgcgcaggcatccacctacgccccccgagcccagtggaggtctacctcggggtccccctgaacccccagatcggctaagttgtgatggatcacgagttcacctcctctacaagtag

SEQ ID NO: 13084 - RNA, 339 nt, synthetic construct
  misc_feature 1..339: note = source = /note="Description of Artificial Sequence: Synthetic coding sequence"
  source 1..339: mol_type = other RNA
atgctgacagccgcattagcccctggtgcagcgaattcccctactactaacccagtaattttgattgtggataaggtgcttgaaacccaagacctgaatggagacggactgatgactcccgctgagctgattaatttccccggcgtggctctgcgcccgtacccaccgtacattggtgtgggccccaattctaacatgtgctccaggtcagatctccctgaagactccaatactctctaccccggaagccacctgtggctgcgccacgccctcaattccaaaggtaatcttgacgcaagactggacggcggagaaaaagctatgcagcctcaatggtag

SEQ ID NO: 13085 - RNA, 2676 nt, synthetic construct
  misc_feature 1..2676: note = source = /note="Description of Artificial Sequence: Synthetic coding sequence"
  source 1..2676: mol_type = other RNA
atgttgccgacggaggtacctcagagccaccctggcccatccgctttactgttgttgcagttactactgccccctactagtgcattcttccctaacatttggtccctgctggccgcccccggaagcatcacccatcaggatctaaccgaagaggcagccctgaacgtgacacttcagctgttcctcgaacaaccccccccaggaagaccgcctctacgcctcgaagattttcttggacgaacactgctcgcagatgatctgtttgctgcctactttggccctggttcttctcgccgatttagggccgccctgggtgaggtgagtagagcgaacgcagcgcaggatttcctgcccacttctaggaacgaccccgaccttcattttgacgccgaacgactgggtcagggtcgggcacgtctggttggtgcgctgcgggagactgtggtggctgcacgagcattagatcacacactcgctaggcagcggctgggcgccgccttgcatgccctccaggatttctattcgcactcaaattgggtggagcttggcgagcagcaaccacacccccatcttttatggccaaggcaagaattacaaaacctcgctcaggtggccgatccgacctgtagtgattgcgaagaattgagctgtccacggaactggctgggtttcacattgttaacgtcggggtacttcggaacccacccacctaagccgcccggcaagtgctcccatgggggtcactttgatcgtagctcaagtcagccacctagaggaggtattaataaagactctactagtcccggcttctcaccacatcatatgctgcacctacaagcagcgaagctggcattactcgcgagcatccaggctttcagcctgctgagatcccgactgggtgaccgcgatttttcccggctgctggatatcaccccagcatcttcactaagcttcgtgctcgataccacaggctccatgggcgaagaaatcaatgcggcaaagatccaggcccgccatcttgttgaacagcggcgaggtagtcctatggaacccgttcattacgtactggtccctttccatgaccctggctttggccccgtgtttactacaagcgatccggattccttttggcagcagctgaacgagattcacgctctgggtggcggagatgaacccgaaatgtgcctaagtgccttacagttagccctgctccacactccccctctaagtgatattttcgtgttcaccgatgccagtcctaaagacgcttttttgaccaaccaggtcgagtcactgacccaggagcgccggtgcagagtgacctttttagtcacagaagatacctcgcgcgtccaggggagagctcgtcgcgagattctgtcccctctgagattcgaaccttataaagcagttgcgctggccagtggtggggaggtgatctttaccaaagaccagcacattagggacgtagctgccattgtcggggaatcaatggccgctctagtcactctgcctttggatcctccagtagtagtccccggacaacccctggtgtttagtgttgatgggctccttcaaaaaattactgtgcggattcacggggatatttcttctttttggatcaagaaccccgcaggagtgagtcagggtcaagaggaaggcggcggaccgcttggccacacgcgccggttcgggcagttttggatggtaactatggacgatcccccccagactggaacatgggagatacaggtcacagctgaggatacacctggtgtccgcgtgcaggctcagacgtctctagattttctgtttcacttcggcattcccatggaggacggtccgcatcccgggttgtatccacttacccagcctgtagccggactgcagactcagttgctcgtcgaggtaaccggcttgggcagcagagctaaccccggagatccacaaccccatttcagtcatgttatccttcgcggcgtgcccgaaggcgctgagttggggcaggtaccgctggagccagtcgggccccctgagaggggactcctggcggcctcactctctcccaccttactgtcaactccacgccccttcagcctggaacttatcggtcaggacgctgcaggcagacggctacaccgggctgcgcctcagccttccactgtggtccccgtgttactggaactgagcggaccctctggatttctcgccccaggcagtaaggtacccttgagccttaggatcgcctccttttccgggccccaggatctcgatctacgtacattcgttaacccatctttctctctgacaagcaacctttcgcgcgcccacctggaacttaatgaatcagcctggggtcgcctttggttagaggttccagattcggctgcacccgactccgtggttatggttacagtcacagctggaggccgcgaagccaaccccgttccccccactcatgcatttctgagactcctcgtcagcgcccccgccccgcaagatcggcataccacacctacaggctcatcagaccctattcttaccaccgctacacccgcattttcacccttcaccctggtgactcagggccgcgcgggcgcaggactggctgctggatcaccttggtggggaaccgtcggcggcgttctgttgttgctgggtctcgccagctggtag

SEQ ID NO: 13086 - RNA, 2742 nt, synthetic construct
  misc_feature 1..2742: note = source = /note="Description of Artificial Sequence: Synthetic coding sequence"
  source 1..2742: mol_type = other RNA
atgggccctgaagccctgagttctcttctgttgttactcctcgtggccagcggcgacgctgatatgaaaggtcacttcgatcccgcaaaatgccgatatgcattggggatgcaggaccggactatccccgactccgatataagtgcatcaagctcctggagtgattccactgccgcacggcattcccgattggaaagtagcgacggtgatggcgcttggtgtcccgctggctctgtcttcccaaaagaagaggaatatctgcaagtggacctccagcgattgcacttagttgcgcttgtggggacacagggccgccacgccggagggctaggaaaagaattctcgagatcatatagacttcgatactcccgtgacggccggcgttggatgggttggaaagacagatgggggcaagaggtgatatcgggcaacgaagatcctgagggagtggtgctaaaggatctaggaccaccaatggtcgcaagactcgtgcgcttctatccgagagccgaccgtgtaatgtctgtttgcctccgagttgagctctacggatgcctttggcgagacgggctgctgtcttacacagctccagtcggacagacaatgtacttgtcagaagccgtgtatctcaacgattctacctacgatggccacacggttggaggactgcaatacgggggtctggggcaacttgctgacggagtggtaggcctggacgatttccgaaagtcccaggagttgagggtctggccaggctacgattatgtcgggtggtcaaaccacagtttcagtagcggatacgtcgaaatggaatttgagttcgatcgcttgcgcgcatttcaggcaatgcaggttcattgcaataatatgcacaccctgggggccagactgcctggaggggttgagtgcaggtttagacgaggcccagccatggcttgggaaggcgagcccatgaggcacaatctaggaggcaatctgggggaccccagagcaagggccgtgtcggtgcctttagggggccgggttgcccggtttctgcaatgcaggtttctgtttgctggaccttggctattattttcagaaatctccttcattagtgacgtcgttaacaattcttctcctgctttaggcggcacttttccccctgctccttggtggccccctggaccccctccaacaaattttagtagtctggaactcgagccccgcggccagcagcctgtggccaaggcggagggctctcctaccgctatcctcatcggctgtttagtggctattattctgctgttacttctgataatcgccctgatgctttggcgccttcattggcggcggcttttgagcaaggccgaaaggcgagtgttggaggaagagctcactgtccatttgtccgtgcctggtgatacgattttgatcaataacagaccaggcccccgggagccccccccgtaccaagaacctcgaccaaggggcaatccccctcatagcgccccctgtgtgcccaacgggagtgcgcttcttctgagtaatccggcctacaggctcttgctcgccacttacgctcggcctcctaggggccccgggccgcccactccagcctgggcgaagcccaccaatacacaagcttactcaggtgactacatggagcccgaaaagccaggtgcccctttattgcctccccctcctcagaatagtgtacctcactacgccgaagctgatatcgtgaccctccagggcgtcactggggggaacacgtatgccgttcccgcactccctcctggagccgtaggagatggaccacctcgggtcgactttccccgctcccggctgcgtttcaaagagaagttaggcgaagggcagtttggcgaagtgcacctctgtgaagtagatagcccccaagacctggtgtccctggattttccactcaacgttcggaaggggcaccctctgttggtggccgtgaagatcctgcgacccgatgcaacaaaaaatgcaagaaacgatttcttgaaagaagtgaagatcatgtctagactcaaggatcctaacattattagacttctgggcgtgtgtgttcaggatgacccactgtgcatgatcaccgactatatggagaacggcgatcttaatcagttcctttccgcccatcaactcgaagataaggcagccgagggggcgcccggggatggacaggccgctcaaggccccaccatttcataccccatgctgctccatgtggccgcccagatcgcctccggcatgcggtatctggccaccttaaacttcgttcacagggacctggctacacgcaattgcctcgtgggcgaaaacttcacaataaagatcgcagacttcggtatgtcacgaaacctatacgcgggtgactactacagggttcagggtcgagcagtgctgcccattcgatggatggcatgggagtgcattctgatggggaagtttaccacggcctccgacgtgtgggcctttggagttactctctgggaggtgctcatgttgtgtagagctcaaccatttgggcaacttactgacgaacaggtgatagagaatgctggcgaatttttcagggatcagggacgccaggtttacttgagccggccgcctgcgtgcccacagggtctgtatgagctcatgctccgttgttggtcgagagagagtgagcagagacctccatttagccagctgcataggttcttagccgaagacgccctgaacaccgtgtag

SEQ ID NO: 13087 - RNA, 390 nt, synthetic construct
  misc_feature 1..390: note = source = /note="Description of Artificial Sequence: Synthetic coding sequence"
  source 1..390: mol_type = other RNA
atggccgctggatcagcccccatgcagctgcatcttagagctaccataagaatgaaggatgggttatgcgtgcctagaaaatggatatatcacttaactgagggttccaccgacctgcgcactgagggcagaccagacatgaaaactgaactgttttcttcctcgtgcccagggggcattatgttgaatgaaactggacagggctaccagaggtttcttctctataataggtccccccacccgcctgagaaatgtgtggaagaatttaaaagccttacatcatgcctggatagcaaagcatttcttctcacgccacgaaatcagggtaaaggactgaaatcacataaaacaggccttggcctcactaaatcctcaggagtgaccgggtag

SEQ ID NO: 13088 - RNA, 846 nt, synthetic construct
  misc_feature 1..846: note = source = /note="Description of Artificial Sequence: Synthetic coding sequence"
  source 1..846: mol_type = other RNA
atgctcccgaagagccgtagggcactcactatccaagagatcgcggcacttgcgcggagttctttgcatgggatctcacaagtcgtcaaagaccatgtaacaaagccaacagccatggcccaggggcgcgtcgcacatctgatcgaatggaaaggctggagcaagccgtctgacagtccagctgctcttgaaagcgcattctcctcttacagcgacctttcagaaggtgaacaagaagcccggtttgcagctggagtcgccgagcagtttgctatagccgaggctaagctccgggcctggagtagtgttgacggggaagattctaccgacgattcatatgacgaggacttcgctggaggcatggataccgatatggcgggccaactaccactggggcctcaccttcaggaccttttcacaggtcatagattcagccgaccagtacgccaagggtctgtggagcccgagagtgattgtagtcagaccgtctcacccgacacactgtgttcaagcctgtgttcattggaggatggattgttgggatcccctgccagactggctagccagctgttgggagatgaactgctgctcgcgaaattaccgcctagccgggagtctgcttttcgctctttgggccctttagaagcacaggacagtctgtataactcgcccttaacagagagctgcttgtctccagctgaagaagaacctgccccctgcaaggactgccagcccctttgtccccccctaactgggtcatgggagcggcaacggcaggcatccgatctggcttctagcggtgtcgtcagcctcgacgaggacgaggcggaacccgaggaacaatag

SEQ ID NO: 13089 - RNA, 444 nt, synthetic construct
  misc_feature 1..444: note = source = /note="Description of Artificial Sequence: Synthetic coding sequence"
  source 1..444: mol_type = other RNA
atgggacccgaagcactatcctctctgctcctgcttctgttagtggcctctggcgacgcagatatgaaaggacactttgaccctgccaagtgccgatacgcattagggatgcaggacaggaccatacccgactcggacattagtgcgagcagctcatggtctgattcgaccgcagcgcgtcattctcggttggaatcctcagacggcgatggggcctggtgccctgccggcagcgtttttcctaaggaggaggagtacctgcaggtggatcttcagcgcttacacctggtggcgctcgtcgggacgcaagggaggcatgcaggcggacttggcaaagaattttctagaagttatcgattacgctactcccgggatggccggcgttggatgggctggaaagaccggtggggacaggaagtgatatcagggaacgaggacccgtag

SEQ ID NO: 13090 - RNA, 2631 nt, synthetic construct
  misc_feature 1..2631: note = source = /note="Description of Artificial Sequence: Synthetic coding sequence"
  source 1..2631: mol_type = other RNA
atggggcctgaagccctcagttcactgctcttactgttgctggtggcaagcggagatgctgatatgaagggccactttgatccagctaagtgtcggtatgcactgggaatgcaggatcgcacgatcccagactcagacatctccgcaagtagctcttggagcgattccaccgctgctcgccactcccgactcgagagttccgatggcgacggggcttggtgccctgctgggtctgtctttccaaaagaggaggaataccttcaagttgatctgcagcgtcttcatctggttgccctcgtcggaacacaggggagacacgcgggggggctcgggaaggaattctctaggtcctatagactgaggtacagcagagacggccggagatggatgggatggaaagaccgctggggtcaagaagtgattagtggtaacgaagatcccgagggggttgtgctcaaagatctcggcccacctatggtggctagactcgttagattttatcctcgagccgatagagtgatgtctgtgtgtttaagagttgagctgtatggatgtctttggcgcgacggtcttttgagttacactgcccccgttggtcaaactatgtatctgagcgaggctgtctatctcaatgactccacatatgacgggcacactgtcgggggcctgcagtacggcggcttaggacaactagctgacggcgtagtggggctcgacgacttcagaaagagccaagaattgagggtgtggcccgggtacgattacgtaggctggtctaaccacagttttagctcaggttacgtcgagatggagtttgagtttgacagactgcgcgcctttcaagccatgcaggtgcattgcaacaatatgcataccctcggtgcacgattgcctggcggtgtggagtgtcggtttcgtaggggacctgccatggcatgggaaggagaacccatgcggcataatctcggagggaacctgggggatcctcgagcccgcgctgtaagcgtacctctcggaggacgggtggccagattcttgcagtgcagattcttgttcgccggaccctggctactgttttccgaaatctctttcatatctgacgtggtcaacaattcttctcccgccttgggcggtacttttccccctgctccatggtggcctcccggcccgccccctaccaacttctccagtttggagctcgagccacggggacagcagccggtggccaaagccgaaggaagcccgacagccatcctgatcggctgcctggtggccatcattctgttgctgctgcttatcattgcactgatgttgtggcgcctgcactggcggcgcctgctcagtaaggccgagcgtcgagtgctcgaggaggagctgacagtgcacctgtcagtgcccggcgacactatcttgatcaacaatcgccccggtcccagggaacccccaccttatcaggaacctagacccagaggcaatccacctcatagtgcgccctgtgtcccaaatggctctgcctattccggagactacatggagcctgaaaaaccaggggctccactgctgccccccccaccacaaaattctgttccccactatgctgaagcagacatcgtcactttgcaaggcgtcacaggcgggaacacctacgccgtcccggccctcccgccaggagccgtgggcgatgggccaccacgggtggatttccctcggagcaggctcagatttaaggagaaattgggcgaaggacagttcggcgaggtccatctatgcgaggtggactcacctcaagatctggttagtctggatttccctctcaacgtacgcaaaggacaccctctgctggtagccgtcaaaatcctcagacctgatgcgaccaagaatgccagaaacgacttcctcaaggaggtaaagataatgtcacggctgaaagatcccaacatcataagactgctcggcgtctgtgtccaagacgatccgctgtgcatgattacagactatatggagaacggagatcttaatcagttcctgagcgcccaccagcttgaagacaaggctgccgaaggtgcacccggtgacggccaggccgcacaggggccgacaatctcctacccaatgctgcttcacgtggccgcacaaatcgcttctgggatgagatacctggcaacgctgaatttcgtgcacagggatctggctactagaaattgccttgtgggtgaaaacttcacaattaagatcgccgactttggaatgtctcggaacctttatgcgggcgattactatcgagttcagggacgcgcggtgcttcctatccggtggatggcatgggagtgcattttgatggggaagtttactacagctagtgatgtgtgggctttcggtgtcactttgtgggaggttttgatgctctgtagagcccaaccattcggacaacttaccgacgaacaagtaatagagaatgcaggagaattctttagggaccaggggcggcaggtgtatctgtctcggccccccgcctgcccgcaaggtctctatgaactaatgttgaggtgctggtccagggagtccgagcaacggcccccttttagtcagctccatcgttttctggccgaggacgccttgaataccgtttag

SEQ ID NO: 13091 - RNA, 1749 nt, synthetic construct
  misc_feature 1..1749: note = source = /note="Description of Artificial Sequence: Synthetic coding sequence"
  source 1..1749: mol_type = other RNA
atggatttcctccttgccctcgttcttgtgtcatctctctacctgcaggccgcagcggaatttgatggcagatggcctcgacaaattgtgtcttcgattggcttgtgcaggtatggcggccggatagactgttgttgggggtgggctcggcagtcttggggccagtgccaaccattttatgtactccggcagcgtatagctagaatcaggtgtcagctgaaggcagtctgtcagccaagatgtaagcacggggagtgtattggtcccaataaatgcaaatgtcatcctggctatgccggcaaaacctgcaatcaggacctcaatgaatgcgggttaaaacctcggccatgcaagcaccgatgtatgaacacctatggatcatataagtgctactgtcttaacgggtatatgcttatgcccgacggctcctgctctagcgccttgacatgctccatggccaactgtcagtacggttgcgatgtggtcaagggtcagatccgttgccagtgccccagtcctggcttacagttagctcctgacggccgcacatgtgtagatgtggatgaatgcgctacaggcagagcttcttgcccacgatttcgtcaatgcgtcaacacttttggttcctatatttgcaagtgccataagggattcgatcttatgtacattgggggcaaataccagtgccatgatatcgatgaatgttcacttggacagtaccaatgctccagctttgcgcgctgctataacataaggggcagttacaagtgcaagtgtaaagagggctaccagggcgacggtttgacatgtgtctacattccaaaagtgatgatagagccttccggccccattcatgtaccaaagggcaatggaactatcttgaaaggagatactggtaacaataattggataccagacgttggcagcacctggtggccacctaaaacaccttatattcccccaattattacaaaccgcccgacctccaaacctactacgagaccaactccgaagccgactccaatccccactcccccaccccctccacctttgcctacagaactaagaacccctctccctccaactacgcccgagcggccaacgactggactcacaacaattgcccccgcagcatccacaccccctggtgggattacggtggataatagggtgcagactgacccccaaaaaccccgcggagacgtgttcattccccggcagccaagtaatgatttgttcgagatctttgaaattgagagaggagtgtccgctgacgatgaagctaaagacgaccccggcgtattggtccacagctgcaactttgatcacggcttgtgtggctggatccgggaaaaagataatgatctgcactgggaacctatcagagaccctgccggcggacagtacctaaccgtttccgctgccaaagcccctggtggaaaggcagcccgcttggttctcccgctgggacgcttaatgcattcaggagacctctgcctctctttccgtcacaaagtcacagggttacactctggcaccctacaagtgtttgtgcggaagcacggggcccatggagctgcactctggggcagaaacggcggccacggctggagacagactcagattaccttacggggcgccgacatcaagtctgtggtctttaagggggaaaaacgcagaggtcataccggcgagattggcctggacgatgtgtccctgaagaagggccattgtagtgaagaaaggtag

SEQ ID NO: 13092 - RNA, 1602 nt, synthetic construct
  misc_feature 1..1602: note = source = /note="Description of Artificial Sequence: Synthetic coding sequence"
  source 1..1602: mol_type = other RNA
atgggcagttctcgcttggcggctcttctgctcccactgctcctgattgttatagacctgtccgactccgccggcatagggttccggcacctgccacactggaatacccgctgccctctcgccagccacacagatgactccttcacaggcagctccgcatacatcccttgccggacttggtgggcactgttctccacgaaaccatggtgtgtccgggtgtggcactgttcaagatgtctctgccaacacctcctgtctggcggctccggactgcaacgcggtctgttccatcttctggtacagaaatctaagaaatctagtacttttaaattttatagacgccacaagatgcccgccccggcccagcgcaagttattgccacgtagacatctctccgagaagtcgcatcatatcagtataccaagcccagatatctcacacaaaggtctgcggtccaagcgcacacagcctagtgaccctgagacatgggaatccttgccaaggcttgattctcagcgacatggcgggccagagttctctttcgacctgctcccagaggcacgagcgatcagggtgacaatcagtagcggccccgaggttagcgtgaggctatgccaccagtgggcgttggagtgtgaagagctgtcttctccatacgacgtgcagaaaatagtgtccggcggccacacagtcgaactgccatatgagtttttgctgccatgtctgtgcattgaagcctcatatttacaagaggacaccgttagacgtaaaaagtgcccgttccagtcctggcctgaggcctacggctctgatttttggaaaagtgttcactttacggattactcccagcacactcagatggttatggctctgacattaaggtgcccactgaagttagaggcggctctgtgccaaaggcatgattggcacaccctgtgcaaggaccttcccaacgcaactgcacgcgagtccgatggctggtacgtgctcgagaaggtcgatctacaccctcaattgtgtttcaagttttccttcggcaatagctcgcatgtcgagtgtccccaccaaaccggctcacttacatcatggaacgtgtccatggacacacaggcacagcagttgattttgcacttcagctctcggatgcacgcaacgttttctgctgcatggtcactgccaggtctgggccaggatacacttgtgcctcctgtctatactgtttcccaggcccgaggaagttcccctgtgtctctggatctgatcataccctttcttcggccagggtgctgtgtccttctccacgcctcattatctagtcccggcggtgaggacgcatggcttataggtgtgggtggaagtgtcccaagcggcgtggctgtacggtgtccagtgtgccttgaagcccccttagtctccggttgcctgctgcagacccctggggccctcgatcctggcacagccggtccaccacatcccaccgggtgctgctctggacctcatttaccagcgccaactgtaaggcctggaccctctgctgccagcgctccccctgcgagaggaggcctaggcggagccgccgcccccggcggaagcgccggctag

SEQ ID NO: 13093 - RNA, 1293 nt, synthetic construct
  misc_feature 1..1293: note = source = /note="Description of Artificial Sequence: Synthetic coding sequence"
  source 1..1293: mol_type = other RNA
atgggggtgtctaaactggatatcctttatcggcgcctgctcttgacaaagttattcatacgcgggtgggggcgccctgaagacctcaagagactgtttgaatttcgcaagatgattggcaacagggaaaggtgccagaatttagtctcttccgactaccccgtgcatatcgacaaaattgaagagcaaagcgactgcaagattctggatggacattttgtgtctccaatggcccactacgttccagacatcatgcccattgaatctgtgattgctcgcttccagtttatcgtccctaaagaatggaactcaaaataccgacctgtctgcattcatctggcaggcaccggcgaccatcactactggagaaggagaaccctgatggctcggcccatgattaaagaggctagaatggccagtctacttcttgagaatccttactacgggtgccgcaaacccaaggaccaggttaggtcatcgttgaagaacgtctctgatcttttcgttatggggggggccttggtgttggaatcagcagcattgctccactggcttgagcgcgaaggatatggaccactaggcatgaccggtatttccatgggcggtcacatggcaagcctggccgtgagtaattggcccaagcctatgccgcttattccctgcctctcctggtcaaccgcatccggggtgtttaccaccaccgacagtttcaaaatgggccaggagtttgttaagcactttactagtagcgccgacaagctgaccaatctgaatttagtctctcgtactctgaacctcgatatttccaaccaggtagtatctcagaagccagccgattgtcataattcttcaaagacgagcgtttccgccacctctgagggcctgctgctacaggacacttctaaaatgaagagattcaatcagacactgtccacgaacaagagcggatatacatctaggaacccacagtcgtaccacttattgtcaaaagagcaatcccgcaattccctgcgaaaggagtccctgatcttcatgaagggagtgatggacgaatgtacccatgtcgctaatttcagcgtaccagtggacccatcattgattattgtggttcaggccaaggaggacgcctatataccacgaacaggcgtacggtcactgcaagaaatctggccaggatgtgaaatcagatacctggagggaggtcacatctcggcttacttgttcaagcagggattatttagacaggccatctacgacgccttcgatcgcttccttcacaaatatgctaattag

SEQ ID NO: 13094 - RNA, 2631 nt, synthetic construct
  misc_feature 1..2631: note = source = /note="Description of Artificial Sequence: Synthetic coding sequence"
  source 1..2631: mol_type = other RNA
atggggcctgaggctctctcgtctctgctgctgctgctgttggtggcatctggcgacgcagacatgaaaggacatttcgaccccgcgaaatgccgttacgctcttggcatgcaggatcggacaatccctgatagtgatatttcggccagctcctcttggtctgacagtactgccgctagacactctcgacttgagtcttccgatggggacggtgcctggtgccccgccggttctgtgtttcctaaggaggaagagtacctgcaggtggacttgcagagactgcaccttgttgcactggtaggcacccaagggaggcatgccggaggccttggcaaggagttttcaagatcttatagacttcggtacagtcgcgacggcagacggtggatggggtggaaagatcggtggggccaggaggtcatctctggtaacgaagatcccgaaggcgtcgtgctcaaggatctcggcccaccgatggtggcacggcttgtgagattttacccccgggcagatagagtcatgagtgtctgtttgcgagtagaactctatggatgtctgtggcgggacggattactcagttacacagcgcccgtcggccagaccatgtatctgtctgaggccgtctatttaaatgattctacatatgacggacatactgtgggggggctgcaatatggggggttggggcagctcgctgatggcgtggtggggctggacgatttcagaaagtctcaggagctgagagtgtggcctggatacgattacgtgggttggtcaaatcacagctttagtagcggctatgttgaaatggagttcgaattcgacaggttgagggctttccaggctatgcaggtgcattgcaataatatgcatacactgggcgctagattgcccggcggcgtggagtgtaggtttcgccggggtcccgcaatggcttgggaaggggagccaatgagacataatctcggcggaaatttgggagatcccagggctagagccgtgtctgtgcccttgggtggtagagttgcacggtttctccaatgtcgtttcctcttcgctggaccatggctgctgttttcagaaatctcattcatatcggatgttgtcaacaacagttctcctgctcttggggggaccttccctccagccccctggtggccgccaggccctccacctacaaattttagctccctggagttggaacccagaggccagcaacctgtggccaaggccgaaggctccccgaccgctatcctgattggctgcctagtagcaattattctgctgctcctgttgatcatcgctttgatgctgtggagactgcactggcgtcgcctcctaagcaaggcagagaggcgtgtattagaggaggaattgaccgtacacctttcagtcccaggggacactatcctgatcaacaaccgccctggcccgagagagcctcctccttatcaagagccacgtccgagagggaatccaccgcattcagcaccctgcgtcccaaatggtagcgcctactcaggagactacatggaaccagagaagccaggggcacccctcctccctccgccaccacagaattcagtgcctcattatgcagaggcagatatcgttacactgcagggagtgaccggcggcaacacctacgcagtacccgcgctcccaccgggtgcagtgggcgacggcccccctcgcgtggacttcccaaggagtcggctaaggtttaaagagaagttgggcgaaggccagttcggagaggtccatctgtgcgaggtggactctccccaggacctggtgtcattggacttccctctaaatgttaggaaagggcaccctctactcgtagccgtcaaaatccttcgtccagacgcaactaaaaatgcaagaaatgattttttaaaagaggtcaagatcatgtccaggctcaaagatcctaacatcattcggcttctgggggtttgcgtacaggacgaccctctttgcatgataaccgactatatggagaacggagacctgaatcagttcctgtctgctcaccagcttgaagataaggctgctgagggtgctccaggagacggacaagccgcccagggtcccacaattagctatccaatgttacttcacgtcgccgctcagatagcgtctgggatgagatatttggcaacccttaattttgtgcacagagatcttgctacaagaaattgcctggtgggtgagaacttcactattaagatcgccgatttcgggatgagtcgcaatctctacgccggcgactactatcgagtacaaggcagggcggtcctgcccataagatggatggcatgggagtgtatcctgatggggaaatttaccaccgcttccgatgtgtgggctttcggggtgacactgtgggaagtgcttatgttgtgtagagcccaaccattcgggcagttgactgacgagcaggtcatcgagaatgcgggtgaattcttcagagaccagggccgacaggtgtatctctcaaggcccccggcttgtccccagggcttatatgaattgatgcttaggtgctggagtagagagtccgagcagaggcccccgtttagccagctgcaccgcttcctggccgaagatgcgctgaatacagtatag

SEQ ID NO: 13095 - RNA, 237 nt, synthetic construct
  misc_feature 1..237: note = source = /note="Description of Artificial Sequence: Synthetic coding sequence"
  source 1..237: mol_type = other RNA
atgggcagcggcctcccgctagtactcctgctgaccctcctaggtagcagtcatggcaccgggcctggcatgacactccagcttaaacttaaggaaagttttctgactaattcctcctatgaatctagcttccttgaactactggagaagctctgtctgctcctccaccttccatcaggtacgtccgtaacattacatcacgctcgaagccagcaccacgtggtttgtaatacttag

SEQ ID NO: 13096 - RNA, 2631 nt, synthetic construct
  misc_feature 1..2631: note = source = /note="Description of Artificial Sequence: Synthetic coding sequence"
  source 1..2631: mol_type = other RNA
atgggtccggaggcactgtcgtccctgctcctgcttctcttggtggccagcggcgacgctgacatgaagggccattttgatccagccaagtgtcggtatgcactaggaatgcaggaccgcactatcccggatagtgatatttccgcttcatcaagttggtcagactccacagccgctcggcactcaagacttgagtctagtgacggggatggggcatggtgtcctgccggatcagtgtttcccaaggaggaggagtatctgcaggttgatctgcagcggttgcatctcgtggctcttgtagggacacaaggcagacatgctgggggccttggcaaggaattctcacgatcctatcgactgcgctactcaagagacggcagacgctggatgggctggaaggataggtggggacaggaagtcatcagtggaaacgaggatccagagggtgtggttctcaaggatctcgggccacccatggtcgctaggctcgtgcgattctatccgagagctgatagggtgatgtctgtctgcctgagagtagaactgtacggttgtctgtggcgtgacggcttactttcctatacggcccctgtgggacaaacgatgtatctcagtgaagccgtgtatcttaatgacagtacttatgacggacacacagtcgggggactccagtacggcggcctgggccagcttgccgacggggtagtgggcctcgacgatttccggaagtcccaggagctgcgggtgtggcctggctatgattacgtcggctggagcaatcattcctttagcagcggttatgtcgaaatggaattcgagtttgatcggttgagggccttccaggcaatgcaggtacactgcaacaacatgcacactttaggtgctagattaccaggaggcgttgaatgccggttcaggcgcggtcctgccatggcgtgggagggggagccaatgcgccataaccttggcggaaatttgggcgaccctagagctcgagccgtgtctgtccccttgggcggacgcgtggctcgatttctgcagtgccgattcctctttgccggaccttggcttctcttttctgaaatttccttcatttctgatgtggtcaacaactcttcacctgctctcggcgggaccttccccccagcaccctggtggccacccggacccccccctaccaacttctctagtctggagttagagcctcggggtcagcaacccgtcgctaaggccgaagggtccccgacagctattctcatcggctgtctggtagccatcattctccttctgctcctgataatagctttgatgctgtggcgccttcattggagaagactcctgtccaaagcggagcgtcgtgtcctggaagaagaactcactgtacatcttagcgtgcctggggatacaatcctaatcaataacagacctggccctagagaaccacccccctaccaggagccccgtccccgcggtaatccccctcatagcgccccctgcgttcccaatggtagcgcatacagcggagattacatggagccagagaaaccaggtgctcctctcctgcctcctccaccacaaaattccgttccacactatgcagaagcagatatcgttaccctgcagggcgtgacagggggcaatacttatgccgttcccgccttgccacctggagcagtgggggatggaccacccagggtggactttcctagatctcgtcttagatttaaagaaaaactcggtgaaggccagtttggcgaagttcacctttgtgaagtcgacagcccccaggatctggtcagcctggatttcccactcaacgtgaggaaagggcaccccctcttggtggccgtgaagatcctgcggccagatgccactaaaaatgcgcgaaatgattttcttaaggaggtaaagattatgagcagactgaaggatccaaatatcattaggctgctgggcgtatgcgtgcaggatgaccccttgtgcatgattacagactatatggagaacggcgatctgaaccaattcctgtccgctcatcagctggaggacaaggctgccgaaggagcgccgggtgacgggcaagccgctcaagggcccacgatcagctatcccatgctacttcacgtagctgcccagatcgcgagtggcatgcgctacctcgcaaccttgaactttgtccatagggacttggccacccggaattgcctggtcggagagaacttcacgattaagattgccgatttcggaatgtcccgcaacttgtacgccggggattattatcgcgttcagggcagggccgtgctgccaattagatggatggcctgggagtgtatcctgatgggaaagtttaccactgcctctgatgtctgggcatttggggtgacgctgtgggaagttctaatgctttgtcgggcacagccattcggccaactgacagacgagcaggtcatcgaaaacgccggggaattcttcagggaccaggggagacaggtgtacctgagcagaccccctgcctgtccacaagggctctatgagctgatgttgcgctgctggagcagggaatcggaacagcgcccacccttctcccagctgcaccgctttctcgccgaggacgcgcttaacacagtatag

SEQ ID NO: 13097 - RNA, 1257 nt, synthetic construct
  misc_feature 1..1257: note = source = /note="Description of Artificial Sequence: Synthetic coding sequence"
  source 1..1257: mol_type = other RNA
atgcgtacattattcaatctgctgtggcttgcgctggcctgcagtcccgttcacaccactctgagtaagtctgacgccaagaaagccgctagcaagacactgttggagaaggtaaaattctgcagttgctgccctggatggtccgcgatggcccgttcctggctgactgctaccagcgcgacccaaagccagtttagcgacaagcccgtgcaagatagaggattggtcgtgactgaccttaaagccgagtcagtagttcttgagcacaggtcatactgctccgcaaaagcccgtgaccggcacttcgcaggcgatgtcctcggctatgtgacgccttggaatagccacgggtacgacgtgaccaaagtgtttggatccaagttcacacagatttcgccagtatggttgcagcttaaaagacgcgggagagagatgtttgaggttactggactacacgacgtagaccagggctggatgcgcgcagtccgcaagcacgctaaggggttgcacatcgtaccacgactcctctttgaggactggacttacgatgactttcgcaacgtcctggattccgaagacgaaatcgaagagttaagcaagacagtcgtgcaggtcgcaaaaaaccaacattttgatgggtttgtggtagaggtctggaaccaactgttatctcagaagcgcgttggcctgattcacatgttaacacatctggccgaggcattacaccaggctcgtttgctggcattactcgtgatccctccagcaattacccccggcaccgatcagctgggtatgttcactcataaagagtttgagcagttagcacccgtgcttgatggcttctcattaatgacatacgattattctacggcacaccaaccaggtccaaatgcgcccctgtcttgggttagagcgtgtgtccaagtgttggaccctaaaagcaagtggagatcaaaaatcctgctgggacttaacttctatggcatggactatgctacttctaaggacgcccgggaacccgtcgtgggtgctcggtacatccagactctaaaagaccataggcctaggatggtgtgggattcacaggcgtcagaacacttctttgagtataagaaaagccgcagcggcaggcatgttgtcttttacccaaccctgaagtccttgcaagtccgactggagctggctcgggaactcggagtaggagtgtccatctgggaacttgggcaaggcctcgactacttttacgaccttctgtag

SEQ ID NO: 13098 - RNA, 390 nt, synthetic construct
  misc_feature 1..390: note = source = /note="Description of Artificial Sequence: Synthetic coding sequence"
  source 1..390: mol_type = other RNA
atgcgcaaaccccgaagaaaatccaggcagaatgccgagggaagacgctcacctagcccctattctctcaaatgctctcctacgagagaaacactaacatacgctcaggcccaaaggattgtggaagtggacatcgatggccgcctgcataggataagtatttacgacccgttgaaaatcatcaccgaggacgagctcacagctcaggatatcactgaatgcaatagcaataaagagaattcagaacagcctcagttcccaggaaagtctaaaaagccttcctcaaaaggcaaaaagaaggaaagttgctcaaagcacgcctccggaacttcattccacctcccccagccctcattccgcatggttgattcaggcatacagccagagtag

SEQ ID NO: 13099 - RNA, 315 nt, synthetic construct
  misc_feature 1..315: note = source = /note="Description of Artificial Sequence: Synthetic coding sequence"
  source 1..315: mol_type = other RNA
atgcgagtagtgactatagtcatcctcctgtgcttttgcaaagcagcagaattaagaaaagctagccccggtagcgtgcgatctcgagtaaatcatggacgggccggtgggggaaggaggggatcaaatccagtgaaacgatatgctcccggactgccctgcgacgtttatacgtacctccacgagaagtacctcgattgccaggaacggaaactagtatatgtgttaccagggtggccccaggacctactgcacatgctccttgccagaaataagatcaggacactcaagaataatatgttcagcaagttctag

SEQ ID NO: 13100 - RNA, 639 nt, synthetic construct
  misc_feature 1..639: note = source = /note="Description of Artificial Sequence: Synthetic coding sequence"
  source 1..639: mol_type = other RNA
gattttggctattgcccccgggtctattgcgagaatcagcctatgctgcccataggcgtgctggtgatggtcggatttacagtgggcaaggtccccgtgcctgacatcagaacatgccacttctgcttagtggaagatccttcagttggttgtatttccggaagcgagaagtgtaccatcagttcctcaagcctctgtatggtgatcacgatctattatgacgtcaaagtccgcttcatagtccgagggtgcggccagtatatttcttatcgttgtcaagaaaaaagaaacacctattttgccgaatactggtaccaagcacaatgttgtcagtatgactactgcaattcgtggtctagtcctcagctgcagtcatcactccccgaaccccatgataggccccttgcccttccactgtccgactctcagattcagtggttctaccaggctttaaaccttagcctgccactgcctaactttcacgctggaactgagcccgatggcctcgatcctatggtcaccctgtcccttaacctcggtctctcctttgccgagctgcggcgaatgtatctttttctgaattcatcaggtcttttagtgctgcctcaagctgggctgttgactccacatccatcatag

SEQ ID NO: 13101 - RNA, 1005 nt, synthetic construct
  misc_feature 1..1005: note = source = /note="Description of Artificial Sequence: Synthetic coding sequence"
  source 1..1005: mol_type = other RNA
atgctcgctcttgccaaaattttactgatttctaccctgttttattccttgttgagtgggagtcatggaaaagaaaatcaagacatcaataccacccagaacatcgctgaagtcttcaaaactatggaaaacaagcctattagtttggaatctgaagcaaatttgaattctgataaggagaatataaccactagtaatctcaaagctagtcattcccctccacttaacttgcctaataactctcatggaatcacagattttagcagcaacagctccgcggagcactccctcgggagcctcaaacccacttctaccatttcaacctctccgccacttatccactcttttgtgagcaaggtcccatggaatgcgccaattgcagatgaagatctcttacccataagcgctcatcctaacgccactccagctctttcgagtgaaaactttacctggagcttagtgaatgatacagtcaaaacacccgacaatagcagcatcacagtctcaattctgagcagcgagcccaccagcccttccgtgactcctctcattgtcgaaccctctggctggctgaccaccaactccgactctttcactggcttcacaccgtaccaagagaagacaaccttacaacccacattgaaattcacaaataactctaaactttttcctaatacgtctgatcctcagaaggagaataggaataccggtatcgtatttggggccattcttggagcaatactcggtgtttcattgctcactttagtcggctatctgctgtgcggcaagagaaagacagactctttctcacacagaaggttatacgatgatcgcaatgagccagtgttgcggctggataacgcacctgaaccttatgatgtgtcctttggaaactcaagttattacaaccccacgctaaatgactccgcaatgcctgagagtgaagaaaacgcccgcgacggaatcccaatggatgatattcctcctctgcgtacaagtgtgtag

SEQ ID NO: 13102 - RNA, 987 nt, synthetic construct
  misc_feature 1..987: note = source = /note="Description of Artificial Sequence: Synthetic coding sequence"
  source 1..987: mol_type = other RNA
atggggcctgcgggctgcgcattcactctgctacttctcttgggcataagcgtgtgtggacagcccgtctattcttccagagtcgtaggcggacaggacgctgcggctggcaggtggccgtggcaagtgtcactgcacttcgatcacaattttatttgcggcgggtctctagtgtccgaaagacttattttgacggctgcacactgcatacagcccacatggaccactttctcgtacaccgtctggttgggctctattaccgttggagactcccgaaaacgcgtgaagtattacgtatccaagatcgttattcatcccaaatatcaggacacaactgctgatgtggctctgcttaaactgagctctcaggtcacgttcactagtgctatactgccgatttgtctcccttccgtcacaaagcagcttgcaattccccccttctgttgggttactgggtggggaaaagtgaaagaatcaagtgacagagactatcatagcgccctccaggaagcggaagtgccgataattgatcgacaggcttgtgaacagttatacaaccccatcggcatatttttaccagccctcgaaccagtaatcaaagaggacaaaatctgtgcaggggacacccagaacatgaaggattcctgtaagggagattctggcgggcctttgagctgccacattgacggagtgtggattcagacaggcgtggtgagctggggtcttgagtgtggcaagagtcttcccggggtctacacgaacgtgatctattaccagaaatggattaatgcgacaatttctagggccaacaatctggacttttccgacttcctgttccccatcgtgttactgagcctcgctctactcaggccctcatgtgcatttggccctaataccattcaccgggtcggtacagtcgcagaggctgtggcatgcattcaaggatgggaagaaaacgcatggcggttttctccccggggaagatag

SEQ ID NO: 13103 - RNA, 453 nt, synthetic construct
  misc_feature 1..453: note = source = /note="Description of Artificial Sequence: Synthetic coding sequence"
  source 1..453: mol_type = other RNA
atgcgctttatggccggccccgccgggtcccaaagcttaggtcccctctgttttcattctagtccccaggcactgtataccgtgctgctgattgtgctcgttatgatgtcactggtgttcggaaagtttgtgccagtcaattgggagcctccccagcctctgcccttcccaaaataccttcgctgttatcgctgtctgctggagacaaaagaacttggctgcctccttggcagcgacatttgcctgacccccgccggatcaagctgcattactctccacaagaagaattcctctggctccgatgtcatggtatcggattgtcgatctaaagaacaaatgtcagattgttcgaacacaaggacttctcctgtgagcgggttttggattttttctcaatattgctttctggatttttgcaatgacccgcaaaacaggggtctatatacaccctag

SEQ ID NO: 13104 - RNA, 234 nt, synthetic construct
  misc_feature 1..234: note = source = /note="Description of Artificial Sequence: Synthetic coding sequence"
  source 1..234: mol_type = other RNA
atgcgagtcgccggcgccgctaagctggttgtcgctgtggctgtcttccttctgacattttacgtgatttcacaagtatttgagattaagatggatgctagcttgggaaatttatttgctaggagtgcccttgacactgctgcccgttcaactaagccccctcgttacaagtgcggcatcagtaaagcctgtcccgaaaagcattttgccttcaagatggccagtggggcctag

SEQ ID NO: 13105 - RNA, 1143 nt, synthetic construct
  misc_feature 1..1143: note = source = /note="Description of Artificial Sequence: Synthetic coding sequence"
  source 1..1143: mol_type = other RNA
atggctctgacgccaggatggggatcctccgccggtccagtccgccccgagctgtggctgctactttgggccgccgcttggcgtctcggcgcaagtgcctgtccagctctttgcacatgtacagggactaccgtcgattgtcacgggacaggcctccaggcaatacctaaaaacattcctaggaacactgagagactggagctgaatggcaacaacattaccagaatccataaaaacgatttcgcagggcttaaacagctccgcgtcttacaactgatggagaaccaaatcggagcagtagaacgcggagctttcgacgatatgaaagaactcgaacggttagacctctccgagaatgcaatccaagcaatacccaggaaggcttttcgtggggcgaccgatctcaagaacttacagctagacaaaaatcaaatcagctgtattgaggaaggcgcctttcgagccttaagaggccttgaagtcctgacactgaacaataacaacatcacgacaatcccagtatctagcttcaatcacatgccaaagcttcgaaccttcagactccacagcaaccacctgttttgtgactgccatctcgcatggctttcgcagtggcttcgtcagaggcctactatcggactatttacccaatgttccggccccgcaagtctcaggggacttaatgtcgcagaagtacagaaatcagagtttagctgctcaggacagggcgaagcagggcgcgtccccacatgcaccctgtcctccggttcctgccctgctatgtgtacgtgctctaacggcattgtggactgtcgaggcaaaggactcacagctataccagctaacttacctgaaaccatgactgaaatcagactggaactcaatggaatcaagagcattccacctggcgcattctcaccgtataggaagctgaggcgcatagacctgtctaacaaccagatcgcagagattgcccccgatgcctttcagggcttaaggtcattaaactctttggtactttacggtaataagattaccgatctgcccaggggcgtgtttggcggactgtatactctgcagctcctactgcttaatgctaacaagattaactgtataagaccggatgccttccaagatctgtag

SEQ ID NO: 13106 - RNA, 558 nt, synthetic construct
  misc_feature 1..558: note = source = /note="Description of Artificial Sequence: Synthetic coding sequence"
  source 1..558: mol_type = other RNA
atgcccggctggttaacgctccccactttatgcagatttctgctttgggcgttcactattttccacaaggctcaaggagaccccgcaagccatccaggcccacactacttactgccacccatccatgaagttatacattctcatagaggtgcaaccgcgaccctgccttgtgtcctgggaaccactccgccatcttacaaggtgcgctggagtaaggtcgagccaggcgagctgagagagacactgattttaataaccaacggcctacatgcccgcggatatgggccattgggcggacgtgcacggatgcggcgggggcatcgtctagacgcatcattagtgatcgctggggtgaggctagaggacgaaggcagatacagatgtgagctgatcaatggcatagaagatgaatctgttgcgctcaccctttcacttgaaggtgtcgtctttccataccaaccctctcgcggaagataccagttcaattactatgaagcgaagcaggcatgcgaagaacaggatggacgtctcgccacctatagccaattgtaccagtag

SEQ ID NO: 13107 - RNA, 375 nt, synthetic construct
  misc_feature 1..375: note = source = /note="Description of Artificial Sequence: Synthetic coding sequence"
  source 1..375: mol_type = other RNA
atgcttatgctattcgtgtttggcgtactgctgcacgaagttagtttgagcggtcaaaacgaggccccaccaaatactcatagcatccccggagagccactctacaactacgcatccattcgtctccctgaagagcacatcccttttttcctgcataataaccggcatattgcgactgtctgccgtaaagactcgctttgtccctacaagaaacatcttgagaaactgaagtactgttggggatatgaaaagagttgcaaacctgaattccgttttggataccccgtgtgctcatacgtcgatatgggttggacagacacacttgagtcagccgaggatatattttggaagcaggcagatttcggctacgcctag

SEQ ID NO: 13108 - RNA, 5859 nt, synthetic construct
  misc_feature 1..5859: note = source = /note="Description of Artificial Sequence: Synthetic coding sequence"
  source 1..5859: mol_type = other RNA
atgccagctctggggcccgcactactgcaggcactctgggccggatgggtgctcactctccagccgctacccccaaccgcattcactccaaatgggacgtatcttcagcacctcgctagagatcccacaagcggaaccctgtacttgggcgcaacaaactttctgttccaactttcccccggattgcagctcgaagcaacagtgtcaacaggaccggtactggattctagagattgcttgcctcctgtgatgccggacgagtgtccccaggcccaacctacgaataatcccaaccagttactgctcgtgtctccaggcgccttagtagtatgtggaagcgtccaccaaggggtctgcgagcaaagaagactggggcagctggagcagctcctgctgcgccctgagcgccctggtgacactcagtacgttgcagcgaatgaccctgctgtgtcaacagtcggcctggtcgcccagggacttgcgggcgaaccactgctgttcgtgggtcgcggttacacatccaggggagttggagggggtattcctccaatcaccacgagagcactctggccgccagacccacaagccgccttctcctatgaagagacagctaagctggcggtgggcagactctctgagtatagccaccactttgtgtcggcattcgcccgaggtgcttccgcatatttccttttcctgcgccgcgacctgcaagcccaatccagagccttccgagcctatgtgtctagggtgtgcctccgcgatcagcactactacagctacgtcgaactaccactggcctgtgagggaggacgttacggcctgattcaggccgctgccgtcgctacttctcgcgaagtggcccacggggaagtcctgttcgccgcttttagctcagccgctccacccactgtcggtcggcctccctcggcagctgccggagctagcggggctagcgcactgtgcgcttttccattagacgaagttgatcgcctcgcaaatcgtacacgggacgcatgctacactagagagggccgggccgaggacggtaccgaagtggcatacatcgagtacgacgtgaacagtgactgtgcccagctaccagtagacactcttgatgcttatccttgtggatccgaccacacaccatcccccatggccagtagagtgcccctggaagccaccccaatcttagagtggcctgggatccagctgacagcagtcgccgtgacaatggaagatggtcacacaatcgcttttttgggagactctcagggccagcttcacagagtgtatctggggcctggttcggatgggcatccatatagtacccagtcaattcagcaggggtcagctgtgagtcgcgatctcacttttgacgggaccttcgagcacctttacgtgatgacacagtccactttgttaaaagtccctgtggccagttgtgctcagcacttagactgtgcctcttgtctcgcccatcgggacccttattgcggctggtgcgttctgctcggaaggtgcagcaggcgcagcgagtgctctcgaggccagggtcctgaacagtggctgtggtcctttcagcctgaactgggatgcctccaggtggccgccatgtctcctgcgaatatctcacgggaggaaacacgcgaagtgtttctcagcgtgccggaccttcccccactgtggcctggcgaaagttactcttgtcactttggcgagcatcaaagccccgctcttctgactggaagtggtgttatgtgtccctctcccgatccaagtgaagcccctgtattgccccgcggcgccgattacgtaagtgtgagtgttgagctcaggtttggggcagtcgtcatcgcaaaaacaagcctgagtttctacgattgcgtcgcagtgaccgagctgagaccgagcgcccagtgccaggcttgcgtgagctctagatggggctgtaattggtgtgtgtggcagcacctctgtacacataaggctagttgcgatgcaggccccatggttgcatctcatcaaagcccattggtctctccagatcccccagcaaggggggatggagactccgccgagctggagggacctcccgcgccactcatcctgcccagtagcctggactaccagtacgatactccaggcctatgggaattggaggaggctacactgggcgcatcctcatgcccctgcgtggaatcggtgcagggatccactttgatgcccgtccacgtggagagagagattagacttttggggagaaatttgcatctcttccaggatggcccaggagataacgagtgcgtgatggagctcgaaggactcgaggtggtagtcgaagcaagggtagagtgcgaacctcccccagatacacaatgtcatgtcacgtgccagcagcatcaactctcatatgaagcgctccaaccggagctcagggtggggctgtttttgagacgggcgggtcgtctgcgagttgattccgccgaaggactccacgttgtcctctatgattgctctgtgggccacggagattgctctagatgtcaaacagccatgccacagtacgggtgtgtatggtgcgagggtgagagacctcgatgcgtaacacgagaggcatgtggggaagcggaggcagtggccacacagtgcccagccccactaattcacagcgttgaacccctgacagggcccgtggacggtggaactagggttactattagggggagtaaccttggtcaacatgtgcaggatgtgctgggcatggtgaccgttgctggtgttccctgtgcagtcgacgcccaggaatacgaagtgtcatccagtcttgtctgtatcacgggtgcctcaggcgaagaggtcgctggcgcaaccgcggtggaggtgcctggacgggggcggggcgtgagtgagcatgatttcgcctaccaggatcccaaagtccacagtatttttccagccagagggccacgagcaggtgggaccagactgactctgaacgggagtaagctccttacaggtcggctcgaagatattagagtagtggtaggggatcagccatgtcacctgctgcccgagcagcagtcagaacagctgcgatgcgagaccagcccccgccccacacccgcaaccctgccagtggccgtgtggtttggagctacagagagaaggctccagcgcggacagttcaaatatacgctagacccgaacatcacctctgctggtcccaccaagtccttcctgtctggcggccgggagatttgcgtgcgcgggcagaacttagatgtggttcaaacgcccaggatccgggtgactgtcgtctcaaggatgctgcaaccatcacagggtttgggaagacgacgtcgagttgttccagaaacagcatgcagtttgggcccttcttgcagctctcaacaatttgaagagccctgccacgtaaattccagtcagctgataacatgtcggacaccagctctgcctggacttcccgaagacccatgggtgcgtgtggagttcatactggataatctggtatttgacttcgcaacattgaaccccacccccttctcttacgaagccgaccccaccctgcagcccttaaaccctgaggatcccacaatgcccttcagacacaagcctgggagcgtcttttcagttgaaggggagaacttagatttggccatgagcaaggaagaagtggtggcaatgatcggcgatggaccctgcgtcgtgaagacccttacgaggcatcacctctattgcgaaccccctgtcgaacagcccctgccaaggcaccacgcccttcgtgaggcacccgatagtttgcccgagttcactgttcagatgggaaacctccgtttttctttgggccacgtccagtatgatggagaatctccaggagccttcccagtggcagctcaggtgggcctgggtgtagggactagtcttctggcccttggtgtgataattatagtactgatgtaccgaaggaaatcaaaacaggctctgcgcgactacaagaaagtacaaattcagctggagaatctagaaagcagcgtgcgcgaccggtgtaaaaaggagtttacagacttgatgactgagatgaccgatctgacctccgaccttctcgggtcaggaattcccttcttggattataaagtttatgctgagcgcatcttctttccaggccatcgggagtcccctctgcacagggacttgggtgtacctgaaagcaggcgccctactgtggaacagggcctgggacaactttctaaccttctaaatagcaaactgtttctaactaaattcatccacactctggagagccaacgtaccttctctgccagggatcgcgcatacgtagcctctttactgacagtcgccctgcatggaaagctggaatacttcaccgatattctgaggacgctcctgagcgatctagtcgctcagtacgtggccaagaaccccaagctgatgctgagaagaaccgagaccgtggtggaaaaattgctgactaattggatgtccatctgtctctacacgtttgtcagagactctgtgggcgagcctctatacatgttatttagaggcatcaagcatcaggtggataagggcccagtcgattccgtgacagggaaagctaaatatacactgaacgataatcgcctactacgagaggacgtggagtataggcctctcactcttaacgcccttctggctgtaggacccggagccggcgaggcgcaaggagtcccagttaaagtactcgattgtgacaccatcagtcaggcgaaggagaaaatgcttgaccagctgtataaaggggttcccctgacgcagagaccagatcctcggacactggatgtggagtggcgatctggcgtcgccggccacttgatattgagtgatgaagatgtcacaagtgaagtgcaaggcctgtggcgaagactgaacacgctgcagcactataaggtaccggacggcgcaactgtggcgttggtcccgtgtcttactaagcatgtgcttcgtgaaaatcaggattatgttccaggcgagagaacccccatgctggaagacgtggatgaagggggtatccggccctggcacttggttaaaccgagcgatgaacccgaacccccacgaccacgccggggctccctccgcggaggtgagcgagagagagctaaagctatcccagagatctatttaacccgcttgctttccatgaaaggcacactccagaagttcgttgatgatctatttcaggtgattctctccaccagtcgtcctgtcccacttgccgtcaaatacttctttgatctactggacgagcaggcccagcagcacgggattagtgaccaggacacaattcatatttggaagactaatagcctccccctcaggttctggatcaacatcattaagaatccccagtttgtgttcgatgtgcagacctcagacaatatggatgccgtgctccttgtgatcgcccagacctttatggatgcctgtactttagccgaccataaactggggagggattcaccgataaacaagcttctctatgctcgcgacatccctcgttataagcgaatggtcgaaaggtactatgccgacatcaggcagaccgtgccagcctctgatcaagaaatgaacagtgtccttgctgaactgtcatggaactattccggagacctgggagcaagagtagccctccatgaactctacaagtacatcaataagtattatgatcagattattacagccctcgaggaagatgggactgctcagaagatgcaacttggctacaggctacagcagatcgcggctgccgttgaaaataaagtcaccgatctctag

SEQ ID NO: 13109 - RNA, 612 nt, synthetic construct
  misc_feature 1..612: note = source = /note="Description of Artificial Sequence: Synthetic coding sequence"
  source 1..612: mol_type = other RNA
atgcgcaccgtggtgttaacaatgaaggccagcgtgatcgaaatgtttttagtgctattagtaactggcgtccacagcaataaagaaacagcaaaaaaaatcaagaggcccaagttcaccgtcccccaaattaactgtgatgtcaaggccgggaagataattgaccccgagttcatagtaaagtgtcctgctggatgtcaagatcctaagtatcacgtgtatggaaccgacgtctacgcaagctattcttcggtatgtggagctgccgttcactctggggtcttggataattccggtgggaagatcctcgtacgcaaggttgctggacagagcggatataaagggagttatagcaacggcgtgcagtctctttcgttgcccaggtggcgtgaaagtttcatcgtgctcgagagtaagccgaagaaaggggtcacctaccctagcgctctcacctacagttcatcaaagtccccagcggctcaagccggcaaatgttcccgcgttatcgaatctaaaccttctgagagtatgaatacgcggcgcgtactcggcgatagcggggaaataaatattctgacaggtcaggctccactggctctggcaattttttag

SEQ ID NO: 13110 - RNA, 2511 nt, synthetic construct
  misc_feature 1..2511: note = source = /note="Description of Artificial Sequence: Synthetic coding sequence"
  source 1..2511: mol_type = other RNA
atggaaactcaagaactccgcggtgctttggctttactgttgctgtgcttcttcacatctgccagtcaggaccttcaagtgatagacttacttactgttggtgaatcaaggcagatggtggcagtcgctgaaaaaattaggacagcactgctaactgccggggatatctacctgctttccacctttagattgccccccaaacagggcggagtgctgttcggcttatatagtcgtcaggataatacacgttggttggaagcctcagtcgtcgggaaaattaataaagtgacaaacgccctgcactcaatcttgggcgagcagactaaggcgttggtgacccagcttacactctttaaccagatcctggtcgaactgagagatgatatccgtgaccaggtcaaggagatgtctctgatcaggaataccatcatggagtgccaggtgtgcggtttccatgaacagaggagccattgctctccgaacccgtgcttccgcggagtcgactgcatggaagtatatgagtacccagggtacagatgtggcccttgcccccccggcctgcaggggaacggaactcactgttcagatatcaatgagtgtgctcacgcggatccctgctttccgggcagcagctgcataaatacaatgccgggattccactgcgaagcatgtcccagggggtacaagggaacacaagtgagcggggttggcattgactacgcccgggcgagtaaacaggtgtgcaatgatatcgatgagtgtaacgacgggaacaatggcggctgtgatccaaactccatttgcacgaataccgttggctctttcaagtgcggaccctgcaggttgggctttctgggcaaccagagccagggatgtcttccggcgcgcacctgtcattcgccagcacattctccttgtcacatccacgcgcactgcttgtttgaaaggaatggcgcagtctcttgccagtgcaacgttggctgggccggcaatggcaacgtatgcggcacagatactgatatagacggatacccagaccaggcactcccttgcatggacaataacaaacattgtaagcaggacaattgccttttaacccccaactccggacaggaagatgctgataatgacggcgtcggagatcagtgtgacgacgatgctgacggtgatggcatcaaaaatgttgaggacaactgtcgacttttcccgaataaggatcaacagaactcagacaccgactcctttggagacgcctgtgataactgtcctaacgttccaaacaatgatcaaaaggacactgacggtaacggcgaaggcgacgcctgcgataatgacgtcgacggcgacgggatcccaaacggcctcgacaattgtcctaaggttcctaatccattgcagaccgatagggatgaagacggcgtgggggacgcctgtgacagttgtccggaaatgtctaaccctacccaaacagatgccgacagcgatttggtcggtgatgtatgcgacacaaatgaggactctgacggtgatgggcaccaggataccaaggacaattgcccacagttaccgaactcgagccaactagattcagataacgatggccttggcgacgaatgcgatggggatgatgataacgacggaatcccggactacgttccacccggtcctgacaactgtaggctggtccctaacccaaaccagaaggacagtgatggcaatggcgtaggggacgtgtgcgaagatgacttcgacaacgatgcagtggttgaccctctggacgtctgtcctgagagcgcggaggtgactctcaccgactttcgcgcctatcagaccgtggtgcttgaccctgagggggacgctcagatcgatcccaattgggttgtcctgaaccaaggcatggagattgtgcagacaatgaacagcgacccgggacttgccgtcgggtacactgcattcaatggcgtcgactttgagggcaccttccacgtgaacaccgtgacagacgatgattatgccggcttcctgttcagctaccaggacagcggcagattttatgtggtaatgtggaagcagacagagcagacttactggcaggccactccctttcgcgcagttgcacagcctggtttgcagctgaaagccgttacgtccgtgagtggccccggagagcatttaaggaacgcattgtggcataccggccacacacccgatcaggtgagattgttgtggacagacccgagaaacgtgggctggcgcgataaaacctcatacagatggcagctgctccatagaccccaggtagggtacatcagagtgaaattatacgaaggtcctcaacttgtcgcagacagcggagtgattatcgacacaagcatgagaggaggacgactcggggtgttctgcttttcccaggaaaacattatatggtctaacctgcagtataggtgtaacgacacggttccagaggacttcgaaccattccggcgacagctcctgcaaggacgcgtttag

SEQ ID NO: 13111 - RNA, 1311 nt, synthetic construct
  misc_feature 1..1311: note = source = /note="Description of Artificial Sequence: Synthetic coding sequence"
  source 1..1311: mol_type = other RNA
atgtggagatgccctctggggctgctgctgctgctgcccttggcaggtcacctggccctgggcgcccagcaggggagaggaagaagagagctggcccccggccttcacctgcggggaatccgagacgccggaggccgttattgtcaggagcaggatctgtgctgtagagggcgggctgatgattgcgcacttccatacctgggggccatctgctactgtgacttgttttgtaatagaacagtgagtgattgttgtcccgacttttgggacttttgtctgggcgttccccccccttttccacccattcagggttgcatgcacggaggaagaatctaccctgtactcggaacgtactgggataattgcaatcggtgctggcaagccggcaaccattcggccttctggggcatgactctcgacgaaggtattaggtacagactggggactataagaccgagcagcagtgtgatgaacatgcatgagatatataccgtcctgaaccctggagaagtgctgcccaccgcgtttgaggcgtcggaaaaatggcccaacctgatccacgagccgttggaccaaggcaactgcgccggttcctgggctttctccacagccgctgtggcttccgacagggtctcaatccatagcctcggacatatgacacctgtgttgtcaccccagaaccttctgagttgcgatactcaccagcagcagggatgccgggggggtagattagatggcgcttggtggttcctacggcgaaggggagtggtgagtgaccattgttacccattttcaggcagggagcgagatgaagctgggccagcccccccctgtatgatgcatagtcgagccatgggccgtggaaagagacaggccacggcgcattgccccaattcatatgtcaataacaacgacatctaccaggtaacccccgtgtacagacttgggtctaatgacaaagaaatcatgaaggaactcatggagaatggtccggtgcaggctctgatggaagtgcatgaagatttttttctgtataaaggagggatatactcacacacacctgttagcctgggcaggccagaacgttaccgcagacacggtactcatagtgtaaagatcacaggatggggggaagagaccctgcctgacgggagaactctgaagtactggactgccgcaaattcttggggcccagcttggggagagagagggcactttaggattgtccggggcgtcaatgagtgtgacattgagtcttttgtgttgggcgtgtggggccgagtaggaatggaagacatgggacaccattag

SEQ ID NO: 13112 - RNA, 942 nt, synthetic construct
  misc_feature 1..942: note = source = /note="Description of Artificial Sequence: Synthetic coding sequence"
  source 1..942: mol_type = other RNA
atgtctgatctgttactgctgggacttattgggggcctgactctcctgctgctgctgacattattggcatttgcaggctattctgggcttctcgctggggtagaagtgtctgctggtagcccgccgattaggaacgtgaccgttgcatacaaatttcacatgggtctttatggtgagacaggacggctctttacggaatcttgcagtattagtccaaaactccgctctatcgctgtctattatgataatccccacatggttccccccgataaatgcaggtgcgccgtgggaagtatcctgagtgaaggtgaagaatccccgtccccagagctgatcgacttatatcaaaagttcggcttcaaggtgttttcttttcctgctccgagccacgtggttaccgccaccttcccttacacaacaattctctcaatctggttggcaactcgccgagtccacccggcgctcgacacgtatataaaggaacgcaagctttgtgcctacccgaggttggaaatctaccaggaggaccagattcactttatgtgtcctttggctagacaaggagacttttacgtgcccgagatgaaggagacggagtggaagtggcggggattggtagaggcaatagatacacaggttgacgggaccggagccgacactatgtccgacaccagcagcgtcagtctagaggtcagcccaggcagcagggagacgtcagcagcaactttgagccccggggcatcatcaagagggtgggacgatggagacacacgaagtgaacatagctacagcgagtccggcgccagtggtagttccttcgaggagctggacttagaaggtgaggggcccctgggggaaagccggctcgacccaggcacagagcctctcggcacaactaagtggctttgggagcctactgccccagagaagggtaaggaatag

SEQ ID NO: 13113 - RNA, 213 nt, synthetic construct
  misc_feature 1..213: note = source = /note="Description of Artificial Sequence: Synthetic coding sequence"
  source 1..213: mol_type = other RNA
atggtggcaccagccgcacgagtctttctgcgagcggtgagagctgcactgacctccacagttcctgacctgctgtgcttattggctcgcggatcccctcgaggactggcttccggccggctgcccctcgccgtgcatagcgcccagcatgggccaggtagtggggccccttggttacgcatcgctagacgtgccctttcccaacgcatctag

SEQ ID NO: 13114 - RNA, 642 nt, synthetic construct
  misc_feature 1..642: note = source = /note="Description of Artificial Sequence: Synthetic coding sequence"
  source 1..642: mol_type = other RNA
atggctcagctgttcttgccactacttgccgctcttgtgcttgctcaggcccctgccgccctagccgatgtcttagaaggggacagttcggaggacagggcttttcgagttagaatcgcgggagatgccccgcttcagggcgttctgggtggtgctctcaccattccatgtcatgtgcattacttgcgaccccccccatcccgacgagcagtgctcggctcaccccgggtcaaatggaccttcctgtctcgcggcagagaggccgaggtgttggtggcccgtggagtgagagtcaaagttaacgaagcgtatcggtttagggtggccttgccagcttacccagcatcactcaccgacgttagtctcgccctcagtgagctcaggcctaacgatagtggtatttatcgatgtgaggtgcaacacgggatcgatgattcttcagacgcagtagaggtcaaggttaagggggttgtttttctgtaccgcgagggctctgcacgctacgccttctcattctcaggcgctcaggaagcatgcgcacgcatcggagctcacatcgccactcccgaacaactctatgccgcctacctgggcggttacgaacagtgtgacgccggatggttaagcgaccagacagtatag

SEQ ID NO: 13115 - RNA, 237 nt, synthetic construct
  misc_feature 1..237: note = source = /note="Description of Artificial Sequence: Synthetic coding sequence"
  source 1..237: mol_type = other RNA
atgggaagcggcctcccccttgtgcttttgcttaccttacttggtagcagtcatggcactggtccgggtatgaccttacagttaaaattaaaagagtccttcttgactaacagcagttacgaatcttcttttttggaactgcttgagaaactatgtctcctcctgcatctgccctctggtacatctgtaaccctacatcacgctagatcacaacaccacgtcgtgtgcaacacctag

SEQ ID NO: 13116 - RNA, 651 nt, synthetic construct
  misc_feature 1..651: note = source = /note="Description of Artificial Sequence: Synthetic coding sequence"
  source 1..651: mol_type = other RNA
atgtccgatctgctccttttgggtctcatcgggggtctgacccttttattgctcctgaccttgctggccttcgcaggatattcaggcctgctcgctggagtagaagtatctgccggctctccaccaatccgcaatgttactgtcgcgtacaagttccacatgggcctgtatggggaaactgggagactgttcactgagtcatgctctataagcccaaaactgagatcaatagctgtatactatgataacccccacatggtgcctccagataaatgtaggtgtgccgtaggttcaattctgtctgaaggcgaagaatccccatctcctgaacttatcgatctgtaccagaagttcggctttaaagtcttctccttccctgcacccagtcatgtagttaccgcaaccttcccctatacaacaatcctgtcgatatggcttgccacacgccgcgttcacccggccctcgacacatatattaaagagaggaagctctgtgcgtatccacggttagagatttaccaggaggaccagatccattttatgtgtcccttagcccgacaaggggacttctatgttccagagatgaaagaaactgaatggaaatggcgcggcctagtggaagctatcgatacacaggtggatggtacatag

SEQ ID NO: 13117 - RNA, 453 nt, synthetic construct
  misc_feature 1..453: note = source = /note="Description of Artificial Sequence: Synthetic coding sequence"
  source 1..453: mol_type = other RNA
atgagatttatggccgggccagccggatcccaatcactggggcctctctgctttcattcctccccacaggctttatatactgtgctgctcatcgtgctggtgatgatgtctttagtgttcggaaagttcgtccccgttaactgggaacccccacagcccttgccctttcctaaatatttgaggtgttaccggtgtttacttgagactaaggaattagggtgcctgctagggagtgacatttgcttgacccccgctggttcttcatgtatcaccttacacaaaaagaactcttccgggtcggatgtgatggttagtgactgccgaagcaaggaacagatgtcagactgctctaatacacgaacttctccagtttccggcttctggatttttagccaatactgcttcctcgatttctgcaatgatccacagaaccgtggactgtacacaccctag

SEQ ID NO: 13118 - RNA, 171 nt, synthetic construct
  misc_feature 1..171: note = source = /note="Description of Artificial Sequence: Synthetic coding sequence"
  source 1..171: mol_type = other RNA
atgaagaccggccttttttttctgtgcctcctcgggacagccgctgccattccaacaaatgcacgcctcctaagcgatcattctaagcctactgccgaaacagtcgcccccgataacaccgctattccatctctacgggccgaagccgaagaaaacgagaaagagacttag

SEQ ID NO: 13119 - RNA, 2346 nt, synthetic construct
  misc_feature 1..2346: note = source = /note="Description of Artificial Sequence: Synthetic coding sequence"
  source 1..2346: mol_type = other RNA
atggcagtggcagaagtctcaagaacctgcttgcttacagtgcgggtgttacaagcacaccgtctcccttcaaaagatttggtgacaccatctgattgctatgttacactgtggttacctacagcatgctctcacaggcttcaaacgcgcaccgtcaaaaacagttcaagtcctgtctggaaccaaagctttcactttagaatccaccggcagctcaagaacgtcatggagctgaaggtcttcgaccaggatctcgtaacgggcgatgacccagtactgagtgtgttgttcgatgcagggacccttcgtgcaggcgaatttcgcagagagagcttctcgctgtcaccgcaaggcgaggggaggctggaagtggagttcaggctgcagtcactggccgacagaggggaatggctggtaagcaacggtgttttagtcgctagagagctctcatgtttgcacgtgcaactggaggaaacaggggatcaaaaaagtagtgaacatagagtccagttggtggtccctggcagctgcgagggcccccaggaagcatctgtgggcaccggaacttttcgcttccattgcccagcctgttgggagcaggaactgtctatcagactgcaggacgcacccgaggaacagttgaaagctccactctccgctctccctagtggccaggtggtcagattagtcttccccacctcgcaggaacccctgatgagggtcgagcttaagaaagaagcgggattgcgcgaattggcggtccgcttggggtttggcccttgcgcagaggaacaggccttcctctctaggcgaaagcaagtggtagccgctgccctgaggcaggccctacaactggatggggacctgcaggaagacgaaatcccagtggtggctatcatggcaaccggaggagggattcgcgccatgacgtctctctacggacagttggccggacttaaggaactgggactgctcgactgtgtatcttacattacaggcgcttcaggttccacatgggcactagcaaacctctatgaagatcccgaatggtcccaaaaagacctggctgggcccactgagttgttgaaaacacaggtcacaaagaataagctaggagtgctcgccccgtcccaattgcagcggtacaggcaggagttggctgaaagggcacggctgggatatccctcatgttttactaatctatgggccttgatcaacgaggcacttctgcacgatgagccccacgatcataagctgtccgaccagcgagaggccctgtcccacggccagaaccctctgccaatttactgcgccctcaatacaaaagggcagagcctgaccacattcgaatttggtgagtggtgtgagtttagcccctacgaagttggctttcccaagtacggagcattcatcccctctgagttgttcggtagcgaattcttcatgggccaattgatgaagcgattgcccgagtctagaatctgtttcttggaaggtatatggagtaacctgtacgctgctaacttacaggacagcctttattgggcatccgagcctagccagttctgggataggtgggttagaaatcaagcaaatttagacaaggagcaagtacctctcctgaagatagaggagcccccatccaccgcaggccggatcgcagagttctttaccgaccttttgacctggcgccctctggcgcaggctacacataattttttacgcggattgcacttccataaagactattttcagcacccacacttttcgacttggaaggcaaccacattggacggcttgccaaatcagctcacaccttctgagcctcatttatgtctgctagacgtgggctatcttatcaatacctcctgtttacctctgctccaaccgacgcgtgacgtcgacctgatactctccctcgactacaacctacatggcgcgttccagcagctccagctgctgggccgattttgtcaggaacaggggatacccttccctcctatttccccatcacccgaagagcagctccaaccccgggagtgccacaccttctcggatccgacttgtccgggggcacccgccgtgctccattttccactagtgagcgactctttcagggagtactccgcccctggagtacgtcgtactccagaagaagctgcagccggagaagtcaatttatcttcaagcgattctccgtatcattacaccaaagtgacttattctcaagaagacgtcgacaaattgctacacctgactcactacaacgtctgcaacaatcaggagcagctgctggaggccctgcggcaggcggtccagagacgcagacaacggaggccacactag

SEQ ID NO: 13120 - RNA, 219 nt, synthetic construct
  misc_feature 1..219: note = source = /note="Description of Artificial Sequence: Synthetic coding sequence"
  source 1..219: mol_type = other RNA
atggccgctgctacgagagggtgtagaccatggggcagcctcctcgggctcctcggattagtgagtgccgccgccgctgcttgggatttggctagtctgcgctgtaccctgggcgccttctgcgagtgcgactttcgacctgatttgcctgagggatccgaagagcttgggcctcgggaaccgcactgcctttggcccctgccactccctctgcgttag

SEQ ID NO: 13121 - RNA, 243 nt, synthetic construct
  misc_feature 1..243: note = source = /note="Description of Artificial Sequence: Synthetic coding sequence"
  source 1..243: mol_type = other RNA
atgaaagtgttttttctgttcgctgtcttattctgtctggtacagaccaatagtggcgatgttccccccggcattagaaatacgatctgtcacatgcaacaaggcatctgtcgcctgttcttttgtcacagtggagaaaaaaaacgagacatctgcagcgacccctggaatagatgttgcgtgtctaacaccgatgaagagggaaaggagaagccagaaatggacgggcgcagtggtatctag

SEQ ID NO: 13122 - RNA, 861 nt, synthetic construct
  misc_feature 1..861: note = source = /note="Description of Artificial Sequence: Synthetic coding sequence"
  source 1..861: mol_type = other RNA
atggggcccgaagcactgtcttcgctactgctgctgttgctggtggcatccggcgatgcagatatgaaggggcactttgaccctgctaagtgtcgttacgccttgggaatgcaggataggacaatcccagatagtgacatctccgcttccagcagttggtcagattccactgcagcacgacatagccgcttagagagcagtgacggggatggggcatggtgtcctgcaggatcggtgttccccaaggaggaggagtacctgcaggtggacctgcagcggcttcacctcgtagccctggtggggacacaggggagacacgctggaggactaggaaaggagttttcgcggtcttatcgcttgcgatattctcgggatgggcggcgctggatgggatggaaagatcgatgggggcaagaggtgatcagcggaaatgaggatccagaaggcgttgtactcaaggacctgggaccccctatggtggcaagactggtcagattctatcctcgcgctgaccgcgttatgagcgtttgcctcagagtggagttgtacgggtgcctttggagggatggactattaagttatactgcccctgtgggacaaaccatgtatctttctgaggccgtttatcttaacgactcaacatatgatgggcacacggtaggtgggctgcagtatggcgggctcggacagttggcagacggggtggtgggcttagatgattttcgtaaaagtcaggaactgagggtttggcctggctacgactatgtgggttggtctaaccacagcttttcctccggctatgttgagatggagtttgaatttgatagactgcgggcattccaagcaatgcaggtgcactag

SEQ ID NO: 13123 - RNA, 858 nt, synthetic construct
  misc_feature 1..858: note = source = /note="Description of Artificial Sequence: Synthetic coding sequence"
  source 1..858: mol_type = other RNA
atgcggggccaaggacgaaaggaatccctgagtgattcaagggacttggatgggtcttatgaccagctcaccggccatccgcccgggccgacaaagaaggctctgaaacaaagattcctcaaactccttccttgctgtggaccacaggccctccccagtgttagtgagattggtagggtttttaggttccttggcgactcatctctcccatctgctttagccgcaccagcatcgctccggcctcacagacctcggttgctggacccagacagcgtggacgacgaattcgaactgagcacagtctgtcacagaccagaaggcttggaacagctacaagagcagacaaagtttaccagaaaggaactacaggtgttatacagggggtttaagaacgaatgccccagcggaatagtgaatgaagaaaattttaagcaaatctactcccagttctttccgcagggcgactcttccacgtacgctacattcctcttcaatgcatttgacacaaaccacgacggatccgtctcgttcgaagactttgtggcaggcctgtctgtgatactgagaggcactgtagacgatagactcaactgggccttcaatctgtatgatctcaataaggatggctgtatcacaaaggaggagatgttggacattatgaagagcatatacgatatgatgggaaaatacacataccctgccctccgagaggaggccccacgggagcacgtcgaatcttttttccaaaaaatggatcgtaacaaggacggcgttgtcaccatcgaggaatttatcgagtcatgtcaaaaagatgagaatataatgaggtctatgcagttgttcgataacgtcatctag

SEQ ID NO: 13124 - RNA, 1311 nt, synthetic construct
  misc_feature 1..1311: note = source = /note="Description of Artificial Sequence: Synthetic coding sequence"
  source 1..1311: mol_type = other RNA
atgcagggtactccagggggaggtacacgccccggccccagcccagtggacagaaggaccctgctggtgttttctttcatactagcggccgcccttggacagatgaatttcacgggggatcaggttttacgtgtactggcaaaggatgaaaaacagctgtcgctcctgggggacctggagggtctgaaaccgcagaaagtagatttttggaggggccccgccagaccgtctctacctgtagacatgcgggtccctttctctgagttgaaagatatcaaggcctaccttgagagccacggcctcgcctacagtataatgatcaaagacattcaggttttactggatgaagaacgacaggctatggcgaagagcaggcgcctggagcggagcacaaactcatttagctatagtagctatcacaccctcgaagagatttacagctggattgataacttcgttatggaacactccgatatcgttagcaaaatccagatcggcaacagcttcgaaaaccagagcatcctagtgctcaagtttagcaccggcggctcacgacatcccgctatttggatagataccgggattcactcacgggagtggatcacccacgctacgggcatttggacagccaataagattgtatctgattacggtaaagaccgcgtactgactgacattcttaacgcaatggacattttcatcgaactggtgactaaccccgacggattcgcctttacccactcaatgaatcgtctctggcgcaaaaacaagagcatacgccctggcattttttgtatcggcgttgatctcaacaggaattggaagtctggcttcggtggcaacggctcaaactctaatccttgttcagagacatatcacggaccttcccctcaatcagaaccagaggtcgccgcaatcgttaatttcattaccgcccacgggaatttcaaagctctgatctccatccatagctactcacagatgcttatgtatccgtacggcaggctcttggaacctgtgagcaatcagcgtgaattgtacgatctggccaaagacgctgtggaggccctttacaaggtacatggtattgaatacattttcggttccatttccactactctgtacgtcgcgagcgggatcacagtggactgggcctatgactctggcatcaaatatgcctttagcttcgaactgagggacacagggcagtacggatttcttctccctgctacgcagatcatccccacggcgcaagagacctggatggcactacggacaatcatggaacacacactcaaccatccttattag

SEQ ID NO: 13125 - RNA, 1218 nt, synthetic construct
  misc_feature 1..1218: note = source = /note="Description of Artificial Sequence: Synthetic coding sequence"
  source 1..1218: mol_type = other RNA
atggacacgatttttctgtggtcacttctactgttgtttttcggaagccaagcatcacgttgtagcgctcagaagaatactgaattcgccgtggatctttatcaggaggtgagcctgtctcataaagacaacatcatcttctccccactggggattacactggtgctggagatggtgcaactgggagccaagggaaaagcacagcaacagattagacaaactttaaagcaacaggaaaccagcgccggagaggaattcttcgtactcaagtccttttttagtgccatcagcgagaagaagcaggaattcacttttaatctggctaacgccctatatctgcaggaggggttcactgtgaaagagcagtacctacacggtaataaggagttcttccagagcgcaatcaagctcgtggattttcaagacgctaaggcctgtgcggagatgatctctacttgggttgagaggaagacagacggcaagatcaaggatatgttctcaggggaggaattcggccctctgacccgattagtcctcgttaacgcaatttactttaagggtgattggaaacagaaattccgcaaagaagacacccagctgataaattttacaaagaaaaacggctctaccgtgaagatccctatgatgaaagctttactaagaaccaagtatgggtatttctctgagtcatccttgaactaccaggtcctggagctttcctataaaggcgatgagttcagccttattatcatactgccagctgaaggtatggatattgaggaggtagagaagctgataactgcccaacagattttgaaatggctcagtgagatgcaggaggaagaagtcgagataagcctgcctagatttaaagtcgagcaaaaggtggacttcaaagatgtattgtacagtttgaatatcaccgaaatattctcaggaggatgtgatctcagcggcatcaccgatagttcagaagtgtatgtatcccaggtcacgcagaaggtgttctttgaaataaacgaagacgggtctgaggccgcaacctctactggcatccacatccccgtaatcatgtcactggcacaatctcagttcatcgctaatcatccttttctgttcataatgaagcacaacccaaccgaatccatcctttttatggggagagtcacaaaccccgacactcaggagattaagggcagagatttagactccctgtag

SEQ ID NO: 13126 - RNA, 300 nt, synthetic construct
  misc_feature 1..300: note = source = /note="Description of Artificial Sequence: Synthetic coding sequence"
  source 1..300: mol_type = other RNA
atgctcgcactgctagtgttggttacggtagcgctggcctctgcacaccacggcggagaacactttgagggggaaaaagtctttagagtgaacgtagaggatgaaaatcacattaatataattagagaactcgcttcaactacacagattgacttttggaagcccgattccgtcacgcagattaagccacacagcaccgttgattttagagtaaaggccgaagacacagtgaccgtagaaaatgtcctaaaacagaatgagctgcagtataaggtgttgatttccaatctgagaaactag

SEQ ID NO: 13127 - RNA, 471 nt, synthetic construct
  misc_feature 1..471: note = source = /note="Description of Artificial Sequence: Synthetic coding sequence"
  source 1..471: mol_type = other RNA
atgttattgttattacttctagcccctctgttcttacgccctcctggagctggcggagcccagaccccaaatgctacatctgaaggatgtcaaattatccatcctccttgggaaggtggtatccgctaccgggggctgactagggatcaagtcaaggccatcaacttccttccggtggactatgagattgaatacgtctgccggggcgagcgggaagtcgttggtcccaaggtacgtaaatgtcttgcaaatggttcttggacggacatggataccccatctagatgtgtgagaatctgctccaagtcctacctgacacttgaaaatggaaaagtattcttgactggaggcgatttacccgccctggatggagcccgagtggacttccgctgtgatcccgacttccatcttgttggctccagtcgctcgatttgcagccaaggccagtggtctactcccaaacctcattag

SEQ ID NO: 13128 - RNA, 249 nt, synthetic construct
  misc_feature 1..249: note = source = /note="Description of Artificial Sequence: Synthetic coding sequence"
  source 1..249: mol_type = other RNA
atgggccgtgttttccttactggtgagaaagcaaattctatcctgaagagatacccccgagcaaatggattctttgaggaaatccgacaaggcaacatcgaacgggagtgcaaagaagaattctgtaccttcgaggaagcaagagaggcctttgaaaataacgagaaaacaggactagtattactccctcgcctggagtgctcatgcgaacacggcagcttgcagccccagttacccgtccctaaatag

SEQ ID NO: 13129 - RNA, 372 nt, synthetic construct
  misc_feature 1..372: note = source = /note="Description of Artificial Sequence: Synthetic coding sequence"
  source 1..372: mol_type = other RNA
atgcagggcaccccaggcggaggaactagacctggcccgtccccagttgatagaaggacactccttgtctttagctttatccttgccgccgccctagggcagatgaacttcactggtgaccaggtgctaagggtgctggcaaaggacgaaaaacagctgagtctcctcggcgatctcgaggggttgaaaccccagaaagtagatttttggcgcgggcctgcccgcccttctttaccagtagacatgcgggtacccttttcagaactgaaggacattaaggcgtatttggaatctcacggactggcatactctataatgattaaggatatacaggtgctacttgacgaagagcgacaggctatggctaaatag

SEQ ID NO: 13130 - RNA, 840 nt, synthetic construct
  misc_feature 1..840: note = source = /note="Description of Artificial Sequence: Synthetic coding sequence"
  source 1..840: mol_type = other RNA
atgggcagggtcttcttaactggagagaaggccaatagtatcctgaaacggtatccacgagccaacgggtttttcgaggagatcaggcagggcaacattgaaagggaatgcaaggaggaattttgcactttcgaggaggcgcgagaagccttcgagaataacgaaaagacgattacaggagtgattctactggcagtcggtgtgtgggggaaactgacgctgggcacctacataagccttatcgctgaaaattctactaatgccccatacgtgttaattggaaccggaaccacaatagttgtcttcggactcttcggctgttttgcaacatgtcggggcagtccttggatgttgaagctgtacgccatgtttctatcgctcgttttcttagccgaacttgttgcaggtattagcggatttgtattccggcacgaaattaaggatacttttctgagaacatacacagatgccatgcagacatataatggaaacgatgaaagatcccgcgccgttgaccatgtgcaaaggtccctgtcatgttgtggcgtgcaaaattatacaaattggagtacaagcccttatttcctcgaacacggtattccaccatcttgctgtatgaatgagacagattgtaatccgcaggacttacacaaccttacagtggctgctacaaaagtgaatcagaagggttgttacgatcttgtcacaagctttatggagacaaacatgggaataatcgccggagtcgccttcggcattgcgttcagccagttaataggcatgttgctcgcctgttgtctgtcacggtttatcaccgccaaccagtatgagatggtgtag

SEQ ID NO: 13131 - RNA, 564 nt, synthetic construct
  misc_feature 1..564: note = source = /note="Description of Artificial Sequence: Synthetic coding sequence"
  source 1..564: mol_type = other RNA
atgtggtgcgccagccccgtggctgttgttgctttttgcgctggcctgcttgtcagccatcctgtgctgacccaggggcaagaagccggtgggcgtccaggtgccgactgcgaggtatgcaaggaattccttaaccgtttctacaagagtctcatagatagaggtgtgaacttttcgttggacacaatcgaaaaagagttgatatccttctgcctggataccaagggcaaggaaaatagattgtgttattatctgggagctacaaaggacgccgctacgaaaatcctgagcgaagtgacacgccccatgagtgttcacatgcctgccatgaagatttgcgaaaagttgaagaagttggacagccagatttgtgagctcaaatacgagaagacattggatcttgctagcgtagatctacggaaaatgagagtagcggagctcaaacaaattctgcacagctggggagaggaatgcagggcttgtgccgagaagacggactatgtgaacttgatccaggaattggcaccaaaatacgccgcaactcaccctaagaccgaattgtag

SEQ ID NO: 13132 - RNA, 1311 nt, synthetic construct
  misc_feature 1..1311: note = source = /note="Description of Artificial Sequence: Synthetic coding sequence"
  source 1..1311: mol_type = other RNA
atgcaaggtactcctggcggaggcactcgacctggtccatccccagtggaccgacggactcttctggtgttcagcttcattctagcggctgcactgggccagatgaatttcaccggcgatcaagttctgcgcgtactggccaaagacgaaaaacaacttagcctgctgggagacttggagggtctgaagccacagaaagtcgacttttggaggggcccagccaggccgtccttacctgtggacatgagagtgccgttttctgaacttaaagacatcaaagcctatcttgagtcccatggcctggcttattccattatgattaaggatatccaggtcctgcttgacgaagagagacaagccatggcaaagagtcgaagactggagagaagcaccaactccttttcttactctagctaccacacccttgaagagatttacagctggattgataatttcgtgatggaacacagcgacattgtcagcaagatacagattgggaattcctttgagaatcagagcatcctggtcctcaagttttccactggaggatctcgccatcctgcaatatggatcgacaccggaattcacagcagagaatggattacccacgctaccggcatttggacagctaataagatcgtgtcagattatggcaaagacagagtccttaccgacatccttaacgcaatggatatctttatcgagctagtgacaaacccagatgggtttgcgtttacacattcaatgaacaggctgtggaggaaaaacaaatctatcaggcccggcatattctgcatcggcgttgatcttaaccggaattggaagtccgggtttggcggcaacggctcaaactccaatccatgttctgaaacctaccatgggcccagtccccagtcagagccagaggtggcggccatcgtgaactttatcaccgcccacgggaatttcaaagccctgattagtatacatagctatagccagatgttgatgtacccctatggtcgactactggagcccgtgtcaaatcagagagaactgtacgaccttgccaaggacgccgtcgaagcactgtacaaagtccatggaatcgagtacatttttggtagtatcagtactacactttatgtggcatctggaatcaccgtagattgggcctacgattccggcataaaatacgctttctcctttgaacttagagatactggtcagtatggattcctgttgcctgccacgcagataattccaaccgcacaggagacctggatggctcttcgcaccattatggaacatacattaaaccacccgtattag

SEQ ID NO: 13133 - RNA, 450 nt, synthetic construct
  misc_feature 1..450: note = source = /note="Description of Artificial Sequence: Synthetic coding sequence"
  source 1..450: mol_type = other RNA
atgggtcgcgtgttcctcaccggcgagaaagctaattccatcctcaagagatatccgcgggcaaacgggtttttcgaagaaatcaggcaggggaatatagagagagaatgcaaagaggaattttgtaccttcgaagaagcaagagaggcattcgaaaacaatgagaagacaaaagagttttggtctacgtacaccaaggcccagcaaggagaatccaacaggggaagcgactggttccaattttatctcacctttccactgatttttggtctttttatcattttactcgtgattttcctgatttggcgttgttttcttaggaacaagacaagaaggcaaacggttactgaggggcacatcccatttccacagcacctgaacattattactccacctcccccaccagacgaggtcttcgattccagcggcctctccccaggctttttatag

SEQ ID NO: 13134 - RNA, 936 nt, synthetic construct
  misc_feature 1..936: note = source = /note="Description of Artificial Sequence: Synthetic coding sequence"
  source 1..936: mol_type = other RNA
atgctttaccagactataaattctctgaagactaagaatcccaagcttaaaattctgctgagtatcggagggtacctattcggatctaagggatttcatccaatggtggacagcagcacatcgcgccttgagttcattaattctatcatcctgttcctgaggaatcacaacttcgacggtttagatgtctcatggatctaccctgatcaaaaagagaatacacactttaccgtcttgatccacgaactcgctgaggcatttcagaaagattttacaaaatcaaccaaggaacggctcttgcttaccgcgggcgtcagcgctggcagacaaatgattgataattcttaccaagtggagaaactggccaaggatctggactttattaacctactctcctttgatttccacggtagttgggagaaacctctcatcaccggacataatagcccccttagcaagggttggcaagacagagggccttcatcatactacaatgtggagtatgccgttggttattggatccacaaaggaatgccgtcagaaaaggtggttatgggcatcccgacgtatggacactctttcactctggcgtccgccgagaccacagtgggcgcccccgcatctgggccaggagccgcagggcctatcacagagagttcaggctttctcgcctattatgaaatctgccagtttctcaagggcgccaagatcaccagactgcaggatcaacaggtgccatacgcagtgaagggcaatcagtgggtcggctacgacgatgtaaaatctatggaaaccaaagttcagttcttaaagaatctcaacctggggggtgctatgatctggagtatcgatatggatgattttaccgggaagagctgtaatcagggtccctatcccctggttcaggctgtcaaacgtagccttggaagcctgtag

SEQ ID NO: 13135 - RNA, 621 nt, synthetic construct
  misc_feature 1..621: note = source = /note="Description of Artificial Sequence: Synthetic coding sequence"
  source 1..621: mol_type = other RNA
atggatacgatcttcttgtggagccttttgttactcttcttcggttcgcaagcatcccgttgttccgcgcagaagaacaccgaatttgcagtagacttgtatcaggaggtctctctatcccacaaagacaacattatcttctcccccctcggaatcacattggtgttagagatggtccaactgggcgctaaggggaaggctcagcagcaaatcaggcaaacccttaaacagcaggagacttcagcgggggaagaatttttcgtgctgaagtcattcttctcagccatcagtgaaaaaaaacaggaattcacattcaatctagctaacgcactttatcttcaggaaggtttcacagtcaaggagcagtacctgcatggcaataaggagttttttcagtccgctatcaaacttgtcgactttcaggatgcaaaggcctgtgccgagatgattagtacttgggtggaacgcaaaactgacggcaaaatcaaagacatgtttagtggcgaagaattcggtcctctcacacggctagtcctggtcaatgccatctactttaaaggagactggaaacagaaattccgcaaggaagatactcaactgattaactttacgaagaagtag

SEQ ID NO: 13136 - RNA, 1218 nt, synthetic construct
  misc_feature 1..1218: note = source = /note="Description of Artificial Sequence: Synthetic coding sequence"
  source 1..1218: mol_type = other RNA
atggacaccatcttcctgtggtctcttcttctcttattcttcggatctcaagccagcaggtgctctgcccaaaaaaacaccgagtttgcagtggacttgtatcaagaagtatcactgtcccataaagataacatcatatttagccccctgggtatcactctggtgctcgaaatggtgcagctgggcgcaaaaggcaaggcgcaacagcagataagacagacgctcaaacaacaggagacgtccgcaggcgaggagtttttcgttctgaagtcgttcttctctgctatttccgagaaaaaacaagaatttaccttcaacctggcgaatgctctgtacctgcaggaaggttttacagttaaggaacagtatctgcacggcaataaggagtttttccagtccgccatcaaattagtggactttcaggacgctaaggcttgcgccgaaatgatatccacctgggttgagagaaagactgatgggaagattaaggatatgttctcaggggaagaatttgggcctctgaccaggttagtgttggttaacgctatttattttaaaggagactggaaacagaaatttcgaaaggaggacacacaactgataaactttactaagaaaaatggctctaccgttaagattcctatgatgaaagcgctgctgcggaccaaatatggatacttctcagagagtagcctgaattatcaagtgttagagctttcgtacaagggagacgaattttctctaattattatactaccagccgaaggtatggacatcgaggaagtggagaaactgattacagctcagcagattctgaaatggctgagtgagatgcaggaggaggaagtggagatatcactgccaagattcaaagtggagcagaaggtggacttcaaggatgtgttgtactctcttaatatcacggaaatcttcagtggaggctgcgacctctccggtatcacagattcctcagaagtttacgtttctcaggtgacccagaaggttttttttgaaatcaacgaggatggaagtgaggccgctacatcgacgggtattcacatccccgtgatcatgagtttagcgcaatcacaattcatcgccaaccatcctttcttgtttatcatgaagcacaatcctaccgagtcaattctatttatgggaagggtgaccaatcccgacacacaagagatcaaaggtagagatctggacagtttgtag

SEQ ID NO: 13137 - RNA, 399 nt, synthetic construct
  misc_feature 1..399: note = source = /note="Description of Artificial Sequence: Synthetic coding sequence"
  source 1..399: mol_type = other RNA
atgcttatcttctggacaattacactctttttgcttggagccgctaagggaaaagaagtctgttatgaagacctgggatgcttcagtgataccgaaccctggggaggcaccgcaattagaccccttaaaatattaccttggtctcctgaaaagattggcacccgattcttattgtatacgaacgaaaaccccaataacttccaaatcctgttgctgtccgatcctagtacaattgaagcctctaactttcagatggatcgaaaaactagattcattattcacgggtttatcgacaaaggtgacgagagttgggttacagacatgtgcaagaagcttttcgaagtggaggaagtcaactgtatctgcgtggattggaagaagggatctcaggcaacatag

SEQ ID NO: 13138 - RNA, 606 nt, synthetic construct
  misc_feature 1..606: note = source = /note="Description of Artificial Sequence: Synthetic coding sequence"
  source 1..606: mol_type = other RNA
atgaaggtgcacatgctcgttggcgtactagtgatggtcggcttcacagttggtaaagtccccgtccctgatataagaacctgtcatttctgcctggtagaagatccgtctgtggggtgtatctctggcagtgaaaagtgcacgatctctagttctagtctgtgcatggtgatcaccatatactacgacgtcaaggtccgcttcattgtccgaggttgtgggcagtacatctcgtacagatgtcaggagaagcggaatacttatttcgccgagtactggtatcaagctcagtgctgccaatacgactactgcaattcatggtcatctcctcaactgcaaagtagcttacctgagcctcacgaccgacccctggccctccctctaagcgatagccagatccagtggttttaccaagcactcaacctttcccttcctcttcctaacttccacgccggcactgagcccgacggtctggatcccatggtaaccctttctctgaatttggggctcagcttcgctgagttgaggcgaatgtatctattcttaaattcgtctggccttttggtgctgcctcaggctggactattgacccctcacccctcgtag

SEQ ID NO: 13139 - RNA, 1086 nt, synthetic construct
  misc_feature 1..1086: note = source = /note="Description of Artificial Sequence: Synthetic coding sequence"
  source 1..1086: mol_type = other RNA
atggcatcactcggccttctcctccttttgctactgactgcccttccccctctttggagctcctcgttaccggggcttgatacggctgagagcaaagctactattgctgacctgattttgtccgcccttgaacgcgcgactgtctttttagaacaaaggctgccagaaataaatctggatgggatggtcggagtgcgggtgctagaagaacaactcaagtctgtccgcgagaagtgggcccaggagccactgttgcagcccttgagcctgcgggtagggatgctcggcgagaaactggaagccgctattcagagaagcctgcattaccttaaacttagtgacccaaagtaccttcgcgaattccagttaacattgcagccggggttctggaaactgcctcacgcatggatccacaccgacgcgagcctcgtctatcctaccttcggcccacaggactcattttccgaagaacgaagcgacgtctgtttggtgcaactgcttgggaccggtactgattcttccgagccctgtggactctctgacctctgccgctcattgatgaccaagcctggctgctctgggtattgtttgtcccaccagttactgttctttttgtgggccaggatgagaggctgcacacaggggcctctgcaacagtcacaagattatattaatctgttttgtgccaacatgatggacttaaacagaagggccgaggccatcggctacgcctatcctacacgtgatattttcatggagaacataatgttttgcggcatggggggctttagcgacttttataagttacgctggctggaagcaattctgagctggcagaagcagcaggaaggctgttttggcgaacccgatgctgaggacgaggagctgagcaaggccattcagtaccagcagcacttcagccgcagagttaagcggcgggagaagcaatttcccgacggttgctcctctcataacaccgccaccgccgtagccgccctggggggcttcctttatattttagctgagtacccgcctgctaaccgcgagcctcacccttcaaccccacctccaccttctagtagatag

SEQ ID NO: 13140 - RNA, 162 nt, synthetic construct
  misc_feature 1..162: note = source = /note="Description of Artificial Sequence: Synthetic coding sequence"
  source 1..162: mol_type = other RNA
atgtggacaaattttttcaaattaaggttattctgttgtctgctcgcagtgctgatggtcgtcgtactggttataaatgttacccaagtcgagtacctggaccatgaaaccgtgtctgccaccttcattgattcctctgggcagtttgtctcttctcaatag

SEQ ID NO: 13141 - RNA, 1305 nt, synthetic construct
  misc_feature 1..1305: note = source = /note="Description of Artificial Sequence: Synthetic coding sequence"
  source 1..1305: mol_type = other RNA
atggcctctctgggactgctactcctcttgcttttgacagccttaccccctctgtggtcctccagtctgccaggccttgacaccgccgagagcaaggctacaattgcagatctcatactgtccgcgttagagagggctaccgtgttcttggaacaaagattgcccgaaataaaccttgacggaatggtaggagtgcgtgtcctggaagaacagcttaaatccgtcagggagaagtgggcccaagaacctctcttgcaacctctgagcctccgcgtaggcatgctcggtgagaaactggaagctgccatccagagatcacttcattatctgaaactcagtgatcccaaatacctacgagagtttcagttgaccttgcagccgggcttctggaaactcccacacgcatggatacacaccgacgcctctcttgtctatcccacgtttggacctcaggattcatttagcgaagagcgctcagatgtttgcctcgtccagctcctcggcaccggcaccgactcctcagaaccttgcggactttcagacctctgtcgcagccttatgacaaagccggggtgttccggctattgcttgagccaccaactgctatttttcttgtgggcgaggatgagagggtgcactcagggacccctgcaacagagtcaggattatataaacctgttttgcgcaaatatgatggaccttaatagacgagctgaggctattggctatgcctaccccacgcgcgatatctttatggaaaattccgttacaggccaccctgtattctacctcccactctgtgacagttttctacctcctaaagccgctcccgtgacagaattatacactgacggccccgttatgttttgtggaatgggaggattttcagatttttacaagctcaggtggctcgaggccatcttgagctggcaaaaacaacaagagggctgttttggcgagcccgatgccgaggatgaagagctgtccaaggcaatccaatatcagcagcatttctctcgacgcgtcaaacgcagagagaaacagttccccgactcacgcagcgtggcgcaagccggcgtccaatggagaaatttaggctccctgcagcctctgccccccggtttcaagcagttttcctgtcttatccttccgtcatcatgggattatagatcggtccccccatatctggccaacttctacatcttcctggttgagacgggcttccaccacgtggcccatgcaggattggagctccttattagtagggaccctcccacgtcaggcagccagtcggttggactttag

SEQ ID NO: 13142 - RNA, 1311 nt, synthetic construct
  misc_feature 1..1311: note = source = /note="Description of Artificial Sequence: Synthetic coding sequence"
  source 1..1311: mol_type = other RNA
atgcagggcacgccaggcggcggaaccaggccaggtcccagtccagtggacagacgcactctgctggtgtttagtttcatacttgctgcagctctcggtcagatgaactttaccggggaccaggtcctccgggtgttggcaaaggacgaaaaacaactgtccctcttaggggatctggaaggactgaaacctcagaaggtggatttttggaggggcccggcacggccatctctcccggttgacatgagggtgccgtttagcgaattaaaggatattaaagcctacctggaatcacacggtctcgcatactctataatgattaaagatattcaggtgttgcttgacgaagaacggcaggctatggctaagtcccgaagattagaacggagtacaaacagtttttcatattcttcttaccatactctggaggaaatatactcctggattgataactttgtgatggagcactccgacatcgtgtctaagatacagatagggaatagcttcgaaaaccagtctattctggtgttgaaatttagtacaggcggcagtagacatcccgctatctggattgacactggcattcattcccgcgaatggatcacgcacgcaaccggcatatggactgcaaacaaaattgtgagcgactatggaaaagatcgagtgctgaccgatatcttaaatgcaatggatatcttcatcgaactcgttacaaatccagacggctttgcatttacacattcaatgaataggctgtggcgcaaaaacaaatcaatccggcctggaatattctgtataggtgtggacttaaacaggaattggaagagtggtttcggaggaaacggctcaaattctaatccctgctccgaaacctatcacggaccatcgcctcagtccgaaccagaggtggctgccattgttaattttatcaccgcccacgggaattttaaggcccttatatctattcacagctatagtcagatgctgatgtatccttacggtaggctgcttgagccagttagcaatcagagagagctgtacgatttggcaaaggatgctgtggaagcactgtacaaggtacacggtattgagtatatattcgggagtatatctacgaccctatacgtggcctcagggatcacagtagactgggcatacgatagtggcattaaatacgctttctcctttgagctccgcgacacgggacaatatggttttcttctcccggcaacacaaatcattcccactgctcaggagacatggatggccctacgcactataatggaacataccctcaatcacccatattag

SEQ ID NO: 13143 - RNA, 1218 nt, synthetic construct
  misc_feature 1..1218: note = source = /note="Description of Artificial Sequence: Synthetic coding sequence"
  source 1..1218: mol_type = other RNA
atggacacgattttcctctggtcattactactgctcttctttggcagccaggcgtcaagatgttccgctcagaaaaacactgagtttgccgtagatctctatcaagaggtcagcctctcacataaggataatataatattctcccccctaggcattaccctcgtgttggagatggttcaactgggggccaagggtaaggctcaacaacagattcgccagaccctcaagcagcaggagacatcggcaggcgaagagtttttcgtgctcaaatcattttttagcgcaatctcagaaaagaaacaggaattcacgttcaatctagccaatgcactttatcttcaggaaggcttcaccgttaaggaacagtatctgcatggtaacaaggagtttttccagtctgccattaagttggtcgattttcaggatgctaaagcttgtgcagaaatgatctctacctgggttgaaaggaaaaccgacggcaagatcaaagacatgtttagcggcgaggagttcggccctttgactcgtctggtcctcgtgaacgcaatttattttaagggtgactggaaacagaagttcagaaaagaggatacacaattgataaacttcaccaaaaaaaacggatccaccgtgaaaatcccaatgatgaaggctcttcttcggaccaaatacggctatttctccgaatcatctctgaactaccaggtgctggaactgagttataagggcgatgagttctctctgatcatcatcctgcctgctgagggtatggatattgaggaggtggaaaaactgataaccgcccagcagatcctgaagtggctgagtgaaatgcaggaggaagaggttgagatctccctccccaggttcaaggtcgaacagaaggtggattttaaagatgtgctctattctcttaatataaccgagattttcagcggaggatgcgacctcagcggaattactgattcaagcgaggtctatgtgtcccaggtgacccagaaagtattctttgagatcaatgaagatggatcagaggcagctacctcgacaggtattcacatccctgttataatgtctctcgcccagtcacagttcatcgcaaaccacccgtttctctttatcatgaaacacaaccccaccgagagtattctgtttatgggaagagtaactaatcctgatacccaggaaataaaaggccgcgaccttgactctctctag

SEQ ID NO: 13144 - RNA, 510 nt, synthetic construct
  misc_feature 1..510: note = source = /note="Description of Artificial Sequence: Synthetic coding sequence"
  source 1..510: mol_type = other RNA
atgttatatcaaacaatcaattccctgaagacaaagaatcccaaactgaaaatcttgctgtccatcggcggatacttattcggctctaaggggtttcaccccatggtggatagttctacctcccgcctggagtttatcaattctatcattctcttccttaggaatcacaacttcgatggacttgatgtgtcttggatctatcccgaccagaaagaaaacacccactttacagttttaattcatgaattggccgaagcattccagaaagattttaccaagagcaccaaggagcgtctgttattaaccgccggcgtcagtgcgggccgacaaatgattgacaatagttaccaagtagagaagttagctaaggatctggactttatcaacttgctgtcgttcgatttccatggcagctgggagaagccactaattacaggccacaactccccccttagtaaaggttggcaggaccgcggcccttcttcctactacaacgtggaatacgcatag

SEQ ID NO: 13145 - RNA, 1209 nt, synthetic construct
  misc_feature 1..1209: note = source = /note="Description of Artificial Sequence: Synthetic coding sequence"
  source 1..1209: mol_type = other RNA
atggcctctttgggactcctgttacttctgctcctcaccgctcttcctcctctgtggagcagtagcctgcccggtcttgataccgccgagtcaaaagccaccattgccgacctgatcctctccgcactggaaagggctacagttttcttggaacaaagactgcctgagattaatctggatggcatggtgggggtcagggtgcttgaggaacagctgaaatccgttcgagagaagtgggcccaggaaccattactgcaacctttatccctcagggttggcatgttgggagagaaactcgaagctgccatccagcgatctctgcactatcttaaactatccgaccccaagtacctcagagaattccaactaacgttacagccggggttctggaaactgcctcacgcgtggattcacactgacgctagcctggtctacccgacttttggaccgcaggattctttttcggaggaacgaagtgatgtctgtctcgttcagctccttggaacaggaacggattcatctgagccatgcggattgtctgacctctgccgatccctgatgaccaaaccaggctgctccgggtattgtctgagtcatcagttactgttttttttgtgggcccgcatgcgggggtgtacacaaggccctctgcagcaatctcaggactacatcaaccttttctgtgccaatatgatggatttgaaccgaagagcagaggccatcggatacgcatacccaaccagggacatcttcatggaaaatatcatgttctgcggcatgggagggtttagcgatttctataaactgcgatggctagaggcaattctgagttggcagaaacagcaagagggttgctttggcgaacccgacgctgaggacgaggaactttccaaggccattcagtatcagcaacacttttctaggcgggtcaagagacgggagaaacagtttccagactcacggtcggtggctcaggccggagtgcagtggcgaaaccttggaagcttacagcctttacctccgggcttcaagcagttctcttgtctgatcctgccttcctcctgggactataggtccgttccgccttaccttgccaatttctacatcttcctcgtggagaccggctttcaccacgtcgcacatgccggtttagagctcctgattagtcgagatcctcctactagcggcagtcagtccgtgggattatag

SEQ ID NO: 13146 - RNA, 1680 nt, synthetic construct
  misc_feature 1..1680: note = source = /note="Description of Artificial Sequence: Synthetic coding sequence"
  source 1..1680: mol_type = other RNA
atgtggaccaacttttttaaactacgtctcttctgctgcctgttggccgttttgatggtagtggtactggtcataaatgtgacccaggtggaataccttgaccacgagacggtgagcgcgaccttcatagattcaagtggtcagtttgtctcctcccaggtcacaggcatctctcgaaatccctactgtggatacgatcagcagaccctctcttcccaggagcgtatggaggaagatagtctcttagccgcactgcatcgtcaggtgccggacgttggccctgtcccctttgtgaagtctacagacccttctagctcgtatttcgtcatccttaattccgcagccttttttaaagtgggatctcagctagaagtgctggtgcacgtccaggactttcagcggaagcccaaaaagtacggtggggactatctccaggcacgcatccattcactcaaactgcaagcaggcgccgtgggccgggtcgtggattatcaaaacgggttctacaaggttttctttacgcttctctggccgggtaaggttaaggtatctgtttccctggtgcatccaagcgaaggcatccgagtcctgcagcggttacaggaagataaacctgacagggtgtactttaagagcctttttcggtccggtaggatctcagaaactaccgaatgcaacgtgtgcctgcccgggaatctgcccctatgcaactttaccgacctgtacacaggtgaaccttggttttgtttcaaaccgaaaaaacttccctgctcatccaggattacccatttcaaaggcggatatctgaagggcttgctcaccgcagctgagagcgcgttttttcaaagcggagtaaacattaagatgcccgttaatagtagcggtccggactgggttaccgtgatacctcgtcggatcaaggaaacgaactcactggagctcagccagggctctggcacatttcctagcggctactactacaaggaccagtggcgtccaagaaagtttaaaatgcggcagttcaacgacccagacaatataacggaatgtcttcaaagaaaggttgtgcacctgttcggagatagtaccatccgccaatggtttgagtatcttactacatttgtaccagacttggttgaattcaatttggggtcccccaaaaacgtgggtccctttctagcggtcgatcagaaacacaacattcttctcaagtataggtgccatggaccaccgattcgcttcactacagtgttcagtaatgaactgcactatgtcgctaacgagctcaacgggattgtgggaggcaagaatacagtagtggccattgccgtgtggtcccacttttcgacgttccctcttgaagtttacatcagaagactgcggaatatcaggcgcgccgttgtgcgcttgttggataggagccctaaaactgtggttgtgatacggaccgcaaacgcgcaagagttaggcccagaggtgagcttatttaatagcgattggtacaactttcagctcgacacaatcctaaggcgcatgtttagtggagtcggcgtgtacttagttgatgcatgggagatgacccttgcacactacctccctcacaaactccacccagatgaagtcatagtaaaaaaccagctggatatgtttttgagctttgtttgcccactggagacatag

SEQ ID NO: 13147 - RNA, 402 nt, synthetic construct
  misc_feature 1..402: note = source = /note="Description of Artificial Sequence: Synthetic coding sequence"
  source 1..402: mol_type = other RNA
atggcaatggtttctgccatgagctgggtgctgtatctctggatctccgcttgtgcaatgctcctctgtcatgggagtttacagcacactttccagcaacaccacctgcaccgcccagaggggggtacctgtgaggtcattgctgcacaccgctgctgtaacaaaaatcggatcgaagagcggtctcaaaccgtgaaatgttcctgtctccctggcaaggtcgccgggacaacaagaaacagaccctcatgcgtggatgcatctattgtgattggtaagtggtggtgtgaaatggaaccctgccttgaaggagaagagtgtaagacactcccggacaactcaggatggatgtgcgctaccgggaacaaaatcaagacaacaagaatccacccccggacatag

SEQ ID NO: 13148 - RNA, 606 nt, synthetic construct
  misc_feature 1..606: note = source = /note="Description of Artificial Sequence: Synthetic coding sequence"
  source 1..606: mol_type = other RNA
atgaaagtccacatgctggttggagtgctggtgatggttggatttactgttggaaaggtgcccgtgcctgacatccgtacttgtcacttttgcctagttgaggacccctctgtcggctgtattagcggatccgagaagtgtacaatttccagttcatctctctgtatggtcatcacaatttattacgacgtcaaagtgagattcatcgtaagagggtgtgggcagtacatatcctatcgatgtcaggagaaaagaaatacctactttgctgaatattggtatcaggcccagtgctgccagtacgattattgtaactcctggtcttcacctcaactgcagagcagtctccctgagcctcatgacagacctttggccctgccccttagcgactcccaaattcagtggttctaccaggccttaaaccttagcctaccgctaccaaattttcacgctggaactgaacccgatggcctggaccctatggtaactctatcactaaatctgggactaagctttgccgagctgagaagaatgtacttatttttgaattcatcagggctgctggtgctaccccaagccggtctgctgactccccatccgtcctag

SEQ ID NO: 13149 - RNA, 606 nt, synthetic construct
  misc_feature 1..606: note = source = /note="Description of Artificial Sequence: Synthetic coding sequence"
  source 1..606: mol_type = other RNA
atgaaggtacatatgcttgttggggtgctggtgatggtgggatttacagtcggaaaggtgcccgtgcctgacatacgcacctgccacttttgtctcgtggaagatcctagcgtaggctgtatttccggctcagagaaatgtaccatttcctctagttcgctctgtatggtgatcaccatttactatgatgtaaaggtgcggtttatcgtccgcggatgtgggcaatacatttcttatagatgtcaggagaagcgcaacacatactttgccgagtattggtaccaagctcagtgttgtcagtacgattactgtaattcttggtcctctccgcaacttcagtcttcactgcccgaaccccacgacagacccttggcccttcccttgagtgacagccagatacaatggttctaccaagctttaaatctttctttgccactgccaaacttccatgctggcactgaaccagatggcctcgaccccatggtgaccttgtctttgaatctcggcctgagttttgctgaactgcgccgtatgtatcttttcttgaactctagtgggctgctcgtacttccacaagccggattgcttacgccacacccaagctag

SEQ ID NO: 13150 - RNA, 732 nt, synthetic construct
  misc_feature 1..732: note = source = /note="Description of Artificial Sequence: Synthetic coding sequence"
  source 1..732: mol_type = other RNA
atgggacccgaagctctttcctctctgctgctgctcctgctcgtggcctctggggacgccgatatgaaaggccatttcgatcccgctaagtgtaggtatgccttgggaatgcaagaccgaactattcccgacagcgacatttcagctagttcaagctggtccgatagcaccgccgcaaggcattctaggctcgagagctcagacggagatggagcatggtgtcctgccgggtcagtcttccccaaagaagaagagtacctccaggttgatcttcaaaggctgcacctggtcgcccttgttgggactcagggccgtcatgctggagggctgggcaaggagtttagccgatcgtataggctcagatactcacgagatggtaggagatggatgggatggaaggatcgatggggtcaggaggtgatttccggtaatgaggacccagagggggtggtgttgaaagatttgggcccacccatggttgccagactggtcagattttatcctagagccgatcgggtgatgtcagtgtgtctcagggtggaactttatgggtgcttgtggcgcgattgctcaatgggagtgtgggcttcatggcagatggtttggtggggttggatgacccttggacgtgtgagatcttgtggctctgggcaggccatgacaatgtgggatggggccacgactgcctctccggtagcaatgtggcgctggagtctgtctctgacgggatag

SEQ ID NO: 13151 - RNA, 258 nt, synthetic construct
  misc_feature 1..258: note = source = /note="Description of Artificial Sequence: Synthetic coding sequence"
  source 1..258: mol_type = other RNA
atgaagataccggtgctgccggccgttgttttactgagtctgttagtgttacacagcgcacaaggagctactctcggcgggcctgaagaggagagcactatcgaaaactacgcttcaaggcccgaagcatttaaggctgatgaattcctaaattggcatgctttattcgaatcaattaagcgaaaactcccttttctcaactgggatgcatttcccaaactgaaaggtctgcggtcagccaccccagacgctcagtag

SEQ ID NO: 13152 - RNA, 348 nt, synthetic construct
  misc_feature 1..348: note = source = /note="Description of Artificial Sequence: Synthetic coding sequence"
  source 1..348: mol_type = other RNA
atgggaagagtgttccttacaggcgaaaaggccaactcaattctgaaaagatatcctcgtgcaaacggtttttttgaagagatacgacagggtaacatcgagcgagaatgcaaggaggagttttgcacatttgaagaggctcgcgaggccttcgagaataacgaaaagactaaggaattttggagcacctatactaaggcccagcagggggagagcaaccgtggcagtgattggtttcagttctaccttacttttcctcttatctttggactatttattattctgctcgttatttttctaatttggcggtgctttcttcggaataagactcggcggcagacagtgtag

SEQ ID NO: 13153 - RNA, 606 nt, synthetic construct
  misc_feature 1..606: note = source = /note="Description of Artificial Sequence: Synthetic coding sequence"
  source 1..606: mol_type = other RNA
atgaaagtccatatgctggtgggtgttctggtgatggtgggattcacagttgggaaagtgcctgtccccgacattcgcacctgtcacttttgcctcgtagaagacccgtccgttggatgtatttcaggaagcgaaaagtgtacaatttcttccagcagcctgtgcatggtcataacaatctactacgacgtaaaagttcgtttcattgtgcggggctgcggacaatacattagctaccgctgccaggaaaaaaggaatacctactttgctgagtactggtaccaggcacagtgctgtcagtacgattattgtaactcctggtcttctccacagttacagtcctcgctcccagaacctcatgatcgccctctcgctttgccactgtccgacagccaaatccaatggttctaccaggctcttaacctctctttacccttacctaactttcacgccggcacggaaccagatgggctcgaccccatggtgacattgtcattaaacttaggactgtcatttgctgagcttagacgtatgtatctgttcctgaattccagcggcttactagtccttccacaggctgggcttctgactccccatccatcttag

SEQ ID NO: 13154 - RNA, 1311 nt, synthetic construct
  misc_feature 1..1311: note = source = /note="Description of Artificial Sequence: Synthetic coding sequence"
  source 1..1311: mol_type = other RNA
atgcaaggaacgccaggaggcgggactcgtccggggcctagtcctgtggatcgcaggacgttgctggtattttccttcatcctggccgccgcattgggacagatgaatttcactggagatcaagtcttgcgggtgctcgcaaaagacgagaagcagctttccctgttaggagatctggagggtctcaagcctcagaaagtagatttctggcgaggtccagcaaggccctccctgcccgtagacatgcgcgtgcccttctcagagctaaaagacataaaagcctacttagagtcccacggactggcctatagtatcatgataaaggatatccaggttttattagatgaggagcgtcaggcaatggccaaatcacgaagattggaaaggtcaactaacagtttttcttactcctcttatcatactctcgaagaaatctattcctggatcgataacttcgtgatggagcactctgacatcgtttccaaaattcagattggaaattcgttcgaaaaccagtctattctggtattaaaattttctacaggcggcagccggcaccccgccatctggatagatacggggatccactctcgggaatggattactcatgcgaccggaatttggacagcgaataaaatagtgtccgattacggtaaggaccgggtgctgaccgacattcttaacgcaatggatatcttcatcgagcttgtcaccaaccccgacgggtttgcttttacgcactctatgaaccgactgtggcgtaaaaataaatcaatccgaccgggcattttctgcatcggcgtggatctgaatcgcaattggaagtctggcttcggcggtaatggctccaactctaacccatgtagtgaaacttatcacggcccgtctcctcaatctgagccagaggttgccgccatcgtcaactttatcacagcccacgggaattttaaagcccttattagcatacattcatactcccagatgctcatgtatccctacgggaggttgctggaaccagttagcaaccagcgcgaactgtacgacttagctaaggatgcagtcgaggctttatataaagtacacggtatagagtacattttcggcagtatttctaccactctatacgtagcctctgggataacggttgattgggcctacgactcaggaattaagtacgccttttcattcgaattgcgagatacaggccagtacggatttctgctcccagctacacaaatcatccctaccgcccaggaaacgtggatggccttgcggaccattatggagcacacccttaaccacccttattag

SEQ ID NO: 13155 - RNA, 606 nt, synthetic construct
  misc_feature 1..606: note = source = /note="Description of Artificial Sequence: Synthetic coding sequence"
  source 1..606: mol_type = other RNA
atgggagccaccacaatggaccagaagagcctgtgggccggcgtcgtggtactcttgcttcttcaaggaggctccgcttataagctggtgtgttacttcactaactggtcacaggatcgacaagagccgggaaaattcactccagagaacatcgacccattcttgtgctcccatctgatatactcttttgcctcaatcgagaataacaaagtaatcatcaaggacaagtctgaagttatgctctatcaaaccatcaactccctgaaaaccaagaacccaaaactcaagattctgctctccatcggtggatatctgtttggtagcaagggatttcacccgatggttgactcttccacgtcccggctagagttcataaactcaattatactgtttttgcgcaatcacaacttcgatggattagatgtgtcttggatatacccagatcaaaaggaaaacacccatttcacagtgctgatccatgaactggcagaggcatttcagaaggatttcacaaagagcacgaaagagagactactattaacagcaggtgttagcgctgggcggcagatgatcgacaactcttaccaggtcgagaaactcgcttag

SEQ ID NO: 13156 - RNA, 75 nt, synthetic construct
  misc_feature 1..75: note = source = /note="Description of Artificial Sequence: Synthetic coding sequence"
  source 1..75: mol_type = other RNA
atgctcgtggatgggccatccgaacgtcctgctctctgttttctgctactggctgtcgcaatgtccttcttctag

SEQ ID NO: 13157 - RNA, 252 nt, synthetic construct
  misc_feature 1..252: note = source = /note="Description of Artificial Sequence: Synthetic coding sequence"
  source 1..252: mol_type = other RNA
atgagaccccgcggattaccaccactcctggttgttcttctgggttgctgggcatccgtgtcagcccaaactgatgccacccctgcagtcactactgaaggcttgaactctaccgaagccgcactcgccacctttggaacctttccgagtactcgccctcccggcacccctcgtgcccctggtccttctagcgggccgcgacccactccagttaccgatggtagccatagcgttacacaagctggagtctag

SEQ ID NO: 13158 - RNA, 1254 nt, synthetic construct
  misc_feature 1..1254: note = source = /note="Description of Artificial Sequence: Synthetic coding sequence"
  source 1..1254: mol_type = other RNA
atgctagcccttcttgtacttgtgactgtggcactcgctagcgctcatcacggaggagagcactttgagggtgagaaagtctttagggtgaacgtcgaggacgagaaccacatcaacatcatacgggaactcgcctctacgactcaaatcgatttctggaaaccagattctgtgacacagattaaacctcactctacagtggattttagggtgaaagctgaggacactgtgactgtggagaacgtgctgaagcaaaacgagttgcagtacaaagtgcttataagcaatctccgaaacgtcgttgaggcacagttcgactctcgcgtgcgggctaccggccattcatatgagaagtacaacaaatgggagacaattgaagcgtggactcagcaggtcgctacagagaacccagccctcatctctagaagcgtgatagggacaacattcgagggaagagccatttatctcctaaaagtgggcaaagctggtcagaataagccagctatctttatggattgcggatttcacgctagggagtggatctccccggccttctgccaatggtttgttagagaagcagtcagaacatatggaagagagatccaggtaacggaactccttgataagctggatttctatgtcctcccagtgttgaacatcgacggctacatatatacctggaccaagagtcgattttggcggaagacacggtcaacgcatacgggctcttcctgtattggaacagatcctaaccgcaattttgacgccggatggtgtgagattggagcctccaggaatccatgcgacgaaacctactgtggacctgcggctgagtccgagaaagaaacaaaagccttagccgactttataaggaacaaactgagcagcatcaaggcctacttaacgatccactcctacagtcaaatgatgatctacccatattcctatgcctacaaactcggggagaacaacgccgaattaaatgctctagcaaaggctacagtgaaagaactggcctcactgcacgggaccaagtacacttatggccctggtgctactacaatttatcccgccgccggcggtagcgatgattgggcttacgatcagggtatcagatactctttcactttcgaactgcgcgacaccggcagatacggcttccttctacccgaatcacaaataagagctacttgtgaagagacattcctggcaataaagtatgtcgcttcttacgttcttgagcacttatactag

SEQ ID NO: 13159 - RNA, 1680 nt, synthetic construct
  misc_feature 1..1680: note = source = /note="Description of Artificial Sequence: Synthetic coding sequence"
  source 1..1680: mol_type = other RNA
atgtggaccaactttttcaagttgcggctcttctgttgcctgctggccgtgctgatggtggtggtattggtaataaacgtaacccaggtggagtacttggatcatgagaccgtgagcgctacttttatcgactcctcaggtcagtttgtcagctctcaagtgaccggtattagcaggaacccttactgcggatatgatcagcagacccttagtagtcaagagagaatggaggaggatagtctccttgcggcccttcataggcaggtgcccgatgtcggcccagtcccgtttgttaagtccacagacccatcatcgtcttacttcgtgattcttaacagcgccgctttcttcaaggtcggatcccaactggaggtcttagttcatgttcaggacttccaaaggaaacctaagaagtatgggggggattacttacaggctcggattcacagtctgaaacttcaagctggggctgtgggacgggtggtcgactaccagaatggtttttataaagtgttctttacgcttttgtggcccggcaaagtcaaggttagcgtttcactcgtgcatccctccgagggaatccgagtactgcagaggctccaggaggacaaacctgacagagtgtattttaagtccctatttcgatcaggacgaatatcagaaaccactgaatgtaatgtttgcttaccagggaatttgcctctctgcaactttaccgatctatataccggcgaaccatggttctgcttcaaacctaaaaaactcccatgctcttctcgcattactcatttcaaaggtggctacctcaagggcctcctgactgcagccgagagtgcgttcttccaatcaggcgtgaacattaaaatgcccgtgaactccagcggaccggattgggtgaccgtgatacccaggcgaatcaaagagactaactctctggaactgagtcagggatctggcacttttccctcaggatattactacaaagaccagtggcggcctcgtaagttcaagatgcgccagttcaatgatcctgacaatataaccgaatgtttacagcggaaagtcgtgcacttgtttggggattccactattaggcagtggtttgaatatctgacgacctttgtgcccgacctcgtggaattcaacctcggctcacccaagaatgtgggtccctttctcgcggtggaccaaaagcacaatatccttttaaaatacaggtgccacggcccccctatacggttcaccacagtcttctccaatgaactacattatgtggccaatgagctgaatgggattgtcggcggcaagaatacagttgtcgcaattgctgtatggtcccatttctctacgtttccccttgaagtttatattcgaaggttgcgcaacatacgcagggctgtggttaggctgcttgatcgctcacccaagactgtcgttgtcattaggacggcgaacgctcaggagctgggtcccgaggtctccctcttcaactctgactggtacaacttccaattagatacgatccttcggagaatgttcagcggtgtcggagtctatctcgttgacgcctgggaaatgacactggcacactatttaccccacaagctgcaccctgatgaggttatcgttaagaatcagcttgacatgtttctctcctttgtgtgcccattagagacttag

SEQ ID NO: 13160 - RNA, 99 nt, synthetic construct
  misc_feature 1..99: note = source = /note="Description of Artificial Sequence: Synthetic coding sequence"
  source 1..99: mol_type = other RNA
atgcagggtactccaggcggcggaaccagaccaggccctagtcccgtggatcgacgaactctactggtgttttctttcatcctagcagctgcgctgtag

SEQ ID NO: 13161 - RNA, 180 nt, synthetic construct
  misc_feature 1..180: note = source = /note="Description of Artificial Sequence: Synthetic coding sequence"
  source 1..180: mol_type = other RNA
atgctggccctcctcgtactggtcaccgtagcattagcttcagcccaccatggaggggaacacttcgagggcgagaaagtgtttagggtcaacgtcgaagatgagaatcacattaatatcattcgagaacttgcctctaccactcagattgatttttggaaaccagacagcgtgacctag

SEQ ID NO: 13162 - RNA, 303 nt, synthetic construct
  misc_feature 1..303: note = source = /note="Description of Artificial Sequence: Synthetic coding sequence"
  source 1..303: mol_type = other RNA
atgcggccaagaggtctgccacccctcttggtcgtgctgctcggatgctgggcttcagtctctgcgcagacggacgctacccccgcagtcaccacagaaggcttgaactcgacagaggcagcccttgccacgtttgggaccttcccctccacgagaccgcccggaacccctagagctccagggccatcctccggacctcgccctaccccagttactgacggcggatatcacgtgccagccccaggtgtgcactccgaccctacttctcgaggccagcctcggtgttgctctctctgtctctag

SEQ ID NO: 13163 - RNA, 234 nt, synthetic construct
  misc_feature 1..234: note = source = /note="Description of Artificial Sequence: Synthetic coding sequence"
  source 1..234: mol_type = other RNA
atgcgaagtccgagaatgcgagtctgtgcgaagagtgttctgctttctcattggctcttcctggcctatgtgttgatggtgtgttgcaagctgatgtccgcctcatctcagcatctccgggggcatgctggtcatcatcaaataaagcaaggtacgtgtgaagtggtagcagtccataggtgttgtaacaagaataggatcgaagaaagatcccagactgtcaaatgctcgtag

SEQ ID NO: 13164 - RNA, 12 nt, synthetic construct
  misc_feature 1..12: note = source = /note="Description of Artificial Sequence: Synthetic coding sequence"
  source 1..12: mol_type = other RNA
atgtggacatag

SEQ ID NO: 13165 - RNA, 402 nt, synthetic construct
  misc_feature 1..402: note = source = /note="Description of Artificial Sequence: Synthetic coding sequence"
  source 1..402: mol_type = other RNA
atggcaatggtctctgcgatgtcttgggtgttgtatctctggatctcggcatgcgctatgttgttgtgtcacggatcacttcagcacacttttcagcagcaccacctgcataggcccgaaggcggtacctgcgaagtaattgccgcacatcgctgctgcaacaaaaaccgcatcgaggagcggagccagaccgtgaaatgctcctgcctgccaggtaaggtcgctggcaccacaaggaatcggccgtcttgtgtagatgctagtatagtgattggtaagtggtggtgcgagatggagccatgtctggaaggagaggaatgtaagacactgccggataatagtgggtggatgtgtgccacaggaaataagattaagacgaccagaattcacccgagaacttag

SEQ ID NO: 13166 - RNA, 600 nt, synthetic construct
  misc_feature 1..600: note = source = /note="Description of Artificial Sequence: Synthetic coding sequence"
  source 1..600: mol_type = other RNA
atgacaatgcgacataactggacaccagatctatcacctctgtgggtcctgctactttgtgcccacgtggtcactctgctggtaagagctacccccgtctctcagaccactactgcagctactgcaagtgtgagatctaccaaagacccttgcccaagtcaacccccggtgttcccagcagcgaagcaatgccctgctctggaggtgacctggcccgaggtggaagttcctctgaacggaacgctttctctttcctgtgtggcctgttctagattccccaacttttctatcttatattggcttggcaatggcagcttcatcgagcacttaccaggcagactgtgggaagggagcactagcagagaacgcggctctacaggcacacagctgtgtaaggcattagtactggaacagttaacacccgctctacactcgaccaactttagttgcgtactggtggaccccgagcaggtggtccagcggcacgtcgtgctggctcagctctgggttcgatcgcctagaagggggttgcaggaacaagaagaattgtgtttccatatgtggggtggaaaggggggcctttgtcagtctagcttgtag

SEQ ID NO: 13167 - RNA, 1044 nt, synthetic construct
  misc_feature 1..1044: note = source = /note="Description of Artificial Sequence: Synthetic coding sequence"
  source 1..1044: mol_type = other RNA
atgggggttgtgcagtacggagacaacccagctacgcatttcaacttgaagacccatacgaattcacgcgatctaaagacagctatcgaaaagatcacgcaaaggggtggcctaagcaatgtgggccgagctataagctttgtgactaagaattttttttcgaaggccaacggtaataggagtggggcccctaatgttgtggtagtgatggtggatggatggccaaccgacaaagtagaagaggcaagccgactggctcgagagtctgggatcaatatctttttcatcactatcgagggggccgccgaaaacgagaaacagtatgttgtcgagcccaattttgccaacaaggccgtgtgccgcactaacgggttttattccctccatgttcaatcctggttcggcctccataagaccctgcagcctttggtcaaacgggtgtgcgatacagatcgcttggcttgttccaaaacctgtttgaattctgccgatatcgggttcgtgatcgacggcagttctagcgttgggacagggaactttagaaccgtcttgcagtttgtgacgaacttgaccaaagaatttgaaatatctgacacagacacccggataggagcagtccagtatacgtacgaacaacgattggagttcggatttgacaaatattcctctaagccagacatactcaatgctataaagagggtgggttactggtctggtggcacctccaccggcgctgctatcaatttcgctttagagcagctatttaagaaatccaaacccaataaaaggaaactgatgatcctgatcaccgacggaagatcttacgatgacgttagaatccccgcgatggccgcacatctgaagggagttattacctatgcaataggcgtggcctgggccgctcaggaggaactcgaggttattgccacacatcctgcacgcgatcattcttttttcgtcgacgagttcgataacctgcaccagtacgtccctagaattatccagaacatctgcactgaattcaattctcagcctagaaactag

SEQ ID NO: 13168 - RNA, 27 nt, synthetic construct
  misc_feature 1..27: note = source = /note="Description of Artificial Sequence: Synthetic coding sequence"
  source 1..27: mol_type = other RNA
atgcaaggaacaccagggggcggctag

SEQ ID NO: 13169 - RNA, 369 nt, synthetic construct
  misc_feature 1..369: note = source = /note="Description of Artificial Sequence: Synthetic coding sequence"
  source 1..369: mol_type = other RNA
atgttgtatcagacaatcaactctcttaagaccaaaaatcctaagttaaaaattctgctgtcaattggcgggtacctctttggaagtaaaggttttcatccaatggtggacagtagtacttctcgtttagaatttataaatagtatcatcctgtttctgaggaatcataattttgacggactggacgtgagctggatttatccagatcagaaggagaacacgcattttaccgtgctgatccatgagctggccgaggctttccaaaaagatttcacgaagtccactaaagaacgcttattactcactgccggggtcagcgccggacgacagatgatcgataactcctaccaggtagaaaaactggcctag

SEQ ID NO: 13170 - RNA, 309 nt, synthetic construct
  misc_feature 1..309: note = source = /note="Description of Artificial Sequence: Synthetic coding sequence"
  source 1..309: mol_type = other RNA
atgcgggttagtggggtgttacggctgctggctctgatcttcgcaatcgttaccacctggatgttcatcagatcttacatgagcttttctatgaaaaccattcgcctaccaagatggcttgccgccagccccaccaaagaaattcaggtgaaaaaatataagtgcggactgataaaaccatgcccagcaaattattttgcctttaagatctgctctggagccgctaatgtggtgggaccaacaatgtgctttgaggatcggatgatcatgagcccagtaaaaaataacgtggggagaggcctgaattag

SEQ ID NO: 13171 - RNA, 660 nt, synthetic construct
  misc_feature 1..660: note = source = /note="Description of Artificial Sequence: Synthetic coding sequence"
  source 1..660: mol_type = other RNA
atgaaactcctgctgtgggcctgcatcgtatgcgtcgcttttgcccggaaaagacgctttccctttattggtgaggatgataacgacgacggccaccctttgcaccccagcctgaatatcccctacggcatacgcaatctgccccctcccttgtactatcggcccgtaaacacagtacccagctatccgggtaacacttacaccgacaccgggctgccctcctatccctggattctgacttcaccaggatttccctacgtttatcacatccgcggtttcccgcttgccacacagttgaatgtgcctcctctgcctcccagaggctttcctttcgtccccccctcgagattttttagcgccgccgctgcccccgccgccccaccaattgcagccgagcccgcagccgctgcgcccctgacagctaccccggttgccgctgaacccgccgccggggcccctgtcgccgccgagcccgccgctgaagcccctgtgggcgccgaaccggctgccgaagcacctgtggcagccgaaccagccgcagaggccccagtgggagtggaacccgctgctgaggagccctccccagcagaaccagcaacagctaagcccgctgctccagagcctcaccctagccctagcctcgaacaagcaaaccaatag

SEQ ID NO: 13172 - RNA, 1869 nt, synthetic construct
  misc_feature 1..1869: note = source = /note="Description of Artificial Sequence: Synthetic coding sequence"
  source 1..1869: mol_type = other RNA
atgggcaagagtgaaggtccagtggggatggtggagtccgcagggcgggcgggacaaaagcggccaggtttcctcgagggcggtctgttgttgctattgttattagtcacagctgcgctggtcgccctcggagtactgtacgccgatcgccgaggtaaacagctgccgagactagcaagtcggctttgttttctgcaagaagagcgcacctttgtcaaacgcaagccaagaggtattcccgaggctcaagaggtttcagaggtctgcactactcctggctgtgtaattgccgcagccaggattttgcagaatatggatcccactaccgaaccatgtgatgatttttatcagttcgcttgtggagggtggttacgccgacacgtaattcccgaaacaaattccagatattcaatcttcgatgttcttcgcgatgaattagaagtaattttgaaagccgttctcgagaatagcactgctaaggcaacagttccccaagaagagagacatgacgtaattgctctgtaccatagaatgggccttgaagaactccaaagtcagttcggcttaaaaggttttaattggacattgttcatccagaccgtgttgagctcagttaaaatcaagctgctgcccgatgaggaggtggtggtatatggtatcccgtacctgcaaaacctggagaacatcatcgatacctatagtgccaggaccattcaaaattatctggtgtggcggctcgtgctcgacaggatcgggtccctgagccagagattcaaagacactcgtgtcaattacaggaaggcactgtttgggacaatggtggaagaggtacggtggcgggaatgcgtgggctatgtcaacagcaatatggagaacgcagtaggtagcctgtatgttagagaggcgttcccaggtgacagtaagagcatggttagggagctgatcgacaaggtgcgtaccgtctttgtggagaccttagatgagcttggctggatggacgaggagtctaagaagaaggcacaggagaaagctatgtccataagggaacagatcggtcacccagattatatactggaggaaatgaacagacgtctagacgaggagtattctaatctaaacttttcagaggacttgtactttgaaaactccttacaaaacctcaaagtgggcgcccagcgcagcctacgcaagctgcgggaaaaagtcgatcccaacctgtggatcattggtgctgcagtagtaaatgcgttctactcaccaaaccgcaaccagatcgttttccccgctggtatactacagccccctttcttcagtaaagagcagccacaggctctcaatttcggtggcattggcatggtgattggacacgagattacccatggtttcgacgacaatggccgtaatttcgacaagaatgggaacatgatggactggtggtcgaactttagcacgcagcactttcgggaacagtctgaatgtatgatttaccagtacggaaattactcctgggatctcgcggatgaacaaaatgtgaacggcttcaacacactgggtgaaaacattgcagataatggcggggtacgccaggcttacaaggcttacctgaagtggatggccgagggcggaaaagaccaacagctgcctggattagacctgacacacgaacagctttttttcataaactatgcccaagtttggtgtggttcttataggcctgagtttgccatccagtcaataaaaactgacgtgcacagcccacttaaatatcgcgtgcttgggagtctgcagaatctggctgcatttgcagataccttccattgcgctagagggacccccatgcatcccaaggagcgttgtagagtctggtag

SEQ ID NO: 13173 - RNA, 168 nt, synthetic construct
  misc_feature 1..168: note = source = /note="Description of Artificial Sequence: Synthetic coding sequence"
  source 1..168: mol_type = other RNA
atggggccagaagccctatcatcccttctcctactcctattagtcgcctccggtgacgcagatatgaaaggccattttgatcccgcaaagtgtaggtacgctctgggcatgcaggaccgcacaatacctgattccgacatcagcgctagttcctcctggtctgattag

SEQ ID NO: 13174 - RNA, 156 nt, synthetic construct
  misc_feature 1..156: note = source = /note="Description of Artificial Sequence: Synthetic coding sequence"
  source 1..156: mol_type = other RNA
atgggaccagaagcactgtcatctctcttgttgttgttgctcgtggcctctggagatgcggatatgaaaggccacttcgaccctgctaagtgccggtacgccctgggcatgcaagatcgaaccattcccgacagcgatatctcagcctcttcatag

SEQ ID NO: 13175 - RNA, 1620 nt, synthetic construct
  misc_feature 1..1620: note = source = /note="Description of Artificial Sequence: Synthetic coding sequence"
  source 1..1620: mol_type = other RNA
atgtctgagcctcaggaaaaaaaactgagcgagaatacggacttcctcgctcccggcgtgtcctcttttaccgattcgaatcagcaggaatccatcacaaagcgcgaggaaaaccaggagcagccacggaattactctcaccaccaacttaacagaagctccaaacactcccaaggcctccgtgaccagggcaaccaggaacaggatcctaatatctcgaacggagaggaggaggaagagaaagagccaggcgaagtgggcactcacaatgacaatcaagagcggaagaccgagctaccgcgggaacacgccaattcaaagcaagaagaggacaatacccagtcagacgacatacttgaggaaagtgaccaacccacacaagtctcaaaaatgcaagaggacgagttcgaccagggcaaccaggaacaggaagataactctaatgctgaaatggaggaagagaacgcaagcaacgttaacaagcacatccaagagacggaatggcagtcacaagaaggaaagacaggattggaggccatttcaaaccacaaagaaacagaggagaagacggtgtccgaggctctgttaatggaacctaccgatgacggcaacaccacacccaggaaccacggtgtagacgacgacggcgacgacgacggcgacgacggcgggacagacggcccaagacattccgccagcgacgattatttcataccctctcaagcatttctggaagccgaacgtgctcaaagcatagcataccacctcaaaattgaggaacagagagagaaagtccacgagaatgaaaacatagggaccacggaaccgggcgaacaccaagaggccaaaaaggccgaaaactcaagtaatgaggaggagacatctagcgaaggtaatatgcgagttcacgcagtggactcctgtatgtcgttccagtgtaaacggggacacatttgcaaggcggatcaacagggcaaaccacattgtgtgtgtcaggatcctgtgacatgtccaccaactaaacccctcgatcaggtttgtggcactgacaaccagacatatgccagcagctgccatctcttcgctactaagtgccgcctggaaggaaccaaaaagggacaccagcttcaactggactactttggggcctgcaagagcataccgacctgcactgactttgaagtgattcagtttccattgcggatgcgcgattggctcaaaaatatcctgatgcaactctatgaagctaactccgagcacgcaggttacctcaacgaaaaacaacgcaataaggtaaaaaagatttatcttgatgaaaagcgcctcctggcaggcgaccaccccatcgaccttctcctgcgagatttcaaaaaaaattatcatatgtatgtgtacccagtacactggcagttcagtgaacttgaccagcatcctatggacagggtcttaacgcactctgagctggccccactacgtgcgtccctcgtccccatggagcactgcataacccggttttttgaagaatgcgatcccaataaagataaacacattacactgaaagagtggggacattgctttgggatcaaagaggaagatatcgacgaaaatttacttttctag

SEQ ID NO: 13176 - RNA, 591 nt, synthetic construct
  misc_feature 1..591: note = source = /note="Description of Artificial Sequence: Synthetic coding sequence"
  source 1..591: mol_type = other RNA
atgccacacctcgcatcactcttcaccgcaagctcgagatgctgtccccatccactcagaccagagggtagcggagccatgggacctgaagccttaagctccctgcttctcttgctgttagtcgctagcggtgacgccgacatgaaaggtcactttgacccagctaagtgtcgttacgccctaggtatgcaagacagaaccatccctgattccgacatcagcgcttccagtagttggagcgacagcacggccgcacggcacagccggctggagagtagcgatggcgacggagcctggtgcccggctgggtcggtgttccctaaagaagaagaatacctacaggtggacctgcaacggctgcacctggtcgctctggtggggacacagggtcgtcacgctgggggcctaggcaaagaattttcgcgttcctacaggctgagatactcccgcgacggtagaagatggatgggttggaaagacaggtggggccaagaagtcatctctggcaacgaggacccagagggagttgtgctgaaagatctcgggcccccgatggtcgcaagactggtaaggttctacccccgcgcatag

SEQ ID NO: 13177 - RNA, 162 nt, synthetic construct
  misc_feature 1..162: note = source = /note="Description of Artificial Sequence: Synthetic coding sequence"
  source 1..162: mol_type = other RNA
atgttgccgtgccttgctttactcctccttatggaactgagcgtatgcacagtcgcgggcgatggaggagaagagcaaacattgtctaccgaagcggagacatgggtcattgtcgccttggaggtgctgcttgggaggggttctgatgagggaagaggatag

SEQ ID NO: 13178 - RNA, 126 nt, synthetic construct
  misc_feature 1..126: note = source = /note="Description of Artificial Sequence: Synthetic coding sequence"
  source 1..126: mol_type = other RNA
atgggccctgaagctctttcctccctgctactgctgttactcgttgcctccggcgacgctgacatgaaaggacactttgacccagccaaatgtaggtacgccctcggaatgcaggatagaacatag

SEQ ID NO: 13179 - RNA, 222 nt, synthetic construct
  misc_feature 1..222: note = source = /note="Description of Artificial Sequence: Synthetic coding sequence"
  source 1..222: mol_type = other RNA
atgggccctgaagcattgagttctttactattgctgctcctagttgcaagtggcgacgccgatatgaagggacattttgaccccgctaaatgccggtacgcccttggcatgcaagatcgaacgattcccgatagcgatatctctgccagctctagttggtccgactccaccgccgcaagacatagtcggctcgaatctagcgacggcgatggtgcgtggtag

SEQ ID NO: 13180 - RNA, 369 nt, synthetic construct
  misc_feature 1..369: note = source = /note="Description of Artificial Sequence: Synthetic coding sequence"
  source 1..369: mol_type = other RNA
atgggtcccgaagctctgagctcattgctactgctgctactcgttgcgtcaggtgatgccgatatgaaggggcactttgaccccgctaagtgccgttacgcactgggcatgcaggaccgcacaattccggatagcgatatttccgcctcctcatcctggagcgacagcaccgccgctagacactcgaggttggaatctagtgatggggatggggcgtggtgtccggccggcagtgttttccctaaagaagaagagtacctccaagtcgacctgcagagactccaccttgtggctttagtcggaacacaaggtcggcatgcaggaggcctgggaaaagagtttagtcgcagctatcgtctgcgttattag

SEQ ID NO: 13181 - RNA, 483 nt, synthetic construct
  misc_feature 1..483: note = source = /note="Description of Artificial Sequence: Synthetic coding sequence"
  source 1..483: mol_type = other RNA
atgggacccgaagctctctcttcattgctgttgctgctgctcgtcgctagtggagatgctgacatgaaaggacactttgaccccgcaaaatgtaggtacgccctgggaatgcaggaccgcacgatcccggatagcgatattagcgcatcttcaagctggtccgactccacggcagcccgacattctcgtcttgagagcagcgatggcgacggcgcttggtgtcctgccgggagtgtattccctaaggaagaggaatacctccaggtggatctgcagcgtctgcatctggtagctttagtcggtactcaaggacgccatgccgggggtctgggaaaggaattcagccggagttataggctgcgttattcgagagacggccgtagatggatggggtggaaagatcgttggggtcaggaagtcatttccggcaacgaagatcccgaaggcgtagtgttgaaagatcttggtcctcctatggtctag

SEQ ID NO: 13182 - RNA, 540 nt, synthetic construct
  misc_feature 1..540: note = source = /note="Description of Artificial Sequence: Synthetic coding sequence"
  source 1..540: mol_type = other RNA
atggggagttccggcctcctaagtctcctagtgttatttgtcttgctggctaatgtgcagggacccggcctgactgactggctgttcccgagaagatgtcccaaaataagagaagagtgcgagttccaagaacgagacgtgtgcaccaaggatagacaatgtcaggataacaaaaagtgttgtgtctttagttgcggcaaaaagtgccttgacttaaaacaagacgtgtgtgaaatgccaaaggaaactgggccctgtctggcgtattttcttcactggtggtacgataagaaagacaacacctgcagtatgtttgtttatggtgggtgtcagggtaataacaacaatttccagtccaaggcgaattgtctgaacacgtgtaagaacaagcagccctgtcctaagattaaagttgaatgcgaggtggaagagattgaccaatgcaccaagccacgcgattgtcccgaaaatatgaagtgttgtcccttctcccgcggcaagaagtgtttagatttccgcaaggcttccctttccacatag

SEQ ID NO: 13183 - RNA, 438 nt, synthetic construct
  misc_feature 1..438: note = source = /note="Description of Artificial Sequence: Synthetic coding sequence"
  source 1..438: mol_type = other RNA
atgttatttaggaaccgattcctgcttctgctcgcccttgccgcacttctggctttcgtgtcactttccctacagtttttccacttgatccccgtgtcgactcccaagaatggaatgtccagtaaatccaggaagagaattatgccggaccccgtgactgagcctcccgtgaccgaccccgtttatgaagctctgctctactgtaatattccctctgtagctgagagaagtatggaaggacatgccccacaccactttaagctggtttccgtccacgtattcatccgccacggtgacaggtaccctctgtatgtgattcccaagactaaacgccctgaaatagattgtacactggtggccaaccgaaagccctatcaccctaaactcgaagctttcataagccatatgtcaaaaggcagcggagcatccttcgaatag

SEQ ID NO: 13184 - RNA, 399 nt, synthetic construct
  misc_feature 1..399: note = source = /note="Description of Artificial Sequence: Synthetic coding sequence"
  source 1..399: mol_type = other RNA
atggggcctgaggctcttagtagtctcctactgctgctactagtcgctagcggagacgcggacatgaagggacatttcgaccccgcaaagtgtaggtacgcccttggaatgcaagaccgaactattccagattctgatatctctgcatcttcctcgtggtcagatagcactgccgccaggcatagcagactggagtcctcagacggcgacggagcctggtgcccagccggtagcgtgtttccgaaggaggaggaatatctgcaagtcgatctgcaacgcctgcatctagtggcattagtaggtactcagggcagacacgcagggggactcggaaaagaattctcccggtcctataggctccgctatagcagggacggccgaaggtggatgggatggtag

SEQ ID NO: 13185 - RNA, 306 nt, synthetic construct
  misc_feature 1..306: note = source = /note="Description of Artificial Sequence: Synthetic coding sequence"
  source 1..306: mol_type = other RNA
atggggcccgaggccttatcatcacttcttttactcctcttagttgcctctggtgacgcagacatgaaaggtcattttgacccagctaaatgccgatacgcacttggaatgcaggacagaaccataccagacagcgacatcagcgcatcatcctcttggtctgactcaaccgcagcaaggcactctcgtctggaaagtagcgacggcgatggagcctggtgtcccgccggaagcgtgttcccaaaggaggaggagtacctgcaagtcgaccttcagcgccttcatctcgtggcactcgtgggttag

SEQ ID NO: 13186 - RNA, 393 nt, synthetic construct
  misc_feature 1..393: note = source = /note="Description of Artificial Sequence: Synthetic coding sequence"
  source 1..393: mol_type = other RNA
atgctggccccactttttctgtgctgtttgagaaatctgttcaggaagcttatttccttccagcccccccagttaggtcgaactaacatgcattatagcaagctcccacgcaccgccatcgaaacagaatttaagcaaaacgtcgggccccccccgaaggatctcactgccgaagtctattttccctccattaagtcccgctctcacctccccgccgtgttttataatcagtatttcaagcatcccaaatgcgtcggagagtatgggccgaaaaacggagctgaacgccagatcgaggaacgcaaggttctgcccaccacgatgatgttttccatgcttgccgattgtgtattgaagtctacccccatccccattctgggtgtcgcaatgtag

SEQ ID NO: 13187 - RNA, 420 nt, synthetic construct
  misc_feature 1..420: note = source = /note="Description of Artificial Sequence: Synthetic coding sequence"
  source 1..420: mol_type = other RNA
atgcccgcgatcgccgtcctcgctgccgctgctgccgcatggtgtttccttcaggtagaaagccgtcatttagacgctctcgcaggcggagccgggccaaaccacggcaattttttggacaacgaccaatggctctccaccgtttcgcagtacgaccgggacaagtactggaaccgatttcgcgatgatgattactttaggaactggaacccaaacaagccctttgaccaggccctcgatccctctaaagatccctgtctgaaggtgaagtgctccccccacaaagtgtgcgtgactcaggactaccagaccgcgctctgcgtctcccggaaacacctgttacctaggcaaaagaagggtaatgtcgcccagaagcactgggtaggtccatctaatctggtgaagtgtaaaccttgctag

SEQ ID NO: 13188 - RNA, 510 nt, synthetic construct
  misc_feature 1..510: note = source = /note="Description of Artificial Sequence: Synthetic coding sequence"
  source 1..510: mol_type = other RNA
atgcgtctcctgattctcacctgtctggtggctgtcgcccttgcccggcccaaactgccactgcgctaccctgaaagactgcagaacccaagtgagtcgtcagagcccattccactggaaagccgcgaagagtacatgaacggtatgaatagacagaggaacattctgcgcgaaaaacagacagatgagatcaaaaattgcgtggtcgccgaacctgagaaaatggagagtagcatcagctccagcagcgaagaacagttttgcagactgaacgagtacaatcaactgcagctccaggccgctcatgcgcaggagcagattcgcaggatgaacgaaaatagccatgtgcaggttccttttcaacagctaaaccaactggccgcctacccttatgcagtgtggtactaccctcaaattatgcaatacgtaccctttccacccttcagtgacatatctaacccgaccgctcacgaaaactatgaaaaaaacaacgtgatgcttcagtggtag

SEQ ID NO: 13189 - RNA, 921 nt, synthetic construct
  misc_feature 1..921: note = source = /note="Description of Artificial Sequence: Synthetic coding sequence"
  source 1..921: mol_type = other RNA
atgaagaaggacgagccacccctggactttcccgataccctggaaggctttgagtacgccttcaacgagaagggccaactcagacacataaagacaggcgagccattcgtgttcaactatagggaagatctgcatagatggaaccaaaagagatatgaggcactcggtgagattatcacgaaatacgtgtacgagctgctagagaaagactgcaacctaaagaaagtgtccattcctgaaggttatggagtgatagtcctcaaccccaacgaaaactatattgaagtcgagaagccaaagatccacgtacagagttcctctgattcaagcgacgaacccgccgaaaagagggaacggaaagacaaggtaagtaaagaaacaaagaagagacgcgatttttacgaaaaatatcggaacccacaacgcgagaaagagatgatgcaattatacatccgtgaaaacggctctccggaggagcatgccatttacgtgtgggaccactttatagctcaagccgccgcggagaatgtatttttcgtagcccacagttacggaggcctggcatttgtcgagctgatgatacagcgagaagctgacgtgaagaacaaagttactgcagtcgccttgaccgactctgtccataatgtctggcaccaggaagccggcaaaacaattagggaatggatgcgcgagaactgctgtaattgggttagttcctccgagcctcttgacacctccgttgagagcatgctgccagactgccccagggtttccgctggcacagatagacatgaactgacgtcctggaagagttttccttcaattttcaagttctttacagaggccagtgaggcgaagacaagcagtttaaaacccgccgtgacccgacgttctcatcgtattaagcatgaagaattgtag

SEQ ID NO: 13190 - RNA, 2862 nt, synthetic construct
  misc_feature 1..2862: note = source = /note="Description of Artificial Sequence: Synthetic coding sequence"
  source 1..2862: mol_type = other RNA
tgacaactgtgctggctccctttgctagcccctcttttattactccgaccccccggagttcagagtgctggacctattagagcattcgtggttccacactcacacatggacgtgggctgggtgtacactgtgcaggagtctatgagagcttacgccgccaacgtctatacttctgtcgtagaggaactggctcgcggccagcagcggaggtttattgccgtggagcaagagttctttcgtctgtggtgggatggcgttgcgtcagaccagcagaaataccaagtgcggcagttactggaggagggaagacttgaatttgtcatcggaggccaagtcatgcatgacgaagcagtaacccatttggacgaccagatacttcaattgacagaagggcatggattcctatacgagacgttcgggatacgacctcaatttagttggcatgtcgatccgtttggtgcgtccgcaaccacaccaacattgttcgcccttgctggctttaacgctcacttggggtccagaatagactacgatctgaaagccgccatgcaggaagccagggggttacagtttgtgtggagaggcagcccttccttaagtgaaagacaagagatatttactcacatcatggaccagtattcttactgcaccccatcacacattcctttctcgaaccgctctggattttattggaacggggtggccgtgttcccgaagccacctcaagacggagtgtacccgaatatgtccgagcctgttacccctgccaatattaatctatatgccgaggctctagtcgctaacgttaagcagagggcggcctggttccgtacccctcacgtgctgtggccatggggctgcgataagcagtttttcaacgcaagcgtgcagttcgcaaacatggaccctctgctggatcatattaactcccacgctgccgagctcggcgtttctgtgcagtacgccacccttggggactacttccgagccttacacgccctgaacgttacatggcgggtgcgagaccatcacgatttcttgccttattccactgagccttttcaggcttggactggcttttacacctcccggtcctctctgaaggggttagccagacgtgcgtctgcactgctgtatgccggggaaagtatgttcaccagatatctctggccggccccaagaggacaccttgaccctacttgggcactccaacagctccagcagctgagatgggctgttagcgaggtacagcatcacgatgccattaccggaacagaatccccaaaggttcgagacatgtacgctacccacctcgccagcggaatgctggggatgcggaaactgatggcttctattgtactggacgagctgcagccgcaggcccccatggctgcatcttccgacgccggtcccgcagggcatttcgcaagcgtgtacaatcccttggcatggaccgttaccacaattgttaccttaaccgtgggatttccaggcgtcagggtgacagatgaggccggtcatcccgtcccttctcagattcaaaattctaccgagactccgtccgcttacgacttgctgattctcacgaccatccccggcttgtcttatcggcactacaatattagaccaactgctggtgcccaggaaggcacacaggagccggctgccactgttgcaagtactctgcagttcggcaggcggctgagacgtagaacgagtcatgccggtcggtacctcgtacccgtggcaaacgactgctacatagttctcctcgatcaagacacaaacttgatgcattccatatgggagaggcagtccaaccggacagttcgcgtaactcaagaattcttagaataccacgtgaatggtgacgtgaagcaaggcccaattagtgataattaccttttcaccccaggcaaggccgctgtccccgcatgggaggcagttgagatggagatcgttgcaggccaattagttacagaaatacgacagtatttttacaggaacatgaccgctcaaaactatacgtacgcaatccggagccgactgacacacgtcccgcagggacatgacggcgagctactctgccaccgcatcgaacaagaatatcaggcagggcccctggagcttaatcgcgaagcggtcttacggacatcaacaaatctgaatagccagcaagtgatttatagcgacaataacggataccagatgcagcgtcgaccgtacgtctcttacgtgaataattctattgcccgcaattactaccctatggtgcaatccgcatttatggaggacggaaaatcaaggctggtgcttctctccgagcgcgcccacgggatcagttctcagggcaacgggcaggtggaagttatgctccaccggaggctgtggaataacttcgattgggacctcggctataaccttaccctcaacgacacgagtgtggtgcacccagtcctttggttgctcttaggctcatggagtctgacaaccgctctgcgccagaggagtgctctagctctgcagcaccgccctgtcgtgttattcggagatctcgcgggaactgccccaaaactacctggccctcaacagcaggaggccgtaacgcttcctccaaacctccacctccagatactcagtatacctggatggaggtattcctccaatcacacggagcattcccaaaatctgcggaagggacacagaggcgaagcccaagctgatctccgacgagtgctgttgcggctatatcatctctatgaagtcggagaggatccagttctatctcaacccgttactgtgaatctggaggtgaattttcctactcctattcagaccataagccagggtagcaagccttag

SEQ ID NO: 13191 - RNA, 459 nt, synthetic construct
  misc_feature 1..459: note = source = /note="Description of Artificial Sequence: Synthetic coding sequence"
  source 1..459: mol_type = other RNA
atgcgattcaagactactgccaaggatggacttctgctctggaggggggattcaccaatgagaccaaactccgattttatatctctgggcctgcgggatggagctctcgtgttttcttataatctcggatcaggagttgcatctattatggttaatggaagttttaatgacggtagatggcacagggtaaaagctgttcgtgatggtcagagcgggaaaattactgtggacgattacggggctcgcacaggcaaaagtccggggatgatgcgacagctgaacattaatggtgctctctacgttgggggcatgaaagaaattgcgctgcatacaaaccgacaatatatgagaggcctggtgggatgtataagccatttcacattgagtacggactaccatattagtctagttgaagatgccgtggacggtaagaatatcaacacttgcggtgccaaatag

SEQ ID NO: 13192 - RNA, 1701 nt, synthetic construct
  misc_feature 1..1701: note = source = /note="Description of Artificial Sequence: Synthetic coding sequence"
  source 1..1701: mol_type = other RNA
atggattttttacttgcacttgttttggtctcatctctatatcttcaggccgctgcagaattcgacgggagatggcccagacaaattgtttcgtctattggcttgtgcaggtatggaggcagaattgactgttgctggggttgggctcgacagtcctggggacagtgtcagcccgtgtgccagccacggtgcaaacatggagagtgtatcggtcccaataagtgcaaatgtcacccaggctatgccgggaaaacttgtaaccaggacgaacatattcctgcccccctggaccaaggcagtgagcagccactgtttcaacccctggatcaccaagccacatccctgccctcccgggacttgaacgaatgcggcctcaaacccaggccttgcaaacatcgctgcatgaacacctacggatcttacaaatgctactgcctgaatggctacatgctgatgcccgatgggagttgttcctctgctctcacatgctcgatggcaaattgtcaatacgggtgcgatgtcgtcaaaggccaaataaggtgccaatgtcctagccccggacttcaattggccccagatggcaggacctgcgtcgacgttgatgagtgcgccactggccgcgcctcctgcccccgcttccggcagtgtgtgaacaccttcgggagctacatctgcaagtgccacaaagggttcgatctcatgtatatcggaggaaaataccaatgccatgatatagatgaatgctcccttggccagtatcagtgtagctcgtttgcacggtgctataatataagaggatcatataaatgcaaatgtaaggaaggctatcagggcgatgggctgacctgcgtctacataccgaaagttatgatcgagccatccgggccgatacacgtgcctaagggcaacggaaccatcctgaaaggcgacacagggaataataattggatacctgacgtaggaagtacatggtggcctcctaagactccgtacatacctccaatcatcaccaaccgccccaccagcaaaccaacaacccgaccaactcctaaaccaacccccatacccacccctcctcccccgccacccctgccaactgaacttcgtacgcccctgcctcctaccacaccagagcggcctactactggactaacaaccatcgccccagctgcatctactcctcctggtggcattactgtagataaccgcgtgcagaccgatcctcaaaagccgagaggggacgttttctctgtgttggtgcactcttgtaacttcgaccacggactgtgcggatggatacgagagaaagacaatgaccttcactgggagccaatcagggatccagccggtgggcagtacctgacagtgtccgctgctaaagcaccaggaggaaaggctgctcggctggttcttcccctcggtagactgatgcattcaggcgacttgtgtttaagctttcggcataaggtaactgggctgcattctggaacgctccaggtgttcgtgagaaagcacggcgctcatggggcagctctctggggccgcaacggtggccacggctggaggcaaacacaaatcacacttcggggagcagacatcaagagtgtggttttcaagggagagaagcggcgaggccatacaggcgaaatcggtttggatgatgtgagcctgaaaaaaggacattgttctgaggagagatag

SEQ ID NO: 13193 - RNA, 213 nt, synthetic construct
  misc_feature 1..213: note = source = /note="Description of Artificial Sequence: Synthetic coding sequence"
  source 1..213: mol_type = other RNA
atgggtccagaagccttatcctccctccttttgctgcttttagttgcatccggtgacgctgacatgaaggggcacttcgatccagccaaatgccgctacgccctgggtatgcaggatcgcacgatacccgatagtgacatttcagcaagttcctcttggagtgatagcacggcagcaagacattccagattggagagttctgacggcgattag

SEQ ID NO: 13194 - RNA, 237 nt, synthetic construct
  misc_feature 1..237: note = source = /note="Description of Artificial Sequence: Synthetic coding sequence"
  source 1..237: mol_type = other RNA
atgggtcccgaagcattgtcttccctactgctgctgctgctggttgcctccggagatgctgatatgaagggccattttgaccccgccaagtgtaggtacgctttggggatgcaagaccgcactattccagactccgacatctctgcttcttcctcatggtctgactctaccgccgcccgacattcaagacttgagagcagcgatggcgacggcgcatggtgtcctgccggttcttag

SEQ ID NO: 13195 - RNA, 339 nt, synthetic construct
  misc_feature 1..339: note = source = /note="Description of Artificial Sequence: Synthetic coding sequence"
  source 1..339: mol_type = other RNA
atgagattcaaaactaccgccaaggatggtctgttattgtggagaggcgattcaccaatgcgtcccaacagtgactttatttcactgggtctccgcgacggcgccctcgtgttttcttacaatctggggagtggagtagctagcattatggttaatggatcatttaacgacggccgttggcatcgggtgaaggcagttcgcgacggtcagtctggcaagataacagtcgacgattacggtgcccgcacaggcaaatctccaggcatgatgagacagttaaacatcaatggggcattatacgtaggcggcatgaaagaaatcgctcttcatacaaactag

SEQ ID NO: 13196 - RNA, 2685 nt, synthetic construct
  misc_feature 1..2685: note = source = /note="Description of Artificial Sequence: Synthetic coding sequence"
  source 1..2685: mol_type = other RNA
atgtccttgcctcgctgctgtccccatcccctccggccagagggttctggagccatgggacctgaggcactcagcagcctactgctcttgttattggtggcgagtggagatgccgacatgaaaggtcacttcgacccagccaagtgcaggtacgctcttggcatgcaggatcgcacgattcccgactctgatatttctgcttcatcctcctggagcgactcaactgcggccagacattccagactcgaaagctcagatggtgacggggcgtggtgtccagccggcagcgtattcccaaaggaggaagagtacctgcaagttgatttgcagcgccttcacttggtggcccttgtaggtacccagggtagacatgccggagggcttggtaaagaattttccagatcttacagactgcgctacagccgggatggcagaagatggatgggctggaaagaccggtggggacaggaagtgatttccggaaatgaggatccagagggtgtagtgctaaaagacctcggacctccaatggtggctcggcttgtgaggttctaccctcgcgctgaccgggttatgagtgtgtgcctgcgcgtcgagctttatggctgcctgtggagagatggtttattgtcttacactgctcccgttggccaaaccatgtacttatcggaagcagtgtacttaaatgattccacgtatgacggacatacagtcgggggcttgcaatatggggggctgggacagctggccgatggcgtagtggggttggacgactttcggaaatctcaggagctgagagtttggcctgggtatgactatgttggctggagcaaccattcatttagctctgggtacgtcgaaatggaatttgagtttgaccgcctcagagctttccaggccatgcaggtgcactgcaacaacatgcacactctcggcgcgcgccttccagggggagtcgaatgtagatttcgccggggtccggccatggcttgggaaggcgagcccatgcgacacaacctgggcggcaatttaggtgatccacgggctcgggccgttagtgtgcctttggggggtcgtgtggcccgcttccttcaatgtaggttcctctttgctggcccctggctgctgttcagcgagatctcctttatttcagacgtagtcaataacagctcaccagctttgggaggcacattcccccccgcaccttggtggcctccaggtcccccccctaccaatttctccagcttggaattggaaccccggggccagcagcccgtggctaaggctgagggttcaccgacagcaattctgatcggatgtcttgtggccataattttgctgctattgctgatcatagcactcatgctgtggcgcctgcactggcgccgactgctttctaaagctgagcgaagagttctcgaggaagaattaacggtacatttatccgtgcctggcgacaccattctcatcaacaatagaccaggacccagagaacctccaccctaccaagaaccaaggccacgcggaaaccccccgcattcggctccgtgcgtccccaatggatccgcttactccggagactatatggagcctgagaaaccaggcgcaccactcctacccccccccccccagaactctgtcccacactacgcagaggcagacatcgtgacgctgcagggtgtcactggtggtaacacatacgccgttcccgcattgccgcctggagctgtgggggatggaccacccagggtggatttccctcgaagtcggcttcggttcaaagagaagctgggggagggacagtttggcgaggtccatctgtgcgaagtggattcacctcaggacttggtttctttggatttcccactgaacgttaggaaagggcacccactgctggtggctgtaaaaattctgagacccgatgcaactaagaatgctcgtaacgatttcttgaaagaagttaagatcatgtctcgattaaaggaccctaatattattcgacttcttggcgtctgcgttcaggatgaccccttatgcatgataaccgactacatggagaatggcgatctgaaccaatttctgagtgctcatcagctggaggataaggcagccgagggtgcgccaggagatggccaagccgcacagggaccgaccatctcctaccctatgttgctacacgtagccgcccagatcgcgtccgggatgagatacttggctacactgaactttgtgcatagggaccttgccacacgtaattgccttgttggggagaatttcaccatcaagatagccgactttgggatgtctagaaatctgtacgctggcgattattaccgggtccagggccgcgccgtgctcccaatccggtggatggcttgggaatgtatactgatgggaaaatttaccacagcctccgacgtatgggcttttggtgtgacactgtgggaagtcttgatgctatgcagagcacaaccttttggccaattgacggatgaacaggtgattgagaacgccggagaattttttagagatcaggggcgccaggtctatctttcccgtccgcccgcatgcccacaagggctgtatgaactgatgctccggtgctggtctagagaaagcgaacagagaccccccttcagccagctgcacagattcctggccgaggacgctctgaacacggtttag

SEQ ID NO: 13197 - RNA, 384 nt, synthetic construct
  misc_feature 1..384: note = source = /note="Description of Artificial Sequence: Synthetic coding sequence"
  source 1..384: mol_type = other RNA
atgggcccagaagcactgtcctctcttctgttgctgttgctggttgcctccggggatgccgacatgaaaggacatttcgatccagctaaatgccgttatgcactgggcatgcaagaccggaccatccccgattcggacatcagcgcctccagttcctggtccgattcaacagccgcccgccattcccgcctagaaagctctgatggggacggggcctggtgccctgcgggttccgtgtttccgaaggaagaggaatatttgcaggtagatttacagagactgcatttggtggcactggtaggaacccaaggtcggcacgctggaggactgggaaaggaattctctagaagctatcgcctgcgctactctcgcgacggcagatag

SEQ ID NO: 13198 - RNA, 1113 nt, synthetic construct
  misc_feature 1..1113: note = source = /note="Description of Artificial Sequence: Synthetic coding sequence"
  source 1..1113: mol_type = other RNA
atgaaaaaagacgaaccaccgttagattttcctgataccttggaagggtttgagtacgctttcaacgaaaaaggccagttgcgccacatcaagacaggtgagccattcgtctttaactatagggaggacctccatagatggaaccagaagcgctatgaagctcttggagagatcattacaaagtatgtctacgagctcctggagaaagattgtaacctcaaaaaagtatcaatccctgtcgacgcaacagaatcagaacccaagtcgttcatctttatgagtgaagatgcattaaccaatccccagaagctgatggtgttaattcacggctcaggggtggttcgggccggccagtgggctcgacgtttgatcatcaatgaagatctggactccgggacgcagattccctttattaagcgcgcagtggccgagggatacggagtgatagtgctgaatccaaatgagaactatatagaggtcgaaaagcccaagatccacgtccagtcttcatcggatagtagcgatgaacctgctgagaagcgcgagcgcaaggacaaagtctccaaggaaactaagaagagaagggacttctatgaaaagtacagaaatccccaacgtgaaaaagagatgatgcagctatacatcagggaaaatggtagtcctgaggagcatgccatctacgtctgggaccacttcatcgcacaagccgccgccgagaatgtattcttcgtggcacatagttatggaggcctagccttcgtggaattaatgatacaaagagaggctgatgtcaaaaacaaagtgacggctgtggcactgactgattcagtacataacgtttggcaccaagaggcaggcaagactatccgagagtggatgagagaaaattgttgcaattgggtatcctccagcgaacccctcgatacttcagttgaatctatgttacctgactgccctagagtctctgctgggaccgaccgacatgagctgacttcttggaaaagctttccctccatttttaaattctttaccgaagcgagtgaagccaagaccagttccttgaaaccagccgtcacccggaggtcacacaggatcaagcatgaggagctgtag

SEQ ID NO: 13199 - RNA, 435 nt, synthetic construct
  misc_feature 1..435: note = source = /note="Description of Artificial Sequence: Synthetic coding sequence"
  source 1..435: mol_type = other RNA
atgaaaaccggactgttctttttatgcctcttaggaactgcggcggctatccccactaacgcccggcttctgtccgatcattccaagccgaccgcagaaacagtagcccccgataataccgcaatccccagccttcgtgctgaagccgaagagaatgaaaaagaaacagccgtgagcaccgaagatgattcgcaccacaaggccgagaaaagttcagtactaaagagcaaagaagagtcccacgaacagagcgccgagcagggaaaatcatcaagtcaggaactggggttaaaagaccaagaagattcagatggccaccttagcgttaatctggagtacgccccaactgaaggcacactggacatcaaggaagacatgtccgagcctcaggaaaaaaaattaagcgagaataccgattttctagcacctggatag

SEQ ID NO: 13200 - RNA, 1341 nt, synthetic construct
  misc_feature 1..1341: note = source = /note="Description of Artificial Sequence: Synthetic coding sequence"
  source 1..1341: mol_type = other RNA
ctgaccttgcactctttaacttgttatgaagatcttgtgacctttttacaacagtccatccatcagtttgaagtggggccttacggatgcatcctgctgacactgtcagctatcctctctagatccactgaactgatcagacaggacttcgacgtaccaacatcccatttaattggcgcacacggctactgcacacaagagctggtcaaccttctactaactggcaaggctgtctctaacgtgttcaatgatgtggtggagctagacagcggagatgggaacataacactactccgagggatcgctgcccggagcgacataggctttttgtctctattcgaacactacaatatgtgccaggtaggctgcttcttaaaaacccccaggttccccatttgggttgtgtgctctgagagtcacttcagcatcttgttctctttgcagcccggcctgctgcgggactggcgcacagagcgactgttcgacctttattattatgacggcttggctaaccagcaagaacagattaggttaaccatcgatacgactcagaccatttctgaagacacagataatgacctcgtgccaccgctggaactatgtatcagaactaatatcggatccgctctcggcttcaaatacccagttggcaataaccaaacagcagtgcaagataacgtaaaggttagtctggcctttggcctatcgattgcgacgctggcgcagtctgttggtcacatctccggcgcccacttgaacccggcagttactttggggctgctcctttcatgccagatttccatcttcagagccttgatgtacatcatcgctcagtgcgttggagctattgtggccacggccatcctgtccggcataacatcctctctgacaggcaacagccttggcagaaatgatctggctgacggtgttaactcaggacagggactcggcattgaaatcataggcaccctgcagctggtactgtgtgtgctggccactacagacagaaggagacgcgatcttgggggctcagccccactcgctattggtttgagtgtcgcattgggacatttgctggcgatcgattacaccggttgcggaattaaccccgctagatctttcggaagcgctgtaattactcacaactttagcaaccactggatattttgggtggggccctttatcggtggtgccctggctgtcttgatatacgactttatattggccccgcgaagtagtgacctgaccgatagagtgaaggtgtggacaagcgggcaggtcgaagagtatgatctcgatgccgacgacatcaactctagagtggaaatgaagcccaagtag

SEQ ID NO: 13201 - RNA, 81 nt, synthetic construct
  misc_feature 1..81: note = source = /note="Description of Artificial Sequence: Synthetic coding sequence"
  source 1..81: mol_type = other RNA
atgaaactcttactgtgggcttgtattgtgtgtgtggccttcgctcgaaaaaatgccggacttggctttctgtggttgtag

SEQ ID NO: 13202 - RNA, 348 nt, synthetic construct
  misc_feature 1..348: note = source = /note="Description of Artificial Sequence: Synthetic coding sequence"
  source 1..348: mol_type = other RNA
atgggtcccgaagccctttctagtctgctgttactgctgttagtggcctccggagatgccgatatgaaaggacattttgatccagctaaatgtcgctatgcccttggaatgcaggaccgaacaattcccgattcagacatctctgccagctcctcttggagcgattcaaccgcggctaggcactctcgtctggagtcctcagacggtgatggtgcatggtgccccgcaggatctgtttttcccaaggaagaggagtacctccaggtggatttgcagaggctgcacctggttgccctggtcggaactcagggtcgtcacgcagggggacttggaaaggaattctcctag

SEQ ID NO: 13203 - RNA, 165 nt, synthetic construct
  misc_feature 1..165: note = source = /note="Description of Artificial Sequence: Synthetic coding sequence"
  source 1..165: mol_type = other RNA
atgtatatccccctagatcccgactacaacgctgattgtcccaacgtcactgcccctgtgtgtgcgagcaacggtcatacctttcagaacgaatgcttcttttgtgtggaacagagagaatttcactataggattaaattcgaaaagtacggaaaatgcgattag

SEQ ID NO: 13204 - RNA, 351 nt, synthetic construct
  misc_feature 1..351: note = source = /note="Description of Artificial Sequence: Synthetic coding sequence"
  source 1..351: mol_type = other RNA
atggttctgctgcattggtgcctactctggctgctgttcccactttcatcacgtacgcagaagcttccaacacgagacgaagaactgtttcaaatgcagatcagagataaggccttctttcacgactctagcgtcatccccgacggcgccgaaatctcctcttacctgtttagggacacacctaaaagatacttcttcgtagtggaagaggacaatacacctttgtcagttaccgtgacaccctgcgatgcccccttggaatggaaattatctctgcaggagctgccagaggatcgttcgggagaaggctcaggagatcttgaacctctggaacaacagaagcaacagtag

SEQ ID NO: 13205 - RNA, 432 nt, synthetic construct
  misc_feature 1..432: note = source = /note="Description of Artificial Sequence: Synthetic coding sequence"
  source 1..432: mol_type = other RNA
atggggcctgaagcactctcctccttacttctgctgctcctggtcgcatccggcgatgcagatatgaaaggccattttgatccagccaagtgtaggtacgcactgggcatgcaggatagaactatcccagattctgatattagcgccagctcatcctggtcggactccactgcagcaaggcactcacggctagaatcttcagacggcgacggagcatggtgtcctgctgggagtgtttttccaaaagaagaagaatatttacaagtcgaccttcaaagactgcatctcgtggcactggtgggaacccagggtcgccacgccggtggattaggcaaagaattctctaggagctacaggctgaggtattcacgagacggaaggaggtggatggggtggaaagacagatggggacaggaggttatcagcggttag

SEQ ID NO: 13206 - RNA, 747 nt, synthetic construct
  misc_feature 1..747: note = source = /note="Description of Artificial Sequence: Synthetic coding sequence"
  source 1..747: mol_type = other RNA
atggagctgctgcaagtgaccatcctgttccttctgccgagcatttgcagcagcaacagcaccggagtgttagaagcagctaataacagcctggttgtcactaccaccaagccctccatcacaaccccaaatactgaatccctgcaaaagaacgttgtaacgcccactacaggtactaccccaaagggtactatcactaacgagttactgaagatgtccctaatgagcaccgctaccttcctgacctctaaagatgaaggcttgaaagccaccactactgatgtacgcaaaaacgatagcattatatcaaatgtcaccgttacttcggttacacttccaaacgcagtaagcacgctacaaagttcaaaacccaaaagctccgtgctccaacccgatgcttctccatctaaaacaggcacactcactagcatcccagtgaccattccagagaataccagccaatcacaagttatcggcaccgaaggtggtaagaatgcctctactagtgcaacctcacggtcctactcctccatcatcctgcccgttgtgatcgctcttatcgttatcacactgtcagtgttcgtgctggtcggattgtatcgaatgtgctggaaggctgaccctgggacaccagaaaacggtaatgaccaacctcaatcagataaggagagtgtgaagttactgactgtcaaaactatttcacatgaatcaggcgaacattccgcccaaggcaaaactaaaaactag

SEQ ID NO: 13207 - RNA, 363 nt, synthetic construct
  misc_feature 1..363: note = source = /note="Description of Artificial Sequence: Synthetic coding sequence"
  source 1..363: mol_type = other RNA
atgaagaccggactatttttcctctgtctgctgggaaccgcagctgctattcctaccaacgccagattgctgtccgatcattccaaaccgaccgcagaaacggtggcccctgacaatacggcaatcccatcgctcagggccgaggcagaagaaaatgaaaaggaaactgctgtctctaccgaagatgattctcaccataaggcagagaaaagctctgtgctgaagtctaaagaggaatcccatgaacaaagcgccgaacaaggaaagtcttcatctcaagaattaggcttgaaggaccaggaagactcagacggccacctgtcagtaaacttggaatatgcaccaaccgaaggaaccctgtag

SEQ ID NO: 13208 - RNA, 339 nt, synthetic construct
  misc_feature 1..339: note = source = /note="Description of Artificial Sequence: Synthetic coding sequence"
  source 1..339: mol_type = other RNA
atgggtcccgaagccctgtcaagcctgttacttctcctgctcgttgccagtggcgacgctgatatgaaaggacattttgaccctgcaaaatgccgctatgcacttggtatgcaggacagaacgattccagatagcgacatctctgcctcctcctcatggtcggattctactgcagcgaggcattcccgactggaaagcagtgatggcgacggggcttggtgtcccgccggatccgtattcccaaaggaagaagaatacctgcaagttgatctgcagagattgcatctggtggctctcgtggggactcaaggaaggcatgctgggggacttgggaaatag

SEQ ID NO: 13209 - RNA, 513 nt, synthetic construct
  misc_feature 1..513: note = source = /note="Description of Artificial Sequence: Synthetic coding sequence"
  source 1..513: mol_type = other RNA
atgggcccagaggcactcagcagtttactgctcctgctgctggttgcatctggggacgcggatatgaaagggcactttgaccccgcgaaatgccgttacgcactaggcatgcaagatcgtactatacctgatagcgacataagcgcaagctctagttggtctgactcaactgctgctcgccactctagactggagtcatccgatggtgacggtgcctggtgtcctgctggctctgtattcccaaaggaagaagagtacctccaggttgatctccaacggttgcacctcgtggcactggtcggcacccagggtcgccatgccggcggactaggtaaggagtttagcagatcttatagattgcggtacagccgggacgggcggaggtggatgggctggaaagaccgttggggccaggaggttatcagtggaaatgaggacccagagggagttgtgctaaaggacttaggcccacccatggtggctcgactggtccgcttttatccaagagcatag

SEQ ID NO: 13210 - RNA, 417 nt, synthetic construct
  misc_feature 1..417: note = source = /note="Description of Artificial Sequence: Synthetic coding sequence"
  source 1..417: mol_type = other RNA
atgggtcctgaggcactttccagcttactactgctcttgctcgtggcctccggagacgcagacatgaaaggccatttcgaccccgctaaatgtcgttacgccctcgggatgcaagacaggacaattcccgattcggacatcagtgctagttctagttggtcggattcaacggccgcacggcattctagattggaatctagcgacggagacggtgcctggtgccctgcgggctctgtttttccgaaggaagaggaatatctccaagttgacctccagaggctgcatctcgtggctctggtgggtactcagggcagacatgcaggtggattagggaaagagttctcccgctcatacaggctgagatactctcgggatggacgaaggtggatgggatggaaagataggtgggggcagtag

SEQ ID NO: 13211 - RNA, 285 nt, synthetic construct
  misc_feature 1..285: note = source = /note="Description of Artificial Sequence: Synthetic coding sequence"
  source 1..285: mol_type = other RNA
atggctgcattcccacataagattattttttttctggtttgctcaactttgacccacgttgcattctccgggattttcaataagagagacttcacacgatggcctaaacctagatgtaaaatgtatattccccttgatccagattacaacgccgattgcccaaacgttacagctcctgtgtgcgctagtaatggacacaccttccaaaacgagtgtttcttctgcgtggaacagcgtgaatttcattaccgcatcaagtttgagaagtacgggaagtgtgattag

SEQ ID NO: 13212 - RNA, 156 nt, synthetic construct
  misc_feature 1..156: note = source = /note="Description of Artificial Sequence: Synthetic coding sequence"
  source 1..156: mol_type = other RNA
atgggcccagaggccttgtccagcttactgctccttctgctcgtggcctcaggcgatgcagatatgaaaggacactttgaccccgccaaatgccgttacgctttagggatgcaggaccgcaccattccagattccgacatcagtgcctcgtcgtag

SEQ ID NO: 13213 - RNA, 2760 nt, synthetic construct
  misc_feature 1..2760: note = source = /note="Description of Artificial Sequence: Synthetic coding sequence"
  source 1..2760: mol_type = other RNA
atgggcccagaagctcttagcagcctactgctgctgctgctggtcgcatcaggcgacgccgatatgaagggtcattttgaccccgcaaaatgcagatacgccctcggtatgcaggaccgtactattcccgactctgatattagcgcttcatcttcgtggagtgattctaccgcagcgaggcactccaggctcgaaagttctgatggagacggcgcctggtgccccgctgggagtgtgttcccaaaggaagaagagtacttacaggttgacctccaacgccttcacttggtggcacttgtgggcacccagggccgtcacgcaggtggactgggcaaagaattcagcagatcttacagactcaggtatagccgggatgggaggcggtggatggggtggaaagacagatggggccaggaggtgatttccggcaatgaagatccagagggggtggttcttaaagacctgggacccccaatggtggctagattggtacgtttctacccgcgcgcagacagggtcatgagcgtttgtctccgcgtggagctctatggatgcctgtggagagacggtcttctatcttatacggcgccagtcggccagacgatgtacctcagcgaggctgtttacctcaatgacagtacttacgatggtcatacagttgggggcctacaatatggagggcttggacagttagccgatggcgttgtgggcctggatgatttccggaagagtcaagagttacgggtatggccgggctacgattacgtcgggtggtctaatcatagtttcagctctggatatgtggagatggagttcgagtttgacaggttgagggcctttcaggccatgcaggtacactgcaacaatatgcacaccttaggtgccagactaccgggaggcgtggagtgccggtttcgacgcggtcctgccatggcttgggagggtgaaccaatgagacacaatctcggtggaaatctgggagacccgagggccagagccgtgtcagttccattaggtggcagggtagccaggtttctgcagtgccgatttttattcgccggtccttggttgctattctcagaaatcagtttcatctctgatgtggtcaacaattcttctccagcactgggaggaactttcccccccgcaccttggtggcccccgggcccacctcctacaaacttcagttccctggaactggagccccggggtcagcagcccgtcgccaaggccgaggggtctccgaccgctatcctgattggttgcctagtcgccattatcctactgctcctgctcataatcgccctgatgctttggcggctacattggcggcgactgttaagtaaggcagaacgcagagtgctcgaggaagagttgaccgtgcatctctccgtgccaggcgatacaatccttattaataatcgaccgggaccccgtgaacccccaccataccaagaacccaggcctaggggcaacccacctcactctgccccatgtgtccctaacggctccgccctgttgctctccaacccagcttataggttactgctagcaacatacgcaaggcccccacgcggtcccggccctcctacccccgcttgggctaaaccgacaaacacccaggcctactccggtgattacatggaacctgagaaacccggagcgccacttttgccccctccccctcagaactctgtcccacattatgccgaagcggacatcgtaactctccagggagtgaccggggggaatacatacgccgtcccagctctcccccccggcgccgtgggtgacggcccgcccagagtggatttcccaagatcacggcttcgtttcaaagaaaaactgggagagggacaattcggggaagtgcatctctgcgaggtggacagtccacaggatctagttagcctcgacttcccattaaatgttaggaaaggccatccattgttagttgccgtgaagatactgcgcccagatgcaaccaaaaacgcctcttttagtctgttttccaggaatgacttcctgaaggaggtgaagatcatgagcaggttaaaggaccctaacataataaggctgctcggagtctgcgtccaggacgatcctctgtgtatgattactgactacatggaaaacggggatctgaatcagttccttagcgcccatcagttagaagacaaggccgctgaaggtgcccccggggacggtcaagctgcccaaggccctacaatctcatatcccatgcttcttcatgttgcagctcaaattgcctcaggtatgcggtatcttgctacactaaactttgttcatcgggatcttgccactcggaactgtctggtgggagaaaatttcacaatcaaaatcgcggatttcggtatgagtcggaatctctacgctggcgattactatcgggtccagggaagggccgtactacctatcagatggatggcatgggagtgcattctgatggggaagtttactaccgcatcggacgtgtgggctttcggggtaaccctctgggaggtcttaatgttgtgtcgggcccagccttttggacagctgacagacgagcaagtgatcgagaacgccggtgagtttttcagagatcaggggagacaggtttacctctcccggcctccagcatgtccgcaagggctttatgagttaatgttgagatgttggagtcgggagtccgaacagcgacccccgtttagtcagcttcaccgcttcttagccgaggatgctctgaatacagtatag

SEQ ID NO: 13214 - RNA, 318 nt, synthetic construct
  misc_feature 1..318: note = source = /note="Description of Artificial Sequence: Synthetic coding sequence"
  source 1..318: mol_type = other RNA
atgggtgtctcaaagttagacattttgtacagaaggcttctcctcaccaagctgttcatacgcggatgggggcgcccagaagatttgaagaggctgtttgaattcaggaaaatgataggtaacagggaaagatgccaaaacctagtgtcctcggattaccccgtacatatagataagatcgaggagcaatcagattgtaagattcttgacggccattttgtgagtccaatggctcactacgtacccgacattatgcccatcgaaagcgtgatcgccaggttccagtttattgtgcctaaggaatggaacagtaagtag

SEQ ID NO: 13215 - RNA, 126 nt, synthetic construct
  misc_feature 1..126: note = source = /note="Description of Artificial Sequence: Synthetic coding sequence"
  source 1..126: mol_type = other RNA
atgaaattaagtggtatgtttctactccttagccttgcactcttttgttttcttaccggcgtcttttcacaggggggtcaggtcgactgcggtgagtttcaagatcccaaagtgtactgtacctag

SEQ ID NO: 13216 - RNA, 459 nt, synthetic construct
  misc_feature 1..459: note = source = /note="Description of Artificial Sequence: Synthetic coding sequence"
  source 1..459: mol_type = other RNA
atgcgttttaagacaacagccaaggatggactgctgttgtggaggggagattctcctatgcggcctaacagcgacttcatatctctcgggctaagggacggggcattagtcttttcatacaatcttgggtcaggtgtagccagcattatggtgaacggaagcttcaatgatggccgctggcatagagtcaaagctgtgagggatggccagtcggggaaaataacagttgacgattacggtgctcgcacaggcaaatctccaggcatgatgcggcagctgaatatcaacggggctttgtatgtcggaggaatgaaggagatcgccctgcacacgaaccgccagtacatgagaggcctggtgggctgcatatcacactttacactttccacggattaccacatatcattggtggaagatgcagtggacggaaagaatattaacacctgtggtgctaagtag

SEQ ID NO: 13217 - RNA, 1611 nt, synthetic construct
  misc_feature 1..1611: note = source = /note="Description of Artificial Sequence: Synthetic coding sequence"
  source 1..1611: mol_type = other RNA
atggactttttgctcgcgctggtgcttgtgagctccctgtacctgcaggcggctgccgaattcgacggcagatggccacggcagatcgtgtcttcaattggcctgtgtcggtacggtggcagaatcgattgttgctggggatgggcccggcaatcatggggccagtgccaaccagtttgtcaaccacggtgtaaacatggggaatgtatcggacccaacaaatgcaagtgccacccaggatacgccggaaagacatgcaaccaagaccttaacgaatgtggactaaaaccaagaccttgtaaacatcgctgcatgaacacttatggtagctacaagtgctactgtcttaatggctacatgttgatgcctgacggctcttgttccagcgcactgacctgttcaatggccaattgccagtacggatgcgacgtggtgaaaggccagatcagatgccaatgcccaagtccggggttgcagttagcccccgatggcaggacatgcgttgacgtcgacgaatgcgccaccggaagagccagttgcccaagattcaggcagtgcgtgaatacatttggatcttacatctgtaagtgccataaaggtttcgatttaatgtatataggaggcaaatatcagtgtcacgacattgacgagtgctcactcggccaatatcagtgctctagttttgctagatgctataatatacgtggatcctataaatgtaaatgtaaagaaggttatcagggagatggacttacctgcgtatatattcccaaggtgatgatcgagccgagcggccccatccacgtcccaaaaggtaacggtaccattctgaagggagatactggaaacaataattggatccccgatgttggaagcacctggtggccgcctaaaaccccctacattccaccgattataacaaaccgccctacctcaaagcctactaccagacccacccctaaaccaactccgatccccacgccacctcctcctcctcctctgccaaccgaactgcgaactcctctcccgcccactactcccgagaggccaacaaccggcctcacaactattgcgccagcagcgtcaaccccacccggtggaataactgtggacaacagagtccagacggaccctcagaagccacgcggcgatgtgttcagcgttctagtgcacagctgtaatttcgaccatggcctgtgtggatggattagagagaaagataacgacctgcactgggaacccatacgagaccctgctgggggtcagtacctcacagtgtctgcagccaaagcaccaggaggcaaggcagcgcggctggtcttgcctctgggcaggctcatgcactccggggacctgtgtcttagctttcgtcacaaagttacaggacttcactccggcaccctacaggtcttcgtcagaaagcacggggcccatggagctgcactgtggggcagaaatgggggacatggctggcggcaaactcaaatcaccctgcgaggcgccgatattaaatcagtagtgtttaagggagaaaagagaaggggccatacaggagaaatcggactcgatgatgtatctctgaaaaaagggcattgttcggaagagcggtag

SEQ ID NO: 13218 - RNA, 288 nt, synthetic construct
  misc_feature 1..288: note = source = /note="Description of Artificial Sequence: Synthetic coding sequence"
  source 1..288: mol_type = other RNA
atgctttttcgaaatcgctttctgctgctcctcgccttagctgcccttctagcatttgtgagcctttccttgcaattcttccacctcatacctgtcagcactcccaaaaacggaatgtcctctaaatcccgtaaaagaatcatgcctgatccagtcactgaacctcctgttaccgaccccgtctacgaggcccttctatactgtaatatcccctctgtggccgagaggtcaatggagggccatgctccacaccactttaaactggtaagcgtccacgtgttcatctag

SEQ ID NO: 13219 - RNA, 213 nt, synthetic construct
  misc_feature 1..213: note = source = /note="Description of Artificial Sequence: Synthetic coding sequence"
  source 1..213: mol_type = other RNA
atggcctctgatctcattcgtacaattttggccgtggctctgatttcaaaacttggaaccgcagtagatgcggagctcatgcctagcggtgcgatcctgcagaacaaaagagaaaacctgcccagagtttgtcatgcactagcatttctcgggatggcaagatgtcaagatctgttcttggtcagactgcaaggatggaaacttggtacctag

SEQ ID NO: 13220 - RNA, 417 nt, synthetic construct
  misc_feature 1..417: note = source = /note="Description of Artificial Sequence: Synthetic coding sequence"
  source 1..417: mol_type = other RNA
atgggtccagaagctctgagcagcttgttgttattgctactcgtcgcctccggggacgcagatatgaagggacatttcgacccagccaagtgtcgatacgcccttgggatgcaggacaggactatcccagacagcgacattagtgcgtcctcaagttggtctgatagtaccgctgcccgccacagtcgtctcgagagctcagacggggatggagcttggtgtccggccggaagcgtcttcccgaaagaggaggagtatttacaggttgatttgcagcgattacacctggttgccctggttggaactcagggtcgtcatgccggcgggttgggcaaagagtttagtcgcagctaccgcttgagatattcaagggacggtcgtagatggatgggatggaaggatcggtggggtcagtag

SEQ ID NO: 13221 - RNA, 219 nt, synthetic construct
  misc_feature 1..219: note = source = /note="Description of Artificial Sequence: Synthetic coding sequence"
  source 1..219: mol_type = other RNA
atggctgtctcggtcctccggctgacagtagttctgggactcctggtgctctttctgacctgctacgccgacgataagccggacaagcctgatgataaacctgatgacagtggcaaagacccaaagcctgattttccaaagtttttaagcctgctgggtactgaaataatcgagaatgcagtggagttcatccttcgttcgatgtcaagatctacctag

SEQ ID NO: 13222 - RNA, 438 nt, synthetic construct
  misc_feature 1..438: note = source = /note="Description of Artificial Sequence: Synthetic coding sequence"
  source 1..438: mol_type = other RNA
atggtactattgcactggtgcctcctgtggttactgttccctttgtcgagccgcacacagaagttacctactagagatgaagaactgttccagatgcagatcagagataaggcgtttttccacgactcaagcgttatcccggacggagctgagatcagctcttatctgttccgagatacacccaagcggtacttcttcgtcgttgaagaggataacacaccactatcggtgactgtcaccccctgcgatgcccccctggaatggaaactgagtctgcaagaacttcccgaggacagatctggcgaaggaagcggtgacttagaacccctggaacaacagaaacagcagatcattaacgaagaaggaactgaacttttcagctataaaggtaatgacgtcgagtatttcatttccagttcatctccttctggtttgtag

SEQ ID NO: 13223 - RNA, 258 nt, synthetic construct
  misc_feature 1..258: note = source = /note="Description of Artificial Sequence: Synthetic coding sequence"
  source 1..258: mol_type = other RNA
atgggcccagaggccttgtctagcctgcttctcctactactagtggctagcggtgacgccgatatgaagggccactttgatccagctaaatgccgatacgcattgggaatgcaggaccgtacaatcccggacagcgatatctcagcctcatcatcctggagcgattcaacagctgcacgtcactctcgtctcgagtcatcggatggcgatggtgcttggtgtcctgcaggaagcgtctttcccaaagaagaggaatag

SEQ ID NO: 13224 - RNA, 1410 nt, synthetic construct
  misc_feature 1..1410: note = source = /note="Description of Artificial Sequence: Synthetic coding sequence"
  source 1..1410: mol_type = other RNA
atgctgaaagtacactatcctaagtttggagtctccgaagactgcctatacctgaatatttatgcccccgctcacgcagatactggatccaaattgccggtgttggtatggtttcctgggggagctttcaagacgggaagcgcgtcaatctttgacgggtctgccctcgccgcatacgaggatgtacttgtagttgttgtgcaatacagactcggaatttttgggtttttcactacgtgggatcaacatgcacccgggaactgggcgttcaaggaccaggtcgcagccctgtcctgggtgcaaaaaaacatagagtttttcggtggcgatccatccagtgtgacaattttcggagaatccgccggagctatctctgtttcttctctgattctttcacctatggcaaagggcttgttccataaggccatcatggagtctggtgttgccatcatcccatacctcgaggcgcacgactatgagaagagcgaggaccttcaagtggtcgctcatttttgtggtaataacgcatctgactctgaagccctcctcagatgtctgcgaactaagcctagcaaagagcttctgaccttgtcacagaaaaccaaatccttcacaagagtcgtggatggggcttttttccctaatgaaccccttgatctgctgtcccagaaggcgtttaaagcaatccccagcatcataggtgttaataatcacgagtgcggattcttactgcctatgaaagaagcacctgaaatcttgtccggctccaataagtctctggccttgcatcttatccagaatatcctgcatatccctccacagtaccttcatctcgtggcaaatgagtacttccatgacaaacactccttaaccgaaattcgggatagtctgctcgacttgctgggggatgtgttctttgtggtccctgccttaatcacagcccgttaccaccgcgatgctggcgcccctgtttacttctatgaattcaggcaccggcctcagtgcttcgaagatacgaagccagcgtttgtgaaagccgatcatgcagacgaggtgcgctttgtttttggcggggcctttcttaaaggcgacattgtcatgtttgagggcgccaccgaagaggagaaactgctgagtagaaaaatgatgaagtactgggccacattcgctaggacaggcaaccccaatggaaatgacctcagtctctggcctgcatataacctgaccgaacaatacctgcagcttgatttgaatatgtccctgggccagaggctcaaagaacccagagtggatttttggacatcgacaatccccctgattctgagcgccagtgacatgttgcatagtcctctaagttcccttacctttctgtccctgcttcagccattcttcttcttttgtgcgccttag

SEQ ID NO: 13225 - RNA, 393 nt, synthetic construct
  misc_feature 1..393: note = source = /note="Description of Artificial Sequence: Synthetic coding sequence"
  source 1..393: mol_type = other RNA
atgctgcccttcttgtttttcagcacactcttctcaagcatctttaccgaggcacaaaaacagtactgggtgtgcaattcttccgacgccagtatttcatacacttactgcggacgcgacttaaaacagctgtacttcaatttatatatcaccgtgaacactatgaatctgcccaagagaaaggaggtcatatgtagaggatcagacgacgattacagcttctgtagggcactcaaaggcgaaacagtgaacactactatttctttctcttttaaaggaatcaagttctccaaggggaagtacaagtgcgtggtggaggctatttcaggtagccctgaagagatgcttttctgcctggaatttgtgattttacaccagccgaactccaattag

SEQ ID NO: 13226 - RNA, 318 nt, synthetic construct
  misc_feature 1..318: note = source = /note="Description of Artificial Sequence: Synthetic coding sequence"
  source 1..318: mol_type = other RNA
atgaagtgcacagctagagagtggctgagggtgacaacagtgctgtttatggcaagagccattcccgcgatggtggtgcccaacgcaaccctgttagaaaaactgcttgaaaaatacatggatgaggacggagagtggtggatagcaaagcagagggggaaacgcgccattacagataatgacatgcagagcattctcgatctacacaacaagcttcgttcacaggtatacccaacagcatcgaatatggagtatatgacatgggacgtagaattggaacggtccgctgagtcctgggccgagtcgtgtctttggtag

SEQ ID NO: 13227 - RNA, 567 nt, synthetic construct
  misc_feature 1..567: note = source = /note="Description of Artificial Sequence: Synthetic coding sequence"
  source 1..567: mol_type = other RNA
atgacaatggtctgccatcgaccagagggattagagcagctcgaagcgcagacgaattttaccaaaagagaactgcaggtgctttaccgcggctttaagaacgagtgcccttccggagttgtaaatgaggatacattcaagcagatatatgcgcagttctttcctcacggagatgcatcaacatatgcccactatctatttaacgcattcgacaccacacagacaggatcagtgaaattcgaggattttgtgactgccctgagtattttgttacgaggtaccgtacatgagaaactacggtggacgtttaacttgtatgatattaataaagacggctatattaataaggaggaaatgatggacattgtcaaagctatttatgatatgatggggaagtatacgtatcccgttctgaaggaggacacccctcgacagcacgtcgacgtattcttccagaaaatggacaaaaataaagacggcatagtgaccctggacgagtttttagaaagttgtcaagaagatgacaatataatgaggtccttgcagttgttccaaaacgtgatgtag

SEQ ID NO: 13228 - RNA, 1275 nt, synthetic construct
  misc_feature 1..1275: note = source = /note="Description of Artificial Sequence: Synthetic coding sequence"
  source 1..1275: mol_type = other RNA
atgccgccctttctgatcacattatttttgttccattcatgctgtctgagggctaatggacatctccgtgaaggaatgaccttactaaagacagagttcgccctgcatttgtatcagtctgtcgccgcatgtcgcaacgaaactaacttcgtaatttctccagcaggcgtctccttgcccttagaaatcctgcaatttggtgccgaaggctctactggccagcaactggctgatgccctcgggtatacagtgcacgataaacgagtaaaagacttcttgcacgccgtgtatgcaactttacctacatcatcccagggcacagaaatggagctggcttgcagcttatttgtgcaggttggcaccccactgagcccgtgttttgtggagcatgtgtcatggtgggcaaacagctctttagaacctgccgatttaagtgagcctaattctaccgcaatacagacttccgaaggggcttcacgggaaacggcgggggggggcccatctgagggaccaggtggatggccttgggagcaggtgtccgccgccttcgcgcagctcgttctggtctctactatgtctttccaaggcacatggagaaaacgctttagctcaacggacacgcagatcctacctttcacttgtgcctacggcctcgtgttacaagtgcctatgatgcatcagacaactgaagttaactatggccagttccaggacaccgcaggccaccaggtcggagtccttgaattgccctatctcggctctgctgtatcccttttccttgttttgccccgcgataaagacactcctttgagtcacatagagccccatctgactgctagtaccattcacctctggacgacatccctgcgacgcgcccggatggacgtgttcctgcccaggtttcggatccaaaatcagttcaatctcaagagcatcctgaacagctggggggttaccgatctatttgacccactgaaagctaatctgaagggaatttcgggccaggatgggttttacgtgtcagaggcaatccacaaagccaagatcgaggtgttggaggaagggacgaaagcctcaggcgccacggcgctgcttctgctcaagagatcccgaattccaatatttaaggcggatcggccattcatttatttcctgcgggaaccaaacaccgggattactgtcttctttgaccgtatacagatcatctaccaatgcctatccagcaataaaggctcctttgttcactatcccctgaagaacaaacattctttttag

SEQ ID NO: 13229 - RNA, 1815 nt, synthetic construct
  misc_feature 1..1815: note = source = /note="Description of Artificial Sequence: Synthetic coding sequence"
  source 1..1815: mol_type = other RNA
atggccgtactggtttgtccggctagctgccacggcctaaaagaattccgcatacgacgaggaatgtggcgattgtgcctggtttattacttctaccctgcaagcagcacactctacgtcctgaggatagatgtcctaaactataccagtaaggacgaaggaccctctgccgaaggcccccagagaaatacccgtctaggatggatccagggcaaacaggtgaccgtgttaggcagccccgtcccagttaacgtgtttttgggagtgcctttcgccgctccccctttaggatccctgaggttcactaacccccagcccgcgtccccttgggataatcttcgggaggctactagttatccaaacctgtgtctacagaattctgagtggctgttgcttgatcagcatatgctgaaagtgcactaccccaaattcggagtgtccgaagactgcttatatctcaatatctacgctcccgcccacgcagataccggtagcaagctcccagtcctagtttggtttccaggcggggcttttaagaccggctcagcctccatctttgatggttctgcactcgcagcttatgaggatgtcctggtcgtggtagtgcaatatagactcggtatttttggatttttcactacatgggatcagcacgccccggggaattgggccttcaaggatcaggtcgccgccctatcttgggtccaaaagaacatagagtttttcggcggagatcccagctcagttacgatatttggcgagtccgctggtgcaattagcgtctcctctctgattctatcccccatggccaaaggtctttttcacaaggccattatggagtctggtgtcgcaattatcccctatctagaagcccatgactacgaaaaatctgaggatctgcaagtggtagcacacttttgcggaaacaacgccagtgactcggaggcccttctgcgatgtcttagaacgaagcctagtaaagaactgctaaccctctcccagaagaccaaatcgtttacacgcgtcgtggacggcgccttctttccaaatgagcccctggatctgctctcgcaaaaggcctttaaggctataccatctattataggagtaaacaatcacgaatgtgggttcctattgcctatgaaggaggcccctgaaatcctgtctggctccaacaaatctttagcactgcatctgatccagaatatccttcatattcccccccagtatctgcatctagtggctaatgaatactttcacgacaagcactcactcacagagatcagggactctttacttgacctactgggcgacgttttttttgttgtgccagctttgattactgcaagataccatcgcgatgccggcgcaccagtatatttttacgaattccggcataggccccaatgctttgaggacaccaagcctgctttcgtcaaagccgatcacgcagatgaggtccggttcgtgttcggaggcgccttccttaagggcgatatcgtgatgtttgagggcgcgacggaagaggagaaactgctttctcggaagatgatgaagtactgggctaccttcgcccgtaccgggaaccccaatggaaatgacctgtcactctggcctgcatataacctaacggaacagtatctgcaattagacctaaacatgtctttggggcaaagactgaaggagccacgtgtcgacttctggacttctactatccccctcattctcagcgcctcagatatgctacattcccccctttcaagcctcacctttttgtctctgctgcagccttttttctttttttgtgccccctag

SEQ ID NO: 13230 - RNA, 939 nt, synthetic construct
  misc_feature 1..939: note = source = /note="Description of Artificial Sequence: Synthetic coding sequence"
  source 1..939: mol_type = other RNA
atgaatatttggggtcagatttggccaaaagcagtgtacctagtctgcaattactctcccaagggaaactggtggggccacgccccttacaaacatggacgaccatgtagcgcttgccctccctcatttggcggcggttgtcgtgagaacctgtgttacaaggaggggtccgacaggtactaccctcctcgcgaggaggaaaccaacgaaattgagaggcaacaaagccaagtgcatgatacccatgtaaggactcggtccgatgacagctctagaaacgaggtgatttctgcgcaacagatgagtcagatcgtgagttgtgaggtacgcctgcgcgaccagtgtaaggggacgacgtgtaatagatacgagtgcccagccggctgcttagacagcaaagcaaaggtcatcgggtctgtgcattacgaaatgcagtcttccatttgccgtgctgccattcactacggaatcattgataacgacgggggatgggtcgatatcactaggcaaggtaggaaacactacttcatcaaatccaacaggaatggcatccagaccattggaaagtatcagtctgccaacagctttacagtctccaaagtcaccgtgcaggccgtaacttgtgaaaccaccgtcgaacaactgtgtccctttcataagcccgcttcgcattgtcccagagtgtactgcccgcgtaattgcatgcaagcgaatccacactacgcacgggtcatcgggactcgtgtttatagcgacctgagttcaatatgcagggccgccgtccatgccggagtagtgagaaatcatggcggatatgttgacgtcatgccagtggataaacgtaagacttatatcgcgagctttcagaatggcatattcagcgagtcactgcagaacccccctggcggcaaggcctttagagtgtttgcagtcgtgtag

SEQ ID NO: 13231 - RNA, 777 nt, synthetic construct
  misc_feature 1..777: note = source = /note="Description of Artificial Sequence: Synthetic coding sequence"
  source 1..777: mol_type = other RNA
atgattgctatatctgccgtgagctcagccctcctcttctccctcctttgtgaagcctcaacagtagttctgctgaactctaccgacagcagccccccaacaaataactttactgatattgaagcagcgctcaaggctcaactggactcagctgacattccaaaggccagacgaaaaagatacatctctcagaacgatatgattgctattttagattatcataaccaggtgagaggcaaggtttttccccctgccgcgaacatggaatacatggtgtgggatgaaaatttggctaaatcagccgaggcttgggccgccacttgtatttgggaccatggcccgagttatctgcttagatttctggggcagaatttgagcgtgcgcacaggcaggtatagatctatccttcaactggtcaaaccttggtacgatgaggtgaaagactatgcctttccctaccctcaggactgtaaccctcggtgccccatgagatgtttcggcccaatgtgtactcattacactcagatggtatgggctacatccaataggatcggctgcgccatccatacttgtcaaaacatgaacgtctggggaagtgtttggagacgtgctgtctatttggtttgcaactacgcaccgaaaggcaactggataggagaggctccatataaagtcggcgtcccatgttcttcatgccctcccagctatgggggctcatgtaccgataatctgtgtttccccggggtgacatccaattacttatactggttcaagtag

SEQ ID NO: 13232 - RNA, 1215 nt, synthetic construct
  misc_feature 1..1215: note = source = /note="Description of Artificial Sequence: Synthetic coding sequence"
  source 1..1215: mol_type = other RNA
atgccacccttcctcattacactatttctgtttcattcttgttgcctacgagcaaacgggcatctgagagaggggatgacactcttaaagactgagttcgcactgcacctgtatcaaagtgtagccgcttgccgcaacgagaccaactttgttatatcacctgcgggggtcagcctgcctctggaaatcctgcagtttggggcagagggcagtaccggtcaacagttggcggatgcactgggatataccgttcatgacaaaagggttaaggactttctgcacgccgtctatgccactcttcccacgtcctcccagggaaccgagatggagctggcttgttctctgttcgtgcaggttggtacccccctatccccatgttttgtggaacatgtcagttggtgggctaactcgtccctcgaacctgctgacttgagtgaacctaactcaactgcgatccagacaagtgaaggagccagccgtgagaccgccggcggcggcccttcagaagggcctgggggctggccctgggagcaggtctcagccgcctttgctcagctcgtgctcgtctctaccatgtcattccaaggaacttggcgaaagagattttcctcaactgacacacagattctcccatttacgtgcgcgtatggcctagtactgcaggtgcctatgatgcatcagaccacagaggttaattatggccagttccaggatactgcagggcatcaggtcggcgttctcgaactgccctacctgggtagcgccgtgtcactgtttcttgtgctccctcgggacaaggatacccctctgagccacatagagccgcacctaactgcctccaccattcatctgtggactaccagcctgcggcgcgcaagaatggatgtgtttctgccaaggttccgaattcagaatcaattcaacctgaagtcaatcctaaattcttggggggtgactgacttattcgatccgctgaaagccaacctcaaaggaatctcaggccaagatggcttctatgtgtcggaagcgattcacaaagcaaaaatagaggttctagaggagggaacaaaagcttcaggcgccacagccttactcctgcttaaaagatctcgcattcctattttcaaagccgacagaccatttatttacttcctgcgtgagcctaacaccggttttgtgtttagtattggacgggtttcgaaccctctggactag

SEQ ID NO: 13233 - RNA, 936 nt, synthetic construct
  misc_feature 1..936: note = source = /note="Description of Artificial Sequence: Synthetic coding sequence"
  source 1..936: mol_type = other RNA
atgctttatcaaactattaatagccttaaaactaaaaacccgaagctcaagatcttactttcaatcgggggatacctgttcggtagcaaaggctttcatccaatggtggactcatcgaccagtagactggagttcataaatagcattatactctttttgagaaaccacaatttcgatggcctggacgtgagctggatttaccccgatcagaaagaaaacacgcattttactgttctgattcatgagctggcagaagccttccaaaaggacttcaccaagtcgaccaaagaaaggctgctgttaacagctggtgtgtcagcgggccggcagatgattgataacagttatcaagtggagaagctggctaaagacctcgattttatcaatttgctctcgtttgactttcacggttcctgggaaaagccgctgatcacaggacataactcgcctttgtcaaaaggctggcaggacagaggtcccagttcttactacaacgtggagtatgcagtgggttattggatacacaagggtatgcctagtgaaaaggttgtgatgggtatcccaacctacggacactctttcaccttggcaagtgcagaaaccactgtcggtgcccctgcttccggaccaggagctgccggccctatcacagagtcttctggttttctcgcttattacgagatctgtcagttccttaagggcgcaaaaattactaggctgcaggatcagcaggttccttacgccgtcaaaggtaatcagtgggtgggttatgatgacgtcaagtcaatggaaaccaaagtgcaattcctcaaaaacttgaacctgggaggggcgatgatctggtcaatcgatatggacgactttacagggaaaagctgtaatcagggaccttatcctttggtgcaagccgtgaagaggtctttagggagtctctag

SEQ ID NO: 13234 - RNA, 555 nt, synthetic construct
  misc_feature 1..555: note = source = /note="Description of Artificial Sequence: Synthetic coding sequence"
  source 1..555: mol_type = other RNA
atggctagcgagcgactccctaacagacccgcatgtctacttgtagcatccggagcagccgaaggcgtgagcgcccagagtttcctacattgcttcaccatggcatccaccgcctttaacctacaggtcgcaacgccaggaggcaaggcaatggagttcgtagacgtaacagagagtaatgcccgatgggtacaggatttcagattgaaggcttatgcatcaccagccaaactggagtctattgatgagcccatttgtgccgtcggtcacggggtcgccgccctctgttgtgccactaatgaggatcgctcttgggtctttgatagttatagtctgaccggaccatccgtttgcgagctggtccgggctccaggatttgcgcgacttcctctcgtggtggaggatttcgttaaggactctggggcatgcttttcagcgtccgagccggacgccgtgcacgtagtcctggatagacatcttgtcaccggtcagaacgccagttctacagttccagccgtacagaacttacttttcctctgcggatccagaaaatag

SEQ ID NO: 13235 - RNA, 1257 nt, synthetic construct
  misc_feature 1..1257: note = source = /note="Description of Artificial Sequence: Synthetic coding sequence"
  source 1..1257: mol_type = other RNA
atgcggtcattgctgttgctgagcgcattctgcttactggaggccgccctggccgccgaagtgaaaaaacctgctgccgccgcggcccccggcaccgccgaaaaactgtctccgaaggccgctacgctggcagaaagaagcgccggtcttgcatttagcctctaccaagcaatggccaaggaccaggctgtggagaatatccttgtgtctcccgtggttgtcgcttcatcgctgggactggtctcccttgggggcaaagcaaccacagcatcccaagcaaaagctgtgttgtccgcagaacaactgcgcgatgaggaggtgcacgccggacttggagagctactccggagcttgtctaatagcacagccagaaatgtgacttggaaactaggctctaggttgtacggaccttctagtgtatccttcgctgacgattttgtgaggagttcaaagcagcattataactgtgagcattccaagatcaattttcgcgacaagcggtctgctttacagtccataaacgaatgggcagctcagaccacggacggcaaactcccggaggtcacaaaagacgtggaaaggaccgatggagccctgctggtcaatgctatgttcttcaaaccccactgggatgagaagtttcatcacaaaatggtggacaaccgcggcttcatggtgacccggtcttatactgtcggcgtgatgatgatgcacaggacaggactttataattattatgatgacgaaaaagagaaactgcagattgttgagatgcccctcgctcataagctgagctcactgatcattcttatgccgcaccatgtagaacctctggaaagactggagaaactgcttaccaaggaacaacttaagatttggatgggaaaaatgcaaaaaaaagccgtcgctatttcactccccaaaggtgtcgttgaagtgacgcatgacctacaaaaacacttagcgggactgggtctgacagaggcgattgacaagaataaagctgacttatctcgaatgtctggaaagaaagatctgtacctggcatccgtgttccacgccactgcctttgagctggacactgacggcaacccatttgaccaggatatctatggcagagaagagcttcgaagccctaagcttttttacgccgaccatccttttatatttctggtgcgggatactcagtctgggtccttactgtttattggccgcttggtgcgcccaaaaggtgataaaatgagagacgaactatag

SEQ ID NO: 13236 - RNA, 1425 nt, synthetic construct
  misc_feature 1..1425: note = source = /note="Description of Artificial Sequence: Synthetic coding sequence"
  source 1..1425: mol_type = other RNA
atggaccgtaacccatccccaccaccccctgggcgagacaaggaagaggaagaggaagttgccggaggggactgcatcggctctaccgtgtacagtaaacactggttgtttggagtgctttccggactaattcagatcgtcagcccagagaataccaaaagttcaagcgatgatgaagaacagcttaccgaactcgacgaggaaatggaaaacgagatctgtagagtttgggacatgagtatggacgaggatgttgccctttttttgcaggaattcaacgcacctgacatctttatgggggtgttagccaaatctaagtgcccccgcctgagggaaatctgtgtgggtatactgggtaacatggcctgttttcaggaaatttgtgtatccatttcttcagataagaacctgggccaggttttgcttcactgtttatacgattctgaccctcccactctacttgaaactagtaggttactgctgacatgtcttagtcaagcggaggtggcatctgtgtgggtggagcgcatccaggagcatccggccatttatgactcaatctgttttattatgagtagtagtaccaacgtagacctcctcgtgaaagttggcgaggtggtggacaagttattcgacctggatgagaaactgatgctggaatgggtgagaaacggagccgcccagccattggatcaaccacaagaggaaagcgaagaacagccagtgttccgactggtcccttgtatcctcgaggccgccaagcaggtcaggtctgaaaatcccgagtggctggacgtctatatgcatattctgcaattgctcacaacagtcgacgacggcatccaagctattgttcattgccccgatacaggcaaagacatctggaatcttttattcgacctcgtgtgtcacgaattctgccaaagcgatgatccccctattatcttacaggagcaaaagacagtgcttgcatctgtattttccgtgcttagcgcgatttacgcttctcagactgaacaagaatacctgaaaattgagaaagtagacctgccccttatcgactctctgatccgcgtccttcagaacatggaacaatgccagaaaaagccggaaaattccgccgaatcaaatactgaagaaaccaaaaggacggacctaacccaggatgatttccatctgaagattctgaaggacattctctgcgagtttctctctaatatttttcaggcactcacgaaagagacagtggcacagggggtcaaagaagggcagttatcgaaacagaagtgtagtagcgcattccagaatttgctgcctttttactctccagtagtggaagactttataaagatcctgagagaggtcgacaaggccctagctgacgacttggagaaaaacttcccttccctgaaagtgcagacctag

SEQ ID NO: 13237 - RNA, 438 nt, synthetic construct
  misc_feature 1..438: note = source = /note="Description of Artificial Sequence: Synthetic coding sequence"
  source 1..438: mol_type = other RNA
atgttaacaagacttgtgctgtcagcccatctcagctcaactacctccccgccctggactcacgccgctatctcttgggaactggataacgttctcatgccctcaccacgcatctggccgcaagttacccctacaggtaggagcgcatctgtcagatcagaggggaatacttcctccttatggaactttagcgcaggacaggacgtccacgccatcgtgacaaggacttgcgagtctgtcctgtcttcggccgtctatacacatggttgcggatgcgtgcgtagcgcaacaaatatcacctgtcaatccagtggtcagcaacgtcaggcggcccggcaggaagaagagaatagcatttgtaaggctcacgactcccgcgagggaaggttaggttaccccttgagtgcacatcaacctggttctggaggtcctaactag

SEQ ID NO: 13238 - RNA, 1728 nt, synthetic construct
  misc_feature 1..1728: note = source = /note="Description of Artificial Sequence: Synthetic coding sequence"
  source 1..1728: mol_type = other RNA
tagattttcggcgggtctattcattactttagggttcccagagagtactggcgtgatcggctcctgaaaatgaaagcctgcggacttaacacgctcactacttacgtaccctggaacctacacgaacctgagcggggtaaattcgactttagtggaaacttggacctggaggcctttgtcctaatggcagccgagattgggctgtgggtaattctaaggccaggaccatacatctgttctgaaatggatctgggaggtctcccctcttggctcctccaggatcccggaatgagactccgaacaacctataaggggttcaccgaggctgttgatctgtactttgatcatttgatgtctcgggttgtgcctctacaatacaaaaggggtgggcccatcatcgctgttcaggttgagaatgaatacggctcttacaacaaagatccggcctatatgccatacgtgaagaaggcacttgaggaccgcgggatagtggaactcttgctgacttccgacaacaaagatggcctctctaaaggaatcgtacaaggcgtcctcgccactatcaatctccagtccacgcacgaattgcaactgctgaccacatttctcttcaatgtccagggaactcagcccaaaatggttatggaatattggactggatggtttgattcctggggcggacctcacaacatcttagatagtagcgaagttctgaagactgtcagtgcgatcgttgacgccggatcttccatcaacctgtacatgtttcacggcgggacgaacttcggattcatgaatggagccatgcatttccatgattacaaatccgacgtcactagctatgattacgacgcggtgttaacagaggccggtgattatacagccaagtacatgaaactgcgtgattttttcggatcaatcagcggtatcccattaccgcctccaccggacttactgccaaagatgccctacgaacccctgaccccagtgctgtacctgtcactctgggacgccctcaaatatctcggcgaacctattaaaagtgaaaaaccaatcaacatggagaatctacctgtgaatggcggcaatggacagtccttcggctacatcctatatgaaacaagcataacttcctccggaatcttgtcaggacacgtgcatgatagaggacaggtgttcgtgaacactgtgagcataggatttctcgactacaaaaccaccaaaatcgcagtccctctgatccaaggatacacagtccttagaatactggtggagaatcggggacgcgtgaactacggggagaatatcgacgaccaacgcaaaggcttgatcgggaacctttatcttaatgatagccctcttaagaattttcggatctactcactggatatgaagaagtcattttttcagaggtttgggcttgataagtggtctagcctccctgagaccccaacgctccccgctttcttcttgggctctctgagcatatcttctacgccctgcgatacgttcctgaagttagagggatgggagaaaggcgtagtatttattaatggacagaatctcggacgatactggaacatcggaccgcaaaagactttgtaccttcccggaccctggctaagttcaggaatcaatcaagtcatcgtctttgaagagacaatggccggccccgcactccagttcacggaaacaccacacctcggacgcaaccagtacatcaagtag

SEQ ID NO: 13239 - RNA, 255 nt, synthetic construct
  misc_feature 1..255: note = source = /note="Description of Artificial Sequence: Synthetic coding sequence"
  source 1..255: mol_type = other RNA
atgcgcaccttgttcaacctgctatggttagccctcgcatgctctcctgttcatacgaccctgagtaaatctgacgctaaaaaggcagcatccaagactttgctcgagaaaagccagttcagcgataagcctgtgcaggaccggggcctcgtggtgacagacctcaaagcagagagtgttgtcctcgaacatcgcagttactgttccgccaaagcccgagatagacactttgccggagacgtacttggttactag

SEQ ID NO: 13240 - RNA, 744 nt, synthetic construct
  misc_feature 1..744: note = source = /note="Description of Artificial Sequence: Synthetic coding sequence"
  source 1..744: mol_type = other RNA
atgcggtctctgcttcttctgtctgccttctgtctgctggaggcagctctggctgcggaagtaaagaaacctgccgctgcagcagcccctgggaccgccgaaaaattgagccccaaggctgcgacactggcagaaaggagcgccggcttagcttttagtctttatcaggcaatggcaaaagatcaggccgtagaaaatatcttggtgagcccagtcgtcgtggcgtcctccttgggcctggttagcttaggcggaaaagcaacaacagcctcgcaagcaaaggccgttctctctgccgaacagcttagagatgaagaagttcacgccggtctcggcgaactacttaggtcactctctaacagtacggcccggaatgtgacatggaaattagggagtagattgtacggccccagtagcgtctctttcgcagacgacttcgttcggtccagtaagcagcattacaattgtgaacattcaaagatcaactttcgtgataagagaagcgccctacagtccatcaatgagtgggcggcgcagaccactgacggaaaactgccagaagtcacaaaagatgtggagcgtactgacggcgcactgctagtgaacgccatgttctttaaaccacactgggatgaaaagtttcaccacaaaatggtcgataaccgcgggttcatggttacacgtagctacacagtcggagtcatgatgatgcaccgtaccgggctctacaactattatgactag

SEQ ID NO: 13241 - RNA, 117 nt, synthetic construct
  misc_feature 1..117: note = source = /note="Description of Artificial Sequence: Synthetic coding sequence"
  source 1..117: mol_type = other RNA
atgcggacattgtttaacctcttatggcttgctcttgcctgctcccctgtccacaccacactctccaaaagcgacgccaagaaagcagctagcaaaaccttgcttgaaaaagtgtag

SEQ ID NO: 13242 - RNA, 750 nt, synthetic construct
  misc_feature 1..750: note = source = /note="Description of Artificial Sequence: Synthetic coding sequence"
  source 1..750: mol_type = other RNA
atgcgaagcctgctgttacttagtgctttctgtttgctggaagctgccctcgcggccgaagtgaaaaagcctgctgccgcagccgcgcccggaactgccgagaaactctcacccaaggccgccactttagctgaacgcagcgccggattggcattctcactctatcaggccatggccaaggatcaagctgttgagaacattctggtgtctcctgtcgttgttgccagctcccttgggctcgtttctctcggaggtaaggcgacaactgcatctcaagcaaaagcagtgctctcagcggagcaacttcgcgacgaggaagtgcacgcagggcttggtgagcttttacggagcctcagcaatagcactgctcggaacgtaacgtggaagctcggcagtcggttatacggaccatctagtgtttcgtttgccgatgattttgtgaggagttccaagcagcactataattgtgaacacagtaagattaattttcgagacaaaaggagtgcccttcagtctattaatgaatgggccgcacagaccacggatgggaaactgcctgaagtcacgaaggatgtcgagagaacagatggagctttgctcgtcaatgccatgttcttcaagccacattgggatgaaaagtttcaccacaaaatggtagataatcgcggcttcatggtgacaagatcctacacagtgggtgtgatgatgatgcataggaccggcctgtacaactactatgacgacgaatag

SEQ ID NO: 13243 - RNA, 201 nt, synthetic construct
  misc_feature 1..201: note = source = /note="Description of Artificial Sequence: Synthetic coding sequence"
  source 1..201: mol_type = other RNA
atgaaacctttactcgtggtttttgtgttcttattcctttgggatcccgttttggccggtattaattcactaagctctgaaatgcacaagaagtgttacaaaaacggaatctgtagactcgagtgctatgagagcgagatgttggttgcctactgtatgttccagctggagtgttgcgtgaaagggaatccagcgccatag

SEQ ID NO: 13244 - RNA, 1002 nt, synthetic construct
  misc_feature 1..1002: note = source = /note="Description of Artificial Sequence: Synthetic coding sequence"
  source 1..1002: mol_type = other RNA
atggtgtcaaaaagtagatggaaactgctggctatgctggccttagtgctggtggttatggtgtggtatagtatatcacgagaggaccggtatatcgaactattctattttccaatccccgaaaaaaaggaaccatgcttacagggcgaagctgaaagcaaggcaagcaaactgtttggtaattacagcagagatcagccaatttttctcagactggaagattatttctgggtcaaaactcccagcgcctatgagctcccttatggcacaaaggggagcgaagaccttctgttgcgagtgctggcaatcacatcctcatccattcccaagaacattcagtccttaagatgcagacggtgcgtggtggttggcaacggccatcgcctccggaactcctcgttgggggatgctatcaataagtacgacgttgtcataaggctaaataatgccccagtggccggctatgaaggcgacgtcggcagcaagacgaccatgcggcttttttaccctgaatctgcccactttgaccctaaggtagagaacaatcccgacactctcctcgtgctggtggcttttaaggccatggacttccattggattgagaccattttgagcgacaagaaacgcgtgcgaaagggcttctggaagcaaccaccactgatctgggatgtcaaccccaagcagattcgcatattgaaccccttctttatggagattgccgctgacaagctgctttcccttccaatgcagcagcctcgcaagattaaacaaaaaccaacaaccggactcttagctatcacgcttgccctgcatctgtgcgatctcgtgcacattgccggttttgggtaccccgacgcttacaacaagaaacagacaattcactattacgagcagattacactgaaaagcatggctgggtcaggtcacaacgtctcacaggaagccctcgcaattaagcggatgttagaaatgggggctattaaaaacctgacaagcttctag

SEQ ID NO: 13245 - RNA, 645 nt, synthetic construct
  misc_feature 1..645: note = source = /note="Description of Artificial Sequence: Synthetic coding sequence"
  source 1..645: mol_type = other RNA
atgaggcctaagaccggacaggtcgggtgtgagacgcctgaagaactcggacctggaccgagacagcggtggcccttgctgctgcttggcttggccatggtggcccacggacttctcagaccaatggttgccccccagtcaggggaccctgacccaggcgccagtgttggtagttcccgaagttccctgaggtcactttggggcagattactattgcagccttccccacagcgggctgatccacgttgttggccgagagggttttggtccgaaccccaaagtctgtgttacgtattcggcactggaacaaaggtcacagtgctgggacaacccaaagccaatcccacggtaaccctgtttccccctagctctgaagaactgcaggccaacaaggctacattagtgtgcctgatctccgacttctatcccggagccgtgacagtggcatggaaggcagatggttctcccgtgaaggctggggtcgaaaccacaaagcctagcaagcaatctaacaacaaatatgcggctagttcctacctaagtctgaccccggaacaatggaaatcacatagatcttatagctgccaggttactcatgagggctcaacagtggaaaaaaccgtagctcctacagaatgctcatag

SEQ ID NO: 13246 - RNA, 1050 nt, synthetic construct
  misc_feature 1..1050: note = source = /note="Description of Artificial Sequence: Synthetic coding sequence"
  source 1..1050: mol_type = other RNA
tgactctataagaaccgcttggggtctggcggtcgcggccgatgcatcaagcagggagaaaattggtattctccaacggaatttgaagctatggccggccgtgcatcatcaaaagactggaagagatccataaggtatgctggtaggcccttacagtgcctcatccaggacggcattctaaacccccacgccgccagctgtacatgtgctgcatgctgcgatgatatgactctgtccggcccggtgagattatttgtgccgtataagaggcgtaaaaaggagaatgagttaccaaccacccctgtgaagaaggactcccctaagaatatcactcttctccccgccactgccgctacaaccttcactgtaacaccaagtggccagattacaacctccggagccctcaccttcgaccgcgccagcacagttgaagcaacagccgtgatttccgagtctccagcccagggggatgtcttcgcaggcgcaacagtgcaagaggccagcgtgcagcccccatgcagggcaagtcatcccgagccccattaccccggataccaggattcttgtcagatagctccctttcctgaagctgcgctgcccacgagccaccccaagattgtgctcacctcccttcccgcgttagccgtaccaccccccacaccaacaaaggcagcgccacctgccctcgtgaacggcttggagcttagcgagcctcgatcctggctgtatctcgaagaaatggtgaactccctgctcaatactgctcaacagctgaagacactgtttgagcaagctaaacacgcaagtacctatagagaagccgcaacgaaccaagctaagatccacgctgacgcagaaagaaaggaacagagctgcgtaaactgcgggcgagaggcaatgagcgaatgcactggttgccacaaggtgaactactgtagcaccttctgtcagcgcaaaaggtggtctcttacgatgctcacttcgctagtctcaatttcatggcttcgcgcgattttgccttgccaacctccaaaggtcctagggctgtag

SEQ ID NO: 13247 - RNA, 600 nt, synthetic construct
  misc_feature 1..600: note = source = /note="Description of Artificial Sequence: Synthetic coding sequence"
  source 1..600: mol_type = other RNA
atgtcactcgacatccagagtctcgatattcagtgcgaagagctctctgatgcaagatgggccgagctcttacctctcctccagcagtgccaggtagtgcgactggacgactgtggacttaccgaggcaaggtgtaaagatatctctagcgctctgcgtgttaatccagctttagctgaactcaacctaagatcgaacgaactcggggatgtaggcgttcactgcgtgctacagggtcttcaaaccccttcctgcaaaattcagaaactgagcctccagaactgttgtctgacaggcgccggctgcggggtcctgtcttcaacactgagaacactgccgacactccaggaattgcatctgtctgataatctgcttggcgatgccggtctgcagctgctgtgcgaaggcttactcgatccccagtgcaggttagaaaaactgcagttagagtattgttcactctccgccgcctcatgtgagcctctcgcctccgtcctgcgggccaaacccgatttcaaagaattaacagtgagtaataacgatataaacgaggccggcgttcgggtattatgccagggtttaaaagatagtccttgttag

SEQ ID NO: 13248 - RNA, 465 nt, synthetic construct
  misc_feature 1..465: note = source = /note="Description of Artificial Sequence: Synthetic coding sequence"
  source 1..465: mol_type = other RNA
atggctgggatcccaggcctccttttcctgctattcttcctactctgcgcagtcgggcaggtgagtccctactcggcaccctggaagccgacctggccggcctatagacttccagtagttctcccgcaatccaccttgaatcttgctaagcctgatttcggcgccgaagcaaaattagaagtaagtagctcttgtggcccacaatgtcacaaaggcacacctctccccacatatgaggaagcgaagcaatacctcagttatgaaaccctatacgccaacggatcgcgcacagagacacaagtgggcatctacatcctgtctagttccggggacggcgcacagcatagagattccgggtcaagtggtaagtcccgccggaagcgacaaatttacggttatgacagcagattttctatttttgggaaggactttcttctgaattaccctttcagcacctccgtatag

SEQ ID NO: 13249 - RNA, 936 nt, synthetic construct
  misc_feature 1..936: note = source = /note="Description of Artificial Sequence: Synthetic coding sequence"
  source 1..936: mol_type = other RNA
atggggatcattcaatcaatactcgctaccagccgggactgctactctttcaaaaaaaaacccatacctaaaaaacccaccatgctggcattggccaagattcttctcatctctacacttttctactctcttcttagcggatcccacggaaaggagaatcaagatatcaacaccacgcagaatattgctgaggtgtttaaaacaatggagaacaaaccgatcagtctggagagcgaggcaaatcttaatagcgacaaggaaaacattacgacctctaatcttaaagcatctcacagtcctcccctcaatctgcctaataactctcatggcatcactgatttctcatccaatagtagcgcagagcactcattaggtagcctgaaacctactagcacaatctccacctcccctcccctaatacacagctttgtgagtaaagtcccctggaacgcaccaatagccgatgaggaccttcttccaatttccgcacatccaaatgccacacccgcactgtcttcagagaatttcacctggagcctggttaacgacacagtgaagacgcccgacaattcctccatcaccgtaagcatactgtcttctgaaccgaccagccccagcgtaactcccctgatcgtggagccaagcgggtggctaacgaccaattcagattcatttaccggattcacgccttatcaggagaagacgacactgcagccaactttgaagtttacaaacaacagcaaactctttccaaatacatcagatccccaaaaagtgttgaggctcgataatgcaccagagccatacgacgtttcatttgggaactcaagctactataaccccactctgaacgattccgctatgccagaatccgaagaaaacgcacgtgacggcattcctatggacgatattccgccactcagaacctctgtgtag

SEQ ID NO: 13250 - RNA, 1404 nt, synthetic construct
  misc_feature 1..1404: note = source = /note="Description of Artificial Sequence: Synthetic coding sequence"
  source 1..1404: mol_type = other RNA
atgttgatattttggacaattacgctctttctgctgggtgctgcaaaaggaaaagaagtttgttatgaagacctaggatgcttcagtgatactgaaccttggggcggaaccgcgataaggccactgaagatcttgccctggtcccccgaaaagataggcacaagattcctcttgtataccaacgaaaacccgaacaactttcaaatcctgttactctccgatcctagtacgatcgaagcgagtaactttcagatggatcggaagactcggttcatcattcatggatttattgacaagggagacgagagctgggtcactgacatgtgtaagaagctgttcgaagtggaggaagtgaactgcatctgcgttgattggaagaagggttcccaggccacctatacgcaggccgccaacaacgtcagagtcgtcggagcccaggtagcacagatgcttgatatattactgacagagtattcatacccgcccagcaaagtgcacctgataggccattctctgggggctcacgtggcgggggaggcaggtagtaaaacccccggtctgagtcgaataactgggctagatcccgtagaagcttcttttgagtcgactcctgaggaagtaaggctcgacccttccgatgcggatttcgtggacgtgatccataccgacgctgcccctctaatccccttcctgggtttcgggacaaaccagcagatgggacacctggacttttttcccaatggcggcgaaagtatgccaggatgcaagaagaatgccctctcgcagatcgttgatctggatggaatttgggcaggaacaagggattttgttgcatgtaatcaccttcgctcttataaatactacctggagtcaattcttaaccctgatggcttcgcggcgtatccctgtacttcgtataagagctttgaatccgacaaatgctttccttgcccagatcaaggttgccctcaaatgggccattacgctgataagtttgccggcagaacatcagaggagcaacagaagttttttctgaataccggtgaagcctcaaacttcgcgcggtggagatatggcgtatcaattaccctgtccgggagaacagcaactggacagatcaaggttgcactcttcgggaacaaaggaaacacacaccaatacagcattttccgcggaatactgaagccggggtccacccatagctacgagtttgacgccaagctggacgtgggtactatagagaaggtcaagtttctttggaacaacaacgtaattaacccaacattacctaaggtgggggctacaaaaatcaccgtacagaagggagaggaaaagaccgtttataacttctgtagcgaagataccgtgcgagaagacactctcttaacacttactccctgttag

SEQ ID NO: 13251 - RNA, 81 nt, synthetic construct
  misc_feature 1..81: note = source = /note="Description of Artificial Sequence: Synthetic coding sequence"
  source 1..81: mol_type = other RNA
atgcgcactctgtttaatctgttatggcttgccctagcttgctctcctgttcacacgaccctaagtaaatccgacgcctag

SEQ ID NO: 13252 - RNA, 549 nt, synthetic construct
  misc_feature 1..549: note = source = /note="Description of Artificial Sequence: Synthetic coding sequence"
  source 1..549: mol_type = other RNA
atgaggagaatgtgggcgactcagggtctcgctgttgctttggcccttagtgttctgccaggatccagagcactgcgcccgggagactgtgaggtttgtatcagctacctgggccgcttctaccaagatctgaaggaccgcgatgtgactttttcccccgcaactatcgagaatgaactgatcaaattctgcagagaggctcgtgggaaagagaatagactgtgttactatatcggagctacagatgacgccgctactaaaatcatcaacgaagtatccaaacctttggcccaccatatacccgtcgaaaagatctgtgaaaagctaaaaaagaaggattctcaaatttgtgaactgaaatatgataagcaaatcgatttgtcaactgtggacctgaagaagctcagggttaaggagctgaaaaagatcctcgatgattggggtgaaacatgcaagggctgtgcggaaaagagcgactatatcaggaaaataaacgagcttatgccgaaatacgctcctaaagccgcatctgctagaactgacctttag

SEQ ID NO: 13253 - RNA, 153 nt, synthetic construct
  misc_feature 1..153: note = source = /note="Description of Artificial Sequence: Synthetic coding sequence"
  source 1..153: mol_type = other RNA
atgaaggtttttttcctgtttgctgtcctgttctgcttggtacagaccaatagcgtccatatttctcatcgcgaggcacgcggcccatcatttagaatatgcgtagatttcctgggaccgaggtgggcgagaggatgttccactggtaattag

SEQ ID NO: 13254 - RNA, 666 nt, synthetic construct
  misc_feature 1..666: note = source = /note="Description of Artificial Sequence: Synthetic coding sequence"
  source 1..666: mol_type = other RNA
atgggtgccaccacaatggaccagaaatctctttgggctggtgtggtagttttgctcctcttacagggcggctccgcttataagctcgtttgctacttcacaaattggtcacaggatcgccaagaaccaggtaagtttaccccagaaaacatagaccccttcctgtgcagccacctgatatattccttcgcttccatcgagaacaataaggtcataatcaaagataagtcggaggtgatgctctatcagacaatcaactccctaaagacaaagaatccaaaactgaaaattctgctctctattggaggatacctttttggttctaagggtttccaccctatggtcgattcctccacctcccgccttgaatttatcaattctataatcttgtttcttcgaaatcacaatttcgacggccttgacgtgtcatggatctaccctgatcagaaggagaatactcacttcaccgttttgatccacgagctggccgaagctttccagaaggactttactaagtcaaccaaagaaaggctcctgctaacagctggcgttagtgctggcaggcagatgattgacaacagctaccaggtcgaaaaacttgccaaagatctcgattttatcaatcttctgagcttcgactttcatggcagttgggaaaagccatag

SEQ ID NO: 13255 - RNA, 1257 nt, synthetic construct
  misc_feature 1..1257: note = source = /note="Description of Artificial Sequence: Synthetic coding sequence"
  source 1..1257: mol_type = other RNA
atgcgtacactcttcaatctattatggctagcactggcttgctcccctgttcacaccaccctatccaaatccgacgcgaagaaagcagcaagtaaaacgttacttgaaaaggtcaaattttgttcgtgctgcccgggatggtctgcaatggcgaggtcatggctgaccgcaacatctgccacacagagccaattctctgacaagcctgtgcaggatagggggctcgttgtaactgacctgaaggccgagagcgtcgtcctggagcaccggtcctattgttccgctaaggcaagggataggcacttcgcaggcgacgtgctggggtacgtaaccccatggaactctcacggttatgacgtcaccaaggttttcggctctaaatttacccagatctcacctgtttggctacaactcaagcgcaggggccgcgagatgttcgaagtgactggactgcatgacgtggaccagggttggatgagagccgtaagaaagcacgctaaaggcctccacatagtacctcgtctgcttttcgaggactggacttatgacgatttccgaaacgtgttagacagtgaagatgagatcgaggagctttccaaaaccgtcgttcaggtggcaaagaaccaacatttcgacggcttcgtagtggaggtttggaatcagttgctgtctcagaagcgggtcggcctcatccacatgctaacccacctggccgaggcacttcaccaggcgcgtctattggcattacttgtgatcccccccgccattacccctggaactgaccagctaggaatgttcacccacaaggagtttgagcaactggcccctgtattagatggcttctcgctgatgacctacgactactctactgctcatcaacctggccccaatgctcctctcagttgggtcagggcatgcgtccaagtactggatcctaaaagtaagtggcggtccaagatcctgctgggcctcaatttctatggcatggactacgccacttccaaggatgcaagagaacccgtcgtgggagcaaggtatatccaaaccctgaaagaccatcggcctcggatggtgtgggattcacaggcttcagaacacttttttgagtacaaaaagagtcgaagcggtcgacacgtcgtgttttacccaaccttaaaaagtcttcaagtgaggctggagctggctcgggaactgggtgtgggggtcagcatttgggaactaggtcagggtctggactacttttatgatctactgtag

SEQ ID NO: 13256 - RNA, 612 nt, synthetic construct
  misc_feature 1..612: note = source = /note="Description of Artificial Sequence: Synthetic coding sequence"
  source 1..612: mol_type = other RNA
atgcgtagcctgctactgttgtccgccttctgcctcttggaagccgcccttgccgccgaggtgaagaaacccgcagccgcagcagccccagggaccgctgagaaactttcacctaaagcagctactctggcggagaggagcgctggtctagcattctctctctatcaggctatggctaaagatcaggccgtggagaacattttggtgtctcccgtggtagtggcctcatcgctcgggttagtatctctaggcggaaaagctactacagcttcacaggcaaaggcagtgctgagcgccgagcaactgagagatgaggaggtccacgcgggcttaggggagctccttcgctccttaagtaactcaactgcacggaatgttacatggaaacttgggtctagattgtacggtcccagttcagtttcattcgctgatgatttcgtacgatcctcaaagcaacattacaattgcgaacacagcaaaatcaactttcgcgacaagcggagcgcactccagagcattaacgagtgggcggcccaaacaaccgacggtaaacttccagaggtgactaaggatgtggagagaactgacggagctttgctggtgaacgcctag

SEQ ID NO: 13257 - RNA, 492 nt, synthetic construct
  misc_feature 1..492: note = source = /note="Description of Artificial Sequence: Synthetic coding sequence"
  source 1..492: mol_type = other RNA
atgaggtcccttctgctcctgtctgcattttgtttgctggaggccgcccttgctgcagaagtgaaaaaacctgccgcagctgcagcgccaggcaccgccgaaaagctaagccctaaggcagcaacattggctgagcgatcagccgggttggctttctctctctatcaggctatggccaaagaccaggccgttgagaacatactcgtatctccagtggtggtagctagtagtcttggacttgtgtctctgggaggtaaggctactaccgcctctcaggctaaggccgtattatcagccgagcaactccgtgacgaagaggtccacgcaggtctgggagaactcttgcgatctctgtcaaattcaactgctcggaacgtcacttggaagctgggaagtcggttgtatggaccttcttctgtgtcattcgctgatgactttgtgcgcagttccaagcagcactataattgcgagcattctaaaatcaacttttag

SEQ ID NO: 13258 - RNA, 570 nt, synthetic construct
  misc_feature 1..570: note = source = /note="Description of Artificial Sequence: Synthetic coding sequence"
  source 1..570: mol_type = other RNA
atgtcactagatatccagtcattagacatccagtgtgaggagttgtcggatgctcggtgggcagagctcttgccgttgcttcaacagtgccaggtggtaagactggatgactgcgggttgacagaagcccgttgtaaagatattagtagtgcacttagagtgaacccagctctggccgagctcaatctcaggagtaacgaactgggcgatgtcggcgtccattgtgtgttacaaggtctccaaactccttcctgtaagattcagaaactgtccctccagaattgctgtctcaccggagcaggatgcggggtcttaagctctacgcttcgcacattgcccactctgcaggagctccacctgtctgacaacctgctgggcgacgcaggccttcagctcttgtgtgagggactgctcgacccgcaatgtagacttgagaagttacagctcgagtattgttctctctcagcggcctcatgcgagccactggcatctgtcttaagggccaaacccgatttcaaagaactcaccgtttctaataatgatataaatgaagctggagtacgggtgtag

SEQ ID NO: 13259 - RNA, 585 nt, synthetic construct
  misc_feature 1..585: note = source = /note="Description of Artificial Sequence: Synthetic coding sequence"
  source 1..585: mol_type = other RNA
atgtctctggacattcagtctctggacattcaatgcgaggaacttagtgacgcgaggtgggccgagttacttcccctgctgcaacagtgccaggtagtgcgactcgacgactgtggactgacggaggcaagatgtaaagacatctcatctgccctacgagtgaatcccgcccttgctgaattgaatctgcggagtaatgaactcggcgatgtcggcgtgcactgcgtgttgcaggggcttcagaccccttcttgtaaaattcagaagttgtccctacaaaattgttgcctgacaggcgcaggttgtggagtgctttcctcaactcttcgaaccttacccaccctccaagagctgcacctgtctgataacttactgggcgatgccggtctgcagttgctgtgcgagggcttgttggacccacagtgtagactagaaaagctccaactggagtattgttctctgagtgctgcctcatgcgaacccctggccagcgtcctgcgtgccaagcccgatttcaaagagctgacagtctccaataacgatatcaacgaagcaggcgtgcgcgtattatgccagggcctgtag

SEQ ID NO: 13260 - RNA, 1086 nt, synthetic construct
  misc_feature 1..1086: note = source = /note="Description of Artificial Sequence: Synthetic coding sequence"
  source 1..1086: mol_type = other RNA
atgggaattatacagtcaatcttggctacttcgcgcgactgttatagctttaagaaaaagccaatccccaagaagccaactatgctagccctggcgaaaatacttctgatatccacactgttttatagcctccttagcggttcacatggaaaagaaaatcaggatattaacactacccagaacatcgcagaggtgttcaaaacaatggagaataagccaatctcactggagagtgaagccaatctcaactcggacaaagagaatataaccacctccaacctgaaagccagccattccccccccttaaacctacccaacaacagccatggcataacagatttcagctcgaatagttctgccgagcatagcctcgggtccctcaaacctacctccactatctccacatccccaccactaattcattccttcgtatcgaaagtcccctggaacgcacccattgccgatgaggacctactgcccatctctgcccaccccaatgccaccccagctctgtcatccgaaaatttcacatggagccttgtgaacgacacagttaagacccctgataactcctctattactgtaagtattctgtcctctgagcccactagcccctcagtaactccgttaatcgtcgaaccaagcggatggctcactactaatagtgactccttcactggctttaccccataccaggaaaaaaccaccctacagcccactctcaagtttacaaacaatagtaagcttttccccaacacttctgacccccaaaaagagaatcgtaatactgggattgtgtttggagctatcttaggtgcaatattgggcgtttctttactgacgctcgtaggctacctcttgtgtggcaaaaggaaaacagattcctttagccatcgccggctttacgacgaccggaacgaaccagtgcttagactggataatgcccccgaaccttacgatgttagcttcggaaattctagctattacaaccctacccttaacgactccgccatgcccgagagcgaggaaaacgctagagacggaataccaatggacgatattcctcccctccgcactagtgtgtag

SEQ ID NO: 13261 - RNA, 327 nt, synthetic construct
  misc_feature 1..327: note = source = /note="Description of Artificial Sequence: Synthetic coding sequence"
  source 1..327: mol_type = other RNA
taaccaaagtcgaaatggaggtctaagatattattgggcctgaacttttatggaatggactatgctacaagtaaagatgctagagagcctgtggtgggggcgagatatatacagactttaaaagaccatagaccaagaatggtgtgggatagccaagccagtgaacatttctttgaatacaaaaaatccaggtccggtagacatgtggtcttctatcctacgttaaagtccctgcaggttaggcttgaattagcccgcgagttgggagtaggggtcagcatctgggaacttggtcagggccttgattatttctatgatctactttag

SEQ ID NO: 13262 - RNA, 504 nt, synthetic construct
  misc_feature 1..504: note = source = /note="Description of Artificial Sequence: Synthetic coding sequence"
  source 1..504: mol_type = other RNA
atgagatcccttctcctactctccgccttctgtctgctggaagctgcacttgccgccgaagtcaaaaagcctgctgccgcagctgcgccagggaccgccgaaaaactgagtcccaaagccgcgaccctggcagaacggtcggccggccttgccttttctctctaccaagcaatggcaaaggatcaagctgtcgagaatattctggtgagcccagtcgtcgtcgcttcatccctgggcctggtgtctctgggaggtaaggctacaaccgcgtctcaggcaaaagcagtcctatcagctgagcagctgcgggacgaagaagtacacgccgggttgggcgagctactacgatctctgagcaactccaccgccagaaacgtgacttggaaactcggctcacgcctgtacggcccgtcctctgtgagcttcgccgacgattttgttagatcgagcaagcaacattacaactgtgagcacagtaagatcaattttcgggacaaacgttag

SEQ ID NO: 13263 - RNA, 1209 nt, synthetic construct
  misc_feature 1..1209: note = source = /note="Description of Artificial Sequence: Synthetic coding sequence"
  source 1..1209: mol_type = other RNA
atgatggttgcattaaggggtgcctccgcattgctggtactttttcttgccgcctttctccctccaccccagtgtacgcaggatcccgcaatggtccattacatatatcaacggtttagagtgttggaacagggtcttgaaaaatgcacccaggcaaccagagcatatattcaagaattccaggagttttccaagaacatttcagttatgcttggtaggtgtcaaacatataccagtgaatataagagcgctgtcggaaatctggcactgagggtcgaacgggcacagcgggaaattgattacatacaatatctgagggaggccgacgaatgcatcgaatctgaagacaagacactcgctgaaatgttgctccaggaggccgaggaggagaagaagatccggacgctcctgaacgcatcatgcgacaacatgctgatgggtattaaatcgctgaagatcgtgaagaaaatgatggacactcacggttcatggatgaaggacgccgtgtacaactcaccaaaagtgtatctgctgatcggatctcgaaacaatacggtctgggaattcgcaaatataagggcttttatggaggacaataccaagccagcacctcggaagcagatcctcacactctcatggcagggaaccggccaagtaatatacaaaggatttttgttctttcacaaccaggcaacaagtaatgagatcataaagtacaacctccagaaaagaacagtcgaggatcgcatgctgctgcccggcggcgtagggcgcgcgctggtgtaccagcacagtccatctacctacattgatcttgctgtagatgaacacggactttgggcaattcactcagggcccggtacccacagccaccttgtcctcactaaaatcgaaccaggtactctgggagtggagcattcttgggatacaccctgtagatcccaggacgctgaagccagcttcttgctgtgtggggtgttatacgtcgtatacagcacaggtggccagggtccccaccgtataacctgcatatatgaccctctcggcacaatctctgaagaagatttgcctaatttattttttccgaaacgtccacgtagccattctatgatacactacaacccaagagacaagcaactgtatgcgtggaacgagggcaaccagataatctataaactgcaaactaaacgcaagctcccattaaaatag

SEQ ID NO: 13264 - RNA, 975 nt, synthetic construct
  misc_feature 1..975: note = source = /note="Description of Artificial Sequence: Synthetic coding sequence"
  source 1..975: mol_type = other RNA
atgaggtcattgctgctgttgagcgcattttgcctccttgaagctgccctcgccgctgaggttaagaagcctgccgcagccgcagcacctgggacagctgagaaactgtccccaaaagccgcaaccctcgcagagcgaagcgccggacttgctttctctctgtatcaggccatggccaaggaccaagcagtggagaacatcctggtcagtccagtggtggtggcttcatctctgggcctagtctcactgggagggaaggccacgactgccagccaagccaaggccgtcctgtccgctgagcaattacgcgatgaagaggttcacgctggcctgggcgagctcctgcgttcattaagcaacagtaccgcgcgcaatgtgacctggaaattgggatccagactctacggccctagctctgtgtccttcgccgatgactttgttaggtcctccaagcagcactataactgtgagcattctaaaatcaacttcagagacaagcgctccgccctgcaatcaattaacgagtgggctgctcagacaaccgacgggaagctgccagaggtcaccaaagatgtggagaggacagatggcgccttgctggttaatgctatgttctttaaaccgcactgggatgaaaaatttcatcacaaaatggtggacaataggggatttatggttacacgttcctacactgtgggggtgatgatgatgcatcgaacaggcttgtacaattattacgacgatgaaaaagagaaacttcagattgtggaaatgccgctggcccacaagctttcctctctcataattctcatgccacaccatgtggaaccactcgagcgtttagaaaaactgcttactaaggaacagttaaaaatttggatgggaaaaatgcagaagaaggctgtcgccatttccctccctaagggcgttgtagaggttacccatgatctccaggtgagaggtgggcccgcttag

SEQ ID NO: 13265 - RNA, 990 nt, synthetic construct
  misc_feature 1..990: note = source = /note="Description of Artificial Sequence: Synthetic coding sequence"
  source 1..990: mol_type = other RNA
atggtgtctaagtcacgttggaaactcctcgcgatgctggccttagtactcgtagtgatggtttggtattccattagcagagaagacagtttttattttccgatccctgaaaagaaggagccctgtctgcagggtgaggccgaatctaaagcaagtaaactgtttggaaactatagccgagatcaacccatctttctgcgcttagaagattacttctgggttaaaacaccatctgcatacgagctgccttacggaacaaaaggatcggaggatctgctcttacgggtattggcaattacctcttcttctattcctaaaaatatccagagcctcagatgtagacgctgcgtggtagtcggtaacggccacaggcttcgaaactctagtttaggggacgccatcaataagtacgacgtggtgatcagacttaacaacgctcccgtcgccggatacgaaggggacgtggggtcaaagactaccatgcgccttttttatcctgaatctgcccactttgaccctaaggtggagaacaaccctgacacactgctcgtgcttgtggcattcaaagctatggacttccactggatagagaccattctcagcgataagaagcgcgtgcggaaaggcttctggaaacaacctccgctcatttgggacgtgaaccccaaacagataagaatcttaaacccctttttcatggagattgctgcagacaaactcttgtccctgccaatgcagcaaccacgcaaaattaagcagaaaccaaccaccggcctgttggccatcacactcgctctgcacttatgtgatctcgtgcacatcgctggatttggctatccagatgcatacaataagaaacaaaccatacattattacgaacagatcactctgaaatcgatggctggtagtggccacaatgtaagccaggaagccctcgcaattaaaagaatgctggaaatgggagccatcaagaatctaacatccttctag

SEQ ID NO: 13266 - RNA, 351 nt, synthetic construct
  misc_feature 1..351: note = source = /note="Description of Artificial Sequence: Synthetic coding sequence"
  source 1..351: mol_type = other RNA
atgaggacgctgtttaatttgctgtggctcgcccttgcgtgtagccctgtacatactaccctctccaaatctgatgcgaagaaggctgcctccaaaaccttgctagaaaagagtcaattctctgataagccagtacaggacaggggcctcgtggtgaccgacctgaaagcagagtctgtggttttggagcaccgttcttactgtagcgccaaggcccgggaccgtcacttcgcaggagacgtcctgggatacgtaactccatggaacagccacggctacgatgtgaccaaagtgttcggatccaagtttacccaaatctccccagtctggctgcaactcaaacgccggtag

SEQ ID NO: 13267 - RNA, 282 nt, synthetic construct
  misc_feature 1..282: note = source = /note="Description of Artificial Sequence: Synthetic coding sequence"
  source 1..282: mol_type = other RNA
atggatagcttgaggaagatgctgatttcagttgccatgctgggagccggggcaggtgtgggctacgcactgttagtgattgtgacgccaggagaacgtaggaaacaagaaatgctcaaagagatgccgttgcaagatccacgaagtagagaggaagccgccagaactcagcagctgttgctggctacactacaggaagccgcaaccactcaggaaaacgtggcctggcgaaaaaactggatggtggggggcgaaggcggagcaggaggacggtccccttag

SEQ ID NO: 13268 - RNA, 255 nt, synthetic construct
  misc_feature 1..255: note = source = /note="Description of Artificial Sequence: Synthetic coding sequence"
  source 1..255: mol_type = other RNA
atgagacccaagaccggccaggtcggatgtgaaacaccagaggagttaggacccggcccgcggcagaggtggcccctcctgctgctgggtctagccatggtcgctcacggtctactgcggcccatggtcgccccccagtctggagaccctgaccctggcgcctcagttggtagctcaagaagctctcttagatcactgtgggggagatcagcccaaggccagccacactgtcattctgtacccgccctgttgtag

SEQ ID NO: 13269 - RNA, 27 nt, synthetic construct
  misc_feature 1..27: note = source = /note="Description of Artificial Sequence: Synthetic coding sequence"
  source 1..27: mol_type = other RNA
atgagcctcgatattcaaagtctgtag

SEQ ID NO: 13270 - RNA, 576 nt, synthetic construct
  misc_feature 1..576: note = source = /note="Description of Artificial Sequence: Synthetic coding sequence"
  source 1..576: mol_type = other RNA
atgctgatattctggacaataaccctgttcctgcttggtgctgctaaagggaaggaagtatgttatgaagatctcggctgcttctcagacaccgaaccctgggggggcactgctattcggcctctaaagatactcccctggtcacccgaaaagattggaactaggttcctgctttacacaaacgagaatcccaacaattttcaaatccttctcctctcggacccatcaactattgaggccagcaactttcagatggacagaaaaacccggtttatcatccatggattcatagacaagggagacgaatcttgggtaacagacatgtgcaagaaactcttcgaagttgaagaggtgaactgtatttgcgttgattggaaaaaaggctcccaggcaacatacacacaagccgccaataatgttcgcgtcgttggtgctcaggtcgcccagatgcttgacatcttgttaacggaatacagctatccacccagtaaagtgcatctgataggacattcgttaggggctcacgtcgcaggtgaggcaggctcgaagacaccaggcttgtcgagaatcacatag

SEQ ID NO: 13271 - RNA, 123 nt, synthetic construct
  misc_feature 1..123: note = source = /note="Description of Artificial Sequence: Synthetic coding sequence"
  source 1..123: mol_type = other RNA
atgtccctagatatccaatcgcttgatatccaatgcgaagaactatccgacgccagatgggcagagttattgccactgttacagcaatgtcaggtagtaagattagatgactgcggcctgtag

SEQ ID NO: 13272 - RNA, 648 nt, synthetic construct
  misc_feature 1..648: note = source = /note="Description of Artificial Sequence: Synthetic coding sequence"
  source 1..648: mol_type = other RNA
atgcgccctaaaaccggccaggtgggatgtgagactccagaggaactgggacccgggcctcggcagagatggccgctgttgctgctcggcctggctatggtcgcacatgggcttttgagaccaatggtagctccgcagagcggcgatcccgatcctggagcttccgtggggtcctctcgatcctccctgagatctctgtggggatcacgccttctcctccagccttcgcctcagagagctgatcctagatgctggcctaggggattttggagcgagcctcagtccctttgctacgtttttggcactggtactaaggtcacagtcttgggccagccaaaggccaatccaactgttactctgtttcctccttcatccgaagagctacaagccaataaagccacactggtttgtttgataagcgatttttaccccggcgccgtgacagtggcatggaaagccgacggctcacccgtgaaagccggggttgaaaccacaaaacctagcaagcagtcaaataacaagtacgctgcgtcttcttacctatcgcttacccccgaacagtggaaaagccatcgatcctactcctgtcaagtcacgcacgaggggagtacagtcgaaaaaacagtcgcccctaccgaatgcagctag

SEQ ID NO: 13273 - RNA, 999 nt, synthetic construct
  misc_feature 1..999: note = source = /note="Description of Artificial Sequence: Synthetic coding sequence"
  source 1..999: mol_type = other RNA
atgtgccccgccgggtggaaacttttggcgatgcttgccttggtgctggtggtgatggtttggtattccatcagtagggaagaccgctatatagagctgttctactttccaattcccgaaaagaaagaaccatgtctgcagggagaggctgaatcaaaggcttctaagttatttggtaattattccagggaccagccaatttttctaagactcgaggattacttttgggttaagactcctagcgcgtacgaattaccctatggaacaaaagggagtgaagatctactcctgagggtgctggctatcaccagttcatctattccaaaaaacatccagagcttgaggtgccgcagatgtgtggtcgtgggcaacggtcaccgattaaggaattcctccctgggagacgctatcaacaaatatgacgtcgtgatccggcttaacaatgccccagtagctggttatgagggggatgtcggctccaaaacaactatgcgacttttctaccccgaatccgctcatttcgatcccaaagtggaaaataaccccgataccctactcgtactggtcgctttcaaggccatggactttcactggatcgagacaatactgtccgacaagaaaagggtgagaaagggtttctggaaacagccgcccctaatatgggacgtgaacccaaagcagatccggatcctgaacccattcttcatggaaatagcagcggataagttactgtccctcccgatgcagcagccccgcaaaatcaagcagaaaccaaccaccggactattggctatcacactggccctacacctgtgcgacttagtccatatcgccggttttgggtatccagacgcgtataataagaagcaaaccattcattactatgaacaaataaccctcaaaagcatggccggatcaggtcataacgtgagtcaagaagccctggccatcaagcgaatgctcgaaatgggcgcaatcaagaacctgacctccttctag

SEQ ID NO: 13274 - RNA, 888 nt, synthetic construct
  misc_feature 1..888: note = source = /note="Description of Artificial Sequence: Synthetic coding sequence"
  source 1..888: mol_type = other RNA
atgcggtcattgctactattgtctgctttttgcctgctggaagctgcgctggcagccgaagtgaagaagcctgccgctgccgcagcccctggcactgcggagaaactttcccctaaggctgcgacactcgcggagcgctccgcaggccttgctttctcattataccaagctatggccaaagatcaagccgttgaaaatatcctggtctcccctgttgtggtggcctcgagcctgggattagtctccctcggaggaaaggccacaaccgccagtcaagcgaaggctgtcctgtcagccgaacagcttagagacgaagaggtgcacgcgggactcggggaactgctccggagcttgagtaatagtacagcccgaaacgtcacttggaaactgggctcaagactctacggccctagctccgtctcattcgccgacgactttgtcaggtccagcaagcaacattacaactgtgaacattccaaaatcaactttcgcgataagagatcagccctacaaagtattaatgaatgggccgcccagacaacagatggtaaattgccggaggtgacgaaggacgtggagaggacggacggagccctgctggtcaatgccatgttctttaagccccactgggacgaaaaattccatcacaaaatggtcgacaatcgcggattcatggttacaaggtcttacaccgtgggcgtgatgatgatgcatagaaccggcctctacaattattatgacgacgaaaaagaaaaactgcagatcgttgaaatgcctctagctcacaagctctcttctctgattattcttatgcctcaccatgtggagccattggaacgcctcgagaagctgctaaccaaagaacagctgaagatatggatggggtag

SEQ ID NO: 13275 - RNA, 399 nt, synthetic construct
  misc_feature 1..399: note = source = /note="Description of Artificial Sequence: Synthetic coding sequence"
  source 1..399: mol_type = other RNA
atgagaacactgtttaatttgttatggctggccctcgcttgcagcccagttcatactacattaagcaaatctgacgcaaagaaagcagcttctaagaccctgctggagaagagtcagttctccgacaagccagtccaggataggggacttgttgttaccgacctaaaagccgagagtgttgtcttggaacaccggagttattgctcagctaaggccagggaccgccattttgcaggggacgtcctgggctatgtgactccctggaatagtcatggatatgacgtgaccaaagtgtttggttcaaaattcacccagatatcccccgtgtggctgcagctcaaaaggcgaggacgtgagatgttcgaggtcaccggacttcatgatgtggatcaggggtag

SEQ ID NO: 13276 - RNA, 360 nt, synthetic construct
  misc_feature 1..360: note = source = /note="Description of Artificial Sequence: Synthetic coding sequence"
  source 1..360: mol_type = other RNA
atgcgcacactgttcaatttgttgtggctggctttggcgtgctcccctgtgcacacaactctttcaaagtctgatgccaagaaggcagctagcaagacactactggaaaaaagccaattttctgataagcccgtgcaagatagaggcctggttgtgacggacctaaaggctgaatccgtcgtgcttgagcatcgatcatactgtagtgctaaagcacgagatagacacttcgccggtgacgtgctgggctatgtgaccccatggaattctcacggctacgatgtgacaaaagtttttggtagtaagtttacgcagatcagccctgtctggttgcaattgaaaagaaggggtcgggagtag

SEQ ID NO: 13277 - RNA, 390 nt, synthetic construct
  misc_feature 1..390: note = source = /note="Description of Artificial Sequence: Synthetic coding sequence"
  source 1..390: mol_type = other RNA
atgcctatggcttctccccagaccctagttctttacctgctcgtactggccgtcacagaagcctgggggcaagaagctgtaatccctgggtgtcatctgcatccgtttaacgtaacagtgagatcggatcgacaagggacctgtcagggctctcacgtggctcaagcctgtgtcggtcattgtgagtcctctgctttcccttcgcggtacagtgtcctcgtggcctcagggtatagacacaacatcacctcagttagccagtgttgcaccataagtggcttaaagaaagttaaggtacagctgcaatgtgttggaagtcggcgtgaagagctcgaaatttttacagcccgggcttgccagtgcgatatgtgtcgcttatcccgctactag

SEQ ID NO: 13278 - RNA, 1386 nt, synthetic construct
  misc_feature 1..1386: note = source = /note="Description of Artificial Sequence: Synthetic coding sequence"
  source 1..1386: mol_type = other RNA
atgtccctggatattcagtctctggacattcaatgcgaagagcttagtgatgctcgctgggcagagctgttgccactgctgcagcaatgtcaggtggtgagattggacgattgtggtcttacagaagcaagatgcaaagatatctcatctgccctgcgtgtcaaccctgctttggctgaactgaatttgcggagcaatgaactgggggatgtgggggtacattgtgtgctgcagggtctgcagacaccctcatgtaaaattcagaaactgtccctgcaaaattgctgtctcaccggtgctggctgcggtgttctgtcttccacactgaggacgctccctaccctccaagaattgcatctgtctgataatctgcttggcgacgcaggcttacagctcctatgcgaaggactcctggaccctcagtgtcgattagagaaacttcagttggaatactgctcattgtccgcggctagctgtgaacctttggccagcgtgctgcgtgcaaaacctgactttaaggagctcactgtcagcaacaacgatataaacgaagcaggcgtcagggtgctttgtcagggcctgaaagattcaccctgtcaacttgaagcactgaaacttgagagttgcggggtgacttcagataattgccgcgacctctgtgggattgttgcatcgaaagcctcgctgcgcgaactcgctctcggctcgaacaagctcggcgacgtgggcatggctgaactgtgcccggggttgctacatccatcatctaggctgagaacattatggatttgggaatgcgggataaccgctaaggggtgcggcgatctttgccgtgtgttacgtgcgaaagaatcactgaaagagctctccctcgccggcaatgagctgggggatgaaggcgcaagactactgtgcgagaccttgttagaaccaggatgccaactggagtctctgtgggttaaatcgtgctctttcacagccgcatgctgttctcatttttcttcagtcctagcccaaaataggtttttattggagctccagattagcaacaaccgcctcgaggatgctggcgtcagggaactgtgtcagggtttgggccaacccggaagcgtgctacgggtgctctggcttgcagactgtgacgttagtgattctagttgctctagccttgctgcaacactgctcgcaaaccactcactgcgcgaactggatctgtccaataactgcctgggagatgcggggattcttcagctcgtcgaatctgttcgccagcccggttgcctgcttgagcagttggtgctctacgatatctactggagtgaagagatggaggacaggctgcaagccctggagaaggataaaccatcactcagagtaatatcttag

SEQ ID NO: 13279 - RNA, 453 nt, synthetic construct
  misc_feature 1..453: note = source = /note="Description of Artificial Sequence: Synthetic coding sequence"
  source 1..453: mol_type = other RNA
atgaggagtctgctcctattgtccgctttttgcctgctcgaggcggccctggcagctgaagtcaaaaagcccgccgcagccgccgcccctggcacagccgagaagctgtcccctaaggctgccactctggcagagcgtagcgccggtctggcattcagtttatatcaagcaatggccaaagaccaggccgtcgaaaacatcctcgtaagtcccgttgtggtggcctcttccttaggactggtctccctcggtggtaaagcaacaaccgcttcacaggctaaagcagtccttagcgccgagcagctgcgcgatgaggaagtgcacgcaggcctcggagagctcctaaggtccctctctaattctactgcccgtaatgtgacgtggaaactgggctctcgattatacggcccttcttctgtatcattcgctgatgacttcgtcagaagtagttag

SEQ ID NO: 13280 - RNA, 1257 nt, synthetic construct
  misc_feature 1..1257: note = source = /note="Description of Artificial Sequence: Synthetic coding sequence"
  source 1..1257: mol_type = other RNA
atgcgcagcttacttctgctctctgccttctgcctgctggaagccgcactggctgcagaagtgaaaaagccagcagctgccgcagcccccggcacggctgaaaaactgagtccgaaagcagcaaccctagctgaaaggtctgccgggctggcttttagcctgtatcaggccatggctaaggaccaggcagtggagaatatcctggtctcaccagttgttgtggcatcgtcacttggcttagtgtcactcgggggaaaagccaccaccgcaagtcaagctaaggctgttcttagcgctgaacagctgcgcgacgaagaggtgcatgcagggttaggcgaactcctgcggtctttgtctaatagcacagcccgaaacgtgacctggaagctgggctctcgtctctatgggccatctagtgtgtcattcgcagacgacttcgttcggagctccaagcagcactacaactgcgaacacagtaaaatcaattttcgggataagagatccgcattacagtcgatcaacgagtgggccgcacaaacaacagacgggaagctcccagaggtgacgaaggacgttgagaggaccgatggagccctgctagtgaatgctatgttttttaagccacactgggacgagaaatttcaccataagatggtggataacaggggatttatggtgacccgctcctatactgtgggcgtaatgatgatgcaccggaccggactatacaattactatgacgatgaaaaggaaaagttacagatcgttgagatgccgctcgcacataaattaagctcccttattatcttgatgccccatcacgtggagccccttgaaagattggaaaaacttctgacaaaagaacagctgaagatatggatgggtaaaatgcaaaagaaagctgtcgccatttccctgcctaagggcgtagtcgaggtgacacatgatctccagaagcacttggcgggtttaggattgaccgaagctattgacaagaataaagccgacctcagccgcatgagcggtaagaaggatctgtatctcgcctctgtatttcacgccacagcgttcgagctagacactgacggcaatccctttgaccaagacatttatggacgcgaggaattgcgtagtcctaaactcttttacgccgatcatcctttcatcttcctagtaagagacactcagtcgggcagtctcctttttattggtagactcgtccgaccgaaaggagataaaatgcgagacgagctgtag

SEQ ID NO: 13281 - RNA, 1002 nt, synthetic construct
  misc_feature 1..1002: note = source = /note="Description of Artificial Sequence: Synthetic coding sequence"
  source 1..1002: mol_type = other RNA
atggtatcgaaatcgcgatggaagttgctcgccatgctggccctggtcctcgttgtgatggtatggtatagcatttcaagagaagatcgatatatagaacttttctacttccctattccagagaaaaaagagccttgtctccagggagaggctgagtcgaaggcgagtaaattgttcggcaattatagtcgggaccagccaatattcttgcgtctcgaagattatttttgggtaaagacaccaagcgcatacgagcttccttatggcactaaaggaagtgaggatcttctcctcagggtgttggccattactagctcttccatccctaagaatatacagagtctgcgttgccgtcgctgcgtggtggttggcaatggccatcgccttcgcaatagctcattaggagacgccatcaacaaatatgatgttgtgatcagacttaacaacgctcccgtggccggctacgaaggtgatgtgggatcaaagacaacaatgcgcctgttttatcccgaatccgctcactttgatcctaaggttgagaataacccagatactctcctagtgttggtcgccttcaaagcgatggactttcattggatcgagactattctcagcgataaaaaaagagttcgcaagggattttggaaacagccacctctgatctgggacgtcaaccctaagcagatacgaattctgaacccctttttcatggaaattgccgctgacaagctgctatccctgccaatgcaacaacctagaaagataaaacagaagccaacaaccggtcttttagctattactctggcactccacttatgtgacctggtacacattgctggttttggctaccccgacgcttacaataagaaacagacaatccattactacgaacagatcactctcaaaagcatggccggcagcgggcacaacgttagccaggaggctctagccatcaagcggatgctggagatgggtgcaataaagaatttaactagcttctag

SEQ ID NO: 13282 - RNA, 987 nt, synthetic construct
  misc_feature 1..987: note = source = /note="Description of Artificial Sequence: Synthetic coding sequence"
  source 1..987: mol_type = other RNA
atgtgtcctgccgggtggaaacttcttgcaatgctagccctggttctggtggtgatggtttggtattctatctctcgggaggactcattctattttccaatcccagaaaaaaaagaaccctgcctccagggggaagctgaatcaaaggcatccaaactctttgggaattattcaagggaccagccaatttttctccggctagaagactatttctgggtgaagactcccagcgcctacgagttgccatatgggacaaagggatcagaggatctcctcttaagagtgctcgctatcacatcttcctccattcctaagaacatccaatccctacgatgccgacgatgtgtggtagtgggcaacggacaccgactaagaaatagctcgctgggggatgccataaacaaatacgatgtggtgatacggctgaacaatgcacctgttgctggctacgaaggcgatgtaggctccaaaaccactatgcgcctgttctatcctgaatccgcccatttcgatccgaaagtagaaaacaacccagataccctgttggtactagtggccttcaaagccatggactttcactggattgagactattttatctgataaaaagcgggtgaggaagggattttggaaacagcctccactgatttgggacgtcaatcccaagcagatccggattttaaacccattttttatggaaatcgccgcagacaagctactatcactgccaatgcagcaaccacgcaaaattaaacagaaaccaactacgggacttttagccatcactctggcactccacctctgcgacctcgtacacattgctgggtttggctatcctgatgcctataataaaaaacagaccatacattactacgaacagataactctcaaaagcatggcaggttctggtcacaacgtatcacaggaggccctggcaattaaacgaatgctcgaaatgggagctattaagaatcttacctcattctag

SEQ ID NO: 13283 - RNA, 585 nt, synthetic construct
  misc_feature 1..585: note = source = /note="Description of Artificial Sequence: Synthetic coding sequence"
  source 1..585: mol_type = other RNA
atgacaatgaggcacaactggacacccgacctgagccccttatgggttttactgctgtgcgctcacgtggtaacccttctcgtccgcgcaacacccgtgagtcagaccaccaccgccgctacagcgtctgtccggagcacaaaagacccgtgtccaagtcagccaccagttttcccagcagccaaacagtgccccgctttggaagttacatggcctgaggtggaggtccctcttaacggcacactttccttgagctgcgttgcttgtagtcggttcccgaacttcagcattttgtactggttaggcaacggtagcttcatcgaacaccttcccggccgcctttgggaggggagtaccagccgcgaacgcgggagcactggaactcaactatgcaaggccctcgtgctggaacagctcactcctgctctgcactccactaacttctcctgcgtgctcgtggaccctgaacaagtggtgcaaagacatgttgtgctcgcccagctctgggctggattacgcgcaacactgcctcccacacaggaagccctgccctcgtcccactcttccccccagcagcaaggctag

SEQ ID NO: 13284 - RNA, 1386 nt, synthetic construct
  misc_feature 1..1386: note = source = /note="Description of Artificial Sequence: Synthetic coding sequence"
  source 1..1386: mol_type = other RNA
atgagcttagacattcaaagtctcgacatccagtgtgaggagttgtccgacgcaaggtgggccgaactcctacccctgctgcaacaatgccaggtggtgcggctggacgattgtggcctgactgaggctagatgcaaggatatctcttcagccctaagagtaaatcccgcactggcagaattaaacttgaggtcaaacgaactgggtgatgtgggggtacattgcgtcctgcaggggctgcagacgccaagttgcaagattcagaaactcagcctgcagaattgttgtcttactggagcagggtgtggcgtactttcctccaccctcaggactctccccactctacaggagctgcacctgtctgacaatctgcttggagacgctggattgcaactgctgtgtgagggcctgctagacccgcagtgcagacttgaaaaattgcagttagaatactgtagcctctctgccgcctcgtgcgaacccttagcttctgtgctgcgcgccaaacccgatttcaaggagctgacggtatctaataatgatattaatgaggccggcgtgagggtactttgccagggacttaaggattcaccgtgtcagttggaggctctgaagctggaatcctgtggcgtgaccagtgacaattgtagagacttgtgtggcatcgtggctagtaaagcttcccttagagagctggctctgggatcaaataagctcggagacgtgggaatggctgaattgtgtccgggactcctccatccatcttcgcgactcaggaccctgtggatttgggaatgtggtatcaccgcaaaggggtgtggggatctctgccgagtgctgcgagccaaggagagcctcaaagaactgagcctcgccggaaatgagctgggcgatgagggagctagattactctgtgagacactgctggagccagggtgccagttagaatccttatgggttaagagctgcagttttaccgcagcttgttgtagccacttttctagcgtgcttgcccagaaccgcttcctcctggaactgcagatatccaacaataggttggaagatgcaggcgttcgtgaactgtgtcaaggtctcgggcaacctggctccgtcctgcgcgttctctggctggccgattgtgatgtctccgactcaagttgctcatcactggccgccacccttctagctaaccattcccttcgtgagctcgacttgagcaataactgtctgggcgatgccggaattctccaactagttgagagcgtgaggcagcccggatgtctcctggaacagctagtcctgtatgacatctattggagtgaggagatggaggatagactccaggcccttgagaaagacaaaccttctcttcgcgtgattagttag

SEQ ID NO: 13285 - RNA, 1995 nt, synthetic construct
  misc_feature 1..1995: note = source = /note="Description of Artificial Sequence: Synthetic coding sequence"
  source 1..1995: mol_type = other RNA
atgccccaggccccctcgactggttcctccttaatccgggatccttcgatagcacacagaaacacacaaatactctggaccgaggctggcagagatttagctcaggatacacgatacaccggggaggagagtctgaccatttttgtggacaagagaaaattatccaagcgggccgaaggcagcgattctacaacaaattcctccagtgtaactttggagacactgcaccagctcgccgctagctatttcatcgaccgcgactcgacattaaggcgtctgcaccacatacagatcgcaagtactgcaattaaggttaccgagacccgcactggaccgctgggatgctccaactacgataatttagactccgtgtcttcagtgcttgttcagtctcccgaaaacaagatccaactgcagggtttgcaggtactccttcctgattacctgcaggagaggtttgtccaggccgcgctctcatatatcgcatgtaactcagagggggaatttatttgtaaggagaatgattgttggtgtcattgcgggcctaaattccccgagtgtaattgccccagtatggatattcaggcaatggaagagaatttactgagaataaccgagacctggaaagcctacaattcagactttgaagagtcagacgagtttaagttattcatgaaacgactaccgatgaactacttcctgaacacttccacaatcatgcatctgtggaccatggacagtaactttcagcgaagatatgaacagctggagaactccatgaaacagttgttcctgaaggcccagaagatcgttcacaaactgttctctctgagtaagaggtgccataagcaaccacttatctccttaccgcgccagcgtacatctacatattggttaacacgcattcaatcattcttatattgtaacgagaatgggctcctgggcagtttctccgaagagacacactcatgcacatgcccaaatgaccaggtggtgtgtactgcatttctgccttgcaccgtcggtgacgcatcggcctgtctgacatgtgctccggataaccggaccaggtgtgggacttgcaacacaggctacatgctgagccaggggttatgtaagcccgaagtggcagagagcaccgaccattatattggttttgaaactgatctgcaggatctggagatgaagtatctgttgcagaagaccgaccggaggattgaagtacacgctattttcatctcgaatgatatgaggctgaattcttggttcgacccctcttggagaaagcgtatgctcctgaccttgaaatccaataaatacaaatcttctctcgtccatatgattctgggcctttccttacagatttgtctaaccaaaaatagcactctcgagcccgtcttagccgtctacgtgaatccttttggcggcagccacagcgagtcttggtttatgcccgtgaatgagaatagtttccccgactgggaaagaacgaaacttgacctccccctccagtgctacaactggacactcacccttgggaacaagtggaagacattcttcgagacagtgcatatatatctgcgaagtagaatcaagagcaatggtcctaacggaaacgagtccatatactacgagccactggaattcatcgaccctagccggaatctcgggtatatgaagatcaataatattcaggtcttcggatattccatgcatttcgacccggaggctatcagagacctaatcctgcagctggattatccttacactcaaggtagtcaggactctgccctgttgcaactgctggagataagagaccgcgtaaacaagctgtcacccccaggacagcgccggctggacctgttttcttgcttgctacgtcaccgtttgaagctcagtaccagtgaagtggttaggatccagagcgcactgcaggcatttaacgccaaacttccgaacaccatggactacgataccaccaagttatgtagctag

SEQ ID NO: 13286 - RNA, 459 nt, synthetic construct
  misc_feature 1..459: note = source = /note="Description of Artificial Sequence: Synthetic coding sequence"
  source 1..459: mol_type = other RNA
atggcaagggactatgaccatcttttcaaactcctgattattggggatagcggcgtggggaagtcttcactgctcctgaggttcgctgataacacattctccggatcgtacatcacaacaatcggcgtggacttcaagatcaggactgtagagattaatggagaaaaggtgaaattacagatttgggatactgccggccaggagcgatttaggactatcactagtacctattatcgaggaacacacggcgtcattgtggtatacgatgtgacctcagcagaaagctttgtgaacgtgaaaagatggttgcatgagattaaccagaattgcgatgatgtgtgccggattttagatgtacagttgcaccacggcgcaggcccaccaagcaaagaacgacagccagggaagaccgctgcagccacaacggaacggtgtggggaggcccatgaagaacagtag

SEQ ID NO: 13287 - RNA, 696 nt, synthetic construct
  misc_feature 1..696: note = source = /note="Description of Artificial Sequence: Synthetic coding sequence"
  source 1..696: mol_type = other RNA
atgttatatataggcatcgccgaatacttttttaaatcagcctcatttgcccactttaccgctggcgtgttcaatgtgaccctctccacggaagaaatttctaatcatttcgtccagaattctcaaggattgggcaatgtgcttagcaggatagctgaaatatatatcctctcccagccgtttatggtcaggattatggctaccgagccacctattatcaacctgcagcctggaaactttacccttgacattcctgctagcattatgatgctaacccaaccaaaaaattcaaccgtcgaaacaattgtctcaatggactttgttgcatctaccagtgtagggctggtgattcttgggcagagactcgtttgctccctctcgctcaaccggttccgccttgccctcccggaaagcaaccgctcaaacattgaagttctacgcttcgagaatattcttagctctatactccactttggcgtgcttcccttagcaaatgcgaaactccagcaggggttccctttgtccaatccacacaagttcttgttcgtgaacagcgatatcgaggtccttgagggatttctgctcatcagcaccgaccttaagtacgaaacgtcatcgaagcaacagccctcttttcacgtttgggaaggactgaatctgatttcccgccagtggcgcggcaaatccgccccttag

SEQ ID NO: 13288 - RNA, 1911 nt, synthetic construct
  misc_feature 1..1911: note = source = /note="Description of Artificial Sequence: Synthetic coding sequence"
  source 1..1911: mol_type = other RNA
atgactacatggtctctccgaaggagacctgctagaaccctggggttattactactagtggtgctaggttttttagtgctgcgacggctggactggagcaccctggtgcctctgaggctgcgccacagacagctgggtctacaggcaaagggatggaattttatgctggaggactctactttttggatatttgggggatccattcactactttagggtgccaagagagtactggcgggatcggctgcttaagatgaaggcttgcgggctgaacaccctgacaacctacgtgccttggaatctacacgaaccagagcgcggcaagtttgacttttcgggaaacctcgacctcgaagcgtttgtgcttatggccgccgagattgggttgtgggtgatcttaaggcctggtccatacatatgcagcgagatggatctagggggcctgccgtcatggctgttgcaggaccccgggatgcgtctgcggactacctacaaaggcttcactgaggccgtggacttatattttgaccatctgatgtctcgcgtcgtccccctacagtacaaaagaggtgggccaatcatcgcggtgcaagttgaaaatgaatacgggtcttacaacaaagatcccgcatacatgccctatgtaaagaaagcactcgaagatcgcggcatcgtggagttgttattgacctctgacaataaagatgggctgtccaaaggaatcgtccaaggagtgctcgcgacgatcaacctgcagagtacgcacgaactacagctcctaaccacatttctattcaacgtacagggtacgcagcctaagatggtgatggagtactggaccgggtggttcgacagctggggagggccgcataatatcttagatagttcggaagtcctaaagaccgtgagcgccatcgtggacgccggctcgagcataaacctctatatgtttcatgggggaacgaatttcggttttatgaacggggcaatgcattttcatgactacaagtccgatgtcacttcatacgactacgacgccgttctcaccgaggccggggattacacagctaagtacatgaaactccgtgactttttcggcagcatttccggcattccactgcccccacccccagacttactccctaaaatgccttacgagcctttgacacctgtcctgtacttgtcactgtgggatgcccttaaatacctgggagagcctattaagtctgagaaacccattaacatggagaatctgcccgtgaatggcggcaatggacagtctttcgggtatatcctctacgaaacctccattacgtcttccggaattttgagtggacatgtccatgataggggccaggtgttcgtaaataccgtaagtatcggatttttagactataagaccaccaaaatcgccgtccccctgatccaaggctacaccgtcttgcgaatcctagttgagaacagaggaagagtcaactacggcgagaacattgatgaccagcgcaaaggcctcatcgggaacttatacttgaacgactcaccactgaaaaatttccggatctactcattggatatgaagaagagttttttccaaagattcggactcgacaaatggtcttccctccccgagacacctacgttaccagcctttttcctgggttcactctctatatcctcaaccccgtgcgatacatttttgaaattagagggctgggagaaaggagtggtgttcatcaacggacagaatttgggacgctattggaatatcggcccacagaagacgctgtatttaccgggcccttggctttcatccggaattaatcaagtgatcgtctttgaggaaacaatggctgggccagccttgcagttcacggagacaccccatctaggcaggaaccagtacattaagtag

SEQ ID NO: 13289 - RNA, 1374 nt, synthetic construct
  misc_feature 1..1374: note = source = /note="Description of Artificial Sequence: Synthetic coding sequence"
  source 1..1374: mol_type = other RNA
atggggtgttccttgcccctcagctgtatcatggttcgtagtgtggcctgggcaggctttatggttcttcttatgatcccttggggaagtgccgccaagctcgtttgctactttacaaattgggcacagtacagacagggagaggccagattcctgccaaaagacctggatccaagcctgtgcacgcacctcatttacgcatttgccggcatgacaaaccaccagctatctacaaccgagtggaatgatgagacactctatcaggagtttaatggtctgaagaagatgtttaccgatatggtcgcaaccgctaacaacaggcagacatttgtcaacagcgcaatcaggtttcttaggaaatattcatttgacggcctcgacctcgactgggaatacccaggcagccaggggagtcctgccgtggacaaagaaaggttcactactctggtgcaagacctggccaacgcttttcagcaggaagcgcagacgtctgggaaggagcgtctgctgctgtctgcagctgttccagcggggcagacctatgtcgacgctggctacgaagtagataaaatagctcaaaatttggatttcgtgaacctgatggcatacgattttcacgggtcctgggagaaagtcacaggacacaacagcccactctataagcgtcaggaggagtctggcgccgcggcatccttgaatgtggacgccgccgtgcagcagtggcttcagaaaggcacccccgcttccaagctcattctaggcatgccaacctacggtcgctcatttaccttagctagctcaagcgacacccgcgttggcgcacccgcaactggttctggaacgcctggcccatttactaaggaagggggcatgttggcctattacgaggtgtgtagttggaagggtgcaaccaagcaaagaatacaggaccagaaagttccctatatttttagagataatcagtgggtcggctttgatgatgttgagtcctttaaaaccaaggtcagttacttgaagcagaaaggcctgggaggtgcaatggtgtgggctctggacctggacgactttgctggctttagctgcaaccaaggtcgatacccgctgatccagacactacgccaagaattaagcctgccataccttccatccggcacgcccgaattggaagtgcccaagcctgggcaaccatccgagccagaacacggacccagccccggccaggacacattttgccagggcaaggcagatgggctttaccccaatcctagagagcgctcatctttttactcttgcgcagccggcagactgttccagcagtcctgtcctaccggtctcgtcttcagcaatagttgtaaatgttgcacttggaattag

SEQ ID NO: 13290 - RNA, 1125 nt, synthetic construct
  misc_feature 1..1125: note = source = /note="Description of Artificial Sequence: Synthetic coding sequence"
  source 1..1125: mol_type = other RNA
atgtacgtgagcacccgtgaaagatacaagtggctgcggttcagcgaggactgcctgtatctgaacgtctacgctcccgctcgggcacctggggacccccaacttccagtgatggtttggtttcctggaggcgccttcatcgtcggcgccgcttcctcctacgaaggctccgacttggctgctcgcgagaaggtggtcttagtgttcctacagcacagactgggaatatttggtttcctccgatggcggggtagaacagacgactctcatgcaagggggaattggggcctcctggatcagatggcagctctgcggtgggtgcaggagaatattgccgcattcggtggagacccaggaaacgttactttgttcggacagtcagctggtgccatgagcatctccggcttgatgatgtctccacttgcgtctggtctctttcacagagcgattagtcagtccgggactgctcttttcagattgttcatcacaagtaatcctttaaaagtcgctaagaaagtcgcccacctggccgggtgcaaccataattctacccagatcctcgtgaattgccttcgtgctctgagtgggacaaaagtgatgagggtgtctaataagatgcgcttcctccaactaaattttcagagagatcctgaggagatcatatggtctatgagtcctgtggttgacggtgttgttattcctgacgacccattagtgcttttgacccagggcaaagtctcctcagtgccgtatctgctgggcgtgaacaatctggagtttaactggcttctgccctacatcatgaagttccccctgaaccggcaggcgatgcgcaaagaaacaataactaaaatgctatggtctactagaaccctgctgaacattaccaaagaacaggtgcctttggtcgtggaagaatacttggacaacgtgaatgaacacgattggaagatgctcaggaatcggatgatggatattgtgcaagatgcgacatttgtctacgccactctccagactgcacactaccacagggaaactcctatgatgggtatctgtccggcgggacacgctaccacaaggatgaagtctacctgcagctggatccttcctcaagaatgggcctag

SEQ ID NO: 13291 - RNA, 384 nt, synthetic construct
  misc_feature 1..384: note = source = /note="Description of Artificial Sequence: Synthetic coding sequence"
  source 1..384: mol_type = other RNA
atgaagaccggactgttttttttatgccttcttggcactgccgcagccatacctacaaacgcccgcctgttgtctgaccatagtaagcccaccgccgagaccgtagccccagataacactgctattccaagcctgcgcgcagaggctgaggagaacgagaaggagaccgcagtttcaaccgaagatgattcccaccacaaagccgaaaaaagctccgttctgaagagcaaagaagaatcgcatgaacaaagtgccgagcaggggaagagctcaagccaggagttaggattgaaggatcaagaggattcagacggccatctgagcgttaacctcgagtacgcacctaccgagggaacacttgacataaaagaggacatgagttag

SEQ ID NO: 13292 - RNA, 285 nt, synthetic construct
  misc_feature 1..285: note = source = /note="Description of Artificial Sequence: Synthetic coding sequence"
  source 1..285: mol_type = other RNA
atgagaaccctcgccattctagccgctatccttttggtggcccttcaggctcaggcggagcccctacaggccagggccgacgaagtcgcagctgcaccagagcagatcgcagctgacattcctgaagtggtagtatcccttgcgtgggacgaatcacttgcccctaaacacccaggtagtagaaagaacatggcttgttattgcagaatccccgcttgcatagccggagaaaggagatatggcacctgtatataccaaggaagactctgggccttttgttgttag

SEQ ID NO: 13293 - RNA, 414 nt, synthetic construct
  misc_feature 1..414: note = source = /note="Description of Artificial Sequence: Synthetic coding sequence"
  source 1..414: mol_type = other RNA
atggctgcgctctcaagagctctcggaccccttcggacgcctgctcctcccctgtggatcggcctctttctggtcgcaaccggatcccagcagtctctagcacaaccactccccggaaacacaaccgaagccaccccccgctcgttacgcgcctccggctctctgtgcggtccacatgcgaaggcgccttacctgtgtgaagccacacacgaacccgccgccgcccgaattcgagcacaggtaccagatactcgctggtctcgcgtgggtggacaaagattttactctcgcgttctctctcccttgcacaggggcccgagtggccacaccgaggcctcagcccaacgtagccacatgggaaagcttaaggaacctcagcctcaggaccacaagcccggattgggggccagttag

SEQ ID NO: 13294 - RNA, 228 nt, synthetic construct
  misc_feature 1..228: note = source = /note="Description of Artificial Sequence: Synthetic coding sequence"
  source 1..228: mol_type = other RNA
atgctcaaggtgcactacccaaaattcggagtgtcagaggactgtctgtacctaaatatctacgcgcccgcacatgctgatacaggcagcaaattaccagtactcgtgtggttccctggcggcgctttcaagaccggctccgcatcaatttttgatggatcagctctagcagcatatgaagatgtgcttgtggttgtggtgcagtatcgacttggtatttttgggtag

SEQ ID NO: 13295 - RNA, 1491 nt, synthetic construct
  misc_feature 1..1491: note = source = /note="Description of Artificial Sequence: Synthetic coding sequence"
  source 1..1491: mol_type = other RNA
atggcacccgctaggacaatggctagagcacggctggcccccgcagattgtctgaatagttttaccgccggagtaccgggctttgtgctggacacaaatgccagcgtctcaaacggagccactttcctcgaatcaccaaccgttcgaagaggttgggattgtgtgcgcgcatgttgtacaacacagaactgtaatttagctctggtggagctccaacctgatcgaggtgaggatgccattgccgcctgtttccttatcaattgcttgtacgaacagaactttgtgtgcaagtttgccccacgagaaggcttcatcaactacttaactagagaggtctacagatcttatagacagctgcgcactcagggattcgggggctcagggatccctaaggcatgggccggaatcgacctgaaggtccagccacaggaacccctggttttaaaagatgtcgaaaacactgattggcgcctattaagaggggacaccgatgtgcgagtggagcgaaaggacccgaaccaggtagagctgtggggactaaaagagggcacttaccttttccagctgaccgtcaccagttccgatcatccagaggacactgcgaatgtcaccgtgactgtgttatctacaaaacagacagaagattattgcctggcatcaaataaagtgggacgctgccgcggcagctttccacggtggtactacgaccctaccgaacagatttgcaaatcattcgtttacggaggatgtcttggcaacaaaaataactatttgagagaagaagagtgcattctggcttgtcgcggggtgcagggtggacccctgcggggctcaagcggagctcaagccacctttccccagggcccgtccatggagcggaggcatcctgtttgttccgggacctgccagcctacccagtttcgctgttccaacggctgctgtattgattccttcctagaatgtgacgacactcctaactgtccggatgctagcgacgaagcagcctgtgagaaatacacttctggctttgacgaactccagcgaatccacttcccctccgacaaaggccattgtgtagatctgccggacacaggactgtgcaaggagtctattccgcgctggtactataatccttttagtgaacattgtgcaagattcacctacgggggatgttacggcaacaagaataacttcgaggaggagcagcagtgcctcgaatcctgtcgaggtatctccaagaaggacgttttcggattgcggcgagagattcctattccgagtacgggatctgttgaaatggcagtggctgtgttcttggtaatctgtatcgtggtggttgttgccatccttggatactgtttctttaaaaatcagcgtaaggattttcacgggcaccatcatcaccccccacctacacccgcatcaagcaccgtttccactaccgaggatactgagcacctggtgtataatcatacaactaggcccctctag

SEQ ID NO: 13296 - RNA, 528 nt, synthetic construct
  misc_feature 1..528: note = source = /note="Description of Artificial Sequence: Synthetic coding sequence"
  source 1..528: mol_type = other RNA
atgccgcctggtaccagagcatgcagggtcccaaggccaggtcgaagagctcccagacctcgccgcgacggcgagccaggcggccatggtgtcgctcctgcaagtgcagaagaagttggggcgagacccggattgcgcgctgttgcccgattgcttccccaacagcacctgcaggcaggttacgtgtgtgagagaaaagatctgctcgtgaacggatgctgcaacgtaaacgtcccttcaaccaagcagtactgttgcgatggctgttggcctaacggttgttgctcagcctatgagtattgtgtgagttgctgccttcaacctaacaagcagctcctgctcgaacgcttcctaaacagggccgctgtcgcttttcagaacctgtttatggccgtagaagatcattttgaactctgccttgcaaaatgcaggacatccagtcagtcagtacagcacgaaaacacctatcgtgaccccatagctaagtattgctacggcgagagccctccagagttattccctgcctag

SEQ ID NO: 13297 - RNA, 1881 nt, synthetic construct
  misc_feature 1..1881: note = source = /note="Description of Artificial Sequence: Synthetic coding sequence"
  source 1..1881: mol_type = other RNA
atggacctagttcttaagcggtgcctgctgcacctggccgtgatcggagctcttcttgctgtgggcgcgacaaaagtgccaagaaaccaggactggttgggagtatctcggcagcttagaaccaaggcttggaaccggcagctctacccagagtggacagaagcgcaaagattagactgttggagagggggacaagtctcgctgaaagtcagtaatgatggccctacattaattggcgctaacgcctccttctctatcgcactgaattttccagggtcccaaaaggttctgccagacgggcaggttatttgggttaataacactattatcaacggcgaccaggtgtggggcggtcagcctgtctatccacaggaaacggacgacgcttgtattttcccagacggcggcccctgcccttctggctcttggagtcagaagcgtagctttgtctatgtttggaagacctggggacaatactggcaggtgctaggcggacctgtgagcggcctgtccatcggaaccggccgggccatgcttggcacacatacaatggaagttaccgtctatcaccggcgaggctctcggagttatgtgcccctagcgcacagtagctcagcgtttactatcaccgaccaagtgcccttttccgtgtccgttagccagctgcgggccctggatggaggaaacaagcatttcctgaggaatcagcccctgactttcgctttgcagctgcacgatcctagtggatatctcgccgaagccgacctgtcctacacatgggatttcggagatagcagcggaacactaatcagcagggccctggtcgtgacacacacttaccttgaacctgggcctgtgactgcccaggtggtgctgcaagcagcaattccccttactagttgcggctcctctccagtgccaggaactactgatggccacagaccgactgccgaagcccctaatactactgccggccaagtccccacaactgaggtggtcgggaccacacccggccaggcccctactgctgagccttccggaaccaccagcgtccaggtccctacgacagaggtaatctcaaccgcccctgtgcagatgccaaccgcggaatcaactgcagcccaagttactacaaccgaatgggtggagaccactgctcgtgagcttcccattccagagcccgaaggtccggatgcttctagcataatgtcaacggaatcaattacagggtctctgggtccactgcttgacggaactgcgacccttcggctggtgaagcgtcaggtgccactggattgtgtcttgtacagatatggtagtttcagtgtgacattggatatagtgcaagggatagagtctgctgagatcctgcaagcagtcccatccggcgaaggggacgcatttgagctcacggtgtcctgtcaaggggggctgccaaaagaagcctgtatggagatctcatcacccggatgccaaccaccagcacaacgtctgtgtcagcctgtcttaccatcccccgcatgccaacttgtgttgcaccaaatcctcaagggtggcagcggcacatactgcttgaacgtgagcctggcagacaccaattcgctcgccgtcgtcagcacccagctgattatgcctgtgccaggcatcttgttgaccggtcaagaggccggactcggacaggttcctcttattgtcgggattctcctcgtactgatggcggtggtgttggcttccttgatctatcgccgcaggttaatgaagcaagattttagcgtaccacaactgccacactcttccagccattggctgcgcctgcctcgcatcttctgttcctgtcctattggcgaaaactctccactgcttagcggccagcaggtgtag

SEQ ID NO: 13298 - RNA, 1611 nt, synthetic construct
  misc_feature 1..1611: note = source = /note="Description of Artificial Sequence: Synthetic coding sequence"
  source 1..1611: mol_type = other RNA
atgccaaccctctgctcgagcttcggcctgcaggtccttttaccagaataccttagggaacgctttgttgctgctgctcttagctatattacctgttcgagcgagggcgagctggtgtgcaaggagaatgactgctggtgcaagtgtagtcccacctttcctgagtgcaattgtcccgatgcagatattcaggccatggaggattcactgctgcagatccaagattcttgggctactcacaaccgccagtttgaagaaagcgaagagttccaggccctactgaagcgcctgccagatgacaggtttcttaacagtacagcaatatcccagttctgggctatggatacctccctccaacacaggtaccaacaactgggagcggggttgaaggtgctgttcaaaaaaacacacagaattcttcggcgccttttcaacctgtgtaaaagatgccatcgacagccccgatttcgactgccgaaggagagctcaccaagaagcttatcatactggtggaatcgcatccaatccctactgtattgtggtgagtcgaccttccctggcacctttcttgagcagagtcacagctgtacatgtccctatgatcagtcctcgtgccaaggccccataccatgtgccctgggagagggacctgcctgtgcgcattgcgctcctgataattccactcgctgtgggagctgcaatccagggtatgtgctggcgcagggtctgtgtagaccagaagttgccgagtccctggaaaacttcctaggattagagactgatctgcaagacctggaactgaagtacctgttacaaaagcaggatagccggattgaagtacactccatctttattagcaacgatatgcgcttaggcagctggttcgatccctcctggagaaaaagaatgttgcttaccctgaaatcaaataagtacaaaccaggtttggtgcacgtgatgttagctctgtccctccagatctgcttgaccaaaaacagtacactcgaaccagttatggctatctacgtgaaccccttcggcgggtcgcattctgaaagttggttcatgcctgtgaatgagggtagcttccccgattgggaacgaacaaatgtcgatgccgctgcacaatgtcagaactggactattacattaggcaaccgatggaaaacattttttgagaccgtccacgtctatttacgaagtagaatcaaaagtctggacgatagctccaatgaaacaatctactatgagcctttggaaatgactgatcccagtaaaaatctcggttatatgaagatcaatactctgcaggtatttggttatagcctgccattcgaccctgatgccatacgggacctcattttgcaactcgattacccatacacacagggctcccaagacagcgcccttttgcagttgatcgaacttagagatcgcgtcaaccagttgtctccccctggcaaagtgcgcttggaccttttttcttgtctcctccggcatcgacttaagctggctaataatgaggtaggacgtatccagtcttccctacgcgcctttaacagcaaattacccaatcccgtggagtacgagaccggcaagctatgttcttag

SEQ ID NO: 13299 - RNA, 423 nt, synthetic construct
  misc_feature 1..423: note = source = /note="Description of Artificial Sequence: Synthetic coding sequence"
  source 1..423: mol_type = other RNA
atgtcccagagcatagaagtcctcaatcttaggacccaacgagatttccagtacgtgcttaagatggaaacccagatgaagggactaaaagccaagttcagacagatcgaagacgaccgcaagactctcatgaccaaacatttccaggagctgaaagagaagatggacgaactgctgcccctaattcccgtgctagagcaatataagactgacgcgaaattaattacacagttcaaggaggaaatacggaatctttccgcggtgctgaccggtatccaagaagagatcggggcctatgactacgaggaattgcaccaaagagtactctctctcgaaacacgcttgcgagactgcatgaaaaaattgatcgacctgaagaaaagaaaggaggaagagaagcgacaacagaagggagaggcttag

SEQ ID NO: 13300 - RNA, 1119 nt, synthetic construct
  misc_feature 1..1119: note = source = /note="Description of Artificial Sequence: Synthetic coding sequence"
  source 1..1119: mol_type = other RNA
atggcttatattgaacaacgcaggatctcgcacgaaggctcaccagtgaagcccgtcgccatccgggagtttcagaagaccgaggatatgcgccgttatttgcatcaaaatagagtgcccgccgagccatcctcccttctgagtctgagcgcttcccataatcagctcagccacaccgacctggagctccaccagcgacgggagcagctcgtggagcgaacaagaagagaagcccagctggccgccctgcaatatgaagaggaaaaaattcgtaccaagcaaatccagcgtgatgcagtcctggattttgtaaagcagaaggcaagtcagagcccgcagaagcagcaccctctgctggacggggtcgatggcgagtgtccctttccatctcggcggagccaacacaccgacgactctgcgctttgcatgtccctctccggcctgaaccaagtcggctgtgccgccaccctcccacattcctcagccttcacgcccttgaaaagtgacgatcggcctaatgctctgttgagctcaccggcgactgagactgtgcatcactcccctgcttatagttttcccgccgctattcaacggaatcagccacaaaggcccgagtcttttttatttagagctggagtgcgggccgaaaccaacaaggggcacgccagtccactgcctccttcagctgctccaaccactgattccaccgacagtattactggtcagaactccaggcaacgagaagaggagttggaattaattgatcagctccggaaacatatcgaatatcgcttaaaagtcagcctcccctgcgacttaggcgccgctctgaccgacggagtagttctctgtcacctcgccaatcatgtccgccctcgcagcgtcccttcaattcacgtcccaagccccgccgttccaaagctcactatggcaaaatgtcgacgtaatgtagagaatttccttgaggcctgtaggaagattggtgtgccacaagaacagctctgtctgcccctgcacatactcgaggaaaaaggactttcgcaggtagctgtcacagtccaagcacttcttgaattagcacctcctaaacagcaacaacatcaactatctgcagtgtag

SEQ ID NO: 13301 - RNA, 1242 nt, synthetic construct
  misc_feature 1..1242: note = source = /note="Description of Artificial Sequence: Synthetic coding sequence"
  source 1..1242: mol_type = other RNA
atggagaatatgttgctgtggcttatattttttacgcccggttggaccctgatagacggatctgaaatggagtgggactttatgtggcacctgaggaaagtgcctagaatcgtcagcgaacgcacgtttcatctgacatctccggcttttgaggctgatgcaaagatgatggttaacacggtctgtggaatagaatgccagaaggaattacccacgccctctttgtctgagcttgaagactatctttcgtatgagaccgttttcgaaaacggcacgcgaacccttacgagggtgaaagtccaagacttggtgttagaacccacacagaacatcacaaccaagggggtatccgtgagaagaaaacgacaagtttacgggacggattctcgttttagtatactcgacaaaaggttcttgacaaatttccctttctcaacagccgtgaagctttcaactggctgcagcgggattctgatctctccccagcacgtgctgaccgccgcccactgcgtgcacgacgggaaagactacgtgaaaggatctaagaagttaagggttggcctcctgaagatgaggaacaaatccggtggaaagaagagacgtggatctaagcggagtcggcgcgaagcatcaggtggagaccagcgggaaggcacccgtgagcacttaagggagcgcgctaaaggtggacgccgacggaagaagagtggtagagggcagaggatagccgagggacgcccgagttttcagtggacaagggttaaaaacacacacatacccaaggggtgggccagggggggcatgggagacgctacactggactatgactatgcactcctggagctcaagcgagcgcacaaaaagaaatacatggaacttggcatctccccaacaattaaaaagatgccaggcgggatgattcacttctccggatttgacaatgatagggctgaccagctcgtctaccggttttgcagcgtgtccgacgagtctaatgacctgctctatcagtactgcgacgcggaatcaggctctactggcagcggggtgtacctgcggctgaaagaccctgacaagaaaaattggaaaaggaaaattatcgccgtctactccggtcaccagtgggttgatgtacacggcgtacaaaaggattacaacgtggccgtccgaatcacacctctgaagtacgcccagatttgtctctggattcacggaaatgatgcaaactgtgcatacggctag

SEQ ID NO: 13302 - RNA, 2541 nt, synthetic construct
  misc_feature 1..2541: note = source = /note="Description of Artificial Sequence: Synthetic coding sequence"
  source 1..2541: mol_type = other RNA
atgttcaaatgctggtccgtggtgttggtactcggttttatttttctcgagtccgagggcaggcccacaaaggaaggagggtatgggctcaaaagttaccaaccccttatgcggctgcgacataaggagaaaaaccaagagagtagcagggtgaaagggtttatgatccaggatgggcctttcggctcttgcgaaaacaaatactgtggactcggaaggcattgtgtgactagcagggagacaggtcaggccgagtgcgcatgcatggacctctgtaagcggcattacaaaccagtgtgtggaagcgacggagagttttatgagaaccactgtgaagtacacagggccgcttgtctcaagaagcagaagatcactatcgtgcataacgaggactgcttcttcaaaggtgataagtgcaagaccacagagtacagcaagatgaaaaatatgctgctggatttacagaaccaaaagtatatcatgcaagagaatgaaaatccaaatggcgatgatattagcagaaagaagctcttggtggaccagatgtttaagtatttcgacgccgactcgaatggccttgtggacattaacgagcttacacaggttattaaacaggaagaactggggaaagatctgttcgactgcaccctgtacgtacttcttaaatacgatgatttcaacgcggacaaacatctcgccctggaagaattttacagagcctttcaggtgatccagctgagtctgcccgaagaccagaaactgagtataacagccgcgaccgtgggccagtccgccgtgctgtcttgcgcgatccagggtactctgagaccccctataatctggaaaagaaataacattattctgaacaacttagatctcgaggacatcaatgactttggggatgatggctctctgtatataacaaaagttacgacgacacacgtgggaaattacacatgctatgccgatggctacgaacaggtgtatcaaacacacatatttcaggttaacgtcccgccagtgattcgagtttaccctgagagtcaggcccgggagcctggtgtcactgcctccctccgatgtcacgcggaaggcatcccaaaacctcagttaggatggttgaaaaatgggatcgatataactccgaagctgagcaaacagctaaccctacaggccaatggatcggaagtgcacataagtaatgtgaggtacgaagatacaggcgcttacacttgtatcgctaaaaatgaggcaggggtggatgaagatatctctagcctcttcgtggaggacagcgctagaaagacattggctaacatcttatggagggaggagggacttggcattgggaatatgttttatgtcttctatgaggacggaatcaaagtcatccagccaatcgaatgtgaatttcagagacacatcaaacccagcgagaaactcctcggttttcaggacgaagtgtgccctaaagcggagggtgacgaagtgcagaggtgtgtttgggccagcgctgtgaatgtcaaagacaagtttatctacgtagctcaacctacattggaccgtgtactgatcgtggatgtgcagtctcaaaaagtagtccaggccgtgtccacagacccggtgcccgtgaaattgcactacgataaatctcatgaccaggtgtgggtcctgtcatgggggactttggaaaagaccagtcctacgctccaggtcatcacactcgccagcggaaatgtacctcatcacaccatccatacacagccagttggtaaacagttcgatcgcgtggacgattttttcatccccacaaccactttaatcatcacacatatgaggttcggattcatcctgcacaaggacgaagctgcgctacaaaagattgacctggaaactatgtcctacattaaaactataaacttaaaggactataagtgcgtgccacaatcactggcatatacccacctggggggctactattttataggatgcaagccagatagtaccggcgctgtatcaccccaggttatggtcgatggcgtcaccgattctgtaattgggtttaactccgatgtgacaggcaccccctacgtcagccctgatggccactacctcgtgagcatcaatgacgttaaaggcctggtgcgcgtgcagtatattacaattcgcggcgagattcaggaagcgttcgatatttacacaaatctccatatctccgacctggctttccagccttcctttactgaggcacaccagtacaatatttacgggtcctccagcacccaaaccgacgtcctattcgttgaattgagctccggtaaggtgaagatgatcaaatcgctgaaggaaccgcttaaagccgaagagtggccatggaatcgtaagaatagacagattcaggacagcgggttatttggtcagtaccttatgacgcctagcaaagacagtcttttcattctagatggccgccttaacaagctgaattgtgaaatcacagaagtcgaaaagggcaacaccgtgatatgggttggggatgcttag

SEQ ID NO: 13303 - RNA, 582 nt, synthetic construct
  misc_feature 1..582: note = source = /note="Description of Artificial Sequence: Synthetic coding sequence"
  source 1..582: mol_type = other RNA
atgctgggtgttttggagctgctattacttggagctgcctggctcgccggtcctgcaagagggcagaatgaaacggaaccaatagtgttagaggggaaatgtctcgtggtatgcgattccaatccaacaagcgaccctaccggtaccgctctaggcattagtgtgagaagtgggagtgcaaaggtcgctttctccgcgattcgctccacaaaccacgaacctagcgagatgtctaaccggacgatgattatttactttgaccaagtgctggtgaacatcgggaataacttcgatagtgagaggtcgaccttcattgctcctcgcaagggcatatactcattcaatttccatgtggtgaaagtctacaacaggcaaactattcaagtctccctgatgctaaacggctggcctgtgatcagcgctttcgctggcgaccaggacgttacccgagaagctgcttctaacggagtgttgatacaaatggagaagggagatagggcttatttgaaactcgaacgcggcaacctcatgggggggtggaagtactcaactttcagcgggtttctagtgttccccctgtag

SEQ ID NO: 13304 - RNA, 813 nt, synthetic construct
  misc_feature 1..813: note = source = /note="Description of Artificial Sequence: Synthetic coding sequence"
  source 1..813: mol_type = other RNA
atgcacggctcatgttcattcttaatgcttctactcccgttactcctcctactggtcgccaccaccggtccagtaggggctctgactgatgaagaaaaacggctgatggttgaactgcataatctctaccgcgcacaagtgtctccaaccgcttcagacatgctgcacatgagatgggacgaagaactggccgccttcgcaaaggcatacgcaagacaatgcgtctggggacacaataaagaacgaggcaggagaggcgagaatctgtttgccatcactgacgaaggcatggatgtgccccttgccatggaagaatggcaccatgaaagagaacattacaatctgtccgccgccacatgcagcccaggccagatgtgcggtcactatacccaggtggtttgggcaaagaccgaacgtatcggctgtgggtctcatttctgcgaaaaactacaaggtgtagaagagaccaatattgaattgcttgtatgtaattatgagccacccgggaacgtgaaaggcaaaaggccataccaagagggcactccttgcagccaatgcccttcaggctaccattgcaagaacagtctctgtgagcctattggatccccagaagacgcccaagacctgccttaccttgttactgaagccccatcctttcgcgccactgaagcctctgactcccgtaagatgggagcggagggtcctgacaagcccagtgtggtgtctggactcaattcaggtcctggacacgtgtgggggccccttctcggtttactcctccttcctccactggtgctagctggcatattctag

SEQ ID NO: 13305 - RNA, 702 nt, synthetic construct
  misc_feature 1..702: note = source = /note="Description of Artificial Sequence: Synthetic coding sequence"
  source 1..702: mol_type = other RNA
atggatcaggtttttatgatcgactcaaaatgtgagagcggcaaaggcagatgtagcttcaatcccaatgtcaacaccgttagcgtgatgattaatgaagagcttttttctgggatgtatattgactttatgggaacggacgcagctatcttcagatcgctcacgaaaagaaatgctgtgcgcacagaccagcataatagcaagtggttgtccgaacctatgttcgtggacgcccatgtgataccagatggcacagatcctaatgatgctaaagtttacttcttctttaaggagaaactgacagataacaaccggtctaccaaacagatccactccatgatcgcccgtatttgccctaacgataccggaggtttgaggtctcttgttaacaagtggaccactttcctgaaagctcgattagtctgctccgtgaccgatgaagacggacctgagacgcattttgacgagctggaagatgtttttttgctagagaccgacaatcctcgaacaacccttgtttatgggatcttcacaacctcaagctctgtcttcaagggatccgctgtgtgcgtgtatcatctttccgatattcagactgtgttcaacggaccctttgcacacaaggaaggcccaaaccaccagttgatttcataccaaggcagaatcccttatcctcggcccggcaccaacacgtgtgtatag

SEQ ID NO: 13306 - RNA, 1368 nt, synthetic construct
  misc_feature 1..1368: note = source = /note="Description of Artificial Sequence: Synthetic coding sequence"
  source 1..1368: mol_type = other RNA
atgctccatcctgaaacctcccccggtcggggccatctcctcgctgttctgttagctctgctggggactgcatgggccgaggtctggcccccacagctgcaagaacaagcaccgatggcaggcgccctcaatcggaaggagtcctttctcctcctctctttgcataacagactcagaagttgggtgcagcctccagccgcagacatgagacgcctcgactggagcgactcactggcgcagctggcccaggcacgagcagctctatgtggcatccccacgccaagtctcgcctccggcctatggagaactcttcaggtgggatggaatatgcagctactcccggcaggcttggccagcttcgtcgaggtcgtgagcttgtggttcgctgaggggcagcgatactcgcatgcagccggggagtgcgcgagaaacgccacatgtactcactatacgcagcttgtctgggcaacaagttcacagctaggttgtggacgccatctgtgcagcgccggccaagcagccattgaagccttcgtttgtgcctactccccgcggggtaactgggaagtgaacgggaagactatcgtcccctacaagaaaggagcctggtgttctctgtgcaccgcatcagttagcggctgctttaaggcctgggatcatgcaggcggattatgcgaggtaccccggaatccctgtcgcatgtcctgtcagaaccacggcaggctgaacatctccacctgccactgtcactgcccacccggctacaccgggagatattgtcaagtaagatgcagcctacagtgcgtgcatgggcggtttagggaagaggagtgcagctgtgtctgcgatattggatacggaggggcacaatgcgccactaaagtccatttcccttttcatacctgcgacctgagaatcgatggcgattgcttcatggtaagtagtgaagccgacacctactaccgggctagaatgaaatgtcaacgcaaaggaggcgtgctcgcacagattaagagtcagaaagtacaggacattctggctttctacctagggagattggagacaaccaatgaagtgatcgactcggactttgagacaaggaacttttggatcggactgacttataagactgcgaaagactcgttccggtgggctacaggcgagcaccaagcatttacaagttttgcatttggccagcccgacaatcacgggctcgtctggctaagtgccgcaatgggcttcggaaattgcgttgagctgcaagcctcagcagccttcaattggaacaatcagagatgtaagacaaggaacagatacatttgccaatttgctcaggaacatatcagccgttggggccctgggagctag

SEQ ID NO: 13307 - RNA, 462 nt, synthetic construct
  misc_feature 1..462: note = source = /note="Description of Artificial Sequence: Synthetic coding sequence"
  source 1..462: mol_type = other RNA
atggccagattctgggtatgtgtcgccggggccggcttttttctggcttttctggtcctccattctagattctgcggaagtccagtgctgagaaattttacttttgctgtctcatggcgcacagaaaaaatactgtacaggctcgacgttggttggccaaaacatcctgaatactttaccggaacaactttctgcgtcgcggtggactctcttaatggcctggtgtatattggccaaaggggggataacataccaaaaatcctcgtatttacagaagacggatactttctacgtgcctggaactatacggtcgatactcctcacgggatcttcgctgcatccacattgtatgagcagtccgtctggattacggatgtgggttcagacttcatgatactgtggctgcatggcgaaaatgggacaggccccgcaaaattcaatattccccacagcgtgacatag

SEQ ID NO: 13308 - RNA, 375 nt, synthetic construct
  misc_feature 1..375: note = source = /note="Description of Artificial Sequence: Synthetic coding sequence"
  source 1..375: mol_type = other RNA
atgtggcgatgccccctcgggcttttgcttctgttgcctctggccggccacttagcacttggtgctcagcaggggagaggtcggagagaactggctcctggactccatctgaggggaatacgagatgccggagggagatactgccaggaacaggacctgtgctgtagaggaagggctgatgactgtgcactgccttaccttggagctatctgctactgcgatctcttctgtaaccgcactgtgtctgactgttgccccgacttttgggatttctgtcttggtgttccaccccctttccctccaatacaagcacctgcacggcgcaccggaagcggaagcgtgactaagaatcatgcatggtggatccagacctag

SEQ ID NO: 13309 - RNA, 777 nt, synthetic construct
  misc_feature 1..777: note = source = /note="Description of Artificial Sequence: Synthetic coding sequence"
  source 1..777: mol_type = other RNA
atgaaaacgttgtacttggctgacactttccctacaaactttcgagactccgccggagctatgaaacagatcaatgattacgtggccaagcagaccaaaggaaagattgtcgatcttctcaagaatctagattctaacgctgtcgtcattatggtaaattacatcttctttaaagccaaatgggagacatcattcaatcataaaggcacacaggagcaggacttttacgttacttctgaaacagttgtccgggtgccaatgatgagtagggaggaccaatatcactatctcctagacaggaatctgtcttgtcgggtcgtgggcgtcccttatcagggcaacgctactgccttatttatcctgccctcagaaggcaagatgcagcaggtggagaacgggctaagcgaaaaaacactacgtaaatggctcaaaatgttcaagaagcggcagttggagctgtacttacccaagttttctatcgaaggtagctaccagctcgaaaaagtgctcccatccctcggcatttcaaatgtgtttacaagccatgcagatctgtctggcatttccaatcactccaatattcaggtcagcgagatggtgcataaagcggtagtagaggtagatgagtcaggaactcgtgctgcagcggccaccggcacaattttcacgtttaggagcgccaggctgaactctcaacggctagtttttaatagacctttcctaatgttcatagtagacaataatatccttttcctcggaaaggtgaaccggccatag

SEQ ID NO: 13310 - RNA, 1731 nt, synthetic construct
  misc_feature 1..1731: note = source = /note="Description of Artificial Sequence: Synthetic coding sequence"
  source 1..1731: mol_type = other RNA
atgatcgtcttcggatgggctgtgttcctcgcttcaaggtcccttggccaaggtctgctattaaccctcgaagaacacatagcacactttctgggcacaggaggagccgccactactatgggaaactcctgtatctgccgggatgattccggaaccgatgactctgtcgatactcagcagcaacaggctgaaaacagcgccgttcctacggcagacactaggtcgcagcctagggatccagttagacctcccaggagaggtcgagggccacacgaacctcggcggaagaagcaaaatgtggacggcctcgtcctggacaccttagcggtgatcagaacactcgtcgataatgaccaggagcctccttacagtatgattactcttcatgaaatggctgagaccgacgaaggttggttggacgtggtacagagtctgatccgcgtgattccactagaggatccactaggaccagcagtaataacactcctgctggacgagtgccccctcccaactaaggatgcccttcaaaaattgacagaaatcctgaacctaaatggggaagttgcttgccaggacagctcacacccagccaagcacaggaatacctctgctgtactcggttgccttgcggagaaactagccggtccggcatccatcggcttattaagccctgggatccttgagtacctcttacaatgtttgaagctacaatcacaccccacagtcatgctgtttgccctaatagccctcgaaaagtttgctcagacttccgagaataaactgaccatttccgagagtagtatttctgaccggctcgttacattagaaagttgggccaacgaccctgactatctgaagaggcaggtaggcttttgcgctcaatggagtctcgacaatctgttcttaaaagaggggagacaactgacttacgaaaaggtaaacctctcatcgattcgagccatgctgaattccaatgatgtgagcgagtatcttaagatttcaccacacggcctcgaggctcgatgcgatgcatcctcctttgagagcgtgaggtgcaccttttgtgtggatgcaggcgtatggtattatgaagttacggtggtcacaagtggggttatgcagatagggtgggcaacccgcgacagcaagtttcttaaccacgaaggctatggtattggtgatgacgagtatagctgtgcctacgatggctgcagacagttgatatggtacaacgcccgttccaagcctcatatccacccttgctggaaagaaggggatactgtgggattcctgcttgacctgaacgaaaaacagatgatctttttcctgaacggcaaccaattgccccctgagaaacaggtattctcatccacagtatctggcttttttgctgccgccagttttatgagttaccaacagtgcgaattcaactttggcgctaaacccttcaagtacccaccttctatgaaattttccacattcaatgattatgcgttcctgactgctgaggaaaagatcatcctccctcgccatcgaagattggctttgctgaaacaagtatctattagagaaaactgttgctctctgtgctgtgatgaggttgccgacactcagttgaaaccttgcggacattccgacttgtgcatggactgcgccctgcagctggagacctgtcccctttgcagaaaggagatcgtgagccggattcgacagatttcccatatttcttag

SEQ ID NO: 13311 - RNA, 1359 nt, synthetic construct
  misc_feature 1..1359: note = source = /note="Description of Artificial Sequence: Synthetic coding sequence"
  source 1..1359: mol_type = other RNA
atggctgatatgcacagaggatacgccgattcaccaagcaaggccggcgccgccccatatgtacaagcattcgatagcctgctggctggtcctgttgcagagtacttgaaaataagcaaagaaatcggcggagacgtccagaaacatgcagaaatggtgcacacaggactcaagctagaacgcgcactcctggttacagcttcacagtgccagcagccagcagagaacaaactgtctgatctgctggcaccaatcagcgaacagatcaaggaggtgataacttttagggaaaaaaacagaggatcgaaactatttaaccatctgagcgcagtgagtgagtcaatacaagccctgggctgggttgcaatggccccaaagcctggtccctacgtgaaggagatgaatgacgcagctatgttttacacaaacagggtgctgaaggaatataaggacgtcgacaagaagcatgtcgattgggttaaagcgtacttatccatttggactgaacttcaggcgtacatcaaagagttccatacaacaggcttggcttggagtaaaaccggtccggttgctaaggaattgtcaggactgccatcgggtccctcagcagggtcctgtccccctcctcctcctccgtgtccaccacctccccctgtgtccacgatctcttgcagttatgagagcgcatcacgatctagtttgtttgcccagattaaccagggagaaagcattacccacgctctgaagcacgtgtccgacgatatgaaaacacataagaatcccgccctcaaggcgcagagcggcccagtgcgcagcggccccaagccctttagcgctcctaaaccacaaacgtccccctctcccaagcgagccaccaagaaggaacccgcggtgttggaattggaaggaaagaaatggcgggtggagaaccaggagaatgttagtaatctggtcatagaagacactgaacttaaacaggtggcatacatatataagtgcgtgaatactacattgcagatcaaaggtaagataaatagcattactgttgataactgtaagaaactgggtctcgtctttgatgatgttgtgggcatcgtagagatcattaatagcaaagacgtaaaggtgcaagtgatgggcaaagtgcccacgatctcgattaacaagacagacggttgccacgcctatctttcgaagaacagcttggactgtgagatagtctcagcaaaatcttctgagatgaacgtgctcattcccacggagggaggggacttcaatgaattccccgtgcctgagcaatttaagacgttgtggaacggccagaagctggttaccacagtaacagagattgcaggctag

SEQ ID NO: 13312 - RNA, 1533 nt, synthetic construct
  misc_feature 1..1533: note = source = /note="Description of Artificial Sequence: Synthetic coding sequence"
  source 1..1533: mol_type = other RNA
atgggcaggcctactcagtggccttcattattgctactgctgctgttgccaggaccgccaccggttgcgggactggaagatgccgcattcccccatctgggagagagtcttcagcctctgccacgtgcgtgtccattgcgatgtagttgtccccgcgttgacactgtagattgcgacggtctcgacttacgagtgttcccagataacatcactagggctgcccaacatctttccctgcagaataaccagctgcaggaacttccgtacaatgagttaagccgcctgtcaggcctgcgaacccttaacttgcacaacaacctgatttcttcagaaggtctgcctgacgaggccttcgagtcacttacacagcttcagcatctgtgcgtcgcacacaataaactgtcagttgcaccccagttccttcctcggtccctccgtgttgccgatcttgcggccaaccaagtgatggagatattcccgctgacatttggcgagaagccagctctccgttcagtgtacttgcataataatcaactcagcaatgcgggcttgccaccagacgcttttcgaggctccgaagcaatcgctactctttcattaagtaacaatcaactatcatacctgccaccatctctgccaccatcccttgagaggctgcatttacagaataacttaattagcaaggtccctaggggtgcgctttctcgccagactcaactgagggaactctacctgcagcacaatcagctgaccgatagtggccttgacgcaaccactttttctaaactgcacagcctggagtatcttgacttgagccacaaccagctgacaacggttccagccggcctgcctcgcaccctcgctatactccatcttggccgaaaccgtattcgacaagtggaagcagctagactccacggagcccgcggattgagatatctcctgctgcaacataaccagttggggagtagtggactgccagccggtgccctcaggccacttcgcggcctgcatacgcttcacctgtacggaaatggcctggatagagtgccacccgcactccctagacgccttcgtgccctggtcctgcctcacaatcacgttgcagctctgggagcaagggatcttgtggcgactcctggcctgactgagctaaatcttgcctataatagactggcctctgcaagagtccatcaccgtgcttttagacgtctgcgagctctccgcagtctggacttggccggcaaccagctaactagactccccatgggtttgccaacagggctgaggacattgcagttgcagagaaaccagctgagaatgctggagcccgagccacttgctggactcgaccagttgagggaactgagcctcgctcataatcgcctgcgagtcggcgatattggaccaggtacttggcacgagctccaggcactgcaagtgagacaccgtctcgtctcccatacagtccccagggccccaccttcgccctgcctgccatgccacgtgccaaatattttagtcagttggtag

SEQ ID NO: 13313 - RNA, 114 nt, synthetic construct
  misc_feature 1..114: note = source = /note="Description of Artificial Sequence: Synthetic coding sequence"
  source 1..114: mol_type = other RNA
atgaactccacgctgaatttcttcatccagtcctacaataatgcaagcaatgatacatacctataccgcgttcaacgacttatcagatcacaaatgcagcaggtacactgctag

SEQ ID NO: 13314 - RNA, 1266 nt, synthetic construct
  misc_feature 1..1266: note = source = /note="Description of Artificial Sequence: Synthetic coding sequence"
  source 1..1266: mol_type = other RNA
atgggcaggccaactcagtggccttcattacttctgctgcttctcctccctggcccccccccagtcgccggattagaggatgcagctttccctcatctcggcgagagtctgcagcccctccctagagcttgccccttacgatgcagctgccctagagtagatacagtggactgtgatggcctcgaccttcgcgtctttcctgacaacattaccagggccgcccagcacctgtcactccagaacaaccaactccaggaattaccttacaatgagctgtcccgcctgagcgggctccgcacactaaatctgcacaataatttaatctcttcagaggggctccctgacgaggcgttcgaaagcctgacacagctccaacacctctgcgtggctcacaacaaaaataatctcatctctaaagtgcctcggggggccttgtctaggcagactcagctgagggagctgtaccttcagcacaatcaacttacggatagcggcttagacgcaaccacattcagtaaacttcacagtctagaatacctggatttgtcccataaccaattaactaccgtccccgccggcctgccacgcactctggctatcttgcacctggggcgcaatcggatccggcaggtagaggcggccaggctacatggtgccagaggcctgagatacttgctcctccagcacaaccagctggggtccagcgggttacctgctggcgctctacgacctcttagaggcctccataccctgcatttatacgggaatggtctggatagagtcccccccgcactccctcgccgcctgcgcgccctcgtgttaccccataaccacgtggctgccttgggcgcaagagacctcgtagcgacgcccggcctaaccgagttgaatctagcctataatcgtctggcttcagcacgtgtgcatcatcgcgcctttcggagactgcgagcccttaggtctctcgacctggccggcaatcagctcactcgactgcccatggggctgccgactgggttaaggaccctgcagctccagcgaaaccaactgcggatgctagaaccagaaccactcgctggtctcgaccagctcagagaactcagtctcgcacacaaccgtttacgtgtgggcgatattggcccagggacttggcacgaactgcaagccctgcaagttcgacacagactggtctcccacactgtgcccagagccccccctagcccctgtttaccctgccacgtacctaatattctggtaagttggtag

SEQ ID NO: 13315 - RNA, 993 nt, synthetic construct
  misc_feature 1..993: note = source = /note="Description of Artificial Sequence: Synthetic coding sequence"
  source 1..993: mol_type = other RNA
atgagttcctggtctcggcagcgtcccaaatctccaggagggatacagccccacgtttctcgtactctgtttttgcttttactcctggcggctagcgcatggggggttactttatcacctaaggactgtcaggtgtttcgaagtgatcatggatcatctatctcctgccaaccacccgcagagatccccggctatctccccgccgacaccgtgcatctggccgtagaatttttcaatctcacacacctacctgccaatctcttacagggagcgtctaaattgcaggaattacatttatcttcaaacggcttggagtccctctcgcctgaatttctgaggccagtaccacagctgcgggtacttgatctgacccgcaatgccttggttcttaaggagaatcagttggaagtgctggaggtgagttggctgcacggcctgaaagccctagggcacctagatctcagtggaaaccggctccggaagctaccccccggcctgctggctaatttcacacttctgagaaccctggatctgggagaaaatcagctcgaaaccctgcctcctgacttactgagaggacctcttcaactggagcgcctgcacctggagggaaataaactccaagtcctcggcaaagatctgctcctgccccagcccgatctgagatacctgttcctcaatggcaataagctggcacgcgtggccgccggggcatttcagggacttaggcagctggacatgctggatctctccaacaactcgctcgcatcggtgccagaagggctgtgggcatctctgggccagcctaattgggatatgagggacggcttcgacatctccggaaacccgtggatctgtgatcaaaacctgagtgatctgtataggtggctccaggcccagaaggacaaaatgttctcccagaatgatactcgttgtgccggtcccgaggctgttaaaggacagactctgctcgccgtcgccaagtcccagtag

SEQ ID NO: 13316 - RNA, 1815 nt, synthetic construct
  misc_feature 1..1815: note = source = /note="Description of Artificial Sequence: Synthetic coding sequence"
  source 1..1815: mol_type = other RNA
atgatgagggctgtgtgggaggcccttgctgccctcgctgctgtcgcttgtcttgttggtgccgtacggggaggtcccggactctcgatgtttgccgggcaggctgctcagcctgacccttgctccgacgaaaacggccatccccgtagatgtatccccgactttgtgaatgcagcgttcgggaaggatgtcagagtcagtagcacctgcgggcgaccccctgcacgatactgcgtggtgagcgagcggggagaagaacgcctgcggagttgtcatttgtgtaatgcctccgatcccaagaaagcacatccacctgccttcctgacagacctcaacaacccacacaacctcacttgttggcaaagtgagaactaccttcaattccctcataatgtgacactgactctgagcctgggcaagaagttcgaggttacatatgttagtcttcagttctgttctcctcggccggagagcatggccatttacaaatcaatggactacggtaggacatgggttccctttcagttttattccactcagtgccgcaaaatgtataatagaccacacagagcccctatcacaaagcagaatgaacaggaagccgtctgtacagactctcatacagacatgaggccactgtcaggcgggctcatagccttctccacactggatggtaggcccagtgcccatgatttcgataacagcccagtgcttcaggattgggtgaccgccaccgacattcgtgttgccttttcccggcttcatacatttggagatgagaacgaagacgattcagaacttgccagagatagctatttctacgcggtgagcgatttacaagtggggggtagatgtaagtgcaacggccatgcagcccggtgtgttagggatcgagacgattccttggtgtgtgattgtaggcacaataccgccggaccagaatgtgacagatgtaaacccttccactacgatagaccttggcaacgggccacagcccgagaagcaaatgagtgtgtggcatgcaactgtaacctgcacgcccggagatgtcgttttaacatggaactatacaagctgagtggccgaaaatcaggaggggtgtgtttaaactgcaggcacaacacggccggaagacactgtcactactgtaaagagggctattaccgcgatatgggtaagcctatcacgcatcgtaaggcatgtaaggcctgtgattgccatcccgtgggagctgcggggaagacatgcaaccaaacaaccggtcagtgcccttgtaaagatggagtgaccggaattacctgtaatcgatgcgcaaaagggtaccagcagtcgcgctccccaatcgcaccgtgcattaagattcctgtcgctcctcctaccacagctgctagctccgtggaagagccggaagactgcgattcatattgtaaggctagcaaggggaaactcaagatcaatatgaagaagtactgtaagaaggattatgctgtacaaatccatattctgaaggcagacaaagccggggattggtggaagtttaccgtgaacatcattagcgtgtacaagcagggaacgagcagaatacggcgcggtgaccaaagcctctggatcaggagtagggatattgcctgcaagtgtccaaagatcaagccgctgaaaaaatacttgctgctcggcaatgcagaagactcccctgaccagtcgggtattgtggccgataaaagctcactggtaattcagtggcgtgacacctgggcccgccggctcaggaaatttcaacagcgcgagaagaaaggaaagtgcaagaaggcatag

SEQ ID NO: 13317 - RNA, 948 nt, synthetic construct
  misc_feature 1..948: note = source = /note="Description of Artificial Sequence: Synthetic coding sequence"
  source 1..948: mol_type = other RNA
atgggccaggatagagaggaaacaaatattgaattacttgtctgcaattacgagccccccgggaatgttaaaggaaaacgtccatatcaagaaggcactccatgtagtcaatgtccttctggttaccactgcaagaactcactttgcgaaccgattggcagtcccgaagacgctcaggacctaccttacctggtgactgaggcacctagctttagagcaacggaggcatctgatagccgcaaaatgggaacaccatcatctctggccacaggcatacctgcctttctggtgaccgaagtgtcgggctctcttgccacaaaagcgctcccagctgtcgaaacacaggccccgacgtctctggcaaccaaggacccaccttctatggctacagaagcacccccttgtgtgaccacagaggtgcccagcatcctcgccgcccattccctgccctcgttggacgaagagcccgttacgttccctaagtcgacacatgtgcctatcccgaaatccgctgacaaggtaacagataaaaccaaggttccatctcggagccctgagaactcactagatcctaagatgagccttaccggcgcacgggagctgttgccacacgcgcaggaggaagctgaagcggaggcggagctccctccaagcagtgaggtgctcgcatcagtctttccggcacaggataagcccggcgaactgcaggcaacgctagatcatacaggtcacactagctccaagagtttaccaaatttccctaacacttcagctaccgcaaacgcaacaggcggcagagcccttgcattacagtcctcacttcctggggcagaaggtccagataaacctagcgtggtaagcggcctgaactccggacctggacatgtttggggcccactgctcggtctactcctgctcccccctctggtgttggctgggattttctag

SEQ ID NO: 13318 - RNA, 207 nt, synthetic construct
  misc_feature 1..207: note = source = /note="Description of Artificial Sequence: Synthetic coding sequence"
  source 1..207: mol_type = other RNA
atgcaagtttcaaccgccgccctggccgtgcttctttgtaccatggccctgtgtaatcaggtactctcagctccccttgccgccgacacacctaccgcttgttgtttcagttacaccagtcggcagatcccacagaacttcatcgccgactacttcgaaacctcctcacagtgttccaagccttccgttatggccgccccaggttag

SEQ ID NO: 13319 - RNA, 3369 nt, synthetic construct
  misc_feature 1..3369: note = source = /note="Description of Artificial Sequence: Synthetic coding sequence"
  source 1..3369: mol_type = other RNA
atgtccctacaggagatgttccgcttcccaatgggcttgttacttggctctgtattactggttgcctcagcacctgcaaccttggagccgcccggttgcagtaacaaggaacagcaggtgactgtttcccacacctacaagatagatgtgccaaagtccgccctggtgcaggtggacgcagaccctcagcccctgtcagacgacggcgcgtcattgctggctctgggcgaagcacgggaggaacagaacattatttttcgccacaacataaggctgcagactccacagaaggattgtgaattagccggcagcgtccaggatcttcttgctagggtgaagaaattggaagaagagatggtggagatgaaagagcagtgctcagcccaaagatgctgtcagggcgtgacggacctgtcccggcattgctccggtcacggtacattctccctcgagacctgtagttgccactgtgaggaagggcgagagggtccggcatgcgaacggctggcctgtcccggagcctgcagcggtcacgggagatgcgtagatggtcgctgtctctgtcacgaaccatacgtaggcgctgactgtggatatcccgcctgccccgagaattgtagcggacacggcgagtgtgtccggggggtatgtcaatgtcatgaagacttcatgtccgaagactgttcagaaaagcggtgccccggcgactgttccgggcacgggttttgcgataccggtgaatgctattgtgaagaaggctttacaggactggactgcgcgcaggttgtgacaccacagggcctccagctgttgaaaaacacggaagacagcctgcttgtgtcctgggagccctcgtcgcaggtcgaccattatctgttaagctactatcccctaggcaaagaactgtccggtaaacagatccaggtcccaaaagaacagcactcctacgagattttaggcctcctgcctggcacaaaatacattgtcactctgagaaacgtcaagaatgaggtgtccagctctcctcaacacttgctcgcgacgaccgatctcgctgttctcggaactgcatgggtgactgatgagacagaaaattctctggacgtcgaatgggaaaacccctcgactgaagtcgactattacaagctgagatacggccctatgaccggccaggaggtggccgaggtgaccgtacccaaatccagcgatccaaagtcccggtatgatatcaccggactgcacccagggactgagtataaaatcacagtcgtccctatgcgcggcgaactggaaggtaaaccaatcctcttaaacggccgcacagagatcgattcccctacaaatgtagtgaccgaccgcgtgacggaggatacagcaactgtttcctgggacccagtgcaagccgtgatagacaagtatgttgtgcgctacaccagcgcagacggagacacaaaggagatggcagtccacaaggacgaatcttccacagtgctgacaggcttgaagcctggcgaagcttacaaagtgtatgtttgggctgagagaggcaaccaaggaagtaagaaggccgatacaaacgccctgaccgagatcgacagccccgctaacctggttacagatagagtcacagagaatactgccacaatttcctgggatcccgtccaggccaccatcgatcggtacgttgtacggtacacttcggcgaaagatggcgaaaccagggaggtgccagtcgggaaagagcagagttcgacagtactgactggcctgcggccaggcgtggaatatacagttcatgtctgggcacagaagggtgcccaagagtccaagaaggctgacactaaggcccaaacagacatagatagccctcagaatctggttacagactgggtcactgagaacacagcgaccgtgtcatgggacccagtccaggccactattgatcgatacgtcgtgcattacacatccgcaaacggtgaaactagggaagtgccggtgggtaaggaacagagcagtactgttctaacagggctacggccaggcatggaatatacggtgcatgtgtgggcccagaaaggcaatcaagagagcaaaaaagctgataccaaggctcagacggagatcgacgggcctaagaatctcgtaaccgattgggtcactgaaaatatggccaccgtgtcctgggaccccgttcaggcaactatcgacaaatatatggtacgctacactagcgcagatggggaaaccagggaggtccctgtgggaaaagaacattcctcaactgtcttgaccggtttgcggccagggatggagtatatggtgcacgtctgggctcaaaaaggggcccaagagagcaagaaggctgacactaaggcccagactgagctggatcctcctaggaatctccgaccttccgcagtgacccagagcgggggcattttaacttggacgcccccgtccgctcaaatccacggctatatactaacgtatcaatttccagatggaactgtcaaagagatgcagctcggtagggaggaccagcgcttcgctctgcaaggactggaacagggtgcaacatacccagtgtcacttgtcgcatttaagggtggaagaaggagtagaaatgtctcaaccacactgtcaacagtgggtgcgcgctttccgcacccttccgattgtagtcaggtgcagcagaactctaacgccgcctcagggttatataccatatatcttcacggtgatgcatccaggccgttacaagtctactgcgatatggaaactgacggaggtggttggattgtctttcagagacgaaatactggccagctcgacttcttcaagcgttggaggagttatgtggaggggttcggcgatcccatgaaagaattttggcttggacttgacaaactccataatctgaccactggaaccccggccagatacgaggtgagagtcgacctgcagacagccaatgaaagtgcttacgccatatatgatttttttcaggtcgccagctctaaagagagatacaagttgaccgtaggaaaatatagaggcactgccggcgacgccttaacataccataatgggtggaagtttacaactttcgaccgcgataacgacatagccctttcaaattgcgcactgactcatcatggagggtggtggtacaaaaactgccacctcgcgaacccaaacgggcgctacggagaaacaaagcattctgagggagtgaattgggaaccctggaagggccacgagttctcaatcccttatgtagagctgaagataaggccacacgggtactctcgagagcccgtccttggaaggaagaaacgaacactacgcggaagactgaggacattctag

SEQ ID NO: 13320 - RNA, 897 nt, synthetic construct
  misc_feature 1..897: note = source = /note="Description of Artificial Sequence: Synthetic coding sequence"
  source 1..897: mol_type = other RNA
atgcttcacccagagacaagcccgggcaggggtcacttactagctgtgctccttgccctgctgggaaccgcatgggctgaagtgtggccccctcagctacaggaacaggccccaatggccggagctctaaaccgaaaggaaagctttttgttgcttagcctccacaacagattgagatcctgggttcagccaccagctgccgatatgagaaggctggactggtccgactccctgaattggcttaaacctgggcccctatggaacccaaaccctgagcccggcgtcagacctgtcgcgcatccagctagcggactggagcatgcggcctgcccacgggcttggcgccctctgctgaagtggtctttgtggttcgccgagggtcagagatattcccacgctgccggcgagtgtgcaagaaacgccacatgtacacattacacgcaactcgtgtgggccacaagctcacagttaggttgcggccggcatttgtgctccgcaggccaagctgctattgaagcatttgtctgtgcttattcacctcgggggaactgggaggtcaatgggaagacgatcgttccctataagaagggtgcctggtgtagcctttgcactgcgtctgtcagcggatgctttaaggcttgggaccatgcaggcggtctatgtgaagtccctcgtaacccatgccgcatgagttgccagaatcatggccgtcttaatatctccacttgtcactgtcattgtccgcctgggtacaccggaaggtactgtcaagttcgatgcagtctgcaatgcgtccatggacgatttcgggaggaagagtgttcatgtgtgtgtgacattggctacgaaccttctgtcccacctcgctgcatattccccagcaccccagtaacctag

SEQ ID NO: 13321 - RNA, 1728 nt, synthetic construct
  misc_feature 1..1728: note = source = /note="Description of Artificial Sequence: Synthetic coding sequence"
  source 1..1728: mol_type = other RNA
atggacctggtccttaaaagatgcctgcttcacctcgcagtcattggagctcttctggccgtaggtgcgactaaaggaagccaagtttggggcggccaaccagtctatccccaagagactgacgacgcctgtatttttccagatggcgggccgtgcccgtccggcagttggtctcagaaacggtccttcgtctacgtatggaaaacatggggccagtattggcaggtgctcggcggaccggtgtccgggctgagcatcggcacgggccgtgccatgcttggaacccacacaatggaggtcacggtttatcacagaagaggttcgcggtcttacgtcccattggctcatagtagcagtgcctttactatcacggaccaagtccccttttcagtgtccgttagtcagcttagggctctggatggtggcaataagcattttctccggaatcagcccttaaccttcgcattgcagttgcacgatccgtcaggctacttagccgaggcagacctttcctatacctgggacttcggtgactcgtcgggcaccctcatcagccgcgctctggttgtcacacatacctatctggaacctggacccgtaactgcacaggttgtgctgcaggccgccattcctttgactagctgtggctctagccctgtcccagggaccaccgacggacacagacccactgctgaagctccaaacacgaccgccggccaggtacctaccaccgaggtcgtcggaactacacccggtcaagccccaacagcagagccttctggcaccaccagcgtccaggtgcctactactgaggtgatctccaccgcaccggttcagatgccgactgcagagtctactggtatgacacccgagaaagtgccagtttctgaggtcatgggcacaacattagcagagatgtcaaccccagaagcgaccggcatgacgcccgctgaagttagtattgtcgttctgtcagggactacagcagcccaggttacaacaactgagtgggtagaaaccacagcacgtgagctcccaatccccgagccagagggccccgacgcctcttcaatcatgtccaccgaaagtatcactgggtccctcgggcccttgctggacggcaccgccaccctcagactggttaagcgccaagtgcccctagactgtgtgctttataggtacggaagctttagtgtcaccttggatattgtgcagggcattgagagcgccgagattctgcaggccgtacccagcggggagggcgatgcatttgaactgaccgtgtcttgccaaggggggctgcccaaagaagcttgcatggagattagctcacccggttgccagccgccagctcaacgcctgtgccaaccggtcttaccttctcccgcctgtcagctggtcttgcaccaaattttaaagggagggagcgggacatactgcctcaatgtgagtctcgccgatacgaactccctggcagtggtctccacacaactcatcatgcccggccaagaggcaggattaggccaagtgcctttgattgtcggaattttgttggtcctcatggcagtggtgcttgccagcctcatatacagacgaaggctgatgaaacaggattttagcgtgccccaactgccacactccagttcgcattggttgagactgccacggatattctgctcatgcccaatcggggagaacagtcccctgctgagtggccaacaggtgtag

SEQ ID NO: 13322 - RNA, 330 nt, synthetic construct
  misc_feature 1..330: note = source = /note="Description of Artificial Sequence: Synthetic coding sequence"
  source 1..330: mol_type = other RNA
tgaagtggacagtctctcaaatctctgaatgcttccagtgggcacctggctctgattttatcatctattttcggactgctcctgctcgtgttgtttatcctgttccttacttggtgtcgtgtacagaaacagaagcatctgcccctccgcgtcagtacacggagacggggaagcttggaggagaacctgtttcatgagatggagacatgccttaaacgcgaggatccccatggcacccggacatctgacgatacccctaatcacggttgcgaagacgcttctgacactagcctacttggagtgctccctgcttctgaggcaacaaagtag

SEQ ID NO: 13323 - RNA, 312 nt, synthetic construct
  misc_feature 1..312: note = source = /note="Description of Artificial Sequence: Synthetic coding sequence"
  source 1..312: mol_type = other RNA
atgtcaggaaggggcaaaggagggaaaggcctgggaaaaggcggagctaaacgacacagaaaagtgcttcgggacaacattcagggcatcacgaagcctgctatccggagacttgctagaagaggcggagtgaaaagaatctccggccttatttacgaagagacaagaggggtgctgaaagtttttctggagaacgtgattcgcgacgcagtgacgtacactgagcacgcaaaacgtaaaaccgtgacggccatggacgtggtttacgctttaaaaagacagggtaggacactctacggtttcggtggttag

SEQ ID NO: 13324 - RNA, 2889 nt, synthetic construct
  misc_feature 1..2889: note = source = /note="Description of Artificial Sequence: Synthetic coding sequence"
  source 1..2889: mol_type = other RNA
atgctcaggcgaccggcaccagctctagctccagccgctagattgctgcttgcggggctgctgtgcggaggcggtgtctgggctgccagggtaaacaagcataagccatggctcgagccgacttatcatgggatcgtgaccgaaaacgataatacagtgctcctggatcccccgctgatcgcactggacaaggacgcccccctgcgtttcgcagaatccttcgaggtcacggttacaaaggagggagagatctgtggttttaaaatccacggccagaatgtcccatttgacgcagtagtagtcgacaagtctaccggagagggcgtgatccggtcaaaggaaaaactagactgcgagttacaaaaagattactctttcacaatacaggcatacgactgtgggaaaggcccagacggaactaacgtgaaaaagtctcataaagcaacagtgcacatacaggtgaacgacgttaatgagtatgccccggtattcaaggagaaatcttacaaggccactgttatcgagggaaagcagtatgactccatcctgagagttgaggccgttgacgctgactgcagccctcagttctctcagatctgcagctacgagatcattacacctgatgtgccgtttaccgtggataaagacggatacatcaagaacaccgagaagctcaattatgggaaggagcaccaatacaaactcaccgtcacagcatatgattgtggcaaaaaacgagccaccgaggatgtgttggtgaagatttctatcaaacctacttgcaccccaggatggcaaggatggaataacaggattgagtacgagccaggcaccggcgctcttgccgtgtttcccaatatccacttagaaacctgcgacgagcccgtagcatccgtgcaggcgaccgtggaattggagacctcccacattggaaagggctgcgaccgggatacctatagtgaaaaaagccttcacagactttgtggcgctgccgccggcactgccgagctcttgccttcccccagtggttccctgaattggacaatgggcctgcccacggataatggacacgattcggatcaggtgttcgagtttaacggcacccaggcagtaagaatccccgatggagtagtcagtgtttccccaaaagaacctttcacaatttccgtttggatgcgtcacgggccgttcgggcgcaaaaaagaaacgattctgtgctcatctgacaagaccgatatgaatcggcatcactattccttgtacgtccacggttgcaggcttatcttcttgttccggcaggatcctagtgaagaaaagaaatatagacctgctgagttccactggaaattaaaccaggtctgtgatgaggaatggcaccactacgttctaaacgttgagtttcccagcgttacattgtatgtcgacggcacctcacacgagcccttttccgtgacagaagactaccccctgcatccgtcaaagatcgaaactcagttggtcgttggggcatgttggcagggcggggacctgcacatgactcaatttttcagagggaacttagcggggctgaccctcagatccggaaagctggctgataagaaggtcatcgactgtttgtatacttgcaaggagggtctagatttgcaggtcctagaggacagtggacgtggggtacagattcaagctcacccctcccaactcgtgctgacattggagggcgaagatctcggggaattggacaaggctatgcagcacatttcgtatttgaactcccgccaattcccaaccccgggtattcgtcgcttgaagatcaccagtaccattaagtgcttcaatgaagccacctgtataagcgtgcccccagtcgacggatacgttatggtgcttcaacctgaggaacctaagatttctttgtctggcgtgcaccacttcgctagagctgcatcggagtttgagtcaagcgaaggagtgttcctgtttcccgaactgagaatcatctcgaccattactcgggaggtggagcctgaaggagacggagccgaggacccaaccgtccaggaatccctggtttctgaagagatagtacatgacctagacacatgtgaggtgactgtcgaaggtgaagaactgaatcacgagcaagagagcctcgaagtggacatggcgcgactccagcaaaagggaatcgaagtaagttcctctgaactggggatgacttttaccggagtggatacgatggcaagttacgaagaggtgctccacctgctacggtatcgaaattggcacgcccgcagcctcctcgacagaaaattcaagttgatatgttctgagctgaacggaagatacatcagcaatgagtttaaagtggaagtgaacgtgattcataccgccaatcctatggagcacgctaatcacatggctgctcaaccccagtttgtgcaccccgaacaccgctctttcgtggatctgtcaggacataacttggccaaccctcatcccttcgccgtggttcccagcactgccaccgtggtgatcgttgtttgcgtgtcctttctggtattcatgattatcctgggcgtgttccgtatccgcgccgcacacaggaggacaatgcgcgatcaagatacgggtaaagagaatgaaatggactgggacgatagcgctttaaccattacagtcaatcccatggagacatacgaagatcagcacagcagcgaggaagaagaggaggaggaggaggaagaagaatccgaagacggagaggaggaggatgacatcacaagtgccgaaagtgaaagctccgaagaagaggaaggcgagcagggcgatccccagaacgccaccaggcagcagcaactcgaatgggacgattctacactctcatattag

SEQ ID NO: 13325 - RNA, 912 nt, synthetic construct
  misc_feature 1..912: note = source = /note="Description of Artificial Sequence: Synthetic coding sequence"
  source 1..912: mol_type = other RNA
atgctgcaccctgaaaccagtcctggccgtggccacctcctcgccgtcttgcttgcactactcgggaccgcttgggctgaggtttggcccccccagctgcaggagcaggcgcccatggcgggtgcgctcaatcgcaaggagtctttcctgctgctgtctctccataatcgtctgagaagctgggtgcaaccccccgctgccgacatgagaaggttggactggagcgattccctggcacagcttgctcaggcacgcgcagccttatgcggaacccccacgccaagcttggccagtggactgtggcggacacttcaggttgggtggaatatgcagctgctgcctgcaggcttggtttcattcgtggaagtcgtatcactgtggtttgccgagggacaacggtactcccacgccgcaggggaatgcgctcgaaacgccacatgcacacattacacccagctggtgtgggccacatcctcccaactgggttgcggcaggcacttatgctccgctggccaggcagccatagaagcctttgtgtgcgcttactctccccggggcaattgggaagtcaatggcaagacgatcgtgccctacaagaagggagcgtggtgcagtctgtgcaccgcatctgtgtcgggatgctttaaagcatgggaccatgccggggggctgtgtgaggtacccaggaatccgtgccggatgtcttgccagaatcacggacgtctgaatataagcacctgccactgtcactgtcctcccggctacacaggcagatattgccaggtgagatgctcgttacaatgtgttcacggtaggtttcgcgaagaggaatgctcatgcgtgtgtgatataggctatggagaaccaagcgtacctcctagatgtatcttccccagcactcctgtgacctag

SEQ ID NO: 13326 - RNA, 1356 nt, synthetic construct
  misc_feature 1..1356: note = source = /note="Description of Artificial Sequence: Synthetic coding sequence"
  source 1..1356: mol_type = other RNA
atggaagcaacgggaaccgacgaggtggacaaactaaagacaaagtttatttccgcgtggaataatatgaaatattcctgggtcctcaaaaccaagacctacttcagtaggaacagcccggttctgttactaggcaaatgctaccatttcaagtatgaagatgaagacaagacactacctgccgagtccggatgcacaattgaagatcatgtcattgcgggcaacgtggaagagttcagaaaagattttatatcacgtatctggctcacgtacagggaggagtttccacaaattgaaggaagtgcacttacgactgactgcgggtggggatgcacgctgcgcaccggacagatgctcttggcacagggcttaatcctccactttttgggacgcgcctggacatggcctgatgcccttaacattgaaaattcagactcggaatcttggacctcacacacagtgaagaagtttaccgcctcattcgaagcatctttatccggcgagcgtgagtttaagacacctactatcagcttgaaagagaccatcgggaagtacagtgatgatcacgaaatgagaaacgaggtgtatcaccgaaaaattatttcttggttcggagatagtcctctggccctattcgggttgcaccagctgatagaatatggaaagaagagcggaaaaaaggcaggcgattggtatggccctgcggtggtcgctcacatcctgagaaaggctgtggaagaggctcgtcatccagatctccagggcatcacaatttacgtggctcaggattgcaccgtgtataacagcgacgtgattgacaaacaatccgcttccatgacaagcgacaacgccgatgacaaagctgtgatcattctggtccccgtgcgactggggggcgagaggacaaataccgattacctcgagttcgtgaaaggtatactctcacttgaatattgcgttggaattatcggggggaaacctaagcagtcttactactttgcggggttccaggatgatagtctaatttacatggatccacattactgtcagagtttcgtcgatgtgagcataaaggattttcctctggagacatttcactgccctagccctaagaaaatgtcctttagaaaaatggacccaagttgcaccattgggttttactgtagaaacgtgcaggatttcaaaagagcatcagaagagattactaaaatgctcaagttcagttctaaagaaaaatatccgctgttcaccttcgtcaacgggcactcacgggactacgacttcacaagtacaactaccaacgaggaagacttattttccgaagacgaaaaaaagcagaaaaaaaaaaaaaaatag

SEQ ID NO: 13327 - RNA, 1557 nt, synthetic construct
  misc_feature 1..1557: note = source = /note="Description of Artificial Sequence: Synthetic coding sequence"
  source 1..1557: mol_type = other RNA
atgaggacttgggactacagatggagcctggccttggtggctcaaaccggtgtccactgctgtaacttgtcgtctctgcaaccccttccacctaggttcaaaaggttttcatgtctgtccctttcatccgggtgggactacagtaactcaggtaatatgaagccacctttgttggtttttatcgtgtgcttgctctggttgaaggactcgcactgcgctcctacgtggaaagacaagaccgccatctccgagaacctaaagagcttcagcgaggtgggcgagattgatgctgatgaggaggttaaaaaggccctcaccggtataaaacagatgaagataatgatggagcgaaaagagaaagaacacaccaacctcatgagcactctgaagaagtgccgcgaggaaaaacaggaggcccttaagctgctgaacgaagtccaggaacatcttgaggaggaggaaagactgtgccgggaatccctcgcggactcttggggcgagtgcaggtcatgcctagaaaataattgcatgcggatttacaccacctgccaaccatcctggtcatccgtcaaaaacaagattgaaagattctttcgcaagatttaccagtttttgttcccatttcacgaggacaatgagaaggatttacccatatcagagaagctgatcgaagaagatgcccagttaactcagatggaagacgtgttctcacaactgactgtcgacgtgaacagcctgttcaatagaagttttaatgtgttccgccagatgcagcaggaattcgaccagacatttcaatctcacttcatttctgacacagatctcacggaaccttacttctttcccgcgttctccaaggaaccgatgaccaaggctgatctcgaacagtgttgggatattccaaactttttccagctgttttgtaacttttcagtgagtatttatgagtcagtctcagagactattactaaaatgcttaaggccatagaagatctgcccaaacaggacaaagccccggaccatggaggactcatctcaaagatgcttcccggacaggatagaggactgtgcggtgaactcgatcagaacctgtcaagatgttttaagtttcatgagaaatgccagaagtgtcaggcccacctcagcgaagattgccccgacgttcccgcactccacaccgagctcgatgaggctattagactggttaacgtctcaaatcagcagtacggacagatcctgcagatgacaaggaagcacctagaagataccgcgtatctcgtagaaaagatgagagggcagttcggttgggtctccgaactggcgaaccaggcccccgaaaccgagattatctttaactccattcaagtggtgccacgcatccacgaagggaacatctctaagcaagatgagaccatgatgacagacctgtctatcttgccatcatctaacttcactctgaaaatacctctcgaagagtctgccgaaagcagcaattttatcggctacgtggttgctaaagctctccaacactttaaggagcatttcaaaacatggtag

SEQ ID NO: 13328 - RNA, 1716 nt, synthetic construct
  misc_feature 1..1716: note = source = /note="Description of Artificial Sequence: Synthetic coding sequence"
  source 1..1716: mol_type = other RNA
gttgaaatgagaaaatggagctcagaacctggcccggaacccgatactgtggaagccgttatcgagtatatgtacacagggcggatcagggttagtacgggtagtgtccacgaggtcctggaattggccgatcgatttctgcttataagactgaaagaattttgcggagaatttctcaaaaaaaagctgcatctcagcaattgtgtggcaatccacagtttggctcacatgtatactctgagtcagcttgccctgaaggcagcggacatgatcaggcggaatttccacaaagtgattcaagatgaggagttctacactcttcctttccatttgatacgggactggctgagtgacctggaaatcactgtggactctgaagaggttctctttgaaactgtgctgaagtgggtgcaacgaaacgccgaggaaagagaacggtacttcgaggaactttttaagctgctgaggttaagtcaaatgaagcctacctacctgacacggcatgttaaaccggaacggttggtagcaaataacgaagtctgcgtgaaattagtagctgacgccgtagaaaggcatgcactgagggccgaaaacattcagagcggtacctgtcagcacccaaccagccatgttagcttactgcctaggtacggtcagaacatggatgtgataatggttataggcggcgtttctgaggggggggattacctttctgaatgcgtggggtactttgtcgatgaggataggtgggtgaatcttcctcacatacacaaccatctggacgggcacgccgtggcagtgacggaaagttacgtttatgtcgccggaagcatggaaccaggattcgcaaagaccgttgagaggtacaatcccaatctgaatacctgggagcacgtttgttccctgatgacgcggaagcattcttttggactgacagaggtgaaaggaaagctgtatagcatcggcggccatggtaacttctctccaggctttaaggatgttaccgtctataaccccgaacttgacaagtggcacaacctggagagcgcccccaagatcctgcgtgacgtcaaagcactagcaattgaagaccgcttcgtctacattgctgcccggacacccgtagaccgtgacacggaggacggtttgaaggccgtgattacatgctacgacactgaaacgcgtcagtggcaagatgttgagtctctacccctcatcgacaattactgcttctttcagatgtcagtcgtcaatagcaatttttatcaaacagctagctgctgtccaaagtcgtactgcctagagaacgaagaggcggtgagaaaaatagcatcccaggtgtccgatgagatccttgagagtctgcctccggaggtgcttagtattgagggggctgccatttgttactataaagatgatgtttttataattggcggatggaagaacagtgacgatattgacaagcagtatagaaaggaggcttaccgctactgtgctgagcgcaaaagatggatgttgttgccaccgatgccacaaccgagatgtagggctacagcctgtcacgtgcgcattccgtataggtatttacatggcacccagcggtaccctatgccccaaaatctgatgtggcagaaggacagaatcagacagatgcaggaaattcatcgccacgctttgaatatgcggagagttccaagctcgcagatcgagtgctag

SEQ ID NO: 13329 - RNA, 729 nt, synthetic construct
  misc_feature 1..729: note = source = /note="Description of Artificial Sequence: Synthetic coding sequence"
  source 1..729: mol_type = other RNA
atgttgaaaaagatatcagtgggggtggccggcgatctgaatacagtcactatgaaacttggttgtgtgctcatggcgtgggcactgtatctgagcttaggggttctctgggtagcccagatgcttttagccgcaggctgtcacgccgaactttttccggcacctattctgagagcagtacctagcgctgagccacaggccggaagccctatgactctcagttgccagacaaaactacccctacagagatccgccgcgagactgctgttttctttttataaagacggccggatagttcaatcccgaggactgagttctgagttccaaatccccaccgcctccgaggatcactcaggctcttattggtgtgaggccgccacggaagataatcaagtgtggaagcaatctccccagttggagatccgggtccagggtgcatcttccagcgccgcgcctcccactctcaatccagccccacagaagtccgccgcccccggtacagctcccgaggaagcgccaggcccgctgcccccacctccgacaccctcctcagaagatcccggatttagcagtccgctcggaatgccagacccacacctctaccatcagatggggctgctgcttaaacacatgcaggacgttcgcgttcttctaggtcacctgttgatggaactcagagaacttagcgggcaccgcaagccaggcacgaccaaggctaccgcagagtag

SEQ ID NO: 13330 - RNA, 1392 nt, synthetic construct
  misc_feature 1..1392: note = source = /note="Description of Artificial Sequence: Synthetic coding sequence"
  source 1..1392: mol_type = other RNA
atgtacgtgagtactcgcgagcgatacaaatggctgaggttctcagaagactgcctttatctaaacgtttatgccccagctcgggcccccggcgaccctcaactacccgtaatggtctggtttcccggaggtgccttcatcgtgggcgctgcatcttcctacgaaggatcagacctggccgcccgggaaaaagtggttctggtctttcttcagcacaggttgggtatcttcggattcctgtccactgatgatagtcacgctcgcggcaactggggccttctggaccaaatggctgccctgagatgggtgcaggagaacattgcagcgttcggcggtgatcctgggaacgtgaccctttttggccagagcgctggagccatgtcgatttccggcctaatgatgtcaccacttgccagcggcctctttcaccgagccatctctcaatccggcacagctctgtttcggctgtttatcacatcaaacccactgaaagtggcgaagaaagtcgcacacctagcaggctgtaatcacaactccactcaaatcctggtaaactgcctacgagctttgtcagggacaaaagtcatgagggtcagcaataagatgcgcttcctccagcttaattttcaaagggacccagaggagatcatctggtctatgagcccagtagttgacggcgttgtcatccctgacgaccccctggttttgcttacacagggcaaggtgtcttcagtgccctacctcctcggagtgaataatctggagtttaattggctgctgccctacatcatgaaattccctctcaaccgccaggccatgagaaaagaaacaatcaccaagatgctgtggagcactaggaccctgcttaatatcacaaaggaacaggtgccacttgttgtcgaagagtacctcgataatgttaacgagcacgattggaagatgctgagaaaccgaatgatggacattgtgcaggatgctacctttgtatacgcgacactacagacagcccactatcacagggacgcagggcttccggtctacttgtacgaattcgaacatcacgcccgggggatcatcgtgaaacctcgaactgacggcgcagatcacggagatgagatgtacttcctatttggaggacctttcgctaccggactctctatgggaaaggaaaaggcgctgtctctgcagatgatgaagtattgggccaacttcgctagaacaggcaacccaaacgatggtaatctcccatgctggccgcggtacaacaaggacgagaagtacctgcaattggacttcacaacgagggtgggaatgaagctgaaggagaaaaaaatggctttctggatgtctctttaccagtcccagagacccgagaagcaacgccagttctag

SEQ ID NO: 13331 - RNA, 1215 nt, synthetic construct
  misc_feature 1..1215: note = source = /note="Description of Artificial Sequence: Synthetic coding sequence"
  source 1..1215: mol_type = other RNA
atgttctatcacgcctacgattcatatctggagaacgcgtttccctttgacgaactgagacctctgacctgcgacgggcacgacacttggggcagcttcagccttactctgattgacgcactggacacccttctcattctcggtaacgtgtcagaattccagagagtagtcgaggtgttgcaagatagcgttgacttcgatattgacgtaaacgcaagtgtttttgaaaccaatatacgtgtggtcggtggtctcctctcagcccatctactcagcaaaaaagctggtgttgaagttgaagcaggctggccatgttccgggcctctgctccgcatggcagaggaggctgctcgcaagctactgccggcattccagacacctacaggtatgccctatggtactgtcaatttgctacatggcgtgaaccctggtgaaacacccgtcacctgcaccgccgggattgggacctttatcgtggaattcgctaccttaagctctctcactggtgaccctgtgtttgaagacgtggcccgcgttgccctgatgcgtttgtgggaatctcgtagcgatatcggattggtaggcaatcatattgacgtgctcactggcaaatgggtagcacaggacgcggggattggcgcaggcgtcgacagttattttgaatacttagtgaagggagcaatcttactgcaggacaaaaagttgatggctatgttcctggagtacaacaaggccattcgcaactacacacgctttgatgactggtacttgtgggtacaaatgtataaaggcacagtgagcatgcccgtgtttcagtccctcgaagcgtattggccggggctgcagagtctcatcggtgatattgacaatgccatgaggacctttctcaattattacacggtttggaaacaatttggcggcctgcctgaattttataatatccctcaaggatatacagtggaaaaacgcgaaggctaccctctccgcccggagctgattgaaagcgccatgtatctgtaccgagctactggagacccgacattacttgaattgggacgggatgcagtggagagcatagagaagattagcaaagtcgagtgcggcttcgcaactgtgtccgtttgcatggcaccaagaaccggaaagagcctcccgctgctgctgaaatcactgtttaagggacgagcgttgggggtcctgacataccagcactag

SEQ ID NO: 13332 - RNA, 1281 nt, synthetic construct
  misc_feature 1..1281: note = source = /note="Description of Artificial Sequence: Synthetic coding sequence"
  source 1..1281: mol_type = other RNA
atgggttggacagacaccttagaaagtgctgaggacatcttctggaagcaagctgactttggctacgcgcgggagcgactggaggagatgcacgtactatgccaacccaaagaaacatcagacagttcactggtgtgtagccggtaccttcagtactgtcgtgcgaccaacttatatcttgatttgaggaacattaaaaggaaccacgatcgattcaaagaggatttttttcagtcaggcgaaatcggcggccactgtaaactcgatatccggaccctgactagtgaaggccagaggaagagccctctccaaagctggttcgctgagttgcagagctatacccaactgaacttcaggccaatcgaagacgctaaatgcgacattgtgatagagaaacctacctacttcatgaagctagatgcaggggtgaacatgtatcaccacttttgtgactttattaatttatacataactcaacacgtcaacaactctttttctacggacgtctacatcgttatgtgggacactagcagctacgggtatggtgatttgtttagtgacacttggaacgccttcacggactatgacgttattcatctcaagacctacgactccaagcgggtctgtttcaaggaagcagttttttcgttattaccacggatgagatatgggctcttctacaatactccccttatctccggctgccagaataccggtctgttccgtgctttcgcccaacatgtcctgcacaggctgaacataacacaagaaggcccaaaggatggcaaaataagggtgaccattctggcaaggagcacagaatacaggaaaatcctcaaccagaacgaattggtgaacgctctgaaaaccgtgtctacctttgaggtgcagatcgttgattataaataccgagaattaggcttccttgaccagctgcgcataacacataacacagacatcttcatcggcatgcatggtgccgggcttacgcacctgctctttctgcccgactgggcagccgtattcgagctttataattgtgaggacgaacggtgttacctagacctggccaggctccggggggttcattacataacatggagaagacagaataaggtattcccacaagataaggggcatcaccctactctgggcgagcatccaaagtttacaaattacagcttcgatgtcgaggagttcatgtacttggtgctgcaagcagcagatcacgtactgcagcatcccaaatggcccttcaagaagaagcatgacgaactttag

SEQ ID NO: 13333 - RNA, 1098 nt, synthetic construct
  misc_feature 1..1098: note = source = /note="Description of Artificial Sequence: Synthetic coding sequence"
  source 1..1098: mol_type = other RNA
atgaagctgggatgtgtgctgatggcctgggcattatacctttcgctcggtgtgctctgggtggctcaaatgttattggtcgcatcctccttctctgctgcctccttcgaaaccctccagtgtgaaggccccgtctgcactgaagaaagttcgtgccacactgaggacgacttgaccgacgcccgagaagcgggcttccaggtcaaagcctacaccttttctgagcccttccatctgattgtgtcctatgactggctcattctccagggccctgcgaagcctgtgttcgagggtgatctcctagttctccggtgccaagcttggcaggattggcctttaacacaagtaacattttaccgggacggctcggccttggggcccccaggaccaaacagagagttcagcattaccgtagtccagaaggccgattctggccattatcattgctcggggatttttcagagtcccggacctgggatacccgaaaccgcatcagtggttgccattacagtccaggagctgttccctgctccaattctacgcgctgtccccagcgccgaaccccaagcaggaagcccgatgacactgtcatgccaaactaaacttccactgcagagaagtgcggcccgcctgctgttttccttttacaaggacggccgtatcgtgcaatcacgagggctgagctctgaatttcagatcccgacagcctctgaggatcactcgggctcatactggtgcgaagccgcaacagaagataaccaagtgtggaagcagtctcctcagttagaaatccgagttcagggcgctagctctagtgcggctccccctactcttaatcctgcaccacagaagtccgccgccccagggaccgccccggaggaagcccctggccctcttccaccacctcccacacccagtagcgaggaccctggcttcagttcaccccttggcatgccagatccccacttataccatcaaatggggcttctactgaaacatatgcaggacgtcagggtactgcttggacacctcctgatggagcttagagaattatcaggtcaccggaagcctggtaccacaaaagctaccgcggaatag

SEQ ID NO: 13334 - RNA, 1407 nt, synthetic construct
  misc_feature 1..1407: note = source = /note="Description of Artificial Sequence: Synthetic coding sequence"
  source 1..1407: mol_type = other RNA
atgcgctggattctatgctggtctttaacgctctgcctgatggcgcagaccgcccttggagctcttcacacaaaaagacctcaggtggtgacaaagtacggaacactccaagggaagcaaatgcacgtgggaaagacacccatccaagtgtttctgggggtgccattttccagacctccactggggattctgcgattcgctccacccgagccgccagagccttggaaaggcatccgggatgccactacttacccacctggttgtctgcaggagtcttggggccaactcgcttctatgtacgtgtcgacccgcgaacgctacaaatggctccgtttcagcgaagactgtctttacctgaatgtgtatgccccagctcgcgcaccaggggacccccagctgccagtcatggtgtggttccccggtggtgcctttattgtgggggctgcttcaagctatgaggggtctgatctggcggcaagggaaaaagtggtgttagtttttcttcagcacagattgggaatcttcggctttctctccacagatgattctcatgctagaggtaattggggcttgctagaccagatggccgctctgcgctgggtccaagaaaacatagccgcctttggtggcgatcccggtaatgtgaccctctttggccagtctgctggggcaatgagcatctctggcctcatgatgtctccactcgcaagcggcttgttccatcgcgcgatttctcagagcggcactgccctatttcgtctcttcatcacttctaatccactgaaggtcgccaaaaaggtcgcccacttggctgggtgcaatcacaattcgacgcagatattagttaattgcttgagagcactctctgggaccaaagtgatgagagtttcaaacaagatgcggttccttcagctgaattttcaacgcgacccagaggaaatcatctggtccatgagtccagtcgtggacggggtggtaattcctgatgacccattggtcctgctaacccagggaaaagtctcttcagtcccttacctgctcggcgtcaataacctggaattcaattggcttctcccttacattatgaaattcccccttaacaggcaggcaatgaggaaagagaccatcaccaaaatgctctggagcactcggacgctactgaatatcaccaaggagcaggttccgcttgtagtcgaggagtatttggacaatgtaaacgaacacgactggaagatgctgaggaataggatgatggacatagtgcaggatgccacattcgtgtacgctacattgcagaccgctcattaccaccgagagacccccatgatgggcatatgccccgctggacacgccacaacaaggatgaaaagcacctgttcttggattttacctcaggagtgggcctag

SEQ ID NO: 13335 - RNA, 756 nt, synthetic construct
  misc_feature 1..756: note = source = /note="Description of Artificial Sequence: Synthetic coding sequence"
  source 1..756: mol_type = other RNA
atgtcctcctatggatacggagacctcttctccgacacctggaacgcatttactgactatgatgttatccatctgaagacttacgatagcaaaagagtatgtttcaaagaggcagtgttctccctactccccaggatgcgctatggtctgttttacaacacccccctcatttctggatgtcagaatacaggcctcttccgagcttttgcccaacatgtcttacacaggcttaacataacccaggagggacctaaggacggaaagatccgggtaactattctggcgcgctctactgaataccgtaagatcttgaaccaaaacgaactggtcaatgcactgaagactgtgagcacgttcgaggttcaaatcgtagattataagtacagagaactcggtttccttgaccagcttagaatcactcataacaccgacatatttatcgggatgcacggagccggcctcacacatctgctttttctcccagattgggccgccgtctttgaactgtacaactgcgaggatgaacggtgctatttggacctggctcgcctaaggggagtccattacattacctggcgccgacagaacaaggtattccctcaggacaaaggacatcaccctactttgggagaacatccgaaatttaccaactattctttcgacgtcgaagagttcatgtatttagtcttgcaggccgctgaccacgtactccagcacccgaaatggccttttaaaaaaaaacatgacgagctgtag

SEQ ID NO: 13336 - RNA, 927 nt, synthetic construct
  misc_feature 1..927: note = source = /note="Description of Artificial Sequence: Synthetic coding sequence"
  source 1..927: mol_type = other RNA
atgatcccagtcgaactgctgctttgctacctcctcctgcatccggtagatgccacatcttacggaaagcagaccaatgtgctgatgcacttccccctctcactggagtctcagacccctagttccgatccactctcctgccaattcttacaccccaagtctctgccagggttcagccacatggcgcctctacccaaattccttgtgtcactagcactgcggaacgcgttggaggaggcaggctgtcaggccgatgtctgggctttgcaattacagctttatcgccaaggcggagtgaacgccacccaagtactgatccaacatctcagaggactgcaaaagggtcgctcaacagaaagaaacgtttccgtcgaggctttggcctcggctctgcagcttctggcacgtgagcagcagtcaacaggccgggttggaaggtcgctgccgaccgaggactgtgagaatgagaaagagcaggccgtacacaatgtcgtgcagctattgccaggggtgggcactttttacaatctgggtaccgccttgtattacgccacacagaattgtttgggtaaggcacgggagcgtggacgggacggtgcaattgatctcggctacgacttactgatgactatggccggtatgagcggaggtcccatgggcttagctatatccgcagcattaaagccagctctgcggtcaggggtgcaacagctaattcagtactaccaggaccagaaagacgccaacatcagtcagcctgaaaccaccaaggaagggctcagagccatcagcgacgtctcggatctggaagaaacaaccaccctagcctcatttataagtgaagtcgtgtcctccgccccctactggggttgggccatcattaaatcctacgacctggacccaggggccggctcactggagatttag

SEQ ID NO: 13337 - RNA, 2862 nt, synthetic construct
  misc_feature 1..2862: note = source = /note="Description of Artificial Sequence: Synthetic coding sequence"
  source 1..2862: mol_type = other RNA
atgagagtcctcgcctgtctgctggcggcactcgtcggcattcaagcggtggagcggctgaggctggctgatgggccccatggttgtgcagggcgcctggaagtctggcacggcggacgatggggtactgtgtgtgatgacgggtgggaccttcgagacgctgctgtggcatgccggcagctgggctgtggtggcgctctcgcagcccccggcggagccttcttcggtgagggggctggccccgtctggttgtccgagctcgcctgccgggggaatgaagggcagcttgggctgtgtcaccaccgggggtggaaagcccacatatgtagccacgaagaagatgctggcgttgtctgtgccggacaacgggtggctaattctcgcgacgattcaactagccccctagatggggccccatggccaggtttgctcttggaattgtccccttcgaccgaagaaccccttgttactcatgctcctagacccgctggtaatccacagaacgccagcaggaagaaatctccgagaccaaagcaagctaagtctacccgagccccacttcttacgaccggggcaccgagacaagagcggctgagattagtgagcgggccccacagatgcgccggacgattagaagtgtggcatggaggcagatggggcacagtctgcgatgatgggtgggatcttcgtgatgcagccgtagcctgccgcgagctcggatgcgggggcgcccttgcagcaccaggcggcgcacgcttcggcccaggggcaggccctgtctggatggacgatgtcggttgcgggggcggagagcaggccctgagggactgcccacgctccccatggggacgctccaactgtgaccattctgaagatgccgggctcgtgtgcacaggccctgcgcctagattaaggctagccgacggtccacatgggtgcgcagggagactggaagtgtggcacggtggaagatgggggagcgtgtgcgacgacgcctgggacctaagagacgcggcagtggcctgcagagaactcggatgcggcggcgctctcgccgctccagggggggcttttttcggggagggcagtgggcctatcatattggacgatctgcgatgccgtgggaacgagaccgctctaaggttttgtccggcccgaccttggggccagcatgactgccaccatagggaggatgcaggtgcagtctgcgatggaatgccgcttggctatgtgccgccaactgccccaacagactcgaacaattccacgcctcgtgaggccgctagtcgtcccccctcgacaatgacttcgcaagcgcctggaaccgccggggtctcccctcctccggcctcccccacagtgctctgggagcccggtccagaggccggatccccgcagctccgtctggttgctggtccaagcaaatgcagcgggaggctcgaagtttggcatgatcaaagatggggtactgtctgcgacgactcatgggatatgagggatagcgccgttgtctgtcgcgagctgggatgtggaggaccacaacagcctgacccggctgcaggacgcttcggatggggtgccggtcctatttggctggatgacgtggggtgtgtggggacagaggcttcccttagtgactgcccggcagctccttggggaaagcacaattgcgcccacaatgaggatgttggggtgacctgcacgggccctcctgggttggactcaatcagtgacccattctcgtggtcttggattccaggcctggggagagatagagacgcatggctgcccggagaactcgcaaccaagccatcagcgagtgttactgcctctgttttggaaaagaccaccacaaaagcccctgggaaaatgcctaaaagcacaaagaagtgggttacaaagaatgcaaagaggccaaccacgcagcccccagtgatgccaaccactaagcactcgcgcgctcagtctccacctgacttaacatcccagactacagcagccctgaccaccgaagcatcaagacgccctacatccgaattcactagaagacctaccacagaggcaccacaacgctggacctcccacactacagctaccctgacgccacaggcaccgcgcgagcgcaccactaaaaccatggccatgctgacaactcagggtccgcaagagatgacgagcgaatctacgataaagagcattcctcaagcttctttggaaccgtcagccgaaattcctgagggttctccagagagcccaaaagacccggctccttccccgagtgtatctactaccggggagagcggattgtttagggtgagactggcggacggccctaataggtgtgccggaaggcttgaggtctggcacgccggacgctggggtacggtgtgtgacgacaactgggatttgcgcgatgccaccgttgcatgctgggaactgggttgtggcaaagtgcgcccccgagtgggcaagacgcattacggccccggcactggccccatctggttggacgatatgggttgcaaaggatctgaggcctcattgagcgactgtccaagtggcgcatggggcaagcacaattgcgatcatgaggaagacgtggggttgacatgcaccggatacaccgattacgatgactatcccccctggacctgggatcctaccagccgagaggatttggcaaagggaaccactacagcaggtgtcccggggcatacactaccctggcgtaccacaagacgcccgggcagctcctcacctgccatccggcgactgccggataccgaaccagaggcaggcctgcgagaggtcatgttgctggtacagggcttgccaggcttgcagagattgcccagtccatag

SEQ ID NO: 13338 - RNA, 474 nt, synthetic construct
  misc_feature 1..474: note = source = /note="Description of Artificial Sequence: Synthetic coding sequence"
  source 1..474: mol_type = other RNA
atgcttagaaccgagtcctgtcggcccagatctccagcggggcaggtcgcagctgcctcaccattactgctactgctgttactcctggcctggtgtgcgggcgcatgtagaggagctcccatcctacctcaaggccttcaacccgagcagcaacttcaactgtggaacgagatcgacgatacatgctcctcattcctctccattgacagccaaccacaggcctcaaacgctctggaagaactgtgtttcatgatcatgggcatgctgccaaaaccacaggagcaggatgagaaagacaacacgaagcgttcttctgtcgtccacccactgctgcaactcgttccccacctccatgagcgtagaatgaaaaggtttcgtgtagatgaggagttccagagtcccttcgcttctcagagccgtggctacttcctgtttcgcccaaggaacggtagacgaagcgccgggttcatttag

SEQ ID NO: 13339 - RNA, 1545 nt, synthetic construct
  misc_feature 1..1545: note = source = /note="Description of Artificial Sequence: Synthetic coding sequence"
  source 1..1545: mol_type = other RNA
atgccttcaacagtattgcctagcactgtgctcccttccttactgccaacagcaggagcaggctggtccatgaggtggattctgtgctggagcctaacgctttgtctgatggcccagaccgccctgggcgcccttcacaccaaaagaccgcaagtggttaccaagtatggcacccttcagggcaaacagatgcacgtagggaagacacccattcaggtttttttgggagtgccgttttccagacctccattgggaattctccgatttgccccaccagagccacctgaaccttggaagggcattcgcgatgccaccacgtatccaccaggatgccttcaagagtcttgggggcagctcgccagtatgtatgtatctactcgtgagcgttataagtggctgagatttagcgaagactgcctttacctgaatgtttatgccccggcacgggctcctggtgatcctcaactgcccgtgatggtgtggttccctggcggagctttcatcgttggcgccgcttctagctacgagggatcagatctcgctgctcgcgagaaggtcgtgctcgtgttcttacagcacaggttaggtatttttggcttcctgagtactgatgattctcacgctcgcggtaattggggcttattagatcagatggccgcgctcaggtgggtgcaggaaaatatagccgcatttgggggagatcccggtaacgttacactgtttggtcaaagcgctggggcgatgagcatctctggcctaatgatgtcaccactggcaagcgggttgtttcatcgagccatttcacagagtggcacagccctcttccgactttttattacatcaaatcccctcaaagtggctaagaaagttgcacacttagctggttgtaatcataactctacccaaatcttggttaactgccttcgcgcactttctggaactaaggtcatgagagtctcaaataaaatgcggtttctccagctgaacttccagcgcgacccagaagagatcatttggtccatgagccccgttgtagatggggtggtgattcctgatgatcccctggtgctcttgacacaaggcaaggtgtcctctgtgccatacctgctgggggtaaataacttagagtttaactggctcctgccctacaacatcactaaggaacaggtcccactggtggtagaagagtacctggacaacgttaacgagcatgattggaagatgctgcgaaacaggatgatggatatcgtgcaggacgcaaccttcgtttatgccacactgcagacagcacactaccatcgcgggctctccatggggaaagaaaaggcactgtccctgcagatgatgaaatactgggctaacttcgcaagaaccggtaacccgaacgacggcaacttgccatgctggcccagatacaacaaagacgaaaaatacctgcagctggattttaccacccgcgtggggatgaaacttaaagaaaagaaaatggcattttggatgtctctgtatcagtcccagcggcccgagaaacaaaggcagttttag

SEQ ID NO: 13340 - RNA, 1062 nt, synthetic construct
  misc_feature 1..1062: note = source = /note="Description of Artificial Sequence: Synthetic coding sequence"
  source 1..1062: mol_type = other RNA
atgagtaacccaacacagaccgacgccgattccgacttggtgggtgatgtgtgcgatacaaacgaagattccgatggtgatggccatcaagacacaaaggacaattgtccccagttgcccaattcttcacagttagattctgacaacgatggcctgggcgacgagtgcgatggggatgatgacaatgacggaattcctgactatgtcccacctggacctgataactgccgactggtgccaaaccccaatcagaaagattctgacgggaatggcgttggcgatgtctgcgaggatgacttcgataatgatgctgttgtggatcccttggacgtctgtccagaaagcgccgaagtgacgctgacagatttccgtgcctaccagaccgtcgtcctcgaccccgaaggcgatgcacagattgaccctaactgggttgtattaaaccaggggatggaaatagtgcagacaatgaatagtgaccccggcctggctgtcggctatacggcattcaacggagtcgattttgaaggcacatttcatgtaaacacagtcacagatgacgactacgccgggtttcttttctcgtaccaggattccggccgcttctatgtggtgatgtggaaacagacggagcaaacgtactggcaggctacacccttccgcgcagtggcccaaccgggtttacagcttaaagccgtcacatccgtttcgggtccaggtgagcatctgagaaacgccctctggcatacaggccacacccccgaccaggtgcgcttactttggaccgatccacgtaatgtagggtggagagataagaccagctacagatggcagctgctgcatagacctcaggtgggctatattcgggttaaactgtatgaggggccacaactggttgccgacagcggagtgattatcgatacgagtatgcgcggaggtcggctgggggtattctgtttcagtcaggagaatattatctggtctaatttacagtacaggtgcaacgatacagttcctgaggattttgagccattccggagacaactcttgcagggaagggtatag

SEQ ID NO: 13341 - RNA, 1074 nt, synthetic construct
  misc_feature 1..1074: note = source = /note="Description of Artificial Sequence: Synthetic coding sequence"
  source 1..1074: mol_type = other RNA
atggagattgagcataccctcgatcagatgatctcaaaagtgggtaaccatatcgacgtgttaactggaaagtgggtggctcaggacgcaggaatcggtgccggtgtagattcctatttcgaatatttggtgaaaggagctatacttctccaggacaaaaagctcatggctatgtttctcgaatacaataaagccatacggaattatacacgcttcgacgactggtacttatgggtccagatgtacaaagggaccgttagcatgccagtgtttcagtcacttgaggcatactggcctggcctgcagtcgctaatcggagatatcgacaatgcgatgcggacctttttgaactactacacagtctggaagcagttcggggggctcccagagttctacaatattcctcaggggtatactgtggaaaagagagaaggttacccccttagacctgaactgatcgaaagtgccatgtatctctaccgggccaccggagaccccacgctgctcgaactcggacgcgacgccgtagagagcattgagaagatttcaaaagtggagtgtggcttcgctaccattaaggacctccgcgaccacaaactagataatcggatggaaagcttctttctggccgagaccgttaaatatctatatcttctgtttgacccaaccaacttcattcataataacggcagtacatttgatgcagtcattaccccatatggcgagtgtattctaggcgctggcggatacatttttaatacggaagctcaccccatcgaccccgcagctcttcattgctgtcagcggctcaaagaggaacaatgggaggttgaagaccttatgagggagttctacagtctaaaaaggtccagatcgaagtttcagaagaacactgttagttccggaccttgggaaccacctgcaaggccaggtaccctctttagccccgaaaaccatgatcaggccagagagcggaaacccgcaaaacagaaggtgcccttattgtcatgtccttcccagcccttcacatcgaagctcgcacttctaggccaagttttcctggatagttcctag

SEQ ID NO: 13342 - RNA, 1341 nt, synthetic construct
  misc_feature 1..1341: note = source = /note="Description of Artificial Sequence: Synthetic coding sequence"
  source 1..1341: mol_type = other RNA
atgctgcacccagagaccagtcccgggcggggtcatctcctcgccgtgctacttgctctgcttggcacggcatgggctgaagtgtggcctccccagctacaggaacaggcaccgatggctggcgctctaaatcgaaaagaaagctttctgttactgtcccttcacaaccgcctgcggtcttgggttcagccacccgctgcagatatgaggcgattagactggagtgactccctcgcccagctggctcaggccagggcagccctctgcggcatccctactccaagcctggccagtggcctctggaggaccctccaggttggatggaatatgcagttgttgcctgccggcctggcatcctttgtagaagtcgtatcgctgtggttcgcagagggtcagcggtactctcatgctgccggtgagtgtgcacgcaatgcaacctgtacacactatacccagcttgtctgggctacctcatcccaactggggtgcggtagacacctctgttccgctggacaagcagccatcgaagccttcgtgtgtgcatatagtcctcggggaaattgggaagtaaacggcaagacaattgttccttacaagaaaggcgcttggtgctcgctctgtaccgccagcgttagtggatgttttaaagcctgggaccacgcaggaggcttgtgtgaagttcctaggaatccttgtaggatgagttgtcaaaatcatggccgcctgaacatctccacgtgtcattgccactgccctcctggctataccggtcgctactgccaggttcgatgttccctgcaatgtgtgcacggccggtttagggaggaagaatgctcatgtgtgtgcgacattggctatggcggtgcgcaatgcgccaccaaggtccacttcccttttcacacctgtgacctaagaattgacggggattgcttcatggtgtcatccgaagcggacacctattacagggctcgcatgaagtgccagagaaagggtggcgtgttggcccagattaaaagccagaaagttcaggacatcctagcattttatctgggcagacttgaaactacgaatgaagtaatcgactctgatttcgaaactcggaatttttggattggcctgacctacaaaacagctaaagactccttccgttgggctacaggagaacatcaggcattcactagttttgcatttggacagcccgataatcatggatttggaaactgtgttgagcttcaagcatcagcagcatttaattggaataatcagcggtgtaaaacccgaaaccgctatatctgtcagtttgctcaggagcatatatctagatgggggccaggtagttag

SEQ ID NO: 13343 - RNA, 900 nt, synthetic construct
  misc_feature 1..900: note = source = /note="Description of Artificial Sequence: Synthetic coding sequence"
  source 1..900: mol_type = other RNA
atgggaggtccacgagcactgctggcagccctgtgggccctggaggcggccgggactgccgccctccgcattggagcttttaatatccaatcattcggcgactcaaaagtttcagaccctgcctgcggttccattatagcgaaaatcctggctggttacgaccttgcgcttgtacaggaagtacgtgatcctgatctgtctgctgtatcggcgctgatggagcagatcaattccgtgagtgaacacgagtacagcttcgtttcatcccagcccctcgggcgagaccagtataaagaaatgtatctgttcgtctacaggaaggacgctgtgagcgtggtggacacctacctgtacccggaccccgaggacgtcttctctagagaaccattcgtcgtgaagtttagcgccccaggaacaggagagagagcacctcccctgccctcccgacgggccctcacacccccaccattgcccgcggccgcacagaacctcgtgctgattccacttcatgctgccccccaccaagcggtcgcagagatcgacgcactgtatgatgtatatttagatgtcattgataaatgggggactgatgatatgttgttcctgggcgatttcaacgctgattgttcttacgtcagagcccaggattgggctgccatcagactgagatctagtgaagtttttaagtggctcatacctgactcggccgacacgaccgtgggaaactcagattgtgcctacgaccgcatcgttgcctgcggagctcgactacggcgaagtctgaaaccccagagcgcaacagtacatgatttccaagaggaattcgggctagaccaaacccaggccctggctatcagcgatcattttcccgtcgaggtcacactgaaattccatcgatag

SEQ ID NO: 13344 - RNA, 1458 nt, synthetic construct
  misc_feature 1..1458: note = source = /note="Description of Artificial Sequence: Synthetic coding sequence"
  source 1..1458: mol_type = other RNA
atggacaataacaagcattgtaagcaagataattgtctgttaacccccaactcaggccaagaagacgccgataatgacggcgttggggaccagtgtgatgacgatgcagatggagacggaattaaaaatgtggaggacaattgcaggctgtttccaaataaggatcagcagaattccgacacagattcatttggcgatgcgtgcgataactgccctaacgtaccaaacaacgaccagaaggatacggatggcaatggtgaaggggatgcatgcgataatgacgtcgatggggacggcatccctaacggactcgacaattgcccaaaggttccaaacccactacagaccgatagagacgaagacggggtcggcgatgcctgcgatagttgccctgagatgagcaatcctacccaaacggatgctgactccgatcttgttggagatgtctgtgatactaacgaggactccgatggtgacggtcaccaggataccaaggataattgcccccagctgccaaattcttcccagctcgatagcgataatgatggactcggcgacgaatgtgacggcgacgacgacaacgacggcataccggactatgtcccccctggtccagataattgcaggcttgtcccaaaccctaaccagaaagattcagatggcaatggcgtcggcgacgtgtgcgaagatgattttgacaacgacgccgtggttgatcctttagacgtttgtccggagagtgccgaggttaccttaactgatttcagagcataccagaccgtggtgttggaccctgaaggcgacgcacagattgatcccaactgggtcgtgctgaaccagggcatggaaatcgtgcagacaatgaattcagatcccggcctggccgtgggctacacggcctttaatggagttgacttcgagggaacatttcacgtgaacacagtgaccgatgacgactacgccggtttcctgttctcctaccaggactcgggacgcttttatgtggtgatgtggaaacagacagaacagacttattggcaggcaacgcccttccgagctgtagctcaacccggactacagcttaaggctgtgacctccgtgtccggacccggggagcaccttcggaacgccttatggcacacaggacatacacccgaccaggtccgactcttgtggacagatcctaggaatgtagggtggcgggacaagacatcctaccgatggcagctgttgcacagaccgcaggtcggatacatccgagttaaactgtatgaagggccacagctcgtggcggatagcggtgtgatcatcgacactagcatgcgcggcgggaggctgggagtattctgctttagccaggaaaacatcatctggtctaacctccagtaccgttgcaacgatacagtgcctgaagacttcgaaccgttccgtcgccaacttttgcagggacgggtatag

SEQ ID NO: 13345 - RNA, 2358 nt, synthetic construct
  misc_feature 1..2358: note = source = /note="Description of Artificial Sequence: Synthetic coding sequence"
  source 1..2358: mol_type = other RNA
atgaagcacactttggctctactggctccactgctcggcctggggctgggcttggcgctgtcacagctcgctgctggagctaccgattgcaaatttctcggccccgcggagcaccttacatttacacccgccgctagagcaaggtggctcgctcccagggtcagagcccccggactcttggacagtctgtacggaacagtccggagatttttaagtgtagttcaattgaaccctttccctagcgaacttgttaaggcgttgctcaacgagttggcctctgttaaggttaacgaagtcgtaagatacgaagctgggtacgttgtctgtgcggtgattgcgggactgtacctcctgctcgtgccgaccgctggtctttgcttttgttgttgccgctgccaccgtaggtgtggtggacgggtgaagacggaacataaagccttagcttgcgaacgcgccgccttgatggtgttcctgctacttaccaccctcttgctactgataggtgttgtctgcgcttttgtgacaaaccagagaacacacgaacaaatggggccttctatcgaagctatgccagagactctgcttagtctatggggattagtgtccgatgtacctcaggaacttcaggctgtggcccaacaattcagtctcccccaggagcaagtatcagaggagctggatggagttggtgtgtcgattgggtccgccatccacacacagttgagatctagcgtctaccccctgctggcagccgtggggtccctgggacaggttctgcaagtgtcagttcaccacctgcagacattgaatgccacagtcgtggaactacaagcgggccagcaagatttagaacctgccattcgagagcatcgtgacaggctccttgagttgcttcaggaagcgcgatgccaaggagactgcgccggcgcactcagttgggcgaggacattggagctgggcgcagacttctcacaagtgccatccgtggaccacgtcctgcaccagctcaaaggtgtacccgaagccaatttcagtagtatggtccaggaagaaaatagcacttttaacgccttacctgcactggcagccatgcagacaagtagtgtggtgcaggaactgaaaaaggctgtcgcccagcagcctgaaggggtccgaacgctcgccgaaggttttcctggcctggaggccgcgtcccgatgggctcaggcgttgcaggaagttgaggagagttctcgcccctatttacaagaagttcagcgctacgaaacataccgctggatcgtcggttgtgtgctctgcagtgtggtgctctttgtagtcctgtgcaacctgctgggtctgaatctaggaatctggggattatcagctagagatgacccctcccaccctgaagcaaagggcgaagcaggagctaggtttctgatggctggcgtggggctgtccttcctttttgcagctcccctaatactcttagttttcgccacctttctcgttggggggaatgtgcagacactcgtgtgccagagctgggaaaacggcgagctctttgagttcgctgacactccaggaaatctccccccctcaatgaatttaagccaactattgggcctccgaaaaaacatttctatacaccaggcctatcagcagtgcaaggagggcgcagcactatggaccgttcttcagctgaacgactcctatgatctggaggagcacttagatattaatcagatccagcgcccggtggtgaaaacatcaatggaacaattggcacaggaattgcaaggcctggcccaggcccaggataactctgtgctggggcagagactccaggaggaggcacaaggtctgcgaaatttacatcaggaaaaagtagtgcctcagcagtccctcgtagcaaagttgaatcttagtgtgagggctctggaatcatccgcccccaacctacaactggagacgagcgacgttctggccaacgttacgtacctcaaaggcgaactgccggcatgggcagcccgtattttacgaaatgtaagcgaatgttttctcgcacgcgagatgggctacttctcacagtatgtggcctgggtgcgtgaggaggtgacacaacgaatcgccacttgccagcctctgagcggcgcgctggataactcccgcgtgatcctctgcgacatgatggcggatccctggaatgcgttctggttctgtttggcctggtgtacctttttcttaattccaagtattatcttcgccgttaagacatccaagtatttcaggcccatccgcaaacgactttccagtacatcctcagaagagactcaactctttcatataccaagagttacaagcctgaagctttag

SEQ ID NO: 13346 - RNA, 792 nt, synthetic construct
  misc_feature 1..792: note = source = /note="Description of Artificial Sequence: Synthetic coding sequence"
  source 1..792: mol_type = other RNA
atgggacgggtcctggaagaggctagatttgccgttgcatttacagagtccatgaaagagatggcccaagcacagtggaaggcaaggcagatttcccttgcggttacaagtgctgttccggtgcagccccacgccaaggggaaagtgtatgttcagtcacagggaatcgcaaccacacccaacgcagcattcaactggaacacttttctccagcgatctgaaattaatcagtctgccgacaatctgcacatttttctgttgatttgcggactgaggcaggttaaagaccccttgtacctggtggacgcgttcagcgcgtggcatcaagaggagccaaatgtgcaccttgtaatagtgggacccgaagtggacccagtctttacacgggaagtgaaggccaaggtgaaaagggctgcaggcgtgaggcttatcggcgagatgccccaggaggacctgcacgcggtggttaagaattgctttgcagtggttaattcctccgtttccgagggcatgagcgctgctatcctagaagccatggatctcgaagttcccgtgctggcacggaacatccccgggaacgcagccgtggtgaaacacgaggtaacaggattgctcttttcaaaccctcaggagtttgtccacttggctaagagactagtctctgatcccgctcttgagaaggagatcgtagtgaatggtagagagtacgtaagaatgtatcatagttggcaagtagagcgagatacctaccagcagctgatccgaaaacttgaaggcagtacagaagattag

SEQ ID NO: 13347 - RNA, 456 nt, synthetic construct
  misc_feature 1..456: note = source = /note="Description of Artificial Sequence: Synthetic coding sequence"
  source 1..456: mol_type = other RNA
atgaagacagccgtaatgaaagaactctatagctttctgcaccatcaaaaccggtatggtagcgagcaggagtttgtggatgacctcaagaatatgtggtttggactgtacagccggggaaacgaagagggagactcctcgggctttgaacacgtgttctccggagaagttaaaaagggcaaagtgaccgggttccataactggattagattctacctcgaggagaaagaaggactggtcgactattactcccatatatatgatggccctgtacccgttaagcctggaagaatatcactttcctgccctgacatctatctgggccaagtccacctctgggaatggcaggaagtgcatcgccactcactgcacagcgtatttcacctcattgaactgagggcacggaaaggtcacgaaggtagttgcgaaacggaggttctgtcaagtttggattag

SEQ ID NO: 13348 - RNA, 363 nt, synthetic construct
  misc_feature 1..363: note = source = /note="Description of Artificial Sequence: Synthetic coding sequence"
  source 1..363: mol_type = other RNA
atgctccctcagtggctgttgctgctgttcctccttttctttttcctcttccttttaacacgaggatccctgtcgcccactaaatacaacttattagagcttaaagaatcctgtataagaaaccaagactgcgagaccggctgctgccagcgagcaccggacaactgcgagtctcactgtgccgaaaaaggatccgagggtagtctatgccaaactcaagtgtttttcggacagtaccgcgcctgtccctgcttaaggaacttgacctgtatttactctaaaaatgagaaatggctctccatcgcctatggcaggtgccagaaaatcggtagacaaaagctagccaaaaaaatgtttttttag

SEQ ID NO: 13349 - RNA, 951 nt, synthetic construct
  misc_feature 1..951: note = source = /note="Description of Artificial Sequence: Synthetic coding sequence"
  source 1..951: mol_type = other RNA
atggccgaggctgcgctcgaggcagtccgtagcgagctgagggaatttcctgctgctgcacgagagctgtgcgttccactggctgtgccatatctcgataagcctccaactccattacatttctatcgcgactgggtctgtcctaatcgaccatgcattatccgcaacgccttgcagcactggccagctcttcagaagtggtctcttccatactttcgagccactgtaggctctacagaagtgtccgtcgcagtgacacctgacggctacgcagacgctgtgagaggcgataggttcatgatgccggctgaaaggaggctgccactgagcttcgtgcttgatgtacttgaaggtcgcgctcagcacccaggtgtcctgtatgtccagaaacagtgttctaatttaccgtccgagttgccacaactactacccgacctggagagtcatgtgccatgggcctctgaggcacttgggaaaatgcctgatgccgtgaatttctggctgggggaggccgcagctgtgacctcacttcacaaggaccactacgagaacctatactgcgtcgtgagcggagagaaacacttcctttttcacccacctagcgatagaccttttattccctatgaactgtatactccagccacctatcagctgaccgaggagggaacctttaaagtggttgacgaggaagctatggagaaagtcccatggattccgctggatcctctcgcacccgatctggccagatatccgtcttattcccaggcccaggcccttcgatgcaccgtgagagctggagagatgctctacctccccgctttatggttccatcacgtccagcagagccaaggatgcatcgcagttaacttctggtacgatatggagtatgatttgaaatactcttacttccagcttctcgactctctgacaaaggcttcaggtttggactag

SEQ ID NO: 13350 - RNA, 657 nt, synthetic construct
  misc_feature 1..657: note = source = /note="Description of Artificial Sequence: Synthetic coding sequence"
  source 1..657: mol_type = other RNA
atgggccgtgtttttctaacaggcgaaaaggcgaactctatactgaaacgatacccgcgggctaacggcttcttcgaagaaatcagacaaggcaacatcgagcgcgaatgcaaggaggagttttgcaccttcgaagaagcccgcgaggcctttgagaataatgagaaaacaaaagagttttggtctacctacacaaaggcacaacaaggagaatccaaccggggaagcgattggttccaattctatctgacattccctctgatctttggcttatttatcattcttctggtaatcttcctaatttggcgctgttttctgcggaataagacaagaaggcagactgtgactgaaggtcacattcctttcccgcaacacctgaacatcataacaccgccacctcccccagatgaagtctttgactcctccgggctgtctccaggttttctagggtatgtggtgggacgatcagactcagtgagcacaagactcagtaactgcgacccaccccctacttatgaggaggccaccggccaggttaatttacagcgtagcgaaactgaacctcaccttgaccctccccccgagtacgaggatattgtcaactcaaatagcgcaagtgctatccccatggtgccggtggtgaccaccatcaaatag

SEQ ID NO: 13351 - RNA, 909 nt, synthetic construct
  misc_feature 1..909: note = source = /note="Description of Artificial Sequence: Synthetic coding sequence"
  source 1..909: mol_type = other RNA
atggccatgtttctggagtacaataaagcaattcggaattacacacgattcgacgactggtacttgtgggttcagatgtacaagggcacagtgagtatgccagtctttcagtctcttgaggcttattggcccgggctacagtccctgatcggtgatatcgataacgcgatgagaacctttttaaactattacacagtatggaagcagttcggtggactgccagaattttataacatcccccagggatatacagtggaaaaacgggaagggtatcctcttcgccctgagcttatcgagtctgcaatgtacttatacagagcaaccggtgatcccacacttttagagctgggtagggacgccgtagaatccattgagaagataagtaaggtggagtgcggcttcgcaacaattaaagatctgagggaccacaagttagacaaccgtatggagagcttctttctcgcggagaccgtcaaatatttgtatctcctgtttgacccaacaaattttatacacaacaatggctccacattcgatgctgtcattaccccttacggtgaatgcattttgggagctggaggatacatcttcaacacagaagcccatccaatagatcccgccgcactgcattgttgtcagagattgaaggaagaacagtgggaagtcgaagaccttatgagagagttctattcgttgaagcgatctcgcagcaagttccagaagaacaccgtcagtagtgggccctgggagcccccggctcgaccggggaccctcttctctccagagaaccacgaccaagccagggagcgcaaaccagccaaacagaaagtccctctcctttcatgtccaagccagccttttacatctaagctcgctctgctaggacaagtgtttctggattcctcttag

SEQ ID NO: 13352 - RNA, 459 nt, synthetic construct
  misc_feature 1..459: note = source = /note="Description of Artificial Sequence: Synthetic coding sequence"
  source 1..459: mol_type = other RNA
atgctcgtagatggaccctcagaacggcctgccctctgcttcctgttgcttgccgtcgccatgagcttctttggttccgctctatccattgacgagactcgggcccacctactcctgaaagagaaaatgatgcgcttgggcggaagactggttttaaataccaaagaggaactggccaatgagcgtttaatgaccctgaaaatcgccgaaatgaaagaagccatgaggacattgatttttcctccttccatgcattttttccaggctaaacatctaatcgagcgctctcaagtgttcaatatcttaaggatgatgccaaagggggcagccctgcacctgcatgacattgggattgtaacgatggattggctggttaggaacgtaacctatcgcccacactgccatatctgcttcacacctaggggaattatgcagtttcgcttcgcacatcctacatag

SEQ ID NO: 13353 - RNA, 3951 nt, synthetic construct
  misc_feature 1..3951: note = source = /note="Description of Artificial Sequence: Synthetic coding sequence"
  source 1..3951: mol_type = other RNA
atggaacctcgcctcttctgctggactaccctgttcttgctggccgggtggtgcctcccggggttgccatgtccatcccgctgcctgtgctttaagtcaactgtgaggtgcatgcacttgatgttggaccatataccgcaagtcccccagcagaccacagtgcttgacctgagatttaaccgcatccgcgagattccgggaagcgcattcaaaaaactcaagaacctgaatacattactgctaaacaataaccacatacggaaaatttccagaaacgcatttgaggggctcgagaatctgctgtacctgtatttgtacaagaacgagatccatgccctggacaagcagacatttaagggtctcattagtctggagcacctttacattcactttaatcaacttgaaatgctccagccagaaacgtttggagatctgctgcgactggagagactgttcctgcacaacaacaagctgagtaaaattcctgccggaagcttctcaaatttagactctcttaaacggctgcgactcgactcaaatgctctggtgtgtgattgcgatctgatgtggcttggagagctgttacagggatttgcacagcatggtcacacccaggccgcagctacttgcgagtatccacggcggctccacggcagagctgtagcttccgtgacagtcgaagagttcaattgtcagtcacctaggatcacgtttgaacctcaggatgtggaggttccatctggcaacactgtgtactttacgtgccgcgctgagggcaatcctaaaccggaaattatttggatccataacaaccatagtttagatttagaggacgatacacgactgaacgtgtttgacgatggaactctgatgatccgcaataccagggaaagcgatcagggagtttaccagtgcatggcccggaactcagccggtgaagcgaagacacaatcagcaatgttaaggtactcctcattgcctgccaaaccgtctttcgttatccaacctcaggacaccgaagtgctgataggcacaagtaccacactagaatgcatggcaacaggccacccgcatccattaatcacatggaccagagataacggcttggagctggatggatctcgccacgtcgcaacttcttcgggtctctatcttcagaacatcacacagcgagaccatggacgctttacttgccacgcaaacaactctcacggaacagttcaggctgcagcaaacatcattgtccaggcccccccgcaatttaccgttacccccaaggatcaagtcgtgctggaagaacatgctgtcgagtggctgtgcgaagcagacggaaaccctccccctgtgatagtctggaccaagacaggcggccaattaccagtggaggggcagcataccgtcctgagctccggcaccttacgcatcgatagagctgcccagcacgaccagggtcagtacgagtgccaagccgtgtcgtctctcggcgtgaaaaaagtaagtgtacagttgaccgtaaaacctaaggcactggcagttttcacccagctgccacaagatacatccgtagaagtgggaaaaaacatcaatatctcatgccatgctcaaggcgaaccacaaccaattatcacatggaacaaggaaggcgtacaaataacagagtccggcaagtttcatgtcgatgatgaaggtaccttaactatatatgatgcaggtttcccagatcagggaaggtatgagtgcgttgccagaaacagtttcggcctggcagtgacaaatatgtttttgacggtgaccgccatccagggcagacaagcaggagatgattttgtggaatcttcaatcctcgacgctgtacaacgcgttgacagcgctattaatagtaccaggcgccacctcttttcccagaagccacatacttccagcgacctgctagcccagttccattatcctcgcgaccccctgatcgtagagatggccagggccggggagatattcgaacatacgttgcaattaattagagaacgcgtgaagcaagggctgacagtggacctggagggaaaagaatttagatacaacgatctcgtctccccccgatccctatctctgattgccaacctctccggctgtacagcacggcgacctctgcctaattgctcaaatagatgcttccatgcaaagtatagagcacacgacggaacttgcaataacctgcagcagccaacctggggcgcagctctcacagcttttgcacgcctcctccagcctgcatacagggatggcatacgtgcaccccgcggactcggcttgcctgtcggctctcgacagccactccctccacccaggctggtagctacagtgtgggcccgcgcggccgctgtgacacccgaccattcgtatacgcgcatgttaatgcactggggttggtttctggagcacgatctggatcacaccgtccccgccctgtcaacggccaggttcagcgacgggcgtccatgctcttctgtgtgtacaaacgatcccccttgttttcctatgaatacacggcatgccgatccgcgtggcacacatgcaccttgtatgctgtttgcgcggagttcacctgcctgcgctagtggccgacctagcgctaccgtggattccgtctacgcacgggagcagatcaaccagcagacagcctacatcgacggctccaatgtatacgggagcagcgaaagggagtcccaagccctgcgcgacccgagtgttcctagagggttgctgaagacgggcttcccctggccaccttccggcaagccgcttctgcctttctcaaccggacccccgactgagtgtgctcgtcaggaacaagaaagcccgtgttttctcgccggggatcaccgtgccaatgaacacctcgcgctggctgccatgcacactctgtggtttcgggaacataataggatggcgacagagctctctgcattgaaccctcactgggaagggaacaccgtgtaccaggaagctaggaaaatcgttggtgcagagttgcaacacatcacatattctcattggctgcccaaagtcctgggggacccaggcacccgaatgctcagaggttaccgagggtataacccaaatgttaatgccggcataatcaactccttcgcaacagctgcattccgctttggtcatactctgattaaccccattctgtaccgtctcaacgcgaccttgggtgaaatctccgaaggccacctgcctttccataaagctttgttctcacccagtagaatcattaaagaaggagggatcgaccctgtcctgcgggggctctttggtgtggccgctaaatggagggctccttcttacttgctgtcccctgaactcacccagcggcttttttcagcagcctattctgccgcagtggactcagcggccaccataattcaacgcggcagggatcatggaattccaccctacgttgatttccgggtcttctgtaacttaaccagcgtaaaaaatttcgaggacctacagaatgaaataaaagattccgagatccgccagaaactacggaaactgtacggctccccgggcgatattgacctctggccagcgctgatggtggaagatctgatacccggtacccgcgtgggcccgacactgatgtgtttatttgtcacacagttccagaggcttcgggatggggacaggttctggtatgagaatcctggtgtttttacgccagctcagcttactcagctgaaacaagccagtttgtccagagtgctctgcgacaatggtgactcgattcagcaagtccaggcagacgtgtttgttaaagccgagtacccacaggattacctgaattgctccgagattccaaaagttgacttaagggtgtggcaagactgctgtgccgacaaacaggcagggggcacaccagaggccggccgggtctaccggtgctag

SEQ ID NO: 13354 - RNA, 891 nt, synthetic construct
  misc_feature 1..891: note = source = /note="Description of Artificial Sequence: Synthetic coding sequence"
  source 1..891: mol_type = other RNA
atggatcccagcaaaatcgcacacactgaataccctgtaaataccataatcatccacgaagattttgacaacaactccatgtccaataacattgctctactgaagaccgacactgcaatgcacttcggcaatctcgtgcagtctatctgctttttggggagaatgctccacactccgccagttctgcagaattgctgggtatccgggtggaacccaactagcgccactggcaaccacatgacgatgagcgtactgcgcaagatcttcgttaaagatctagatatgtgtcccttgtacaaactccagaaaactgaatgtggcagtcatacaaaggaggagacgaagaccgcatgcctaggcgatccgggttctccgatgatgtgccaattgcaacagttcgacctgtgggtgctccggggcgtgctcaatttcgggggagaaacatgtcccggccttttcctgtatactaaagtggaggattactctaagtggatcaccagtaaagctgagagagccggccctcctctatcaagccttcaccattgggagaaactgatcagctttagtcaccacggccccaatgcgaccatgactcagaagacatactccgattcagagttgggccacgtcggatcatatctacaaggccaaaggcgtaccataacacacagtcgtctagggaatagttccagagacagcctagacgtgagagaaaaagatgtgaaagaatctggaagatctccggaggcatctgtacagccactttattacgactattatgggggagaggtcggagagggcagaatttttgcaggccaaaatcggctgtatcagccagaagagatcatcctcgtgtcctttgtgctggttttcttctgtagctctatttag

SEQ ID NO: 13355 - RNA, 2808 nt, synthetic construct
  misc_feature 1..2808: note = source = /note="Description of Artificial Sequence: Synthetic coding sequence"
  source 1..2808: mol_type = other RNA
atgaggaagccacgccgcaaatctcgccagaatgctgaaggccgccgctcacccagtccctattctctcaagtgctctccaactagagaaacactgacctatgcccaagcccagaggatcgttgaagtggacattgacggccggctacaccggatcagtatttacgatccgcttaagataattaccgaggacgaactgaccgcccaggatatcactgagtgtaacagtaacaaagagaatagtgaacagccacaatttccgggaaagagcaagaagccatcctccaaaggtaaaaagaaggagtcctgttcaaaacacgcctcagggacctcttttcatttgccccagcctagttttcgcatggtcgattctggtattcagccagaggcaccacccctcccagccgcatactatagatatatcgagaagcctcctgaggacctggacgccgaagtagagtacgacatggatgaagaggacctggcctggctagatatggtcaatgagaagagacgggttgacgggcatagcttggtgtccgccgacacattcgagttactggtcgatcgactggaaaaagagtcatatcttgaatcaagatcttctggggctcagcagtctttaatcgatgaagacgccttttgttgcgtctgcctggacgatgagtgccacaatagtaatgtgatcctgttctgtgatatttgtaacttagctgtccatcaggagtgctatggtgttccctatatcccagaaggacagtggctgtgtaggtgctgcctgcagtccccatccaggcccgtggattgtatcctctgtcccaacaaaggcggagccttcaagcaaaccagtgacggccactgggcacatgtggtgtgcgccatctggatcccagaagtgtgttttgcaaacaccgtgtttttagagccaattgaaggtatcgataacattccccccgcaaggtggaagcttacttgctacatttgcaaacagaaaggccttggagccgccatacagtgccacaaggtaaactgttatacagccttccatgtgacatgtgcccagagagccggattgtttatgaaaattgaacctatgagagaaacctccctaaacggaacaatcttcactgtgagaaagacggcctattgcgaggcacatagtcccccaggcgctgcaaccgcccgcaggaaaggcgatagtccacggtccatatccgagactggagatgaggaaggacttaaagagggagacggcgaagaggaggaagaggaagaggttgaggaagaagagcaggaggcccagggcggcgtttctggcagtctgaagggcgtgcctaaaaaaagcaagatgtcgctgaaacaaaagatcaagaaagagcctgaagaagccgggcaagatactccaagcaccctgccgatgctcgctgtcccacagataccaagctaccgacttaacaagatttgtagtgggcttagcttccaacgcaaaaaccagttcatgcagcgactgcacaattactggctgctgaagagacaagcccgcaatggtgttccactgatcaggcgcttgcactctcacttgcagagccagcgaaatgctgagcagcgggaacaagatgagaaaacgtccgctgtcaaagaggagctgaagtattggcagaagcttcgacatgacctagagcgcgcccgcctgctgattgaactcatccgcaaacgcgagaaactcaaaagggagcaggtgaaggtgcagcaggctgccatggaacttgaactgatgccattcaatgtgttacttaggacaacactggacttattacaagagaaggacccagcccatatttttgcagagcctgtcaacctgtctgaggtgcctgattacttagaatttatatcaaaacccatggacttcagtacaatgaggcgtaagttagagtcgcacctgtaccggacactggaagagtttgaagaggacttcaacctgatcgtgaccaactgcatgaagtacaacgcaaaagataccattttccatcgggctgctgttcgcctgagggatttgggaggagccatactgagacacgccagacgccaggccgagaatattgggtatgatcccgagcgcggaacacacttgcctgagtcgcccaaactggaggacttctaccgcttctcttgggaggatggaatgactaatgggtttggaaaacacaccgaaagtggcagcgacagtgagtgttcactcggactgtcagggggacttgcattcgaggcttgtagcgggttgacaccacctaagcgtagcagaggaaagccagctttatcacgagtgccattcctggaaggcgtgaatggtgacagcgattacaatggctccgggagatcccttctcttgccgtttgaggaccggggcgacctggaaccactcgagttggtatgggctaaatgccgcggctacccctcttacccggctctgattatcgatccaaagatgccaagggagggcttgttgcataatggcgttcccattccggtaccccctcttgacgtgctaaaactgggagaacagaagcaagcagaagcaggggaaaaacttttcctggtgttgttctttgataacaagaggacctggcagtggctgccccgagacaaggtacttccactgggagtggaggatacagtggataagctcaagatgctggagggccgcaagacttcgattcgcaaaagcgtgcaggtggcctacgacagagccatgattcacctctcacgcgtacgcgggccacacagctttgttacttcttcttatctgtag

SEQ ID NO: 13356 - RNA, 270 nt, synthetic construct
  misc_feature 1..270: note = source = /note="Description of Artificial Sequence: Synthetic coding sequence"
  source 1..270: mol_type = other RNA
atgaagactggcctgtttttcctgtgcctcctgggtacggctgccgccattcccacgaacgctcgacttctgtctgaccattccaagcccactgccgagaccgtggcccccgataatactgcaatcccgagtctgagagccgaagccgaggagaatgagaaagaaactgccgtctcaacagaagacgactctcaccacaaggcagagaaatcatcggtgctcaagtccaaagaggaaagtcacgaacaatccgctgagcaaggaaagtag

SEQ ID NO: 13357 - RNA, 657 nt, synthetic construct
  misc_feature 1..657: note = source = /note="Description of Artificial Sequence: Synthetic coding sequence"
  source 1..657: mol_type = other RNA
atggggagagtgtttctcactggggagaaggcaaactccattctgaaaagatatccgagagcgaatgggttctttgaagagattagacagggcaacattgagcgggaatgtaaagaagaattttgcacctttgaggaggccagggaagcatttgaaaataacgagaagaccaaggagttttggagcacctatacaaaggctcagcagggtgaatcaaatagggggtcagattggtttcagttctacttaaccttcccactcatttttggacttttcatcattctgctggtgatcttcctaatttggcgctgcttcttacggaacaagacccggaggcagaccgtgactgaaggacatattccctttccacagcacctgaatattatcacaccaccgccccctcccgacgaagtattcgactcatccggattgagccctggttttctgggctacgttgtgggacgttcagattcagtaagcactcggcttagtaattgcgatccaccacccacatacgaggaagctacaggtcaagtgaatcttcagcgctcagaaaccgagcctcacctcgaccctccccctgagtatgaggacattgtaaattctaattctgccagcgctataccaatggtccccgtcgtgaccacaatcaagtag

SEQ ID NO: 13358 - RNA, 540 nt, synthetic construct
  misc_feature 1..540: note = source = /note="Description of Artificial Sequence: Synthetic coding sequence"
  source 1..540: mol_type = other RNA
atgtccttgggacctgaagtatttcttggccctccagaggcccagtctttcctttccagtcataccagaatccctagagcaaaccactgggacctcgaactcctgacgcctggcaacctggagagagaatgcttggaagaacgatgttcttgggaagaggctagagagtacttcgaagacaacacgttgactgagaggttttgggaaagctatatctataacggaaagggcggccgcgggcgcgttgatgtcgctagcctggcagttgggctcacagggggcatccttctgatcgtgctggccggattaggagccttctggtacttgcggtggcgccaacataggggacaacagccatgcccccaggaagccggcctgatctctcccctgtcacccctgaatcctctaggtcccccaacgcccctaccacccccacctccacctccgcctggattgcccacttacgagcaggccctcgcagcttcaggggtgcacgacgcccccccacccccatacacctcactgcgccggccccactag

SEQ ID NO: 13359 - RNA, 765 nt, synthetic construct
  misc_feature 1..765: note = source = /note="Description of Artificial Sequence: Synthetic coding sequence"
  source 1..765: mol_type = other RNA
atgaccttggaagacatagtgcaacgcgaggtttggggcaccgtcgtagcccggggcgcccccgctcctccagggcctgtaccaactaggggcgccgcaagccgcagactctctgtgtcccctgcctccacatctgaaacatcactttatcaggtgctgctgggagccagacagctggtgcagcccggccctcatgcaatgtacgcacgagtgagacaagttgaaagtaatccactctatcagggtaccgcctcaagtgccgacgtcgctctggtggaactggaagcgcccgtaccatttaccaattatatccttccagtgtgtctccccgacccatccgttattttcgagacagggatgaattgttgggtgacaggatggggctccccaagtgaagaggatctgctgcccgagcccaggatccttcaaaaactcgccgttccaattattgacacgccaaagtgcaatctcctctattccaaggacactgagttcgggtatcagccgaagaccatcaagaatgatatgctgtgtgcaggctttgaagaaggtaagaaggacgcttgtaagggagattctggcggccccttggtgtgtcttgtcggccagtcctggctgcaggctggggtcatttcttggggggaggggtgcgctaggcagaatcggccaggcgtatatatcagggtgaccgcacatcataactggattcatcgtattatccccaaactgcagtttcagccagctcgactggggggccagaaatag

SEQ ID NO: 13360 - RNA, 1899 nt, synthetic construct
  misc_feature 1..1899: note = source = /note="Description of Artificial Sequence: Synthetic coding sequence"
  source 1..1899: mol_type = other RNA
atgactccccccgttttaacgacagcagaaacatcagtgaagcccagtgtatccgcctttacccactctccccctgagaatactaccggcatcagctccaccataagctttcactctcgaacgctcaacctgaccgacgtgatagaagagctcgctcaggcctccacgcagactctgaaatccacgatcgcttcagagaccaccctttcgagtaaaagtcatcaatcaaccactactcgaaaagcgattatccgccattccaccatccccccatttctgtccagctcggctaccctaatgccagtgcccatttccccacccttcacccagagagccgtcacagacaatgttgccactccgatttctggacttatgacaaatactgtggtgaaactgcatgagtcctctcggcataatgccaaacctcaacagctagtcgccgaagtcgctaccagtccaaaagtgcaccccaatgctaagtttacgatcggcacaactcactttatctacagtaatctccttcatagcactccaatgccagcactcaccaccgtgaagtctcagaattctaaactgacaccatccccttgggcagaaaaccagttctggcataagccttatagtgagatcgccgaaaaaggtaaaaaacccgaagtgtctatgctggccaccaccggcttgtctgaagctactactttagtgtctgactgggatggccaaaaaaatacgaagaagagtgacttcgataagaagcctgtgcaagaagccacgacctctaaattgctccctttcgacagcttgagcagatacattttcgagaagccccgcatagtggggggcaaagccgcctctttcacgattcctgccaatagcgatgcctttctcccttgcgaggcagtcggaaatccacttcctacaatccactggacacgcgtaccatccgggcttgatctctctaaacggaagcaaaactctcgcgtacaggtgctccccaacggcacacttagcatccagagagtggagatccaggatagaggacaatacctgtgttcagcttccaacctatttggcactgaccaccttcatgtcaccctcagcgtcgtatcctatcctcctagaattttggaacgcagaacaaaagagataacagtgcactccggctccactgtcgagctgaaatgccgcgccgaggggcggccatcacctaccgtgacatggattctggcaaatcagacagtcgtgtcagagtcaagccagggtagccgacaagcggtggttaccgtggacggaaccctggtgctgcataacctgtccatctacgaccgaggattctataagtgcgtcgccagcaaccccggaggacaggactcgctgctggtaaaaatccaagttatcgcagcccctcctgtcattctggaacaacggagacaggttatcgtcggcacctggggagaatcgctcaaactcccatgtactgccaaaggcactccacagcccagtgtctactgggtgctctctgatggtaccgaagtgaagccactccagtttaccaactctaagctgtttctcttctctaatggaacattgtatatcaggaacctagccagctctgacagaggaacatatgagtgcatcgctacatctagtactggcagtgaaagacgggttgtaatgctcaccatggaggagagagtaacttctccccggatcgaagccgcaagccagaaacgaaccgaggtgaactttggcgataagttgctgctcaattgctccgccactggggagcctaagccccagattatgtggcgactgccttccaaagccgtggttgatcaacagcaccgggtggcagcaggctcaacttctaccctgatggacccatgtctactcgaccaatag

SEQ ID NO: 13361 - RNA, 681 nt, synthetic construct
  misc_feature 1..681: note = source = /note="Description of Artificial Sequence: Synthetic coding sequence"
  source 1..681: mol_type = other RNA
atggacatcattgtcctacttcccaaggggcactgcactaagatccaagaattacagatgaccaccgtgctgaaacaaaatgtccatgtcttcggcgtagaggggaattctgatgagctcgatgaacctattaaaacagtgtttgctgatgtcgcctttgttaagaagcacaacctgatgtctctcaatagcattaattggtctagagtcctggtccagatggcccaccatttcttcgcatatttccagtgcacgccttctctcgatactcacccgttaccacttgtagaggtggtagtgccgacaggtgccgccgggaatttggcagccggctatattgcacaaaaaataggactccccatccgcctggttgtggccgtaaatcgcaacgacatcattcacagaactgtccagcaaggcgacttttccctctcagaggcagtcaagagtacgctggcctccgcaatggacattcaggtgccctacaacatggaacgggtattttggttgctctccggtagcgactcccaagtgactcgcgccctcatggagcagtttgagcgcacccaatccgtcaacttacccaaggaattgcactccaaacactcaccagttctgcccaggccatgcctgtgctcccaggtgccaggctcttgcccaggatgctggcctgacccctag

SEQ ID NO: 13362 - RNA, 729 nt, synthetic construct
  misc_feature 1..729: note = source = /note="Description of Artificial Sequence: Synthetic coding sequence"
  source 1..729: mol_type = other RNA
atgttccagacaggcggcctgatcgtattctatggactcctggcccagactctcccgctcaacgttaatcctgcgctgcccttgtcccccacgggattagcaggttctttgacaaatgccctatcgaacggactgttaagcggaggtctcctcggaatactagagaacctgccccttcttgacattcttaagccgggtggagggactagcggcggcctactgggcggcttgctgggcaaggtcacctctgtgatccccggtctaaataacattattgacattaaggtcactgaccctcaactactggaacttggccttgtgcagtctcctgacggacatcggttgtatgtgactatccccctcgggattaagctccaggtcaacacaccacttgttggcgcaagcctcctaagacttgccgtgaaacttgatattaccgcagaaattctcgccgtcagagataagcaggagcgtatccacctcgttttgggcgactgtacacactcaccaggcagccttcaaatctccctgctcgacggtttgggccccctcccgatccagggcttgctggatagtctgactggcatcttgaataaagtgctccccgaactagttcagggaaacgtttgccctctggtcaacgaagtattaagaggattggatattactctggtacacgatattgtcaacatgctgattcatgggcttcagttcgtaataaaggtgtag

SEQ ID NO: 13363 - RNA, 1422 nt, synthetic construct
  misc_feature 1..1422: note = source = /note="Description of Artificial Sequence: Synthetic coding sequence"
  source 1..1422: mol_type = other RNA
atgtctctggaggcttctctgtgttcactggaggaatgtgctgcttttcagccctcctctccttcccctcttcagccacaggggccagtgaagtcgaacaatatcgtaactgttactggcatctcgctttgtcttttcatcataatcgcgacggttctgattactctatggcggaggtttggacggcctgctaagtgctccacgccagcccgtcataactccatccattctcctagcttcagaaagaacagcgacgaagagaatatctgtgaactgagcgagcagcggggtagtttctctgacggcggtgatgggcctaccggatcaccgggcgacaccggaatccctttgacctaccgcaggtccggccctgtgccccctgaggacgacgcgtctgggtccgaaagctttcagtccaatgcacagaagataatccctcccctcttctcataccggctggcacaacagcaattgaaagaaatgaaaaagaaaggactgaccgaaactacaaaggtttaccatgtgagccagtccccccttacagataccgccatcgatgcagctccgagcgccccactagatctggaaagtccggaagaagctgccgccaataaatttagaatcaaaagtccctttcccgaacagcccgcagtgtccgctggcgaacggcccccctcccgtctggatctcaatgtcacgcaagcatcctgcgctatttccccaagtcaaacgctaatccgtaaatctcaggcccgccatgttggatcccgggggggtccctccgaacgtagtcatgctcggaacgcccactttcgccgaacagcatccttccatgaagctagacaggcccgcccatttagagagagaagcatgagcacccttacacctcgtcaagcacctgcatatagctcccggactagaacttgtgagcaggcagaagaccggtttaggcctcagtctcgcggcgcgcacctgtttcctgagaagctggagcactttcaagaggccagtggcactagggggcccctcaacccgctgccgaagtcctacaccttgggccagccactgcgaaagccggaccttggagatcatcaagcggggctcgtggctgggattgagaggaccgaaccccaccgcgctcgccgaggaccttctccttcccataagtcagtatcaagaaagcaaagtagcccaatttcccccaaggacaattatcagcgcgtgagctctttgagtccatcacagtgtcgcaaggacaagtgtcaatcgtttcccacacatccggaatttgcgttctatgataatacttcctttggcctaacggaagccgagcagcggatgctggatcttcctggctattttgggtctaacgaagaagatgagaccacctcgactctctctgtcgaaaaattggtgatctag

SEQ ID NO: 13364 - RNA, 2310 nt, synthetic construct
  misc_feature 1..2310: note = source = /note="Description of Artificial Sequence: Synthetic coding sequence"
  source 1..2310: mol_type = other RNA
atgttgagtaaaaagggaattttcccgtggattctgacttgtatcagtgaagaaatggcctttcggactatctgtgttctggtgggtgtgtttatctgctccatatgtgtgaaaggctcaagtcaacctcaggcccgagtctacctgacatttgatgaactgcgcgaaactaagacctctgagtatttttcattgtctcatcaccctctggactatcggatcctcctaatggacgaggatcaggaccgaatctatgtggggtccaaggatcacattttgtcgctcaacataaataacatctcacaggaagccctttccgttttttggcctgcaagcacaatcaaagtggaggaatgcaagatggccggcaaggacccaactcacggctgcggaaatttcgtgcgagttattcagacctttaataggacccacctgtacgtctgtggatccggcgccttcagtccagtgtgtacctatctgaatcgaggccgtcgtagtgaggatcaggtgttcatgatagactctaagtgtgagtcgggtaaaggcaggtgtagtttcaaccccaacgtgaacacggttagtgttatgattaacgaagaactcttcagcggaatgtatattgattttatgggtaccgatgcagctatctttcgttcactgacaaagcgtaacgcagtgcgcacagaccagcataattctaaatggctgagtgagccgatgttcgtggatgcccatgtgattcccgatggcacagaccccaacgatgccaaagtttacttcttttttaaggaaaaattgacggacaacaaccgcagtacaaaacaaattcatagcatgatcgcccgcatctgccctaacgacaccggtggacttcgctcccttgtaaacaaatggaccacctttctgaaggctagattggtgtgttctgtaacagatgaagacggccccgagactcacttcgatgaactagaagacgtgttcctgctcgaaaccgataaccctcggaccacccttgtgtacggcatattcaccacttcttcttcagtttttaagggctccgctgtttgcgtgtaccacctctcggatatccaaaccgtctttaatggtccattcgcccataaagaaggtccaaaccatcaactcattagttaccaaggacgaattccatatccacgtcccggcacctgcccaggaggagccttcacccccaacatgcgaacaactaaggaatttcctgacgacgtagtcacgttcataaggaaccaccccctaatgtacaacagcatctatccaatccacaagaggcccctaatcgtcaggatcggcacagactacaagtatacaaagattgcagttgaccgggtcaatgcggccgacggcaggtatcacgtgctctttctgggcacagaccgcggcactgtccagaaagtggttgtcttacccacaaacaactcagtcagcggagaactgatcctggaagaactggaggtctttaaaaatcacgcacccattaccaccatgaagatttcttcaaaaaaacagcagctctacgtatcctcaaatgaaggcgtgtcccaagtctccctccatcgctgccacatttacgggactgcctgtgccgattgttgcctggccagagacccgtactgtgcctgggatggacacagctgctctagattttaccctacaggcaagcgcaggtcaagaagacaagacgttagacatggcaatccccttactcagtgtagaggattcaatctgaaggcctaccggaacgcagctgaaattgtgcaatacggcgtaaaaaataacaccacattcctggagtgtgcaccgaagtctccccaagcatccattaaatggctcctgcagaaggataaggataggcgcaaggaggtcaagctcaacgaacgaattatcgctacctcacaggggcttctgattcgcagcgttcagggctctgatcagggcctgtatcactgcattgctaccgagaacagtttcaaacagaccattgcaaagattaattttaaagtgctggactccgagatggttgcagtggtgactgataaatggtctccatggacttgggcctcttcagtccgggctctacctttccacccgaaggatataatgggagccttctcccattccgagatgcagatgataaatcagtactgcaaggataccaggcagcaacaccagcagggtgacgaaagtcagaagatgcgaggcgactacggaaagcttaaagctctcatcaattcccgaaagtcccgcaatcgacgcaaccaactccctgagtcttag

SEQ ID NO: 13365 - RNA, 942 nt, synthetic construct
  misc_feature 1..942: note = source = /note="Description of Artificial Sequence: Synthetic coding sequence"
  source 1..942: mol_type = other RNA
atgcccggatggctgaccttgcctacactctgtcggttccttttatgggcttttacaatattccataaggcacagggcgacccggcttcccaccctggtacaacacccccctcctataaggtgcgatggtcgaaggtcgagccaggggaacttagagagactttgatcttgattaccaatggtcttcacgcaagaggctacggtccactgggcggaagggcacgcatgcgcaggggacatcgactagatgcttctctggtgatcgcaggcgtgaggctcgaggatgagggcaggtacaggtgtgagctcattaatggcattgaggatgagagtgtggccttaacactgtctctcgagggagtcgtgttcccataccagccaagcagaggtcgataccagttcaattactacgaagccaagcaagcctgcgaggagcaggatggacgacttgctacatatagtcagctttaccaagcctggacagaaggactggactggtgcaatgcgggttggcttctggagggaagtgttcgatatccagtgttaaccgccagggcaccatgtggcggtcgcggaaggcctggcatccgatcctatgggccacgagaccggatgcgagatagatacgatgctttttgctttacatccgccctggctgggcaagtgttctttgtacccggaagactaactttgtcagaggcccacgctgcttgtcggaggcgcggagctgtggtggcaaaagtggggcacctctatgcagcttggaagtttagcgggcttgaccagtgcgacggaggatggcttgccgacggaagtgtgcggtttcccattactactccacgccctcgatgtggcggactccccgacccgggagtcagatcattcgggtttcctcggcctcagcaggctgcttacggcacatactgctacgcggaaaactag

SEQ ID NO: 13366 - RNA, 1089 nt, synthetic construct
  misc_feature 1..1089: note = source = /note="Description of Artificial Sequence: Synthetic coding sequence"
  source 1..1089: mol_type = other RNA
atggcttggacgtttgaatgcagtcggactactagccctgaaccattgtccacctctccatgtagaactacctctagtagaaactcaccgaccatgtcctgtcctgcgtctgtcgcttgcgagccaagcacatcgactaccaccagctccccccctaaggcatgtctgactaggccgtccagccctagtccatcatgtagtacatccgcatggcataacaaaaataatctgattagtaaagtgcctcgcggggcccttagccgacagacccagctgcgggagttatatcttcagcacaaccagctgactgactctggtctagatgctactactttctctaaacttcacagtctggaatacctcgatctgtcacataaccaactcaccactgtacctgctggccttcctagaacccttgccatcttgcatttgggcaggaaccggatccgacaagtggaagctgcacgactgcacggggccaggggcttgaggtatttacttttgcaacacaaccagttgggaagttctgggctgccagccggggctctgcgcccccttcgcggtctacatactttacatttgtatggcaacggcttagatcgtgtcccaccagctctcccacggagactcagggcgttggtcctcccccacaatcacgtcgctgctcttggagctagggatttggtggctactccaggactgacagaactgaacctcgcttacaacagattagctagtgctcgcgtgcaccatcgcgctttcagacgtcttagggcattaaggtccctggatctcgcagggaaccaactcacccggctgcctatggggttgcctaccgggctgagaacactgcaactgcaacggaatcagctccggatgttggaacctgaaccactggccgggctcgaccagctcagggagctgtctcttgcacacaacagactcagggtgggggacatcggacccggcacgtggcatgaactacaagctttgcaggtgcgccatcgtctagtatcacacaccgtgccaagggcccccccatctccatgcctcccttgtcacgttccaaacattctagtgtcttggtag

SEQ ID NO: 13367 - RNA, 900 nt, synthetic construct
  misc_feature 1..900: note = source = /note="Description of Artificial Sequence: Synthetic coding sequence"
  source 1..900: mol_type = other RNA
atgctccacccagaaacaagtcccggaagaggccacttactcgctgtattgctagccttgctaggaaccgcttgggcagaagtctggcctccccagcttcaggagcaggcccccatggccggggcattaaacagaaaagagtccttcctcctgcttagtctgcataaccggctccgctcgtgggtgcagcctcccgccgctgacatgagaagactggactggtctgattcactggctcagctcgcccagggctctccactgtggaatcctaatcccgaacccggtgtcagacctgtcgctcatcccgccagcggactcgagcacgctgccgctccccgagcctggtgtcctctttctaaatggtccctgtggttcgccgaaggacaacgctattcacacgcggcgggtgaatgtgcccgaaatgctacctgcacccattatacccagctcgtatgggccacatctagtcaattgggatgtggccggcacttgtgtagcgctggccaggccgctatagaggcttttgtttgtgcatacagccctagaggaaattgggaggtcaacggaaagaccatcgtaccctacaagaagggcgcgtggtgcagtctctgtacggcttctgtcagtggctgctttaaagcttgggaccatgccggcggcttgtgcgaagttccacgcaatccatgccggatgtcctgccagaatcacggacgactgaatatatccacgtgtcattgccactgtccacccggctacaccggtcgatactgtcaggtccggtgttctctgcagtgtgtacatggtagattcagagaggaagaatgtagttgcgtatgtgacatcggctacgagccctctgtccccccaaggtgtatatttccatctacgcccgtaacgtag

SEQ ID NO: 13368 - RNA, 1047 nt, synthetic construct
  misc_feature 1..1047: note = source = /note="Description of Artificial Sequence: Synthetic coding sequence"
  source 1..1047: mol_type = other RNA
atgctggacacaaacctaattctgctgccactttttcagttcattgttccgaaggaatggaattcaaagtaccggcctgtgtgcattcacctggcgggcactggcgaccaccactactggagacgacgaacactgatggcccggcccatgattaaagaggcccgtatggcaagcttgcttctagagaatccatattacggctgtagaaaacccaaagaccaagtgagatcttctttgaaaaatgtctccgacctgttcgttatggggggagctctggtactggaaagcgcagctcttctgcattggctagagcgggagggctacggaccgcttggcatgactggaatctctatggggggacacatggcctccctggccgtctcgaactggccaaagcctatgcctttgatcccatgtctcagttggagtactgccagcggagttttcaccaccacagattcattcaaaatgggccaggaattcgtgaagcattttaccagcagtgccgacaagctaactaatctgaacctcgtatcacggaccctgaacttagacatctctaatcaggtggttagtcagaaaccagctgactgccataatagcagcaagacaagcgtgagcgccacaagcgagggtttactgctccaggatactagcaaaatgaaacggtttaatcagacattgagtactaataaaagcggttataccagtcgtaacccacagagctatcacctgctatccaaggagcagagtcgcaatagcttgcgtaaggagagcctcatctttatgaaaggtgtcatggatgaatgcactcatgttgctaattttagcgtccccgtggacccctcccttataattgtagtgcaggccaaagaggatgcttatattccacgaaccggcgtgcggtcactgcaggaaatttggcccggttgcgagatacggtatctggagggtgggcatatcagtgcttatttattcaaacaagggttattcagacaagcaatttacgacgcctttgatcgatttttacataagtatgcgaactag

SEQ ID NO: 13369 - RNA, 1044 nt, synthetic construct
  misc_feature 1..1044: note = source = /note="Description of Artificial Sequence: Synthetic coding sequence"
  source 1..1044: mol_type = other RNA
atgcgcgcctgtatttctctcgttttagccgtgctgtgtggcctggcatgggccgatctgtattcagctcccacatcctgtcaaggtagatgttatgaggctttcgacaagcatcaccaatgtcattgtaacgcccgctgtcaggaatttggaaattgctgtaaggattttgaatctctttgctcggatcatgaggtttcacactcatccgacgcaattacaaaagaggaaatccaatccatcagcgaaaagatctaccgcgccgataccaataaggctcagaaggaagacatcgtgttaaatagtcagaattgcatatctccaagtgaaactagaaatcaggtggaccggtgccccaaacccctgttcacgtacgtgaatgaaaaactcttctcgaaaccaacttacgcagcattcattaacctgctcaacaattatcaaagagctaccgggcacggagaacactttagtgctcaggaactggctgagcaggacgcattcctgcgcgagatcatgaagaccgcagttatgaaagagctgtatagctttttgcaccatcaaaatagatacggaagcgaacaggagttcgtggacgacctgaaaaatatgtggttcggcttatattcacgagggaatgaggaaggtgattcttccggcttcgagcatgttttctccggcgaagtgaagaagggaaaagtcactggatttcataattggatccggttctacctggaagagaaagaagggctggtggactactactcacacatttatgacggcccttgggactcgtacccggacgtgctcgcgatgcagttcaactgggacggatattacaaagaagttggaagtgccttcatcggatcctcacccgagttcgaatttgcactctattccctgtgctttatcgccagacccggtaaggtgtgccaactgtctcttggtggctatcctctcgcagtaaggacttacacttgggacaaaagcacttatggtaatgggaaaaagtacatcgcgaccgcctatatagtttcatcaacttag

SEQ ID NO: 13370 - RNA, 864 nt, synthetic construct
  misc_feature 1..864: note = source = /note="Description of Artificial Sequence: Synthetic coding sequence"
  source 1..864: mol_type = other RNA
atgctcaagaagatatcagtgggcgtggctggggatctgaataccgtcactatgaaactcggctgcgttctgatggcatgggcactttatttaagtctgggtgtgttatgggtggcacagatgttgctggctgcttcttttgagaccttgcaatgtgaaggacccgtgtgcaccgaagaatcttcatgccacacggaggacgacctgactgatgcccgggaagcgggattccaggtgaaagcctacactttctccgagccgttccacctcattgtctcctacgagctattccctgccccaatattacgagctgttccaagtgccgaaccacaggcaggatcacctatgaccttgtcctgtcagaccaaactcccactgcagcgatccgcggcaaggttgctgttttccttctataaagatggcagaatcgttcaatcacgcggtctctcaagtgaattccagatcccgacagcgagtgaggatcactccggctcttactggtgtgaagcagccaccgaagataaccaggtgtggaaacagagcccgcagctggagatcagggtccagggagcatcctcctctgccgcacccccaactctgaaccctgccccacagaaatcagcagcccctggaaccgctcccgaagaagcccccggaccactacccccaccacccaccccctcttctgaagacccaggattctcttcacccctgggtatgccagatccacacctgtaccatcagatgggactgctgctgaaacatatgcaggacgtccgcgtcctgttgggacacctgcttatggagctgagagagttgagcggccaccgtaaaccgggaactaccaaagccaccgctgagtag

SEQ ID NO: 13371 - RNA, 1815 nt, synthetic construct
  misc_feature 1..1815: note = source = /note="Description of Artificial Sequence: Synthetic coding sequence"
  source 1..1815: mol_type = other RNA
atgatgagagccgtatgggaagcattagcagctctggccgccgtcgcctgcctcgttggcgccgtgcgtggggggcccggtcttagcatgttcgcaggccaagccgcacaacctgatccctgttccgacgaaaatggacacccgcggcgatgtatccccgactttgttaacgcggcgttcggcaaggatgtcagagtaagtagtacatgcgggaggcctccagcacgatactgcgtggtgagcgaaaggggggaggaacggctgagaagctgccacctgtgcaacgcgtccgaccctaagaaggcccaccctcctgcctttctgactgacctgaataatcctcacaatctgacatgttggcaaagtgaaaattatcttcaattcccacacaacgttaccttgacgctgtccttaggtaagaagttcgaagtgacgtacgttagcttgcagttctgtagccctcgaccggaaagtatggccatttacaagtccatggattacggcagaacctgggtcccgtttcagttctactccacccaatgtcggaaaatgtacaatcggccgcatagagcaccaatcactaagcagaacgagcaggaagctgtatgtactgattcccacaccgacatgcgcccgctttctggtggcctcatcgcctttagcaccctggacggcagaccctccgcacatgactttgataattcaccagtgcttcaggattgggtcacagccactgacatcagggtggctttttctcggctgcatactttcggtgatgagaacgaagacgacagcgagctcgcaagggattcttatttttatgccgtatccgatttgcaagtgggcggcaggtgcaaatgcaatggccacgcagccagatgtgtaagagacagagacgacagccttgtttgcgactgccgccacaatacagccggcccagaatgtgaccgctgtaaaccattccactatgaccgtccctggcagcgtgcaaccgcccgtgaagcgaacgagtgcgtggcgtgcaattgcaaccttcatgcacggcgctgccgcttcaacatggagctatataaactgtcaggcaggaaaagcgggggggtgtgcttaaactgccggcacaataccgccggacggcactgccactactgtaaagagggatattatcgcgatatggggaagccaatcactcacagaaaagcttgtaaggcatgtgattgtcaccctgtgggagcggccggtaagacatgcaatcagactacaggacagtgtccctgcaaggatggtgtcactggaatcacatgtaaccgttgtgcgaagggctaccagcagagcagatctcctattgccccttgtatcaagatccccgttgccccacctacaactgcagcttccagtgttgaggaacctgaggattgcgactcgtactgcaaggcatcaaaaggcaaactcaaaattaacatgaagaagtactgcaaaaaggattacgctgtacaaattcatattcttaaagccgataaagcaggggactggtggaagttcaccgtgaatattatctctgtctacaagcagggcacctccagaattcggcgcggcgatcaatcactgtggataagatcgagagatattgcttgtaagtgccccaaaatcaagcctttaaaaaaatatttacttctcggaaacgcggaagattctcccgatcagagtggtatcgtagctgacaagtccagtctcgtcattcaatggcgggatacttgggcccggaggttacggaaatttcaacagagagagaagaagggcaaatgcaaaaaggcctag

SEQ ID NO: 13372 - RNA, 1005 nt, synthetic construct
  misc_feature 1..1005: note = source = /note="Description of Artificial Sequence: Synthetic coding sequence"
  source 1..1005: mol_type = other RNA
atgagatcggccgggggtagaggcgagattaaagttagacgtgaactccaaccaagtaaacaggtttccggtttaacaaatcacgctagaacaggccaggaaaagagaaacctgcagcgacttgtgctagaaacacctagtcagaacatttttttttctcccgtgagtgtgtctacctcacttgccatgctgagtttgggtgcgcactccgtgactaagactcagattttacagggactgggatttaatctgactcatacaccggagagtgctatccaccagggtttccaacacttagtgcactcactaaccgtgccctcgaaggaccttaccttaaaaatgggttccgctctcttcgtgaagaaggagctacaactgcaggctaacttcctggggaatgtgaaaagactctacgaagccgaagtgtttagcacagacttcagcaatccatcaatcgctcaagccaggattaactctcacgtaaaaaagaagactcagggaaaggtggttgacattattcagggtctcgatctgctgactgcaatggtcctggtgaatcacatctttttcaaagccaaatgggagaaaccattccacccagaatacactaggaaaaacttccctttcctcgtaggtgaacaggtaactgtacacgtgccgatgatgcaccagaaggaacagtttgccttcggggtggacaccgaactgaattgctttgtacttcaaatggactacaagggagatgctgtcgctttcttcgtcctgcccagtaagggcaaaatgagacaactggagcaggctctgagcgccagaacactgaggaagtggagtcactcacttcagaaaagatggattgaggtgtttattccaagattttcaatttccgcctcgtataaccttgagactatattgccgaagatgggaattcagaatgtgttcgacaagaacgctgacttctccggcattgccaagcgggactctctgcaggtgtctaaagtctcctag

SEQ ID NO: 13373 - RNA, 1065 nt, synthetic construct
  misc_feature 1..1065: note = source = /note="Description of Artificial Sequence: Synthetic coding sequence"
  source 1..1065: mol_type = other RNA
atggcaccggccagaaggccagctggcgctcggctgttattagtgtacgctggactcctggccgctgctgccgctgggctgggatccccagagcccggtgctcctagtcgttcccgggcccgtagagaaccgccaccaggaaacgagttaccacgaggcccaggcgagagcagagcgggacccgccgctagaccaccagagcccaccgctgaacgggcacactccgtggacccgagagacgcctggatgctgtttgtccggcagagtgataaaggggtaaacggaaagaagagaagtaggggaaaggcaaaaaagctgaagttcggtctgccaggccctcccggcccaccggggcctcaggggccccctggtcccataattccacccgaagccttgttgaaagaatttcaactcctgctgaaaggcgcagtaaggcaacgcgagagggcagagccagagccatgtacatgcgggccagctggtcctgtagccgccagtttggctccagtttcggctacagcgggcgaggatgacgatgatgtagtaggggacgtgctagccctgttagctgcaccgctcgcaccaggaccgcgagcacctcgggtggaggctgctttcttgtgcaggttgagaagagacgccctggtcgagagacgcgccctgcatgagctgggtgtctactatctcccagatgcggagggcgccttccgtcgggggcccgggttaaatttgactagtggacaatacagagcgcctgtcgccggcttctatgctctggcagccactctacatgtcgctctgggcgaaccaccccggcgcgggcccccccgtcctcgagatcacctgaggcttctgatttgcatccagtctcggtgccaaaggaacgcaagtcttgaagctataatgggcctagagtcttcctccgagctgtttacaatttctgtcaacggagtgctgtacctgcagatggggcaatggaccagcgtctttctggataacgcgtccggttgctcacttacagtgcggagtggcagtcactttagcgccgtgctccttggggtttag

SEQ ID NO: 13374 - RNA, 2685 nt, synthetic construct
  misc_feature 1..2685: note = source = /note="Description of Artificial Sequence: Synthetic coding sequence"
  source 1..2685: mol_type = other RNA
atgtcattgcccagatgttgccctcatccacttagacccgaggggtccggagccatggggccagaagccctcagtagcctcttgcttttgctccttgtggcctcaggcgacgctgatatgaaaggccattttgacccagctaaatgtcgctacgctctgggaatgcaggaccggacgataccagactccgacatctctgcttcatcttcttggagcgattccactgcagcccgccactcacgcctggaatcaagtgacggagatggggcttggtgcccggccggtagcgtattcccaaaggaagaagagtacctccaggtggacctccagaggctgcatctggtggctctggtcggcacccaaggacgacacgctggaggattgggaaaggagttctccaggagctaccgcttacggtacagtcgggatggacgtcggtggatgggttggaaggaccgctggggacaggaagtaatctccgggaatgaggatcccgagggcgtcgtgttgaaagatctggggccgcccatggtcgcccgcttagtccggttctacccacgggcggatcgcgtaatgtccgtatgccttagggttgagctgtacggctgtctatggcgcgacggactcttaagttacaccgcgcctgtgggccagactatgtatctcagcgaggctgtgtacttgaacgattcaacatacgacggacacaccgtcggagggttgcagtatgggggtttaggccagctggccgacggtgtcgtaggactcgacgacttccgcaagtcacaggagttacgcgtgtggcccggctacgactacgtcggctggtctaaccattccttttcaagtgggtatgtggagatggagtttgaattcgatcggttgagggcgtttcaggctatgcaagtgcactgcaataacatgcatacactgggggctcggttaccagggggagtggagtgcaggttccggcgcggtccagcaatggcttgggaaggcgagcctatgaggcacaacctcggagggaatctcggggatcctcgggctcgggccgtgtctgtgcctttgggggggcgggtagctcgtttcctgcagtgcaggtttctctttgctggcccgtggctcctcttttccgaaattagctttatctcagacgttgtgaacaatagttcccctgcactgggtggaactttcccccctgctccctggtggcctcccggtccgcctcccaccaatttctcttccctggagctggagccccggggtcaacagcccgtggccaaagccgagggctcccccaccgctatactcatcggctgcctcgtcgcaatcattctgctgctgctgctcatcatcgccctcatgttatggagattgcattggagacggctcctgtcgaaagcggagaggcgggtcctcgaagaagaacttacggtgcacctgagtgtgcccggggacacaatacttattaataaccgaccaggcccaagagagccacccccataccaggagccccgtccgagaggaaaccctccgcatagcgccccatgcgtgccaaacggatcggcctacagcggagactacatggaacctgagaagccgggtgcaccactgctgccaccaccacctcagaacagcgttccacattatgcagaagcagatattgtaacattacaaggtgttaccgggggcaacacctacgcagtcccagctcttccccccggcgccgttggagatggtcctccgagagtggatttccctcggtctagactgaggtttaaggagaagctcggagaagggcagttcggagaagtgcacctgtgtgaggttgattctccccaggatctggtatccctcgactttccactaaatgtgagaaagggccaccctctgcttgttgcagttaagatcctaaggccagatgctacaaaaaacgcaagaaatgatttccttaaagaagtgaagattatgtccaggttaaaggaccccaatattatccgactgctaggcgtgtgtgttcaggacgaccccctgtgtatgatcaccgattacatggaaaacggagatctcaaccagtttcttagcgcacatcaactggaagataaggctgcagaaggggcccctggagacggacaggcggcccagggccctacaatctcatacccaatgctccttcacgtggccgcccagatcgctagtggtatgcgttacctggcaacactaaacttcgttcatagagatctagccacccgaaactgtctggttggagaaaatttcactataaaaatcgccgattttggaatgagccgtaacctatatgctggggattattaccgcgtgcagggtcgcgctgttctgccaattaggtggatggcgtgggaatgtatcctgatgggcaaatttactactgctagtgatgtctgggcctttggagtcactctatgggaagtcctaatgctgtgtcgagcccagcctttcggacagctgactgatgaacaagttatagaaaacgccggcgaattctttcgagatcagggacggcaggtgtatctgtccaggccccccgcctgcccacaggggctgtacgaattaatgctgaggtgttggtcccgagagagtgaacagcggccgcccttcagtcaattacaccgattcctagccgaagatgcactgaacacagtatag

SEQ ID NO: 13375 - RNA, 2685 nt, synthetic construct
  misc_feature 1..2685: note = source = /note="Description of Artificial Sequence: Synthetic coding sequence"
  source 1..2685: mol_type = other RNA
atgtccctccctaggtgctgcccccatccacttcgccctgagggaagcggcgccatgggcccagaagctctgtctagcctgttgctgttgctcctggtggcctccggagacgccgacatgaaaggccacttcgaccctgccaaatgtcgctacgcactcggcatgcaagacagaactatccccgatagtgatatttcagcttccagcagttggtctgattctactgctgccagacactcgagattggaaagcagcgacggcgatggggcatggtgccctgcagggagcgtcttccccaaagaggaggaatacctgcaggtcgacttgcagcgcctccatttggtggctcttgtggggacccagggacggcacgccgggggccttggtaaagaattctctcgctcctacagactgagatactcacgtgatggacgccgatggatgggatggaaagacaggtgggggcaggaagtcattagcggaaacgaagatcctgaaggggtcgtattgaaagatctagggccccctatggtggctcggctggtgaggttctatccaagagccgatagagtcatgagcgtgtgcctgagagttgagctctacggatgcttgtggcgagacggacttctgagctacaccgcccccgtcgggcaaacgatgtacctcagcgaggcagtgtacttaaacgacagcacctatgatgggcacacagtgggtggactgcagtatgggggtctgggccagctcgcggatggcgtggtgggcttagatgacttccggaaaagccaggagttacgggtttggccagggtatgattatgtgggctggtctaatcacagtttctcatccggatatgtagagatggagttcgagttcgacagactgagggctttccaggccatgcaagttcattgcaataacatgcacactttgggagcacggctgcccgggggagtggaatgccgatttaggcggggcccagctatggcttgggagggagagcctatgaggcacaatctggggggaaatctgggcgatccgcgggctagagctgtgtccgtgccattgggaggacgggtggctcgtttcctgcagtgtcgtttcctcttcgctggtccatggttgctgttttcagaaatatcatttatttccgatgtagtgaataactcatcccccgcacttggaggaacctttcctcctgcgccttggtggccgcccggtcctccccctacgaattttagtagtctggagttggagccaaggggccagcaaccggttgctaaagctgaaggctctccaaccgccatcctgataggatgcctagttgcaattatattacttctgttgttgataattgccctcatgctgtggagactgcactggagacgtttactgagcaaagccgagcggagagttttagaggaagagctgaccgtgcatttatcagtgccaggtgacacaatcttaatcaataatcgccctggcccccgcgaacctccaccctaccaggaaccccgaccacgcggaaacccacctcattcagcaccatgtgtgcctaacggcagtgcctactcaggggattatatggagccagaaaaacctggtgctccactcctgcctccacccccccaaaactctgtcccccactacgcagaggccgacatcgtcacacttcagggcgtgaccgggggaaacacatatgcggttcccgctctgcctcctggtgcagtgggagatggaccacccagagttgactttccacgcagtcgcctgcgttttaaggagaaattgggagaaggccaatttggtgaggttcacttatgtgaagtggattccccacaggatttggtaagcctggatttccctctaaacgtcagaaagggtcatccacttctggtcgcggtcaaaattctccgcccagacgccaccaaaaacgcaagaaatgatttcctcaaagaagtaaagataatgtccagactgaaagaccctaacatcattcgactcctgggcgtgtgtgtgcaggatgaccccctgtgcatgattactgattatatggaaaatggcgatttgaatcaattcctctctgcgcatcaacttgaggacaaggcagccgaaggcgcccccggagatggacaggccgcccaggggcctactatctcttatcccatgctgctccatgtcgcagcgcaaatagcctcagggatgcgctacctcgcaactctgaattttgtgcaccgagatctggctacgaggaactgtctggtgggagagaacttcaccatcaaaatagcggatttcggcatgtctaggaacttgtatgctggggactactatcgggtgcaagggagggctgttctgcctattcggtggatggcatgggagtgcatactcatgggaaaatttacgaccgcttctgatgtgtgggcgttcggggtcacattatgggaggtcttaatgttgtgccgagcccagccattcggccaacttacagatgagcaggtcattgagaatgccggcgaattttttcgggatcaggggcgtcaagtgtatctgtctcggccccccgcctgcccccaggggctctacgaactgatgctcaggtgctggtcacgggagtccgagcagcggccaccattctcacagcttcatcgcttcttagcagaagacgctctgaataccgtgtag

SEQ ID NO: 13376 - RNA, 2886 nt, synthetic construct
  misc_feature 1..2886: note = source = /note="Description of Artificial Sequence: Synthetic coding sequence"
  source 1..2886: mol_type = other RNA
atgttgctgctcctcctgctggctccgctgtttcttagaccacccggggcaggcggggcccagaccccaaacgcgacatccgaaggttgccagataattcaccctccttgggaaggaggcattcggtacagaggactgacgagggaccaagttaaggccatcaattttctgcccgtagactatgagatcgaatacgtgtgccggggcgaacgcgaagtagtgggaccaaaagtgagaaaatgtctggctaatggctcctggacagacatggatacacccagtagatgcgtgagaatttgttcaaagagttacctcactctggagaacggcaaagtgttcttaacaggcggggatcttcccgcattggacggcgcccgagttgatttccgttgcgaccccgacttccaccttgtggggtcttcccgctcaatttgtagtcagggccagtggtcaacgccaaaacctcactgtcaggtaaatcgaacaccacactccgaacggagagctgtctacatcggagcactcttcccaatgagtggtggctggcctgggggacaggcatgtcagcccgcagtagaaatggcgctcgaagacgttaacagcagaagagatattctcccggattatgagctgaagctgattcaccatgatagtaagtgtgatcccgggcaagctacgaagtacctctatgagcttctttacaacgatcctattaagattatactcatgccaggctgctcttccgtatctacgctcgtagcagaggccgcacgcatgtggaacctaattgttctgtcctacggatcgtcatcgccagcgctgagcaacaggcagcgatttcccactttcttccgcacccacccctcggccacactacacaatcccacgagagtcaaactcttcgagaagtgggggtggaagaagatagctaccatacagcagaccactgaagtattcacatctaccctcgacgatctggaagaacgggtgaaggaagctggtatcgagatcacctttaggcaatcttttttcagcgacccggcagtacccgtaaagaacctaaagagacaggacgcccggattatcgtgggattgttctatgaaactgaagctaggaaggtcttctgcgaggtttacaaagagcgcctctttggtaagaagtatgtctggttcctgattggctggtacgccgacaactggttcaaaatttatgatccatctattaattgcacagtcgatgaaatgacagaagcagttgaggggcacatcaccacggagatcgtgatgctcaatcccgccaacacaagaagcatttccaatatgacgtcccaagagtttgtagaaaaacttacgaagagattgaagcgccatcccgaggagacgggtggttttcaggaggctcccctcgcatacgacgccatctgggctttggcgctggctctgaacaagaccagtggtggaggaggaaggtccggcgtcagactagaagactttaactacaataatcagaccataacagaccagatctaccgggccatgaatagcagcagttttgagggggtgagcggtcacgtggtgtttgacgcctcaggctcacggatggcatggacactgattgagcagctgcagggcggcagctataaaaaaatcggttattatgacagtactaaagatgacctcagctggtcaaaaacagacaagtggataggcggttcacccccagccgaccagacactcgtgatcaaaacattccggttcctatcacagaaactctttatcagcgtcagcgtgctgagttccttggggatcgtcctggcggtcgtgtgtctgagctttaatatctataattcccacgtccgctatatccagaacagccagcctaacctgaataatcttaccgccgtagggtgctccctggctttggcagcagtttttcctttaggactcgacgggtaccatattggaagaaatcagtttccctttgtgtgccaagcccgtttgtggttactaggactcgggttttccctgggatacgggtctatgttcactaagatttggtgggtccacaccgtatttactaaaaaggaggaaaagaaggagtggagaaagactttggagccatggaagctctacgctactgtcggtttgctagtcggtatggatgtactaaccttggccatttggcagatcgtggatcccctccatagaacaatcgaaacgttcgctaaagaagagcctaaggaagacattgacgtgagcatattgccccaactggagcattgtagtagtaggaaaatgaatacatggctgggcatcttttatggctataaggggctgttgctcctgcttggcatcttcttagcgtacgagacgaagagcgtgtctactgagaagattaacgaccatagggccgtaggtatggccatttacaatgtggctgtcttatgccttatcacagctccagtgactatgatattatcatctcagcaggatgcagccttcgctttcgcctctctggccatagtgttctcttcttacataacgctggttgtcctattcgtgcctaaaatgaggcggttgatcaccagaggcgaatggcagagtgaggctcaagatactatgaaaaccggttcatctactaacaataacgaagaagaaaagtccagattgttggagaaggagaaccgggagctcgaaaagatcatcgccgagaaagaagaacgcgtgtctgagctgaggcaccagctccagtcgaggcagcagctaaggtctcgacggcacccaccaaccccccccgaacctagtggcggccttccacggggacctcccgagcctcctgatagacttagctgtgatgggtctagagtgcatcttctgtacaaatag

SEQ ID NO: 13377 - RNA, 2559 nt, synthetic construct
  misc_feature 1..2559: note = source = /note="Description of Artificial Sequence: Synthetic coding sequence"
  source 1..2559: mol_type = other RNA
atgctcccaaccgaggtcccccaatcgcacccaggaccttccgctcttctgctcttgcaattgttactgccgccaactagtgccttttttccaaatatctggtccctgctcgccgctccaggatcgatcactcaccaggacttgaccgaggaggctgcccttaacgtgacactccagctgttcctcgagcagccgccacctggtagaccacctctacgtctggaagattttctaggccgcaccctgctggctgacgacctgttcgccgcctacttcggtccaggttcatcccggagatttcgggcagctctgggagaggtttcccgggccaacgcggcacaagacttcctgcctacgtctcgtaacgacccagatctgcattttgatgcggaaagactcggacaagggcgagcccgtcttgtcggtgctctgcgggagaccgttgttgccgccagagccctagatcatactcttgccagacaacgcttaggagcagctctgcatgccctccaagatttctacagccactctaactgggttgagctaggggaacaacagccccacccccatctcctgtggccacgacaagagctgcagaacctcgcccaagtggccgaccccacgtgtagtgactgcgaagaactatcctgccctcggaattggcttggcttcactctgctcacttccggatacttcggcacccatccccccaagccaccagggaaatgctcccacggcggacactttgaccgatcctccagccagccaccacggggcggcataaataaggatagcacctccccgggcttcagtccacatcacatgcttcatctgcaggctgccaaacttgctctcttggcctcgatccaggccttttcccttctgcggagcagactgggggatagggatttctctagattgctggatatcactcctgcaagctcactgtcgttcgtgctggataccacaggctctatgggtgaggagatcaatgcggcaaaaattcaggctagacacttggtcgagcaacgacgcggttctcctatggaaccggtccactatgtgctggttcctttccacgacccgggcttcggaccagtgttcacaacttctgaccctgactccttctggcagcaactcaacgagattcatgccttgggaggtggcgacgagcctgagatgtgcctgtctgctctacaattagcccttttgcatacgccaccactgagcgacatctttgtctttacagatgcgagtccaaaagacgccttcctcactaatcaagtcgaatccctaactcaggaacgccggtgccgcgttaccttcctggtcaccgaagacaccagtagagtccaagggagggcccgacgggagattctgtcgccacttaggttcgagccctataaagccgtggctttggcatccggaggagaagttatcttcaccaaagaccaacacatccgcgacgtggcggcaattgtgggagaaagcatggctgccctcgttactctcccgttggatcctccagtagtcgtaccaggtcagcctctcgttttcagtgtggacgggctgctgcaaaaaatcacggtgcgaatccatggagatatcagcagcttttggatcaaaaatcctgcaggcgtgtcacaagggcaggaagaagggggtggacctctcggacatacacgccggttcgggcaattttggatggtgacaatggacgaccccccccagactgggacatgggaaattcaggtcactgcagaagatacacccggcgttcgcgtacaagcccaaacatctttggacttcctgttccactttggcataccaatggaggacggccctcatcccggcctgtatccactgacccagccagttgccggtcttcaaacacagttgttagtggaggtcacaggcctaggttccagggcaaaccccggcgatccacaacctcacttctcccacgttattctgaggggcgtacccgagggggctgagctcgggcaagtcccactggaaccagtcggtcctcccgagcgcgggctactggcagcttccttatcgcctactcttttgtcaaccccacggccattctctctggagctgattggtcaggacgccgccggtcgcaggctgcatcgtgccgccccccagccatctacggtggtccctgtgctccttgagctctccggaccttcaggttttctggctcccggatcaaaggtccctctgtcgctgagaatagcttcttttagcggcccacaggacttggatctgcgtacctttgtgaaccctagcttctccctaacttcgaatctgtctcgcgcccatttggagctgaatgagagtgcctggggaagactgtggctcgaggtacccgattcagctgcccccgattcagtcgttatggtgactgtcaccgcgggaggaagggaggcgaaccctgttccacccactcacgctttccttaggctcctggtttcagccccggctccccaggtgagaaatcattatttcccaagtcaaggccctgcgcatcacccttatcgattgatctag

SEQ ID NO: 13378 - RNA, 756 nt, synthetic construct
  misc_feature 1..756: note = source = /note="Description of Artificial Sequence: Synthetic coding sequence"
  source 1..756: mol_type = other RNA
atgccacatttagcaagtctattcacagcttcttcgaggtgttgccctcatcctctcagaccggagggatcaggtgctatgggcccggaagctttatcttctttgctacttttgctgcttgttgcctcaggagacgccgatatgaaagggcattttgatccagccaagtgtagatacgccttagggatgcaggatcgtaccatccccgattcggatatatctgcttcgtcatcttggtccgacagcaccgccgcccgccactccaggttggaatcctctgatggagatggcgcttggtgccccgccggctccgtctttccaaaggaagaggagtatctgcaggtggatttgcagagactgcacctggtcgcactggtcggaacacaggggagacacgctggtggactgggtaaagagttctcaagaagttaccgtcttcgatattcccgagatggtcgccgctggatgggctggaaagatcggtgggggcaggaagttatcagtgggaatgaagatcctgagggagttgtcctgaaggatctgggaccccctatggtggctcgactagtgaggttctatcccagagcggatcgggtcatgtccgtatgtcttcgagttgagctgtacggatgtttgtggcggggggaatggctaagcttcctgggaatctgctttctcagccgcgggctggaaggaggagaatgtggcgagtgggcaagtcggatcccaagtcctgcaggcaagctttctctctag

SEQ ID NO: 13379 - RNA, 726 nt, synthetic construct
  misc_feature 1..726: note = source = /note="Description of Artificial Sequence: Synthetic coding sequence"
  source 1..726: mol_type = other RNA
atgaaatttatactcttgtgggctctgttaaatctgactgtcgcactcgcttttaatcctgactacactgtatcatcaacaccaccttaccttgtatatcttaagagcgattatctgccatgcgccggggtcctgattcaccccctgtgggttataaccgctgctcattgtaacttgccgaagctgcgagtcatcctgggcgtgactattccagctgattcgaacgagaaacatcttcaggtaatcggctatgaaaagatgattcaccacccccacttcagtgttacttcaattgaccacgatatcatgctgattaaactcaaaacggaagctgaactgaacgactatgtgaaactcgccaacttaccttatcagacgatcagtgaaaacactatgtgcagcgtgtcaacttggagttacaatgtatgcgacatctacaaggaacctgattccctccagacagtcaatatatccgttatcagtaaaccacagtgccgagatgcctataagacttacaacatcacagagaacatgctgtgtgtcggcattgttcctggtagaagacagccttgcaaggaagtcagcgccgcacctgcgatatgcaatggtatgttacaaggaattttaagttttgctgacggatgtgtgctcagagcagacgtcggtatctatgccaaaatcttctactatattccatggattgaaaacgtcatacagaataattag

SEQ ID NO: 13380 - RNA, 1536 nt, synthetic construct
  misc_feature 1..1536: note = source = /note="Description of Artificial Sequence: Synthetic coding sequence"
  source 1..1536: mol_type = other RNA
atggccaaaggtctgagcgtgcagaacgataagcaccctggatatcaacctgcactgctgttgtctcctggcgctcctctgtttgcagatggcccagcctacgcgctgttacatttactgctccacgaaggaaaggccgagatggcagatcaggcagcagcctggctgactcggcagggatcattccaagggggctttcggagcacacaggatacagttatcgcactggacgccctctcagcgtattggattgctagtcacacaacagaagagagaggacttaatgttacgttgtcatctacaggcagaaatggatttaaatcccacgcattacagcttaacaaccggcagatcaggggtttggaagaagaacttcagttttcactcggctccaagattaatgtgaaggttggaggcaatagtaagggcaccttgaaggtgctccgcacatataatgttctggacatgaagaacaccacctgtcaagacctgcaaattgaggtcaccgtcaagggtcatgtcgagtacaccatggaggctaacgaggattacgaagactatgagtatgacgaactgcccgccaaagatgatccagacgctccactccaacccgtaaccccactgcaactcttcgagggacggcgtaaccggagacggcgagaggctcctaaagtagttgaagaacaagagtcccgcgtccattacacagtctgcatctggcgcaatggcaaagtggggctgtccggaatggctatcgccgacgtaaccttgttgtccggctttcatgcccttcgagctgatctcgagaagttaacaagtctgagcgatagatatgtgagccacttcgagaccgaaggcccacacgtgcttctttacttcgactctgttccaacgtctcgagaatgtgttggatttgaagccgtgcaggaggtccctgtggggttagtgcagcccgcgtccgctactttatacgactactataaccccgagagaagatgttcagtcttctatggggccccttccaagtcacggctgttggctacactgtgtagtgccgaggtatgccagtgcgcagagggcaagtgtcctcgccaacgacgcgccctagagcggggcctgcaggacgaagacggctaccgcatgaaatttgcctgttactaccctcgtgttgaatacggctttcaagttaaagtgctgagggaggacagccgcgcagcttttagactgtttgagaccaagataacccaggtactgcactttactaaagatgtcaaggcggcagccaaccagatgcgaaattttctggtgcgcgcctcctgtcggttgagactggaaccgggcaaagagtatttgataatgggcctagatggtgctacttacgatttagagggtcaccctcaatatcttctagattccaactcctggatagaggaaatgccaagcgagcggttgtgcagaagtacccgacagagagcagcttgcgcccagttaaacgatttcctgcaggagtacgggacacaaggctgccaggtttag

SEQ ID NO: 13381 - RNA, 2067 nt, synthetic construct
  misc_feature 1..2067: note = source = /note="Description of Artificial Sequence: Synthetic coding sequence"
  source 1..2067: mol_type = other RNA
atgctcccaactgaagtgccccagtcccatcctgggccttctgccttattgcttctacagctcttactaccccctacctctgccttctttcccaacatctggagcttactggcagccccaggaagcattacacaccaggaccttaccgaggaggccgccctgaacgttacactgcagctttttctcgagcaacccccccccgggaggcccccacttcgcttggaagatttccttggtaggacacttctcgcagacgacctgttcgcagcgtatttcggcccaggaagttcacgtcgatttcgagccgccctgggcgaagtttcacgggcaaatgcagctcaggatttcctaccaacttcaaggaacgatccggatctccacttcgacgctgagagactcggacaaggcagagcccggttggtgggggccctccgcgagaccgtcgtggccgctcgggcccttgatcatacacttgcccgacagcgcctgggggccgctcttcatgccctccaggatttctattcccactctaactgggtagagctcggtgaacaacagcctcaccctcatctactgtggccccgccaggagcttcagaatctcgctcaggtggccgacccgacctgcagtgactgcgaagaactgagctgtcccagaaattggctggggttcaccctgctgacctcaggatatttcggcacccaccccccaaagcctccaggaaaatgctctcacggtgggcacttcgatcgatccagttctcagccacctagaggaggaattaataaggactctactagtcctgggttcagtcctcaccacatgctccatcttcaggccgctaaactggccctcttggcctccatccaagcattctccctgctgagatcgcggctgggggaccgcgacttcagtagactactggatattacccccgcgtcaagtcttagtttcgtattagacacaactggctccatgggcgaagaaatcaacgccgccaaaatccaggctagacacttagtagagcagaggcgtgggtctcctatggaacctgtgcactatgtcttagtcccattccacgaccccggctttggtcctgtgttcacaacaagcgacccagattccttttggcagcagcttaatgagattcacgcactcggtggaggcgatgagcccgagatgtgcttgtccgccttgcagttggcactcctacacacacccccattgagtgacatctttgtgtttaccgacgccagcccaaaagacgcgttcttaaccaaccaggtcgagtctctgacccaggaacgaagatgcagagttacattcttagtgaccgaagacacctctcgtgtgcagggaagagcgcggcgagagatactgtcccctttacgtttcgagccgtataaagcagtggcgctagccagcggaggcgaagtcatttttaccaaagatcagcacatcagagatgtggcagccattgtaggcgaaagcatggcggccctcgtaacattgcctcttgacccacccgtcgttgtccctggacaaccgctggtgtttagcgttgatggattactgcagaagattactgtgcgaattcacggcgatatctccagtttctggatcaaaaatcctgctggagtgagccaggggcaggaagaaggaggcggtcccctgggccacacccgccgctttggacaattctggatggttaccatggatgacccaccccagacgggcacctgggaaattcaggtcactgctgaggacaccccgggcgtacgggtccaagctcaaacgtccctcgattttttgtttcacttcgggatccccatggaggacggcccacacccaggactttaccccttgactcagccagtagctggactgcagacacagctgctggtggaatctcagtcttgggggtcgagcgcggcctttctgcctaggcatccttctcgcggtccgcgagggtgtagaaccagaccgggagcgctaggtgctcgcgggacgtccggcgctaggagtccacgctcgcttgccgtcgcacacgccgcggtgcatccatag

SEQ ID NO: 13382 - RNA, 2559 nt, synthetic construct
  misc_feature 1..2559: note = source = /note="Description of Artificial Sequence: Synthetic coding sequence"
  source 1..2559: mol_type = other RNA
atgctgcctacagaagtcccacagtcacacccaggaccttctgctctacttttgcttcagttactcctcccacccacatccgcctttttccccaatatttggtccctgctagcagcccccggatcaatcacacaccaggacctcactgaggaggcagcccttaatgttacactgcaattgttcttagagcaaccaccgcccgggagaccgcctttacggctcgaagacttcctgggccgcacgctactagctgatgaccttttcgctgcatacttcggaccaggcagttcaagacggttccgggctgccttaggagaggtcagccgagctaacgccgcccaggacttcttaccaacctccagaaacgaccccgacctgcactttgatgcagagagacttgggcaagggagggcgcggctggtgggcgccctaagagagacagtggtcgcggcccgggccttggatcacaccctcgcccgtcaacgcctgggagcagcattacacgccttgcaggacttttactcccattccaattgggtggaactgggggagcaacagccccatccgcatttattatggccacggcaagagttgcagaacttggcacaggtcgcagatccaacctgcagtgattgtgaggaactgagctgtcctagaaattggctcggtttcactctattgacaagtggctacttcggcacccacccccccaaaccccctggcaagtgcagccacgggggacactttgataggagttcttcccagccccctcgtggcggcataaacaaggacagcacaagcccaggcttctcgccccatcacatgttgcacctccaggccgctaagctcgcacttctcgctagcatccaggcgttcagcctgttaaggtcaagattaggggacagggacttctcacgacttctggatattactcccgccagttctttgagttttgtgttggacacaacaggctcaatgggtgaggaaattaatgctgccaagattcaagcgcgacatctcgttgagcagcgacgaggatcgcctatggagccagtccattatgtattggtcccgttccacgaccctggttttggcccagttttcacaacctccgatcccgactctttttggcagcagctaaatgaaatccatgccctgggtgggggcgatgagcccgagatgtgcctctcagcactgcaactggctcttctgcatactcccccgctgagcgacatctttgtctttaccgatgcgagtcccaaagacgccttcctcactaatcaggtggaaagcctaacccaggagcgtaggtgtcgtgtgacatttctggtgacagaggacacaagccgtgtgcaaggccgcgccagacgcgaaattctctctccactgcgtttcgaaccttataaggccgtggccctggcatcagggggtgaagtgatctttacaaaagaccaacatataagagatgtagcagccattgtcggtgagtctatggcagctctggttacactgcccctcgaccccccagttgtggtgcccggacaacctctagttttttcagtcgatggcctgcttcagaagattaccgtacgcatccatggtgatatcagctccttctggataaaaaaccccgccggggttagccagggccaggaagagggaggaggccctctcggacatactagaagatttggccagttctggatggtcactatggatgaccccccacagaccggaacctgggagatccaggttacagcagaagacacacccggcgtccgagtgcaggcccaaacctcactggattttctgttccacttcggcataccaatggaggatgggccacatccaggcctctacccccttacgcaacccgtcgcgggcctgcaaacacaactgttagtggaggttacaggcctgggatctcgggccaaccctggggacccccagccccatttttcccacgtcattctgcgcggggtgcctgagggggccgagctaggccaagtcccattagaacccgtgggacccccagaaagaggactgttggcagccagtctctcccctactcttttgtctacccctcggccgttctcactggagctcattggacaagatgccgccggaagaagactgcatcgcgcggctcctcaaccctccacagtagtgccagttctgttagaactctcaggcccatcaggctttctagcccccggttccaaagtgcctttatcattacgcattgcatccttttcaggacctcaggacttagacctgagaacctttgtcaatccgtctttctccctcaccagcaacttgagccgtgcacacttggagctgaatgaatcagcatggggacggctgtggctagaggtgcccgattctgccgcccccgactccgtggtcatggtgacagttactgcgggtggacgagaagcaaatccggtacccccaacccacgccttcctccggctgctagtctccgccccagccccacaggttcgtaaccattatttccctagtcagggcccagcccaccatccctatcggcttatctag

SEQ ID NO: 13383 - RNA, 1737 nt, synthetic construct
  misc_feature 1..1737: note = source = /note="Description of Artificial Sequence: Synthetic coding sequence"
  source 1..1737: mol_type = other RNA
atgcttctgttgctactgttggcccccctctttcttcgcccacccggcgcagggggcgcgcagacccctaatgctacatccgaagggtgccaaattatccacccgccctgggaaggtgggatcagatacagaggcctaactcgcgatcaggttaaagccattaatttccttccagtagattatgagatcgagtacgtgtgtagaggcgagcgcgaagtcgttggtcctaaagtaaggaaatgtctcgcaaacggctcctggaccgatatggacactcctagtaggtgcgttagaatttgcagcaaatcttacctgacacttgagaatggcaaggtgtttctcaccggtggtgacctgcccgcattagacggcgctagggtggacttccggtgcgatccagattttcatttagttggaagcagtcggagcatttgctctcagggccagtggagcactcccaagccgcactgtcaagtgaatagaacccctcactctgaaaggcgggccgtctatattggcgccctcttccccatgtccgggggctggcccgggggtcaagcatgtcagccagccgtggagatggccctggaagatgttaacagccgccgcgatatcctgccagattacgaattaaagctgattcatcatgattctaagtgtgatcccggtcaagcgacaaaatacctctatgagttgctatataatgatccgattaagattatcctcatgcccggctgttcttcagtatcaacactggtggccgaggctgccagaatgtggaacctgatcgtcctttcctatggcagttcatcacctgctctcagtaatcgccaaaggttcccgacattcttccggacgcatccttctgctaccttgcacaaccctacacgagtgaaactgttcgaaaagtggggctggaaaaaaatcgcaacgatccaacagaccactgaagtctttacatccactcttgacgatttggaagaacgggtcaaagaggcgggcatagaaattacgtttcgacagtctttcttctctgatcctgcagttcccgtgaaaaacctcaaaagacaggatgctcgtattatcgttggacttttctatgaaaccgaagccagaaaagttttttgcgaagtgtacaaagagaggttgtttggtaaaaaatatgtctggtttctgatcggatggtacgccgacaactggtttaagatatacgacccaagtatcaattgtacagtggatgaaatgaccgaggccgttgaggggcacattaccacagagattgtcatgttaaaccctgctaacaccaggtccatctctaacatgacaagtcaggaattcgttgagaaactcacaaagcgtttgaagaggcaccctgaggagactggaggattccaggaggcacccctggcctacgacgcaatctgggctttggccctggcgctcaataagaccagcgggggcggtggccgatcaggcgtccgactagaggatttcaactataacaaccaaaccatcacagatcaaatatatcgcgccatgaactcctccagtttcgaaggcgtctcagggcacgtggttttcgatgcgtcaggctcaaggatggcctggaccctgattgaacagttgcagggtggttcttataagaaaattgggtactatgacagtacaaaggatgatctgagctggagcaagacggacaagtggatcgtgatcagtagaacccattcacctacttag

SEQ ID NO: 13384 - RNA, 1326 nt, synthetic construct
  misc_feature 1..1326: note = source = /note="Description of Artificial Sequence: Synthetic coding sequence"
  source 1..1326: mol_type = other RNA
atggagtttgaattcgacagacttagagcgttccaggcgatgcaggtccattgtaataatatgcatacactgggcgcacggctgcctgggggcgtggagtgcagattcagaaggggacccgcgatggcctgggaaggggaaccaatgaggcacaacctgggcggaaacctgggtgatccaagggccagggcagtttcggtgcctctaggaggacgagtggcacgtttcctgcagtgtcggttcctgttcgcagggccttggttgctgttctccgaaatctcctttatctcagatgtggttaacaactccagccccgccctcggagggactttccccccagccccatggtggccaccgggtcctcctcccacaaacttctcctcactggaactggaaccacgcggtcaacagcccgttgcaaaagctgaaggttcccccaccgccatcctgataggctgtctggtagccatcatcctgcttttgctgctaattatagcgctgatgctttggcgactgcactggcgccgtctgcttagcaaggtactagagtcacatccgcgaacaagatctcccggcttagtaggcatacgccccacccccttgcccgtgagtccgatggcactccgatgctgtagccccattcaacccaccgcctccttctggccattaaccccagtcccgcttgaggcgcgcgcgccgccgcacccccccggacccaacccccccacaccgaggggtgtcactgggggaaatacatacgctgtgcctgctctgccccccggcgctgttggagacggacccccaagagtggattttccaagatcaagactgcgattcaaggagaagctcggtgaaggccagtttggcgaagtacatttgtgtgaagtggatagccctcaagatctggtgtctttggattttccccttaatgtaaggaaagggcaccctctacttgtggccgtgaagatactacgccccgacgcaactaagaacgctcgtaatgattttctgaaggaagtcaaaattatgtctcgattgaaggaccccaacattatcaggctcttgggggtgtgtgtgcaagacgaccccctgtgcatgatcacagattacatggagaacggagacctgaatcagtttttgtctgcgcaccagctggaggacaaggccgccgagggcgctcccggagatggacaggccgcccagggtccaaccatctcctaccccatgctcctgcacgttgcggcgcagatcgcatcaggcatgcgctatctcgcaactctcaatttcgtccacttctggggagaaagacatcgcttcctgcactag

SEQ ID NO: 13385 - RNA, 2685 nt, synthetic construct
  misc_feature 1..2685: note = source = /note="Description of Artificial Sequence: Synthetic coding sequence"
  source 1..2685: mol_type = other RNA
atgtcattgccacgttgctgtccgcaccccttaaggccagaaggtagtggcgccatgggacctgaagccctcagctctctactcctactgttgttggtggcaagcggagatgctgatatgaaagggcactttgatcctgccaaatgccggtatgctcttggaatgcaggaccgtactatacctgacagtgacatcagtgcttccagctcctggtccgattccactgccgctcgtcattcacggctggagagttcagatggtgacggcgcatggtgcccagccggatccgtctttccgaaagaagaggagtatttacaggtcgaccttcagcgcctgcacctcgttgcgctggtcggtacgcagggtagacacgctgggggacttggtaaagaatttagccgctcttacagactaagatattcacgggatggcaggcggtggatggggtggaaagatcgctggggacaggaagtgatttccggtaacgaagatcctgaaggcgttgtgctgaaagatttagggccccccatggtcgcgagactcgtaaggttctatccccgcgctgaccgggttatgagcgtttgcctgcgagtggagttgtatggttgcttgtggcgtgacggcttgctgagttatactgcacccgtgggacagacaatgtacttaagtgaggcggtgtacttgaacgactccacatacgatggacacaccgttggcggcttgcaatacggcggcctgggtcagttagccgatggtgtggttgggcttgatgatttccggaaaagccaggagctcagagtttggcccggctacgattatgttggttggtccaatcattccttttcctccggctatgttgagatggagtttgagtttgaccggctgagagcatttcaagccatgcaggtacattgtaacaatatgcacacactgggtgcccgcttgcccggtggtgttgagtgccggttccggaggggccctgccatggcttgggagggagaacccatgagacacaatctgggcggtaacctcggcgaccctagggctcgtgccgtcagtgtccccctcggcggaagggtcgcccggtttttgcagtgcagattcttatttgctgggccctggctcctgtttagcgaaatttcttttatcagcgacgtcgttaataactcctccccagccttgggggggactttcccacctgctccgtggtggccccctggaccacctcccacgaactttagctccctggaactggaaccgagaggccaacaacccgtcgcgaaggccgaaggttcccctacggccattctcataggctgcctggtcgcaatcattctccttctgctgcttattatcgctcttatgctctggcgccttcattggaggaggttgctcagcaaggctgagagaagggtgctcgaagaggagttgactgtccacttgtcagttccgggcgataccatcttgattaataaccggcctgggccaagggagcctccaccgtaccaggagccacgtcctcggggcaatccaccacactcagccccctgtgtgcccaatggaagtgcatactcaggcgattacatggagcctgaaaagcctggagcgcccctgctgcctcccccccctcaaaacagtgtgccgcactatgcagaagctgatattgtgaccctgcagggggtgaccggtggaaatacatatgctgttcctgccctgcctccaggcgccgtcggggacgggccacccagggttgactttccaagatcccggttgcggttcaaagagaaactgggcgagggacagttcggagaagtgcatctctgtgaagtcgacagtccccaggaccttgtatctctggacttcccactaaacgtccgcaaggggcacccattactggtggccgtgaagatcctgcgacccgacgctaccaagaatgcacggaacgacttcctgaaagaggttaaaatcatgagcagacttaaagacccaaatattattcgcctgctgggcgtgtgcgtccaagacgaccctctgtgcatgattacagactatatggagaacggcgatctgaatcagttcctctctgcccatcagctggaggataaggctgcagagggggcccccggagacggacaggccgcacagggccccaccatttcatatccgatgttgctacatgtggccgctcaaattgcttccggcatgcgatacttggcgacactaaatttcgtgcatagggatttggccacccgaaattgcctagttggcgaaaactttacaattaagatcgccgatttcggtatgtcccggaacctgtacgcaggcgattactaccgtgtgcagggccgtgcagtgctccccattagatggatggcctgggaatgtatcctgatgggcaagttcacgaccgcatctgatgtttgggcttttggggttaccttatgggaggtactgatgctgtgcagagctcaaccgttcggccaactgacagatgaacaggtaatcgagaacgcaggggagttctttagagatcagggccgacaagtttacctctccaggcctcccgcttgccctcagggactttatgaactcatgctgaggtgttggtctagagagtctgagcaacgcccgccctttagccagctgcatcgattcctggcagaagacgcactcaataccgtttag

SEQ ID NO: 13386 - RNA, 216 nt, synthetic construct
  misc_feature 1..216: note = source = /note="Description of Artificial Sequence: Synthetic coding sequence"
  source 1..216: mol_type = other RNA
atgcctgccggcgtgcctatgtcaacttatctcaaaatgtttgccgcaagccttttagccatgtgcgcgggcgctgaagtggtccaccggtattaccgccccgacctaacgatccccgaaatcccccctaagagaggggaactcaaaaccgaactgctcggcctcaaagagagaaagcacaagccacaggtgtcccaacaggaagagctcaagtag

SEQ ID NO: 13387 - RNA, 2760 nt, synthetic construct
  misc_feature 1..2760: note = source = /note="Description of Artificial Sequence: Synthetic coding sequence"
  source 1..2760: mol_type = other RNA
atgggccccgaggctctaagctctttgctcctgctgctgttggtggcttccggtgatgctgatatgaagggacatttcgaccctgcaaagtgcaggtatgctctgggtatgcaggaccggactatcccagatagcgacatcagtgcctcaagctcctggtccgactccacagcggcacgccattcccgactagaatcctctgacggcgatggagcatggtgcccagctgggagtgtatttcccaaagaagaggagtacctccaggtggatctgcagcgactgcatttagtagctcttgtgggcacccaagggcggcatgctggaggacttgggaaggagttttcccgcagttacagactcagatattctcgagatggaagacgctggatgggatggaaagatagatggggacaagaagttatcagtggcaatgaggaccccgagggggtggtactcaaagacctaggccccccaatggtggcccgcctcgtcagattctacccaagggcagatagagtgatgagcgtgtgtctgagagtcgaactgtacggatgcctgtggcgtgatggcctgctatcctacaccgcccctgtagggcagacaatgtacttgagcgaggcagtgtacttgaacgactctacttatgatggtcatacagtgggtggcctccagtatggaggcttgggccagctggccgacggagtggtgggcctggatgactttcggaagtctcaggagttgagagtgtggccaggatatgattatgtggggtggagtaatcactccttttcgagtggatacgtggaaatggaatttgaattcgacaggctgcgcgcatttcaagctatgcaggtgcactgtaacaacatgcatacactcggagccagactgcccggaggggtagaatgtaggtttcgcagaggacctgcgatggcttgggaaggcgagcccatgcggcataacctgggagggaacctaggagatcctcgagctcgcgccgtctctgtgccactgggggggagagtggccagattcttgcagtgtcgcttcttgttcgccggaccttggctgctgttcagcgagataagtttcattagcgacgtagttaacaattcatccccagcactggggggaacattcccccccgccccatggtggccacctggccctccacctacgaatttttcgtctctggaactggaacccagaggccagcaacctgtggccaaagctgaaggctcccctacagcgattcttattgggtgtttggttgccattatcctgcttctcctcctgataatagccctgatgctgtggaggctccattggagacggcttctgtccaaggctgagagacgtgttcttgaagaggagttgaccgtgcaccttagtgtgcccggcgatactatactgatcaataatcggccaggcccccgcgagccccccccttaccaggaaccccgccccaggggcaatcccccgcactccgccccttgcgtccctaacggttctgctctgcttctgtcaaatcctgcttaccgtctgttgcttgctacatatgcgcgcccaccacggggtccaggcccccctaccccagcctgggcaaagccaactaatacccaagcgtattctggcgattacatggaacctgagaaacctggcgccccgctgctccccccacctccacagaattccgtaccccattatgccgaagccgatattgtgaccctgcagggagtgaccggcggcaatacctacgccgtacccgcccttcctcctggagccgttggagacggtcccccccgagtcgactttccccgatcacggcttcgattcaaggagaaactgggcgagggccaatttggtgaagttcatctgtgtgaagttgatagcccccaggatctggtttcactcgatttcccactcaatgtgagaaaaggccatcccctcttagtggccgtcaagatcctgaggccagatgctaccaaaaacgcctcattttcactgttctctaggaacgacttcctcaaagaagttaaaattatgtctaggctaaaggatcctaatataatacgcctactcggggtgtgtgtgcaggacgaccctctttgcatgattaccgattatatggagaatggcgacctgaatcagtttcttagcgcccatcagctggaagacaaagccgcagagggagcccccggggatggacaagcggcccagggtccaaccattagctatccgatgctccttcatgtggccgctcagattgcctcggggatgagatacctggcaacgctgaacttcgtgcaccgagatctcgccaccagaaactgcttggttggcgagaatttcactatcaagatcgccgatttcgggatgtctaggaatctgtacgccggcgactattaccgggttcagggcagagctgtgcttccaatccggtggatggcatgggagtgtatcttgatgggcaagtttaccaccgcatcagacgtgtgggccttcggggtgacactatgggaggtattgatgttatgcagagctcagccctttggacagctgactgatgagcaagttatagagaacgctggggagtttttcagggatcagggacgacaggtgtatctctccaggcctcctgcttgcccacaagggctctatgaattaatgttacgttgttggagccgcgaatccgagcagagaccccccttttcacaactgcaccgctttcttgcggaggacgctttgaatacagtttag

SEQ ID NO: 13388 - RNA, 447 nt, synthetic construct
  misc_feature 1..447: note = source = /note="Description of Artificial Sequence: Synthetic coding sequence"
  source 1..447: mol_type = other RNA
atgcaaacttttcccgttgccggagccttggaccccgcgatcctggatacttcctccccgcaggccctatacacagtgttattgattgtccttgtgatgatgtcacttgtgtttggcaagttcgtgccagtgaattgggagcccccgcagccgttgccctttcccaaatacctgcgctgctatcgttgtctccttgaaacaaaagagcttggatgcctgctcggcagcgacatttgtttgaccccagccggctcatcctgcataaccctgcacaagaagaatagcagtgggtcagacgttatggtctctgattgccgctctaaagaacagatgagcgattgctcgaatacccgaacctctcccgtctctggattttggatcttctcacaatactgtttcctcgatttttgcaacgacccccagaataggggcctctacacaccttag

SEQ ID NO: 13389 - RNA, 5097 nt, synthetic construct
  misc_feature 1..5097: note = source = /note="Description of Artificial Sequence: Synthetic coding sequence"
  source 1..5097: mol_type = other RNA
atgcggctactttggggactcatctgggccagttctttcttcaccttaagcctgcagaaacctcggctgttgctgttcagcccatcagtggtccatctcggcgtgccactgagcgtgggtgtacaattgcaagatgttccccgtggacaggtggtgaaagggtcggtgttcctccgcaatccttccagaaacaatgtaccatgttcgcccaaggtagattttaccctctcctccgagcgggacttcgcactcctgagtcttcaggtccctcttaaggatgcgaaaagctgtggtctccatcagcttctgagagggccagaagttcagctggttgcacactccccctggctgaaggactcactttccagaacaaccaatattcagggcatcaatcttctcttcagttccagacgaggccacttatttctccagaccgatcagcccatatataacccgggccagcgagtgcgttatagggtgtttgcattagaccagaaaatgcgcccaagtaccgatactatcactgtgatggtggaaaactcccacgggcttagagtccggaaaaaggaagtgtatatgccatctagtatcttccaggacgactttgtaatacctgacatttcagaacccgggacgtggaaaattagtgcccggtttagtgacggcctggaatccaactcttccacccagtttgaagtgaaaaagtacgtactgcccaatttcgaagtcaaaatcacaccgggcaaaccttatattcttactgtgccaggtcatctggatgaaatgcagctcgatatccaagccaggtacatatacggaaagcctgtgcagggcgtagcctacgtcagatttggactgctcgacgaggacggcaagaagacgttcttccgcggtctagaatcccagaccaagcttgtgaatggccagtcccacatctcattgagcaaggcagaattccaagatgctctggagaaactaaatatgggaataactgatctgcagggtctacgtctatatgtggcagcggctattattgagtatcccggtggggagatggaagaagccgagctgaccagctggtatttcgtgagctcacccttctctctggatctctccaagaccaagcgacacctggtgccaggagccccattcctcctgcaagctctggttcgcgaaatgagcggctcacctgcctccggaattcctgtgaaggtgagcgcaacagtcagcagtcccggatctgttcccgaggtacaagacattcagcaaaacacagacggctctggacaggtctctatcccaattattattcctcaaactatttccgaactgcaactgagtgtgtctgcagggagtcctcacccagcaatcgcgagacttacagttgccgctccaccaagtggaggcccagggttcctgagtattgaacgccctgactcccgccctcctcgggtgggcgatacactgaaccttaatttgagagctgtgggcagtggggctactttttcccattattattacatgattctaagtagaggccagattgttttcatgaaccgcgagcccaagaggacattgacctcagtgagcgtgttcgtagaccaccaccttgcccccagcttctactttgtcgcgttttactatcacggagaccaccccgttgccaatagcctacgcgtcgacgtgcaggccggagcgtgtgaggggaagcttgaactttccgtggacggagcaaagcagtaccggaacggggagtcagtgaagctccacttagaaactgattcacttgctcttgtggccctcggcgcgctggataccgcactgtacgccgccgggtccaaaagccataagcctcttaacatgggcaaggtctttgaggccatgaacagttatgatctgggttgcggtccaggcgggggggattcggcgctgcaagtgtttcaagcagccgggctggctttctctgacggagaccagtggaccctttctcgtaagcggctctcctgccccaaggaaaaaactacccgcaaaaagcgcaatgtgaatttccagaaggccattaatgaaaaactcggccaatacgcttcccccacagcaaagcgctgttgtcaagacggggtgaccagactgcccatgatgcgtagttgcgagcagcgtgctgctcgggtccagcaacctgattgccgggaaccatttctaagctgctgtcagtttgcggagtcactccgcaaaaaatccagagataaaggacaagcgggattacagcgcgctctggaaatcctgcaggaggaagacttaattgacgaggatgatatcccggtccgatctttctttccggagaactggctttggcgcgtagagactgtggacaggttccagattttgactttgtggctgcccgatagcctgacaacatgggaaatccatggtctctcgctttctaaaacaaaaggcttgtgtgtggctacccctgtccagctgcgcgtgtttagagagttccatctgcatcttcgccttccaatgagtgtgcggagatttgaacagctagaactgaggccggttctctacaactacttggataaaaacctcacagtgtcagttcatgtctctccggtggaaggcctgtgtctggcaggggggggtggactggcacagcaggtcctagttcctgcaggctcagctcgcccagtcgcatttagtgtagtgccaaccgcagcagctgccgtcagtctcaaggttgtcgccagggggagctttgaatttccggtgggcgacgcagtgtcaaaagttctccagatcgagaaggagggagcaatacaccgtgaggagttggtctacgaactcaaccccctggatcatcgcgggaggaccctcgagattcctgggaatagcgacccaaatatgattccggacggagactttaactcctatgtccgggtgactgcttctgatcctctggacaccttgggctctgaaggcgccctgagtcccgggggggtggcctcgctactccgactgcctaggggatgtggtgaacagaccatgatctatctggctccaactctggctgcctccagatacctagataagaccgagcagtggagcactttgcctccagagactaaggaccatgcagtagacctcatccaaaaaggatacatgcgaatccaacagttcaggaaggccgacgggagctacgccgcttggctgagcagaggaagctctacgtggctgacagctttcgtattaaaagtgttatcccttgcccaagaacaggttggcggctctccagagaaactgcaggagacctcgaactggctgctatcacagcagcaagccgacgggtctttccaggatctctcccctgtcatccatcgctccatgcagggtggacttgtgggaaatgacgaaacagtcgctctgaccgccttcgtaacaatcgcgctgcaccacggcctggccgtattccaggacgaaggggccgaaccactcaaacagcgtgtggaagcctcgatctccaaggcatccagctttctgggagagaaggcttcagcgggactcttgggtgcccacgccgcagctataaccgcctatgccctcacactcactaaagcgccagctgatctgagaggagtcgcacataataacctcatggccatggcccaagaaaccggcgacaacctctattggggctctgtgacaggatctcagtccaacgcagtctcgcctaccccagctccacgaaatccatcagaccctatgccccaggcacccgccttatggatcgagacaacagcatacgctctccttcacctcctccttcacgaggggaaagctgaaatggccgaccaggcggccgcctggctcactcggcagggaagtttccaaggtggctttagaagtacacaggacaccgttatcgcgttagatgcgctatctgcatactggatcgcttctcacaccactgaagagaggggactgaacgtcacgttgagctcgaccgggaggaatgggtttaagagccacgctcttcagttaaataatagacagatcagggggttagaggaggagctccagttttctctgggctctaagatcaatgtgaaggtaggaggtaacagcaaaggaaccctgaaagtgctgagaacatataatgtgctcgatatgaaaaacaccacctgccaggacctgcaaatcgaggttactgttaagggccacgtggagtatacgatggaggccaatgaagattacgaggattatgagtatgacgagctaccagctaaagatgacccagacgcaccccttcaacccgttacacccctccaactgtttgagggacggagaaatcggaggagacgcgaagcgcccaaactgacgtccctgagtgatagatatgtctcccatttcgaaacagaaggcccacacgtgctgctgtattttgatagtgtccccacgtctcgggaatgtgtcggcttcgaggctgtgcaggaagtcccagtgggcttggtccaaccagcatccgccactctctatgattactacaacccagaacgccgatgtagcgtcttctatggtgcaccatccaaatcccgccttctagcaactctgtgctcagccgaagtttgccaatgtgcagagggcaagtgcccccgccagagaagagccctggagcgcggactccaagacgaggacggataccggatgaagtttgcttgttactaccctagagttgagtacggtttccaggtaaaggtactaagagaggatagcagggcggcttttcgcctgtttgagaccaaaatcactcaggtcctacactttacaaaggacgtgaaggccgccgccaatcaaatgcgcaattttctggtccgcgcctcttgccgtttgaggttggagcctggcaaagaatacctcatcatgggcttggacggcgctacctacgaccttgaggggcatccccagtatcttctggactcaaatagttggatagaggagatgccgtctgaaagactctgccgaagcactcgccagagagccgcgtgcgctcagctcaacgattttttacaggagtacgggacccaggggtgtcaggtttag

SEQ ID NO: 13390 - RNA, 1986 nt, synthetic construct
  misc_feature 1..1986: note = source = /note="Description of Artificial Sequence: Synthetic coding sequence"
  source 1..1986: mol_type = other RNA
atggacttagttctgaagaggtgcttgttacacctggcagttattggggccttactggctgtgggcgccaccaaagtgccaaggaatcaggactggctgggcgtatcccgccagttgcgtactaaagcttggaatcggcaactataccccgagtggacagaggctcagagattagactgttggcggggaggacaagtgtcccttaaggtatccaatgacggtcccaccctaataggagccaacgcatccttctctattgctttaaacttcccagggtcacagaaggtgctgccagatggccaagtgatttgggtcaataatacaatcataaatggaagtcaggtgtgggggggccaacctgtgtatccccaggaaactgatgatgcctgtattttccctgacggaggaccatgcccgagcggatcttggtctcagaagcgcagttttgtgtacgtatggaagacctggggtcagtattggcaggtgctgggaggccccgtctctgggcttagcatcggaacaggccgggcaatgcttggaactcacactatggaggttaccgtctaccacaggcgcggatcaaggtcgtacgtgccactcgctcactcatcctccgccttcaccattactgatcaggtaccgtttagcgtatccgtctcccagctgagagcccttgacgggggtaataagcacttcctaagaaatcagccactcacctttgcgttgcagttgcacgatccgtcgggctaccttgcggaagcagatttatcctatacatgggacttcggggactccagcgggaccctcatttccagagccctggtcgtgacacatacatacctggaacctggcccagttacagcccaagtggtgctgcaggcagccatacccttgactagttgtggctcctctccggtacccgggacgactgacggacatagacctactgcagaggcaccaaacactaccgcagggcaggtgcccacaaccgaggtggtggggacaactcccggacaggcacccacagctgagccctcaggaactacgtccgtgcaagttcccacaacagaggtcatttctaccgcccccgtgcagatgcccactgccgagtccaccgggatgactccggagaaggtcccagtttccgaagtgatgggaactacattggctgagatgagcaccccagaggccaccgggatgactcccgctgaggtcagtatcgtggtgctttctgggacgactgctgctcaggtaacgaccaccgaatgggtggagaccactgcgcgtgaactgccgattccagagcccgaggggcctgacgctagcagcattatgtccacagagtctatcacaggaagtttgggcccacttttggacggcacagccacccttcggctcgtcaaacgccaggtacctcttgactgtgtgctgtatcgatacggatctttctctgtaaccttggatattgtccagggcatagagtccgctgaaatccttcaagctgtcccatccggcgaaggcgatgccttcgaactgactgtatcctgtcagggcggacttcccaaagaggcctgcatggagattagcagcccgggttgccagcctcctgcccagagattgtgccagccagtcctgccgtcacccgcctgccaactcgttcttcatcagatcttaaaaggcgggtctgggacctactgtctgaatgtgtcactcgccgacactaactccctcgctgtggtgtcgacccagctgattatgccaggacaggaagccggcctcgggcaggtaccactcatcgtagggatcctcctcgtcttgatggcagtggtcctcgccagtctaatttacagacggcggctgatgaaacaggatttttcagtgccccagctgccccattcttcatctcactggctccgcctcccccgtattttctgctcttgccctattggagaaaatagtcccctactcagcggacagcaggtctag

SEQ ID NO: 13391 - RNA, 516 nt, synthetic construct
  misc_feature 1..516: note = source = /note="Description of Artificial Sequence: Synthetic coding sequence"
  source 1..516: mol_type = other RNA
atgagacataatctggggggaaacctgggcgacccgcgcgcccgcgccgtctccgtgccattaggtggacgcgtagctcggtttctgcagtgtcgctttctctttgctgggccatggctgctttttagtgagataagctttataagtgacgtggttaataatagttctcccgccctcggcggcactttcccacccgccccatggtggccccctggccctcctccaacgaacttcagctctttggagctcgaaccacgcggccagcaacctgttgctaaagccgaaggcagtccaaccgctattctaattggatgccttgtggctattatactcctgctgctgttaataatcgcactgatgctgtggcgattgcactggaggaggctcctctctaaggtcctagagtcacacccccgaacaaggagtcctggactggtcggtattagacccacccctcttcctgtctctccaatggcactcgtccacctctgcgaagtcgactctcctcaggattag

SEQ ID NO: 13392 - RNA, 1986 nt, synthetic construct
  misc_feature 1..1986: note = source = /note="Description of Artificial Sequence: Synthetic coding sequence"
  source 1..1986: mol_type = other RNA
atggacctcgtgcttaaacgctgtcttctgcatttagccgtaatcggagcgcttctcgccgtcggagccaccaaagtcccccggaaccaggattggctcggcgtgtcgcggcagctgcgcacgaaggcttggaatagacagctatatccggaatggacagaggcgcagcggctagactgttggaggggcggacaggtcagcctgaaagtgagtaatgatggccctacccttatcggagctaatgcctcttttagcattgccttaaattttccaggttcgcagaaagtgcttcctgatggacaggtcatctgggtgaacaataccataattaatggatcccaggtctgggggggccaaccagtgtaccctcaggagacagacgacgcttgtatattcccagacggtggcccgtgtccatccggctcctggtcacagaagaggtcatttgtatatgtttggaagacttggggacagtattggcaggtattagggggccctgtctctggcctgtcaatcggaacgggccgggcgatgctgggtactcatactatggaggtgacagtttatcaccggcggggctccagatcttacgttcctctcgctcatagcagcagcgctttcacaattactgatcaggttcccttctcggttagtgtttcacagctgagggcactggacggcggtaacaagcattttcttagaaaccagcctttaacttttgctctgcaactgcacgatccctctggctatctcgccgaagctgacctttcatatacatgggatttcggagatagctccggaacacttattagtcgggcgcttgtagtgactcacacttatttggaacctggaccggttactgcccaggtagttttacaggcagctatccccctcacaagctgcggaagcagcccagtgcctggaactacggatggccatcgcccaactgcagaagcccctaacactaccgcaggccaagttcctactacagaagtggtcggcaccacccctggtcaggcacctacagccgaaccgagtggaacgacctccgtgcaagtccccacaactgaggtgatctcaactgcaccggtgcaaatgcctaccgcagaaagcacaggtatgacccccgaaaaagtccctgtttccgaagtcatgggcactaccttagcagaaatgagcaccccagaggcaacaggtatgacacccgcagaggttagtattgtggttctctctggtaccacggcagctcaggtgactaccaccgagtgggtagaaaccaccgcacgcgaactacctattcctgagcctgagggccctgacgcctcgagcataatgagcaccgagtccatcacagggtcattgggtcccctcctcgacggcacagcaacactaagactggtgaaacggcaggtgccgctggattgtgtgctgtatcggtatggctccttcagcgtaacccttgatatcgttcagggtatcgaatcagccgaaattttgcaggctgtaccaagtggagaaggcgacgcgtttgagttgaccgtttcatgccagggaggtctgcctaaggaagcatgcatggagatttctagtcctggctgccagccccccgcacagcgcctttgccaaccggtgctgcccagtccggcttgccaactggtactccatcagattctgaaaggcgggtcaggaacatactgcttaaacgtatcattggcagatacgaactccctcgctgtcgtctctacccagctgatcatgcccggccaggaagctgggctggggcaggtaccccttatagtgggaatcctcctggtcctgatggcggtggtgctggcgtccctcatttatcgtcggaggcttatgaaacaagacttttccgtgccccagttaccccattcttcttctcattggctcagactcccccggattttctgctcctgccccatcggcgaaaatagccctctcctgtccgggcagcaggtctag

SEQ ID NO: 13393 - RNA, 1737 nt, synthetic construct
  misc_feature 1..1737: note = source = /note="Description of Artificial Sequence: Synthetic coding sequence"
  source 1..1737: mol_type = other RNA
atgttgctgcttttattgttggcccccctctttctgagaccgcccggcgccggcggcgcccagacccccaatgccaccagcgagggatgtcaaattatccatccaccatgggaaggcggcattcggtaccggggcctgactcgggatcaggttaaagccataaacttcctgccagtcgattacgagatcgaatatgtctgtaggggagaacgtgaggtggtgggcccaaaagtgaggaagtgtctcgccaacgggtcctggacagacatggatacaccttctagatgcgtgcggatatgctccaaatcctacctcacattggagaatggaaaagtgtttctaacagggggggatctacccgctttggatggggcacgtgtcgacttccgctgtgatccagactttcacctcgttgggagcagtcgatctatatgcagtcagggtcaatggtccacccccaaaccccattgccaagtgaatcgcacaccccactccgaaagaagagccgtatacatcggtgctctgttccctatgagcggcgggtggccaggcggccaggcgtgccagccagctgttgagatggcccttgaggacgtcaactctcgccgtgacattctgccagactacgaattaaagcttatacaccacgatagcaaatgtgaccccggacaggccacaaaatacttatatgagttactatataatgaccctataaagattattctgatgccaggttgcagttctgttagcaccctggttgctgaggctgcacgtatgtggaacctgatcgtcctctcctatggcagcagcagccccgctttgtccaaccgccagcgctttccaacattttttaggactcatccttcagccactctacataacccaacgcgtgtcaaactcttcgaaaagtggggatggaagaagattgcaactattcagcaaaccaccgaggttttcacgtccacactggatgaccttgaagaaagggtgaaagaagcaggcattgagattacgttcagacagtccttcttcagcgatccagcagtgcccgtgaagaatctgaaaagacaggatgccaggattattgtagggctcttctatgaaactgaggctcgcaaggtgttctgcgaagtgtacaaggagcgcttgttcggaaagaagtatgtctggtttctgatcggttggtatgctgacaactggttcaagatctatgacccttccatcaactgcacggtagacgagatgacagaggcagttgagggacacattactaccgagattgtgatgctcaaccctgcaaacactagatccatttccaacatgacatcacaggagttcgtggaaaaactgactaagagattgaagcgtcatcccgaagaaaccggcggttttcaagaggcccccttggcctacgacgctatttgggccctcgccctggctctgaataagacctcaggaggtggagggagatctggagtgaggttagaagactttaactacaataaccaaaccatcacagatcagatctatcgcgcgatgaattcttcatcgtttgaaggagtcagcgggcacgtcgtgtttgacgccagcggatcccgcatggcttggaccttaatcgaacaattgcaggggggttcctacaagaaaataggatactacgacagcaccaaagacgatttgtcgtggtctaaaacagataagtggattgtcattagtagaacacattcccctacgtag

SEQ ID NO: 13394 - RNA, 1326 nt, synthetic construct
  misc_feature 1..1326: note = source = /note="Description of Artificial Sequence: Synthetic coding sequence"
  source 1..1326: mol_type = other RNA
atggaattcgagttcgaccgcttacgggcgttccaagccatgcaggtgcactgcaataacatgcacactcttggggcaagattgcctggcggcgttgagtgcagatttcgccgggggccagcaatggcctgggaaggcgagcccatgagacacaacctgggcggcaatcttggagatccaagggccagggcggtatctgtgccattaggtgggagagtggctagatttttacagtgtaggtttttgttcgccggaccgtggctgctattctctgagatctcctttatctccgacgtagtgaacaattcctctccagctttaggagggacatttccacccgccccctggtggccaccggggccccccccaactaatttcagcagtttggaactggaaccccgaggccaacagccagtagccaaggcagaaggatctcccacagccatacttatcggctgtctggtggcaattatactgctgctcctcctgataatcgctctcatgctttggcgacttcactggcggaggctgctttctaaagtgctggaatcacatccgcggacgcgatcacctggtttagtgggcattcgccccacccctttgcccgtaagccctatggcgctacgatgttgtagcccaatacagcccactgctagtttctggcccttaactccggtgcccctcgaggccagagcaccgccccatcctcctggcccgaatcctcctacaccccgcggcgttacaggcggaaatacttatgcagttccagccctgcctcctggagcagtcggggatgggccccctagggtggatttcccccgatctaggctgcggtttaaggaaaagttaggagaagggcagttcggcgaagttcacctgtgtgaggtcgattcaccccaggacttagttagtctggactttccactgaacgtgcgaaaagggcatccgttgctcgtcgctgtgaagatactgcgtcccgatgccacaaagaacgctagaaatgatttcctcaaggaggtgaagattatgagcagactcaaggatcccaacattatcaggcttttaggcgtctgcgtccaggacgaccccttgtgcatgattactgactacatggagaacggagatttgaaccagtttctaagcgcccaccagctcgaagataaagccgctgaaggcgccccgggtgatggacaggctgcgcaggggccaacaatcagctatcctatgcttttgcacgtcgcagcccagatcgcatctggcatgagatacctggcgaccctgaatttcgttcacttctggggagaaagacaccgcttccttcactag

SEQ ID NO: 13395 - RNA, 447 nt, synthetic construct
  misc_feature 1..447: note = source = /note="Description of Artificial Sequence: Synthetic coding sequence"
  source 1..447: mol_type = other RNA
atgcagacatttcctgtagccggcgccctggacccagccatcctcgacacctccagcccccaggccttatatacagtattactaatcgttctcgtgatgatgagccttgttttcggaaagtttgtcccagttaattgggagcccccccagcccctaccattccccaaatatctgaggtgttataggtgcctcttggagaccaaggaattgggatgcctacttggaagcgacatctgtctcactcccgctggaagctcatgtattaccttgcacaaaaagaactcatcaggctctgacgtaatggtgtccgactgccgtagcaaagagcagatgtcagactgtagcaatacccgcacttcccctgtcagcggcttttggattttctcacagtactgttttctcgacttctgtaacgaccctcagaaccggggactttacactccctag

SEQ ID NO: 13396 - RNA, 732 nt, synthetic construct
  misc_feature 1..732: note = source = /note="Description of Artificial Sequence: Synthetic coding sequence"
  source 1..732: mol_type = other RNA
atgggccccgaagccctcagttccttgttgctgcttttattagttgcctcaggtgacgccgatatgaaaggacacttcgatcccgcaaaatgccggtacgccctgggcatgcaagaccgtacgattccagacagtgacatcagtgcttctagttcatggagcgattccacagctgcccggcactcgcgtcttgaaagctccgatggcgacggcgcttggtgtcccgccggaagcgtttttcccaaagaggaggagtacctccaagttgatctgcagaggctccacctcgtggcgctcgtcggcacgcaggggagacatgcaggtggcctgggtaaggaattctcgagatcatatagactcagatactcacgagacggtagaagatggatgggctggaaagacaggtggggccaggaggtgatcagcggtaatgaagacccggaaggggtcgtcctgaaagacctggggccccctatggtggctcgactggtgcgcttctatccgcgagccgacagagtgatgtcagtctgtctcagggtagagctgtacggctgcttatggagggactgcagtatgggtgtctgggcctcctggcagatggtgtggtggggatggatgacgctgggacgagtccggagttgcgggagcggacaggctatgactatgtgggatggagccacaacagcatcaccagttgctatgtggaggtggagcttaagcctcacagggtag

SEQ ID NO: 13397 - RNA, 732 nt, synthetic construct
  misc_feature 1..732: note = source = /note="Description of Artificial Sequence: Synthetic coding sequence"
  source 1..732: mol_type = other RNA
atgggtccagaggctttaagcagtttgctactattgctgctcgtcgcctccggggacgcagatatgaaagggcactttgaccccgccaaatgtaggtacgctctaggaatgcaggataggacaataccagactctgatatttctgcgtcaagctcctggagtgattccacagcagcgcggcactcaagactcgagagttccgacggggacggcgcctggtgtccagcaggcagcgttttccctaaagaagaggaatatctccaggtggatctgcagcggctgcatctggtcgccttagtgggaactcagggacggcatgccggggggctaggaaaggagtttagtcgcagttatagactcagatactcacgggacggacggcgttggatgggttggaaagatcggtggggtcaggaggttatatctggcaacgaggacccagagggcgtggtcctgaaggacttgggtccacccatggttgctagattggtgaggttctatccgagagccgatagagtcatgtcagtgtgtttaagagtggaactgtacggctgtttgtggagagattgctccatgggcgtgtgggccagttggcagatggtatggtggggctggatgaccctgggcagagtgaggtcctgcgggtccgggcaggctatgacaatgtgggacggagcaaccacagcgtcgcccgtcgcaatgtggagatggtctttgagcttgactggctag

SEQ ID NO: 13398 - RNA, 1224 nt, synthetic construct
  misc_feature 1..1224: note = source = /note="Description of Artificial Sequence: Synthetic coding sequence"
  source 1..1224: mol_type = other RNA
atgcgcttgctcgcctggctcatattcctcgctaattggggtggtgcccgcgccgaacctgggaagttctggcatatagcagacctgcacttggaccccgactacaaagtgtccaaagatcctttccaggtctgccccagcgcaggctcacagcccgtgcccgacgcaggcccctggggagattatctatgcgacagcccctgggcgttaatcaactcgtctatctacgccatgaaggagattgaacccgaacctgacttcattctgtggacaggggacgatacaccccacgtacccgatgaaaaacttggcgaggcagcggttctggagatcgttgagcgtcttaccaaattgatccgggaagtgttccctggcgccttctactgcgaaaagcttcctggaccttcaggggcagggaggattgttgttctgaacactaacctgtattacactagtaacgccctaacagctgatatggctgaccccggccagcagttccagtggctggaagacgtgctgacagacgctagtaaagctggagatatggtgtacattgttggacacgtccctcctgggttttttgagaagacacaaaataaggcctggtttcgagagggttttaacgagaagtacctgaaggtagtgagaaaacaccatcgcgtcattgctggacagttctttgggcatcaccacacagactcgtttcggatgctgtatgacgacgcaggcgtgcctatttccgctatgttcatcactccaggagtgaccccctggaaaaccaccctgcccggcgttgttaacggcgctaacaacccagcgataagagttttcgagtatgaccgcgcgacactctcgctgaaagatatggttacgtacttcatgaacttatctcaggcaaacgcacaaggcactccaaggtgggagctggagtaccaactgactgaagcctacggcgtgcccgatgcaagtgctcactccatgcataccgtcctggatagaattgcaggggatcaatctactctgcaaagatattacgtgtataatagcgtttcttactctgccggagtctgcgacgaggcctgctctatgcagcatgtttgtgccatgcggcaggtggatatcgacgcctatacgacctgtctgtacgcatccggaaccacccctgtgcctcagctcccactcttactgatggccctactgggtctgtgcacactggtcttgtag

SEQ ID NO: 13399 - RNA, 756 nt, synthetic construct
  misc_feature 1..756: note = source = /note="Description of Artificial Sequence: Synthetic coding sequence"
  source 1..756: mol_type = other RNA
atgccccatttggctagtctctttaccgcctctagtcggtgctgtcctcatcctctcagaccagagggatccggggccatgggacccgaggccctatctagcttgctgcttctactactggtcgcgtctggggacgccgatatgaagggccactttgatccagccaagtgcaggtacgcactgggtatgcaggaccgtaccatacctgactcagatataagtgcatcgagctcctggtcggacagcactgctgcgcgacactctagactggaatcctctgacggcgacggtgcctggtgtcctgctggtagcgtgtttcctaaagaagaagagtacttgcaggtggatctgcaacgactccatctggtggccctggttggtacccaagggcgccatgccggcggactgggcaaggagttctctcggagttatagactgcgttacagtagagacggacgacgatggatgggatggaaagatcgatggggacaggaggtgatctctggaaatgaggacccagaaggcgtggtcttgaaggatttgggccctcccatggtggccagattagtaagattctacccacgagcagatcgggtgatgagcgtgtgtcttagagtggagctatacggatgcctctggcgcggggagtggctgtcctttctggggatctgtttcttatcgaggggtctcgaaggcggcgaatgcggggaatgggcaagccgcattcctagtcccgccggcaaactgtccctgtag

SEQ ID NO: 13400 - RNA, 756 nt, synthetic construct
  misc_feature 1..756: note = source = /note="Description of Artificial Sequence: Synthetic coding sequence"
  source 1..756: mol_type = other RNA
atgccccatctggcctccctgttcaccgcatcctcgagatgctgtcctcacccccttagaccagaaggctccggcgcaatggggcccgaggcattatccagcctattactgttgctactcgttgcctctggcgatgctgacatgaagggtcactttgacccagctaagtgccgctacgctctggggatgcaggaccgtacaattcccgactcagatatttccgctagctcctcatggagtgacagcacagctgcccgtcattctaggctcgagtcctcagacggcgatggggcgtggtgtcccgccgggagcgtgtttcccaaagaagaagaatatttacaggtggaccttcagcgcctccatctggtggccctagttggaacccaaggccgccatgccgggggactcggaaaggagttttcaagaagctacagactccgctatagccgcgatgggagacgctggatgggatggaaggaccgatggggacaggaagtgatctctgggaacgaggaccctgaaggagtggttttgaaagatttgggccctccaatggtggctagactggtgcgcttttacccccgcgccgaccgtgtgatgagcgtatgcttgagagtggaattgtatggatgtttgtggaggggcgagtggctgtccttcttagggatttgctttctgagccgcggtctggagggtggagaatgtggcgaatgggctagtcgcatcccttcgcctgctgggaaactctcactttag

SEQ ID NO: 13401 - RNA, 456 nt, synthetic construct
  misc_feature 1..456: note = source = /note="Description of Artificial Sequence: Synthetic coding sequence"
  source 1..456: mol_type = other RNA
atggatctcgtcctcaagcggtgtttgctccacctcgctgtgataggcgcgctgctcgcggtcggtgccaccaaagtgcctcgaaatcaggactggctgggcgtcagtcgccagttacgcaccaaagcatggaataggcaactgtatcccgaatggacagaagcccagagactggattgttggagaggcgggcaagtgtcactcaaagtttccaacgatggccctacattgattggtgcaaacgcgagtttcagcattgcattaaactttccaggctctcagaaagttctacctgacggccaggtgatttgggttaacaatactatcattaacggatcacaggtatgggggggccagcctgtgtacccccaggagacagacgacgcgtgtatcttccccgatggaggaccttgtccaagtggcagctggtctcagaaacgctcattcgtgtactag

SEQ ID NO: 13402 - RNA, 216 nt, synthetic construct
  misc_feature 1..216: note = source = /note="Description of Artificial Sequence: Synthetic coding sequence"
  source 1..216: mol_type = other RNA
atgcctgccggcgttcctatgtctacatacctgaaaatgttcgctgccagcttattagcaatgtgtgccggagccgaagttgtgcatcgctattaccgccctgacttaactataccagagatcccaccgaagcgcggagagcttaagaccgagctgctgggcctgaaggagaggaagcataaaccccaggtatcgcagcaggaagaactcaaatag

SEQ ID NO: 13403 - RNA, 447 nt, synthetic construct
  misc_feature 1..447: note = source = /note="Description of Artificial Sequence: Synthetic coding sequence"
  source 1..447: mol_type = other RNA
atgcagacatttcccgtggcaggagcactcgaccccgcaatcctcgacacaagcagtccccaggcactttacaccgtcctcctgattgtactggtaatgatgagcctcgtattcgggaaatttgttcctgttaactgggagcctcctcagcctcttccttttcccaagtaccttcgatgctaccgttgcctgcttgaaaccaaggaactgggttgcctcctaggtagtgacatctgtctcacaccggcgggcagttcttgcattacacttcataaaaagaacagcagcggctccgatgtcatggtatccgattgtcggtctaaagagcagatgagcgactgttcaaatacccgcaccagtcctgtttccggtttctggatcttctcgcagtactgcttcctggatttttgcaatgatccacagaacagaggactgtacacaccgtag

SEQ ID NO: 13404 - RNA, 447 nt, synthetic construct
  misc_feature 1..447: note = source = /note="Description of Artificial Sequence: Synthetic coding sequence"
  source 1..447: mol_type = other RNA
atgcaaaccttccccgtggccggagccctcgacccagcaattctggacacatcaagccctcaagctctctacactgttctgctgatcgttcttgtcatgatgtccctggtgttcggaaagtttgtgcccgtgaattgggaaccaccacagccccttccctttccaaagtatctgcgctgctatcgatgtcttttagagacaaaagagctgggatgtctgttagggagtgatatttgcctgacacccgccggttctagttgcatcactttacacaagaagaattccagcggaagtgacgtgatggtatctgattgtaggtctaaagaacagatgagcgactgttctaatacaagaaccagcccagtcagcggattctggatattttcacaatactgcttcctcgacttctgcaacgatccccagaaccgcggtctctataccccttag

SEQ ID NO: 13405 - RNA, 1326 nt, synthetic construct
  misc_feature 1..1326: note = source = /note="Description of Artificial Sequence: Synthetic coding sequence"
  source 1..1326: mol_type = other RNA
atggagtttgaatttgacagactgcgggctttccaggcgatgcaggtgcattgcaataatatgcacacgttaggggcccgactgcctggcggggttgagtgccggttcagacgcggaccagcaatggcatgggagggcgagcctatgagacataatcttgggggaaacctgggagacccaagggcccgtgccgtcagtgtgccgctgggaggccgggtggcgagattcctgcaatgcagattcctctttgccggcccatggcttctctttagtgaaatctccttcatcagtgatgtggtaaacaacagtagtcccgcgctcggaggcacgttcccacctgctccatggtggcccccaggtccacccccaacaaactttagtagtctagaactcgagccgaggggccaacaacccgttgcgaaggccgagggcagcccaactgccatactcattggatgcctagtagccatcattctgctgctactgctgatcattgcattaatgctatggcggcttcattggaggcggctgcttagcaaggtcctggaatcgcaccccagaacgagatcccctggtttggtcggcattagaccaacacctctgcccgtgtcccccatggcactcagatgctgtagccctatccaacctaccgcttcgttttggccactcacaccggtgcctcttgaggcgcgtgctccccctcatccacccggcccaaatccccccacaccccggggcgtaacagggggtaacacctatgctgttccagcactccctccgggcgcagtgggcgatggcccaccaagggtcgatttcccccgcagtaggctcagatttaaagagaaactgggagaagggcagtttggcgaagtacacctgtgtgaagtggactctccacaggacctggtttcacttgactttcctttaaacgtgcgtaagggccatccactactcgtggcagtaaaaatcctgcggcctgacgcaactaaaaacgctaggaacgatttcctgaaggaggtgaagatcatgtcaaggcttaaggatccgaacattattcgtttgctgggcgtgtgcgtgcaggacgaccctctctgcatgattacagactatatggagaacggagacctgaaccaatttctttcggctcaccaacttgaagacaaagctgcagaaggagcaccaggcgatggacaagctgcacaggggcctactatttcctaccccatgctcctgcatgtggctgcccagattgcctcgggaatgaggtacctcgcaacccttaattttgtacacttttggggagagagacatcgtttcttgcattag

SEQ ID NO: 13406 - RNA, 2067 nt, synthetic construct
  misc_feature 1..2067: note = source = /note="Description of Artificial Sequence: Synthetic coding sequence"
  source 1..2067: mol_type = other RNA
atgctccccaccgaagttccacagtctcatcccgggccttccgccctcttgctgctccagctgttactgccacctacatccgccttctttcctaacatctggtctcttcttgcagcacctggatctatcacacatcaggacctgacagaagaagcagcactgaatgttacactgcagctgtttttggaacagccgcccccgggccggcctccacttaggctggaagattttctgggacgcaccctgctggctgatgatcttttcgcagcctactttgggcccggcagcagccgacgattccgggcagcactgggcgaagtgagtagagctaacgctgcacaggactttctacccacgtcgcgtaacgatcccgatctccatttcgatgctgagcgcctgggacagggtagagcgcgcttagttggagccctgagagaaacagtagtggccgcccgcgcactggaccatacgttggcccggcagaggctcggagccgcattgcacgccctccaggacttctactctcatagtaattgggtcgagcttggagagcagcagcctcatccacacttgctttggccccggcaggagctgcagaatcttgcccaggtcgccgatccaacatgttccgattgtgaggaattgtcctgccctagaaattggttgggattcacgctgctgactagcggatactttggcacacacccgcccaagcctcctggcaaatgtagtcacggcggtcatttcgatagaagctcctcccaacccccaaggggcggaattaacaaagactcaacaagcccaggattcagcccacatcacatgctgcacctccaggccgctaaactagccctactagcatccatccaggctttctctctgttaagatctagacttggtgatagggacttctctcgcctcctagacattacgccagcgtcatcgctgtcctttgtcctcgacactacagggtccatgggggaggagatcaacgcggctaaaatccaggcgaggcaccttgtggaacagcgacgtggatcacctatggagcctgtccattatgtgctcgtaccctttcacgatccaggtttcggtcctgtctttacaacatctgatcccgattcattctggcagcagctcaacgaaattcacgccctgggaggaggcgacgagcccgagatgtgtttgagcgccctccaactcgcattgcttcatacaccacccctcagtgacattttcgtgttcacagacgctagcccaaaagacgcattcctgaccaaccaggttgagtctctgacgcaagagcggagatgtagagtgaccttcctcgtaaccgaggatacttcccgtgtacagggtcgcgcaagaagagagatcttatcaccgctgcgattcgaaccctataaggcggttgccctggcttccggcggcgaggtcattttcaccaaagaccagcacatcagagatgttgcagcaattgtgggagagagcatggcggccctggtcacactgcctctggatcctccagttgttgtccccggtcagcccctggtcttttcggttgatggattgctccagaagattactgttagaatacatggagacatttcctccttctggatcaagaatccagcaggcgtatctcagggacaggaggagggtggcgggcctttgggtcatacacgtaggttcggccaattctggatggtgaccatggatgaccctcctcagaccggtacgtgggaaattcaggtcaccgcagaggacactcctggggtccgcgtccaggcccagacatccctagactttctctttcactttggtattccaatggaggacggcccacaccctggactttacccactaacccagccagtggcagggctgcagacacagctgctcgtagaatctcagagctgggggagttctgctgcatttctgccccgtcacccaagtaggggccctaggggttgccggacccgtcctggagccctgggtgccaggggcacctcgggcgcacgctcgcctcggagccttgcagtggctcacgccgcagtgcatccgtag

SEQ ID NO: 13407 - RNA, 1326 nt, synthetic construct
  misc_feature 1..1326: note = source = /note="Description of Artificial Sequence: Synthetic coding sequence"
  source 1..1326: mol_type = other RNA
atggagtttgaattcgatagactgcgagcttttcaggccatgcaggtgcattgcaacaatatgcacaccctaggagctcgtcttcccggtggagtcgagtgtcgatttagaagggggcccgctatggcctgggagggcgaacccatgcgccataatctcggcggtaacttgggagaccctagggcacgcgccgtctcagttcccttggggggcagagtggcccggtttctgcaatgtcgatttctgttcgcagggccttggctcttatttagcgaaatttcctttattagcgacgttgtgaacaactccagcccagctctcggagggacgtttcccccagctccttggtggccccccggaccacctccaacgaacttttcttctctggaattagagccaagaggccagcagccagtggcgaaggcagaaggttcgccaacggccatactgattggatgtctggtggcaataatcctgctcctgttgctcattattgccctcatgttatggcgcctgcactggaggcgcctgctcagtaaagtactggagagtcacccaagaactcgcagcccagggttagtcggcatccgacccacgctgctacccgtgtcccccatggctcttaggtgctgctccccgatacagcccaccgcctctttttggccgttaacacctgttcccctcgaggcacgagccccaccccacccacccggccctaacccccccaccccgcgaggagtgaccggcggaaacacatacgcagtgcccgccctcccaccaggcgccgtgggtgatggtcctcctcgcgtcgacttcccaagaagcagactgcggtttaaagaaaaacttggcgagggccagtttggagaggttcatctgtgtgaagtagattcaccacaggacctagtctctctggatttccccctgaacgttagaaaaggtcatcccctgctggtcgccgtgaagatcctgaggcccgacgccacaaaaaacgcccggaacgatttcctgaaggaggttaagataatgagtcgcctgaaggatccaaacatcatccgtttgcttggcgtctgcgttcaggatgaccctctgtgcatgattaccgactatatggagaacggagacttaaatcagttcctcagcgctcaccagttagaggacaaggctgctgaaggcgcccctggtgatgggcaagcagcccaaggacctactatctcatatcccatgctgctgcatgtggctgcacaaatcgcatctggaatgcggtacttagcaacgctaaatttcgtccatttctggggcgaaaggcacaggttcttgcactag

SEQ ID NO: 13408 - RNA, 2559 nt, synthetic construct
  misc_feature 1..2559: note = source = /note="Description of Artificial Sequence: Synthetic coding sequence"
  source 1..2559: mol_type = other RNA
atgctcccaacggaagtgccacagtcacaccctggcccaagtgctttattgcttctccagctacttttacctcccacctcagcatttttcccgaatatatggagtctattagccgcaccaggatccattacccaccaagacctcactgaggaagccgccctaaacgttacactgcagctctttctagagcagcctccaccgggacgtccaccgctacgactggaggactttcttggacgcactctcctcgcggacgatctgttcgcagcgtatttcggccccgggagcagtagaagattcagagccgccctgggcgaagtgagcagagccaatgccgcccaggacttcctgccaacttctagaaacgatccagacctccactttgatgcagaaagattaggccaaggtagagcccggctggtaggagccttaagagagaccgtggtcgcagccagggccttggaccacacccttgcacgccagaggcttggagctgccctacatgctctgcaggatttttactcacattcaaactgggttgaacttggggagcagcagcctcacccccatcttttatggcccagacaagaactccaaaacctggcccaggtcgcagatccaacatgtagcgactgcgaagagctctcttgccccaggaattggctgggcttcaccctcttaacatctggttatttcggaactcaccctcctaagcctccaggtaaatgcagccatggcggacacttcgacagatccagctcccaacctccgaggggcggcattaacaaagactccacgtccccaggcttcagtccccatcacatgctgcacttacaggctgcaaaattagcccttctggccagcatccaggccttctccctactgagatcaaggctaggagaccgcgactttagcaggttacttgatattaccccagccagctctcttagcttcgtcctggacaccaccggaagcatgggcgaggaaatcaacgccgctaagattcaggccaggcacctcgtagagcagagaagaggtagccctatggaacccgtccactatgtccttgtcccgtttcatgaccccggatttgggcctgtattcaccacaagcgacccagactctttctggcaacaattaaatgaaattcacgccttgggcggtggagatgaacctgagatgtgtctttccgctctgcagctcgcccttctgcatacaccaccgctgtcagatatttttgtgtttacagatgccagtcccaaggacgcgtttctcacgaatcaggtggagagcctgacccaggaacgacggtgtcgcgtgacattcttagtaaccgaagacacgtcccgggtacagggcagggctaggagagaaattttgtccccattgagattcgagccttataaagccgtggcgctagccagtggaggagaagtaatctttaccaaagatcagcatatacgggatgttgctgccatcgtgggtgagagtatggctgcactggtgacattgccattagatccccccgtggtggttcccgggcagcctttggttttcagcgtcgacggactcctgcagaaaatcacagtgcggattcacggcgatatcagcagcttctggatcaaaaacccagcaggagtgtcccaaggtcaagaagaagggggagggcccctaggacacaccaggcgtttcggtcaattctggatggtgaccatggacgaccccccccaaacaggaacgtgggagatccaggtcaccgcagaggacacccccggagtgcgtgtgcaagcgcagacatctctggactttctattccacttcggtatccccatggaggacggccctcaccctgggctttacccacttactcagccagtggccggcctgcagacgcagctcctcgtagaggtgacagggctcggatcaagagcaaacccaggggacccacaaccacacttttcccatgtgatcctacggggggtgccagaaggagccgagctagggcaggtgcctctcgaaccagtgggacctcccgagagggggttacttgccgcatccctctctcccacactgttaagcacgccccgacctttctcattagagcttattggtcaggacgcggccggacgccgactacatcgggcggctccacagccgagtacagtggtaccagtcttgctggagctgagtgggccttcgggatttctggctcccggcagtaaagtcccccttagtctcaggatcgcctctttctcaggaccacaggacttagatcttcgaacgttcgttaaccccagtttcagccttacaagcaatctgagccgagcacacctggagctgaacgaatccgcctggggtcggctgtggctggaggttcccgattcggccgctcctgattccgtagttatggtgaccgtaacagcaggcggacgcgaggcgaaccctgtacctcctacccatgcttttttaagactcctcgtgtccgctcctgcgccccaagtgagaaatcactactttccaagccagggccctgcccatcacccataccgattgatttag

SEQ ID NO: 13409 - RNA, 732 nt, synthetic construct
  misc_feature 1..732: note = source = /note="Description of Artificial Sequence: Synthetic coding sequence"
  source 1..732: mol_type = other RNA
atgggacctgaggccttaagttcattgctgctgcttctgctcgtcgcttcaggagatgcggacatgaagggacactttgaccctgccaagtgtcggtacgctctgggaatgcaagatcggaccattccagactccgacatttccgctagcagttcctggtcggacagcacggccgctcggcatagcaggctcgagagctctgatggggatggagcctggtgcccagccggttcagtctttccaaaggaggaggaatacctgcaggtggatctgcaacggctgcatctcgtcgctctggtaggaacccaaggaagacacgctgggggacttggtaaggaattcagtcgatcttatagactgagatactcaagagacggccgcaggtggatgggttggaaggatagatgggggcaggaagttatctccggcaacgaagatcccgagggcgttgtactgaaagatctgggcccccccatggttgcacgactggtaagattttacccccgggcagacagggtcatgagtgtgtgtctgcgtgtggagctatacgggtgcctgtggagagactgttccatgggtgtgtgggcttcttggcagatggtgtggtggggctggatgacactcggaagggtgcgcagctgcggatccgggcaagctatgacgatgtgggacggagccactaccgcctctcccgtcgccatgtggagatggtcgctgagcctcacaggctag

SEQ ID NO: 13410 - RNA, 2760 nt, synthetic construct
  misc_feature 1..2760: note = source = /note="Description of Artificial Sequence: Synthetic coding sequence"
  source 1..2760: mol_type = other RNA
atgggccccgaggcactcagttccctgctcctactgctcctcgttgccagtggggatgccgacatgaaaggacatttcgacccggccaagtgccgctatgccctggggatgcaggatagaacaatacctgattccgacatttccgccagcagctcatggagcgatagtaccgctgcccggcactccaggctcgaatcctcagatggtgacggcgcctggtgtccagctgggtctgttttcccaaaagaggaggaatacttacaggtcgatttgcagagactgcaccttgttgccctcgtaggcactcagggtcggcacgccggaggtctgggtaaagagttttcccgttcttaccgactcaggtactcccgggacggccgcagatggatgggatggaaggatagatggggccaggaggtcatctcaggcaatgaggaccccgaaggagtagtgttgaaagacctcggtccaccgatggttgcacgcttggtcagattctatccaagagctgatcgagtcatgagcgtctgcctgcgcgtcgagctgtacggttgtctctggcgagatggtctgctctcttacacagcacctgtagggcaaacgatgtacttatcagaggcagtctatttgaatgacagcacctatgatgggcacactgtcgggggcctccagtatggaggacttggacaattagcagacggcgtggtcggcctagatgacttccgcaagtctcaggaactacgtgtgtggcctggttacgactacgtgggatggagcaaccactctttcagctcaggctatgttgaaatggaattcgagtttgacagattgcgcgcattccaggcgatgcaagtacactgcaataacatgcacacgctcggagctcggctcccagggggagtggagtgtcggttccgaaggggacccgccatggcatgggaaggggagccaatgaggcacaacttaggggggaatctgggtgaccccagagctcgagccgtctccgtccctctgggcggaagggtggcccgatttctgcaatgtagatttctatttgctgggccctggcttctctttagcgagatttcatttatctcagatgtggtgaacaattcctctccggctctgggagggacgttcccccccgctccctggtggcctcctgggcctccccccaccaatttcagttctttggagctcgagccaagaggtcagcagcccgttgcgaaggccgaagggtcgccaacagccattttaatcggctgcttagtagccattatcctactcctcctactgatcattgccctcatgttgtggcgattgcattggagaagactcctgagtaaggcggagcgccgggttctggaagaggaacttacagtgcacctcagtgtgcctggggatactatcttgatcaacaatcgccctgggcctagagaacccccaccgtaccaggagcctcgccctaggggtaacccaccccatagcgccccatgtgtaccaaacgggtccgcactcctgttgtcaaatcctgcttatcgcctccttctcgccacctatgcaagaccaccaagaggacccggaccgccaacccccgcctgggcgaaacctaccaatacacaggcatatagcggggattatatggaacctgaaaagccgggggctcctttgctgcccccccctccccagaactccgttccacattatgccgaagctgacattgtgactctgcagggagttacaggaggcaatacatatgccgttccagccttgcctcccggcgctgtcggggacggacctccaagagtcgatttcccacggagtcggctgcgttttaaagagaagctgggagaaggacaattcggagaggtccacctctgtgaagttgattcgccacaggatctcgtgtccctagactttcctctgaacgtaaggaaaggtcacccactcctggttgccgtgaagatccttcgccccgatgccactaaaaatgcctcgttttccctattcagcagaaatgattttctgaaggaggtgaaaatcatgagtcgattgaaggatcccaacattatccgactgttgggggtttgcgtgcaagacgacccactgtgcatgattacagattatatggagaatggcgatcttaaccagtttctgtcagctcaccagttggaagacaaggccgctgagggggctcccggggatggacaggccgctcagggcccaaccatttcttaccccatgttattgcacgtggcagcccagatcgcctccggaatgcgctacttagcaaccctcaacttcgtgcaccgtgatttggctactagaaattgtctggtgggagagaatttcaccataaaaatcgcagactttggtatgtctcggaatctgtatgctggcgattattatagggtgcaggggagggcagtgctgccaattagatggatggcctgggagtgtatcctgatgggtaagttcacgactgccagtgacgtgtgggcttttggtgtgacactgtgggaggtgttgatgctctgtcgggcacagccttttggtcaattaactgacgagcaggttatcgaaaatgctggcgagtttttcagggaccaagggcgtcaggtgtatttaagtcgccccccagcctgtccccagggcctctatgaattgatgttacgatgttggtccagagagtccgaacagcggccacctttctcacaactccacagatttctggctgaggatgccttaaatacagtctag

SEQ ID NO: 13411 - RNA, 2700 nt, synthetic construct
  misc_feature 1..2700: note = source = /note="Description of Artificial Sequence: Synthetic coding sequence"
  source 1..2700: mol_type = other RNA
atgctgctcctgttgttactggcccccttattcttacgcccccctggggcaggaggcgctcagacccctaatgctaccagcgagggctgtcagattatacacccaccctgggagggaggcattcgataccgagggctgaccagggaccaggtgaaggctatcaatttcctgccagttgattacgagattgagtacgtatgccggggagaaagagaggtcgttgggccgaaagtgagaaagtgcctcgccaatgggagctggactgatatggataccccttcgcggtgtgtgaaccgtaccccccactctgagcggcgggccgtatacattggagccctgttccctatgagcgggggatggcccgggggccaggcttgtcagcctgccgtcgagatggctctcgaggatgtgaattcccggcgggatatcctgcccgactatgagctgaaactgatccaccacgactcgaaatgcgatcccgggcaggccactaaatacctgtacgaactgctgtacaacgacccaattaagatcattctgatgcccggctgctcaagcgtctcgactctcgttgccgaggccgctcgaatgtggaatctgattgtgctctcatatggatcaagtagtcctgccttgtcaaaccgtcagcgctttcccaccttcttccgaacgcatccttcagccactctgcataaccctacaagggtgaaactgttcgagaaatgggggtggaaaaaaatcgctactatacagcagactaccgaagtattcacaagtaccctcgacgatctggaagaaagggttaaggaagcaggcattgaaattactttcagacagtcatttttttcagaccctgccgtcccagtgaaaaatctgaaacgtcaagacgcaaggatcattgtcggcctgttctacgagacagaagccagaaaggttttctgcgaggtgtataaagaacgtttgttcggaaaaaaatatgtgtggttcctgatcggctggtatgctgacaactggtttaaaatttacgatccaagtatcaactgcaccgtcgacgagatgaccgaggcagtggaaggacatattaccacggagattgtaatgctgaaccctgcaaacacccgatcaataagcaatatgacatcacaagagtttgtggagaagcttaccaagaggctcaagcgtcatcccgaggagactggcggcttccaagaggcgcccttggcctatgatgctatctgggctttagcactagctcttaacaaaaccagtggagggggagggagatcaggtgtcagactcgaggacttcaactacaataatcaaaccattaccgaccaaatttatagagccatgaactcctctagcttcgagggcgtctccggccacgtggtttttgacgcttcaggcagtcggatggcttggacgctcattgaacagcttcaggggggctcctacaaaaagataggatattacgattcaactaaagatgatctctcgtggagcaagactgacaaatggatcggtggttctcctcctgctgaccaaacactggtcatcaagaccttccggttcctttcccagaaactctttattagtgtgtctgtgctgagctccctgggcatagtgctggctgtcgtttgcctgtcattcaatatttataatagccacgttaggtatatccagaatagccaaccaaacctaaacaatctaacagctgttggctgttcgctggcactagcagcggtgttccccctcgggctggacgggtaccacataggaagaaaccagtttccctttgtgtgtcaggctcggctgtggcttttaggtcttgggttcagcctagggtacggctctatgttcaccaaaatttggtgggtccacacagtcttcacgaaaaaggaggagaaaaaggagtggagaaagacactggaaccctggaaattgtacgccaccgtgggtctcctggtgggtatggacgtcctgacactggcaatatggcagatcgtggatcctcttcacagaaccattgaaacctttgccaaggaagaacctaaagaagacatcgatgtatctatcctcccccagctagagcattgctcttcacggaagatgaacacatggttaggcattttctatgggtacaagggtctcctactgctgctgggtatctttcttgcgtacgagactaagagcgtatccacagagaaaattaacgaccatagggcagtgggcatggcaatttacaacgtcgccgttttatgcctgataacagctcctgtgacaatgatcctttcctctcagcaggacgccgcttttgcgttcgccagtctggcaatagttttcagttcctatatcacgctagttgttctttttgttcccaagatgaggagattgataacccggggcgaatggcaatcagaggcccaagacacgatgaaaactggcagctccacaaacaacaacgaggaagaaaagtcaaggcttctcgaaaaggagaaccgtgagctagaaaagattatcgccgaaaaggaggaaagagtctccgagctcaggcaccagctacagagccgtcagcagcttcgctcgagacggcacccaccgacaccaccggagccctccggaggtctgcccagggggcccccagaaccccccgaccggctgtcctgcgacggttcgagagtgcacctgctgtataaatag

SEQ ID NO: 13412 - RNA, 447 nt, synthetic construct
  misc_feature 1..447: note = source = /note="Description of Artificial Sequence: Synthetic coding sequence"
  source 1..447: mol_type = other RNA
atgcagacattcccagttgcaggggcactggatccagccatactcgacacctcttccccccaggccttgtacactgtgttactaatcgtcctggtcatgatgtcactggtcttcggcaagttcgtgccagtaaactgggagccgccacaaccattaccattcccgaagtatctccggtgttatcggtgtctgctggagacaaaggaactgggctgtttgcttggaagcgacatctgcctcacccccgcaggctcaagttgcatcacgctgcataaaaagaactcatcaggaagcgatgtgatggtatctgactgtcgcagtaaggaacaaatgtccgactgttctaatacaagaacctctcccgtaagcggcttctggattttttctcaatactgttttctcgatttctgtaacgatccacagaacagaggcctgtacaccccctag

SEQ ID NO: 13413 - RNA, 516 nt, synthetic construct
  misc_feature 1..516: note = source = /note="Description of Artificial Sequence: Synthetic coding sequence"
  source 1..516: mol_type = other RNA
atgagacacaatttaggaggtaacttgggcgacccaagggctagagcagtttccgtgcctctgggcggacgggtagccagatttctccaatgtcgcttccttttcgcaggcccctggctgctcttttctgaaatctcctttatatccgatgtcgtgaataactcctcacccgcactcggaggcacttttccacccgcaccttggtggccgcccgggccaccgccgactaacttttcatctctcgagctggaaccacgaggccaacaacctgtcgccaaggccgaaggcagccctacagcgatcctcattggttgcttagtggcaatcattctgctgcttctcctgattattgctctcatgctttggagactgcactggcggcggctgctatcaaaagtcctggaatcccatccccgaactaggtctcctgggctggttgggattagaccgacccccctgcccgtcagtccaatggcactcgtccatttatgcgaggttgacagtccccaggactag

SEQ ID NO: 13414 - RNA, 666 nt, synthetic construct
  misc_feature 1..666: note = source = /note="Description of Artificial Sequence: Synthetic coding sequence"
  source 1..666: mol_type = other RNA
atgaccacgcagctgagagttgtccatctcttgccgctgctgctcgcctgctttgtgcagacctctcctaagcaggaaaagatgaagatggactgccacaaggacgagaaaggcacaatctacgactatgaagcaattgcgctgaataagaacgagtatgtgagcttcaaacaatatgtcgggaagcatatcctgttcgtcaacgtggcgacttattgcggcctgaccgcacaatacccggaattgaatgccttgcaggaggagctgaagccctacggactcgtcgtacttggatttccctgtaatcagttcggcaagcaagaacctggggataacaaagagatcctgccaggcctcaaatatgttcgcccaggggggggatttgtaccgtcattccaactctttgaaaagggtgatgtaaatggtgagaaagaacagaaagtgttcagttttctgaaacactcatgccctcacccaagcgagatccttggtacgtttaagagtatctcttgggatccagtgaaggttcatgacatacggtggaactttgaaaaatttttagtaggacccgatggaatccctgtaatgcgctggtctcatagagcgaccgtcagtagcgtaaaaactgacattctggcctacttaaagcaattcaaaacaaaatag

SEQ ID NO: 13415 - RNA, 447 nt, synthetic construct
  misc_feature 1..447: note = source = /note="Description of Artificial Sequence: Synthetic coding sequence"
  source 1..447: mol_type = other RNA
atgcagacattcccagtcgctggggcccttgaccccgctatactcgatacctcttctccccaagctctgtacacggtgctcctgatcgtgttggtaatgatgagcctcgtctttggtaagtttgtccctgtcaactgggaaccccctcaaccccttcccttcccaaagtatcttcggtgttatcggtgtttactggaaacgaaggaattgggctgtctccttggaagtgacatttgtctgacacccgccgggtccagctgtatcaccctgcataagaagaactcctctggttcagatgtcatggtttccgactgtagatccaaagaacagatgtctgattgttctaatactcggacttcaccagtgagcggcttctggatctttagtcagtattgttttcttgacttttgcaatgacccacagaatcgtggcttatataccccttag

SEQ ID NO: 13416 - RNA, 1737 nt, synthetic construct
  misc_feature 1..1737: note = source = /note="Description of Artificial Sequence: Synthetic coding sequence"
  source 1..1737: mol_type = other RNA
atgcttctgctactcctgcttgccccattgtttcttcgaccacctggcgccggtggggcccagacccctaatgcaactagtgaaggctgccaaattattcatcctccttgggagggcgggattcggtaccgagggctgactagagaccaggtgaaggcaattaatttcctaccagtggactacgagatcgaatacgtctgccggggtgaaagggaagttgtaggccctaaggtccgcaagtgtttagccaatggttcctggacggacatggacacacctagccggtgcgtgcgcatctgttccaagagctatttgaccttggagaacggcaaggtgtttctcacgggtggcgatcttccagcgttggatggcgcacgggttgacttcagatgtgaccctgatttccacctcgtcggcagttctagatccatctgcagtcagggtcagtggtcaacacctaaaccgcactgtcaggtaaaccgcacacctcattccgagagacgggctgtgtatattggagcgctgttccccatgagcggaggttggcctggcggccaggcttgccagcctgctgtggagatggccctggaggacgtgaattcccgtagagatatattgcctgattacgagctgaagctgattcatcacgattctaagtgcgatcccggtcaagcgaccaagtacctgtacgagctactatataatgacccaattaagatcattctgatgcccggctgctccagcgtgtcgacattagtagccgaagcagctcggatgtggaaccttattgtactctcctatggatcctcctcacccgctctgagtaatcgtcagcgattcccaaccttcttcagaacacatccctccgcgacactgcacaatcccactagggttaaattatttgaaaagtggggctggaagaaaatagctactattcaacaaaccacagaggtgttcaccagtactctggacgatttggaggagcgtgtaaaagaagctggcattgagatcaccttccgtcagtccttctttagcgaccccgctgtcccagtaaagaaccttaaacgacaagatgctaggattattgtgggattgttctacgagacagaggccaggaaggttttttgcgaagtctacaaagagcgactcttcggcaaaaagtacgtctggttcctcattggatggtatgccgacaattggttcaagatctatgacccttctattaattgtactgtggacgagatgaccgaagctgtcgaggggcatataacgacggagatagtaatgttgaacccagccaacacaagatcaatatctaatatgaccagtcaagagttcgtggagaagcttacaaagagactgaagcggcaccccgaggaaactggtggcttccaggaggcccctctggcgtatgacgccatttgggcactggctttagcactgaacaagacatccggagggggcggtcgctctggcgttcgcctggaggactttaattacaataaccagaccattaccgaccaaatatacagggctatgaacagtagctcgtttgaaggagtgtcaggccacgtagtgttcgatgcttccggcagcaggatggcttggactttgatcgagcagttacaaggagggagttacaagaagatcggctactatgattctactaaagacgacctgtcttggagcaaaacagacaagtggatcgtcatctcccggactcatagcccgacctag

SEQ ID NO: 13417 - RNA, 1737 nt, synthetic construct
  misc_feature 1..1737: note = source = /note="Description of Artificial Sequence: Synthetic coding sequence"
  source 1..1737: mol_type = other RNA
atgctcctgctgctcctgctagcccctctcttcctccgaccacccggggccggtggagctcagacacccaacgcaacttccgagggctgccaaatcattcacccaccgtgggagggaggcatccgctatcgcggactcacacgcgaccaagtaaaagcaatcaactttttgcccgtcgattacgagattgagtacgtatgccgcggagaaagagaagtcgttggcccaaaggtgcgcaaatgtctcgccaacggctcgtggaccgacatggacactcccagccgatgcgttcggatatgttccaaatcctacctgactcttgagaatggtaaggtttttctgactggcggtgatctgcccgcccttgatggagctcgagtggacttccgttgtgatcctgattttcacctcgtggggtcaagtaggtctatatgcagtcagggacagtggagtaccccaaaacctcactgccaggtgaacaggactccccatagcgaacgtagagcagtgtacattggggctctattcccaatgagcgggggttggcccggcggacaggcatgtcagcccgctgtggaaatggcacttgaggatgtgaattcccgtcgagacatactgccggactacgaactgaagttgatacaccacgactcaaagtgcgatcccggccaagctacaaagtacctatacgagttgctgtataatgaccctatcaaaattattctgatgcccggatgcagtagtgtttccacgctggttgctgaggccgcgagaatgtggaatttaattgtgttgtcttatggctcctcttcaccagcactttcgaaccgtcaaagattccctacattcttccggacacacccttccgccacgctgcacaacccaacccgtgtgaagttatttgagaaatggggttggaaaaagatcgcaactattcaacagacgacggaggtgtttacaagcactctggacgatttagaagaacgggtgaaagaggccggaatcgagattacgttcagacagagcttcttcagcgacccggcagtccccgtgaagaatctgaagcggcaggatgctaggattatcgtcggactgttctatgagacagaggctcgtaaggtattttgcgaggtgtataaagaacgactgttcggaaaaaaatacgtctggttcctgattggctggtatgcagataactggttcaagatttacgaccctagcatcaattgtactgttgatgaaatgactgaggccgttgagggacatattaccaccgagatcgtgatgttaaatcccgctaatacaagaagtatcagtaacatgaccagccaagagttcgtggaaaagcttacaaagcgcttgaagcgtcacccagaagagaccggaggattccaggaagcaccactagcctacgatgcaatttgggcgttagccctcgcactaaataagaccagtggaggcggaggccggtcgggcgttaggctggaggatttcaactacaacaatcagacgatcacggatcagatctatcgggcgatgaactcatcctcctttgaaggagtgtctggacatgtcgtgttcgacgcaagcggctcgagaatggcttggactcttattgagcagctccaaggggggtcctataaaaagatcggatactacgattctacaaaggacgatctatcctggagtaaaacagataagtggattgtcattagtagaactcacagtcctacatag

SEQ ID NO: 13418 - RNA, 756 nt, synthetic construct
  misc_feature 1..756: note = source = /note="Description of Artificial Sequence: Synthetic coding sequence"
  source 1..756: mol_type = other RNA
atgccccacctcgcctctctgttcaccgcctccagtcgttgttgccctcacccgctgagaccagaaggcagtggtgccatgggaccagaagccctcagttccctgcttctgctcctacttgttgcttcaggcgatgccgacatgaaaggacactttgaccccgccaagtgccgatacgcactaggcatgcaggaccgcactattccggactctgatatatccgcgtctagctcttggagcgattctacagcggctcgccatagtcgactggagagtagcgatggtgacggggcttggtgccctgccggaagcgtttttcctaaggaggaagagtacttacaggttgaccttcagcgcctgcacttggttgcattggtaggaactcaaggacgtcacgccggaggactcggcaaggagttcagtaggagctaccgattgcggtacagccgcgacggacgccgttggatgggctggaaggacaggtggggccaggaagtgatctcaggcaacgaagaccctgaaggagttgtcctcaaagacttggggcctccaatggtcgcgagactcgttcgattctatccccgagcggaccgtgtgatgtccgtgtgtttaagagtggaactgtacggctgcctgtggaggggcgaatggctaagcttcttgggaatatgttttttgtctagggggcttgaaggcggggaatgcggtgagtgggcttctcgcataccatctccggctgggaagttgagtttgtag

SEQ ID NO: 13419 - RNA, 1764 nt, synthetic construct
  misc_feature 1..1764: note = source = /note="Description of Artificial Sequence: Synthetic coding sequence"
  source 1..1764: mol_type = other RNA
atgagacctcggggtctgcctcccctactcgtcgtgctcctgggctgttgggcgagcgtctccgcccagacggatgccacgcccgcggtaactactgagggtctgaacagtaccgaagccgcgttggccaccttcggcaccttcccgagtactagacctccaggcacccctagagcccctgggccttcaagtggacctcggcctacacctgtcactgacgtagcagtgctgtgtgtctgtgaccttagtcccgcccagtgtgacatcaactgctgctgcgatcctgattgttcatccgttgattttagcgtgttttctgcctgtagcgtacccgtggtgacgggtgatagccagttctgctcccagaaagccgtgatttactccctgaactttaccgccaaccctccacaacgagtgtttgagctagtcgaccagattaaccctagcatattctgtatccatatcacgaattacaagcccgccctttctttcatcaatcctgaagtcccagacgaaaataatttcgacactctcatgaaaacctcagacggcttcacactgaacgcagaaagctatgtgtcctttaccacaaaattggacattcccactgctgctaaatacgagtatggggtcccccttcagacgagcgacagcttcctcagattcccatccagcctaacttcctccctctgtaccgacaacaatccagctgcatttctagtcaatcaggcagtcaagtgtacccgtaaaatcaatcttgagcaatgtgaggagatcgaggctctgagtatggccttctatagctcgcccgaaattctgagggtgccggacagccggaagaaggttcccatcaccgtccagagcatagtgatccaaagcctaaataaaaccctgacacggcgcgaagatacagacgtcctacagccaacccttgttaatgctggtcatttctctctgtgcgtcaatgtggtgctcgaggtgaaatactcgctgacatatacagatgccggcgaagtgactaaggcggatctgtcctttgttttgggaactgtgtcatctgtggtggtgcctctgcagcagaagttcgaaatccatttcctccaggaaaatacccaacccgtgcccctctctggaaaccctggttacgtcgtaggcctgcctcttgccgccggtttccaaccacacaaaggatcagggatcatccaaacaaccaaccgttatgggcagcttaccattttacacagcacaacggaacaggactgcctcgcactcgagggggtccgtacgccagtcctgtttggatacaccatgcaatccgggtgcaaactcagattaacgggggcgctcccctgccagctcgtggcccaaaaggtgaaaagcttattatggggccagggcttccctgactacgtggctccttttggcaactcccaagcacaagacatgctggactgggtacctatccactttattacacaaagtttcaatcgtaaggattcctgccaattacctggcgctctggtaatcgaggtgaagtggactaaatacgggtcactgttgaacccccaggccaagattgtcaacgttactgccaatctgatcagtagctcttttccggaagcaaattcagggaacgagaggactattctgatctcgacggccgtgacctttgtggacgtgagcgcgccagcagaagcaggcttcagggccccacctgcgattaacgcacgtctgccttttaatttttttttcccatttgtgtag

SEQ ID NO: 13420 - RNA, 2067 nt, synthetic construct
  misc_feature 1..2067: note = source = /note="Description of Artificial Sequence: Synthetic coding sequence"
  source 1..2067: mol_type = other RNA
atgctcccaacagaggtgccccagagccatcctggtcccagcgcgctcctgctgctgcagctacttctgcctccgacatccgctttcttcccaaacatatggagtctgctagccgcgcctggcagcataactcaccaggacttgacagaggaagcagctctgaatgtgaccctgcagttattccttgaacagccaccccctggaaggccgccactcagactcgaggattttctgggaagaactctactggcggacgatcttttcgccgcatacttcggtccaggctcatcaagaagattccgggcagccttgggcgaggtctcaagggctaacgcagcccaggactttctgccaactagccgtaacgatcctgacttgcacttcgacgccgaacgactgggccaaggacgagcccgcctcgtcggcgcgcttagagagaccgttgtagccgcacgtgctctggaccacacccttgccagacagcggttgggcgccgccctgcatgcacttcaagatttctatagccatagcaactgggtggaacttggagagcagcaaccacacccacatctcctttggccacgacaagagctacagaacctcgcccaggtagcagacccgacctgttcggactgcgaagaactgagctgtcctcgaaattggctgggattcactctgcttacaagtggctattttggcactcatccacccaaaccccccgggaaatgtagccacggcgggcacttcgatcgttctagcagtcagccaccaagagggggaattaacaaggactccacatctcccggattcagtcctcaccatatgcttcacctgcaagcagctaagttagctctgctggcttctatccaggccttctctcttctgcgctccaggctgggcgatcgggattttagccgactcctggacatcactccagcttcctccctgtcttttgttctagacacgacaggttcaatgggagaggaaatcaatgctgccaaaatccaagcaaggcatctagtcgagcagagacgggggtctccaatggaacccgtccactatgtactcgtaccattccacgaccctggtttcggtccagtgtttactacctccgaccctgacagcttttggcagcagttgaacgagattcacgctctcggcggcggcgatgagcccgagatgtgtctgtccgccctgcaactcgccctgctgcacacgcccccgctgtccgatatttttgtgttcaccgatgccagccctaaggatgcatttctaactaatcaggtagagagcctcacacaagagcgccgctgccgagttacattcctggttaccgaagatacctctagggttcaagggcgcgcccgaagagagattctgtctcctctgagatttgagccatacaaggccgtggctctggcctcgggcggggaggtcatttttactaaagatcagcacattcgtgatgtggcggctatagttggcgaatctatggcagctctggtaactttgcccctggatcccccagtcgtagtgccaggacagccccttgtgttcagcgttgacggacttcttcagaagattacggtcaggatccacggggatatcagctctttctggataaaaaatcctgcaggcgtctcccaagggcaggaagagggcgggggcccattaggccacaccaggcggtttggtcagttctggatggtaacgatggacgaccccccccagacgggcacatgggaaatacaggtcacagccgaggacaccccaggcgtgcgcgtgcaagcccagacgagccttgacttccttttccatttcggtatcccaatggaagacgggccacaccccgggctctaccccttgactcaaccagtagccggtcttcaaactcaactgctcgtggaaagccagtcctggggcagtagcgctgcctttctgcccaggcaccccagccgtggcccccgggggtgtcggacacgccctggggcactgggtgcacgcggaacgagtggagcccgttctccaaggtcccttgctgtggcacatgccgccgtgcacccctag

SEQ ID NO: 13421 - RNA, 303 nt, synthetic construct
  misc_feature 1..303: note = source = /note="Description of Artificial Sequence: Synthetic coding sequence"
  source 1..303: mol_type = other RNA
atgacaacccagctgcgcgtcgttcacctgctaccgctgctactggcatgttttgtacagacgtctcccaaacaggaaaagatgaagatggactgccacaaagatgagaaaggaacaatttatgattacgaggctatagcccttaacaaaaacgaatatgtgtcattcaaacagtatgtggggaagcacatcctatttgttaatgtcgctacatactgcggcctgacagcccagtatccaggcatgagcgtccagggggaagacctttatctcgtgtctagttttctgaggaaagggatgtag

SEQ ID NO: 13422 - RNA, 705 nt, synthetic construct
  misc_feature 1..705: note = source = /note="Description of Artificial Sequence: Synthetic coding sequence"
  source 1..705: mol_type = other RNA
atgaagacgctggccggccttgtgctaggcctggttattttcgatgccgccgtcactgctcctacactcgagtccattaactacgattcagaaacatatgatgcaacattggaagacttggacaatctgtacaattacgaaaacatcccggtcgacaaagttgagatagagatcgccaccgtgatgccttcaggaaatagagagctgctcacaccgccaccccagccagaaaaagcccaagaggaagaagaggaagaggaatctacaccacgacttatcgatggatcctcaccccaagagccagaattcaccggggttctagggccccatactaacgaagattttcccacctgtcttctctgtacttgcatatctactaccgtttactgcgacgaccacgaactggatgctattccgccgctgcccaagaataccgcttatttctacagtcgctttaatcggataaagaagatcaacaaaaacgatttcgctagtttaagtgacctgaagcgtattgacctgactagtaaccttattagcgagatcgacgaggacgcctttcggaagctaccacagcttcgcgagctcgtgctgcgagataataaaatccgccaactcccagaattgcccaccactctgaccttcatagacatctctaataatcgcctaggtcgaaaaggcatcaagcaggaagccttcaagtag

SEQ ID NO: 13423 - RNA, 2559 nt, synthetic construct
  misc_feature 1..2559: note = source = /note="Description of Artificial Sequence: Synthetic coding sequence"
  source 1..2559: mol_type = other RNA
atgctgccaaccgaggttccccagtcccacccgggacccagcgctcttttacttctgcagttgctcctccctcctacttcagccttcttccccaatatatggtcgctccttgccgctccgggctccattacccaccaggacctcacagaggaggccgcgctcaacgtaacgctgcagcttttcctggaacagccccctccagggcgcccacccctacgtctggaggacttcctcggacggaccctcctggccgatgacctgttcgctgcgtactttggcccggggagctcgcggaggtttcgagctgcccttggcgaagtgtctagggccaatgccgcacaggatttcctgccgacctctcgcaatgatcctgatcttcacttcgatgctgaacgcttaggccaaggaagagcacgcctggtgggcgccttgcgggaaacggtggtagccgctcgtgctctcgaccacaccttggctaggcagagattgggagcagcccttcatgcactgcaagatttctattcacactctaactgggtggagctcggagagcagcagccacacccacacctattgtggccacgccaggagctccaaaacctcgcccaggtggcggaccctacctgctccgactgcgaagagctctcctgtccacgcaattggcttggcttcacgctgctcacatctgggtactttgggactcacccgccaaagccaccaggcaaatgtagccacggaggtcatttcgatcggtctagtagtcaaccccctcgcgggggaattaataaagattctactagtcctggattctcaccccaccatatgttacacctccaagcggcaaaactcgccctactggcaagcatccaagcattttctctccttcgttcccgtctgggggatagggacttttcccgcctcctcgacatcactcctgcgtcctcactttcgtttgttctcgatacaacgggttcaatgggggaggagataaatgccgcgaagatccaggcccgacaccttgttgagcagagaagagggtcgcctatggagccagtccattatgtgctggtgccattccacgatcccggattcggacccgtgtttactactagtgacccagattctttttggcagcagctgaacgagattcacgccctggggggaggcgacgagcctgaaatgtgtctgtctgctctccagttagccttactgcacacccctccgctctccgacatattcgtctttactgatgcaagcccgaaggacgcatttctcacaaaccaggtagaatctttgactcaggaaaggaggtgccgagtcacatttctggtgactgaagatacgtctagagtacagggtcgggccaggagggaaatcctgtcccctcttagattcgaaccatataaagctgtcgccctcgcttctggaggtgaagtaatctttacaaaggatcagcacatcagagacgtggcggctatcgttggcgagagtatggctgccctcgtaactttgccgttggatccaccagtcgtcgttccaggacaaccactcgttttcagcgttgatggacttctgcagaaaatcaccgtgcgcatccatggcgatatatcctccttttggatcaagaatcctgcgggggtgtcccaagggcaagaggaaggaggtgggcctttggggcatacccgccggttcggtcagttttggatggtaaccatggatgaccctcctcagaccggcacctgggagattcaggtcaccgcagaagataccccaggtgtgagggttcaggcccaaacatccctggacttcctattccattttggcattcctatggaagatggacctcaccccgggttgtatccacttacacagccagttgccggcctccaaacacaattactagtagaagtcactggtctcggttcacgcgctaaccctggcgatcctcagcctcacttctcccatgttatcctccgaggggtcccagaaggggccgaactggggcaggtcccactggagcctgttggaccacccgaacggggtctgctggccgcgtcgctgagccccacactgctttcaacacctagacctttctccctcgaactaataggacaggacgcggctggcaggcggctgcatagagccgcaccccaacctagtaccgtggtgccggtactgctagagctgtcaggaccatcgggattcttggcacccggaagtaaagttcccctatccctgcgcattgcctcctttagtgggcctcaagacctcgatttgcgcacatttgtgaatcctagcttttctttaacatcaaatctatcccgcgcccacctggagctgaatgaatcggcttggggaagactgtggctcgaagtcccagatagtgctgctccagactctgtcgtaatggtgactgtgacagccggaggccgggaagccaatccagtgccacctacacatgccttcttgagacttctcgtaagcgcccccgccccacaagtacgcaaccactacttcccctcacaggggcccgctcaccatccttaccggttaatttag

SEQ ID NO: 13424 - RNA, 2760 nt, synthetic construct
  misc_feature 1..2760: note = source = /note="Description of Artificial Sequence: Synthetic coding sequence"
  source 1..2760: mol_type = other RNA
atgggccctgaggcactgtcctcactgttgttactgctactcgtggcatcgggcgacgccgatatgaagggccactttgatcccgccaagtgcaggtacgcgctgggtatgcaggacaggactatccctgacagcgatatctctgcctcatcttcttggtctgactccactgcggccaggcacagcagactggagagttctgacggggatggcgcatggtgccccgccggcagcgttttccctaaagaagaagaatatcttcaggttgaccttcagagattacatcttgtggccttagtagggactcaggggcgccacgccggcggcctcggcaaggaatttagtcgctcatataggctgcggtacagtcgcgatggaaggaggtggatggggtggaaggacaggtggggccaagaggtcattagtggtaatgaagatcccgagggcgttgtgctgaaagacctgggaccccccatggtagctaggctggtccggttttacccacgagctgaccgagtaatgtccgtatgtcttagggttgagctctacgggtgtctatggcgagatgggctgttatcttacaccgcccccgttggccaaactatgtatcttagcgaagctgtctacctgaatgactctacctacgatggtcacacagttggcggattgcaatacggaggccttggtcagcttgcggatggcgtggttgggctggatgactttcgaaagtcacaagaattacgggtgtggcctggctatgattacgtgggctggtctaatcacagtttcagctcgggctatgtagagatggagtttgagttcgaccgtctgcgtgcttttcaggcaatgcaggtgcactgtaacaacatgcatactttgggcgcacgactgccggggggcgttgagtgtagattcagacgagggccggctatggcctgggagggggaacccatgcggcacaatctgggaggcaacctgggggacccaagagcccgcgctgtgtccgtgccactcggaggccgcgtagctcgatttttacagtgcagattcctgtttgccgggccctggctactgttctcggagatctcctttattagcgacgttgtgaataattcttctccagcccttggaggcacgtttccgcccgctccctggtggccccctgggcccccaccaactaacttctccagccttgaactcgaacctcggggccagcagccagttgctaaggctgaaggatcaccaaccgcaatactgattggatgtctagtggcgattatactgcttcttttgcttattattgccttgatgctctggcgattacactggcgacgcctcttaagtaaggccgaacgacgagtcctagaggaagaattaaccgtgcacctaagcgtcccgggcgacactatcctaatcaataatcgcccaggcccccgggagccccccccttaccaagaacctagacctcgtggaaacccccctcattcagcaccatgcgtgccaaatggcagcgccctgttgctgagcaacccagcttatcgcctgcttctcgcgacctatgccaggccacctaggggacctggaccacccactcccgcctgggcaaaacctactaatactcaagcttatagtggagactatatggagcctgagaagcccggcgcccccctgctgccacctcctccccagaactcagtgccccactacgccgaagctgatatagtgacactgcagggcgtaactggtggtaatacctatgccgtgcccgccctgccgcccggcgcagtgggggacggtcccccacgggtcgacttccctcgatctcgcctgcgttttaaagaaaagctgggagaaggccagtttggagaggtgcatctgtgcgaagtggactcccctcaggatctcgtcagcctcgacttccccctcaacgtcagaaaaggccatcccttactggtcgctgtaaagattctgcgacctgatgctaccaagaacgcctccttctctctgttttcgagaaatgattttctgaaagaagtcaagataatgtctcgcctgaaggatccaaatatcatccgcttattgggtgtttgcgtccaggatgaccccttgtgcatgattaccgattacatggaaaacggggatttgaaccaattcctttccgcccaccagttggaagacaaggcagcagaaggcgcaccaggtgacggtcaggccgcgcaaggccccactatcagttacccgatgctactgcatgtggcagctcagatcgcctctggcatgcgctaccttgccacactgaattttgttcacagagacctcgccacacgaaattgtcttgtgggtgagaattttacgataaagattgccgacttcggcatgtccagaaacttgtacgccggcgactactatagggttcagggccgcgcagtgcttccgattaggtggatggcctgggagtgtatccttatgggaaagttcaccaccgccagtgatgtctgggcttttggggtgactctatgggaagttctgatgttgtgcagggcccaaccttttggtcagctgactgacgagcaggttattgagaacgctggcgagtttttcagagatcagggtcggcaagtctacctttcaagaccgccagcctgtcctcagggtttgtatgagctcatgctgcgttgttggtcacgagagtctgagcagcgaccccccttttcacagttgcataggtttctcgcggaagacgccttgaacaccgtgtag

SEQ ID NO: 13425 - RNA, 1737 nt, synthetic construct
  misc_feature 1..1737: note = source = /note="Description of Artificial Sequence: Synthetic coding sequence"
  source 1..1737: mol_type = other RNA
atgctgttgctgttgctgcttgcgccactgttccttagaccacccggagctggtggtgctcagacgccaaatgccacttcagaggggtgtcaaattattcaccctccatgggagggcgggatcaggtacagaggtcttactcgggaccaggtgaaggcgatcaacttcttgccagtggactatgaaatcgaatatgtgtgccgcggagagcgtgaagtggtaggaccaaaagttagaaaatgcctcgccaacggaagttggaccgatatggataccccatctagatgtgtgcgcatctgttccaaaagctacttaacactcgagaatgggaaggtattcctgactggcggggacctgcccgccctcgacggcgctcgtgttgattttcgctgtgacccagactttcaccttgttggatcctctagaagcatttgcagtcagggccaatggagcacacctaagccgcattgtcaggttaaccgcacccctcatagcgaacggagggcagtgtatattggcgccctgttcccaatgagcggagggtggcctggcggccaggcctgtcagcccgctgtagagatggcgctggaagacgtgaatagtcggcgcgacattttgccggattacgaactaaagctgattcaccatgatagcaagtgtgaccctggccaggccactaaatacctctatgaactactgtataatgatcctataaaaattattctgatgcccggttgctcttctgtttctaccctagtagccgaggcggcaaggatgtggaatctgatcgtactctcttatggctcctcttccccagccctctcaaatcggcaacgcttccctactttctttcggactcatccctctgctacccttcataacccgacgcgcgtaaaacttttcgaaaagtggggctggaaaaagatcgcaaccatacagcaaactaccgaggtgtttacatctacactagacgatctcgaagaaagggtcaaggaggcggggattgaaattacttttcgccagagtttttttagcgaccccgccgtccctgtgaagaatctcaagagacaagacgctagaatcattgtgggattattttacgagaccgaggcgcggaaagtgttttgcgaggtttacaaagaacgtctgttcggaaaaaagtacgtctggttcctgatcggatggtacgccgataactggttcaagatatacgaccccagcattaattgtaccgtggacgagatgaccgaagctgttgaaggccacataaccaccgagatcgtcatgttgaaccccgctaacaccagatctatctcaaacatgacgtcccaggagttcgtggaaaagctgaccaaacgcttgaaacggcatccagaagagaccggcgggtttcaggaggcaccactcgcctacgacgcaatatgggctcttgcactcgccttgaataagacctccgggggcggaggccgatccggagtgagattggaggatttcaactacaataaccagaccatcactgaccagatctacagggccatgaactcatctagcttcgaaggggtgagtggccacgtggtatttgacgcaagcggctccagaatggcatggactctcatcgaacaactgcagggcggctcctacaaaaagattgggtattacgacagcacaaaggatgatctcagctggagtaagactgataagtggattgtaatctcacgtacccatagccctacttag

SEQ ID NO: 13426 - RNA, 516 nt, synthetic construct
  misc_feature 1..516: note = source = /note="Description of Artificial Sequence: Synthetic coding sequence"
  source 1..516: mol_type = other RNA
atgcgacataatctaggtggcaacctcggagatcctcgtgcccgcgcagtatctgtgcccctgggagggcgagtcgctcgcttcctccagtgtcgctttctgtttgccggaccatggcttctgttcagcgagatctcatttatttccgacgtggttaataacagctctcccgctcttggaggtacttttcctcctgctccctggtggcccccaggaccaccccctaccaacttctcatcgctcgagttggaaccccggggccagcagcccgtggcgaaagctgaaggctctccaaccgccatattgattggatgtttagtcgcgataattctccttctgttgctgatcatcgcgctgatgctttggagactgcactggcgacgcctcctctcgaaggtgttagaatcccaccccaggacccgaagtccaggattagtgggcattagaccaacaccactccccgtgagccccatggcactcgttcacctctgtgaagtggactccccccaggactag

SEQ ID NO: 13427 - RNA, 2067 nt, synthetic construct
  misc_feature 1..2067: note = source = /note="Description of Artificial Sequence: Synthetic coding sequence"
  source 1..2067: mol_type = other RNA
atgttacctaccgaggtgcctcagtcccacccaggaccctctgctttattacttctgcagctgctgctgccacctacttctgcattctttcctaacatttggtccctgctggcagcaccaggatctattacacaccaagacctcactgaagaggccgccctgaacgtcactcttcaactcttcctagaacagcccccacccggccgaccccctctgcgcttggaggactttctcggtcgtaccttgttggccgacgatttgtttgccgcttacttcgggcctggctcctctcgaagattccgcgctgccctgggagaggtgtctcgcgcaaacgccgcccaggacttcttgcccactagcaggaatgacccagacctgcactttgacgctgagagactcgggcaagggcgcgcccggctagtcggcgccctacgggaaacagtcgtggccgctagagctctggaccacaccttagcccggcagcgccttggggctgccttgcacgctcttcaggatttttatagccacagtaattgggttgagttgggggaacaacagcctcacccacatcttctatggcctagacaggaactgcagaaccttgcccaggtggccgaccccacctgtagtgattgtgaggaactgagttgcccgagaaattggctgggatttaccctgctcacctctgggtattttggaacacacccacccaagccgcctggaaagtgctctcatgggggacacttcgacaggagctctagccaaccccccagaggtggcataaacaaggactctacctccccagggttcagcccacaccacatgttacacttgcaggccgctaagttggccttactcgcctctattcaggccttctctcttcttcgttctagacttggcgacagggatttttcaagactcctcgacattactcccgcttcatctctctcctttgtgctagataccacgggcagcatgggagaggagattaacgccgccaaaatccaggccaggcacctcgtggagcagcgcagaggttcccccatggaacccgtgcactacgttctcgttccatttcacgaccctggatttggaccagtgttcactacctctgatccggacagcttctggcagcaactcaacgaaattcacgcactgggtggaggggatgaaccagagatgtgcctgtcggccctccagctggcgttgcttcacaccccaccactctccgacattttcgtgttcacggatgccagccctaaggacgcctttttgacaaatcaagttgaatccttaacacaggaacgacgatgcagagtcacgttcttggtgaccgaagatacaagccgggtacaaggcagggccaggagggagattctgagcccattgcgcttcgaaccatacaaggcggtcgcccttgccagcgggggcgaagtgatctttactaaggaccagcacatacgagacgtagcagccattgtcggggaatcaatggccgctctggtcactctgccactagatccgcccgtcgtggtccccgggcaacctctggtgttctccgttgatggcctgctgcagaagattactgtgagaattcatggagacatctcatccttctggatcaagaatccagccggcgtatcccaggggcaggaggaaggaggcggcccgctcgggcatactcgccggtttggccagttttggatggtcaccatggatgatcccccacaaactggtacctgggaaattcaagttaccgctgaagatacaccgggagtcagggtacaggcacagacatctctcgattttctgttccattttggtatccctatggaagacggaccacatcctggattgtacccactgactcaacctgtggcaggtctgcagacacagctgctggtagagagccagagctggggcagctcagccgcctttctcccaagacacccttctcggggaccccgaggctgcagaacccgccccggtgcactcggcgcccgtggcacctccggagctaggtcaccacggagcttggcagtcgcacacgccgccgtccacccgtag

SEQ ID NO: 13428 - RNA, 5097 nt, synthetic construct
  misc_feature 1..5097: note = source = /note="Description of Artificial Sequence: Synthetic coding sequence"
  source 1..5097: mol_type = other RNA
atgcgactgttgtggggacttatctgggcatcttccttttttacactttccttgcagaaaccccgcttactgctgttcagtccatctgtggttcacctaggcgttccactgtcagtgggggtccagttacaggacgtacctcgaggccaagttgtgaagggaagcgtgtttctcagaaacccatcaaggaataatgtgccatgcagccctaaggtggattttacactttcctctgagagggatttcgcactcctgtcactgcaggtgcccctcaaggatgcaaagagctgtgggttgcaccagctccttcgcggcccagaggtacaactggtcgcccatagtccctggctaaaggacagcttaagccggactacgaatattcagggtatcaacttgctattttcttcgcggagggggcacttattcctccaaactgatcagcctatatacaatccaggtcagcgcgtgcgttaccgagttttcgctttagaccagaaaatgaggcccagtaccgatacaatcaccgtcatggttgagaatagtcatggcctgagggtacgcaagaaggaagtgtacatgcctagcagcatcttccaggacgactttgttatccctgacatctcagagcctggaacttggaaaatctctgcgcgctttagtgacggactagagagtaatagctctacccagttcgaagtgaagaaatacgtgctgcccaacttcgaagtcaagattactcctgggaaaccatatatactgacggtcccaggccacctggatgagatgcaattagacatccaggccaggtatatatatggcaagccagttcaaggggttgcgtacgttcgtttcggtctgctggacgaggatgggaaaaaaacctttttcagagggctggaatctcagaccaaattagtgaacggccagagtcatatctctctctccaaagcagagttccaggacgcactggaaaaactgaatatgggcatcaccgacttgcagggcctcaggctctacgtagccgccgccataattgaataccccgggggcgaaatggaagaagctgagttaacaagttggtacttcgtctctagccctttcagcctcgatctctctaagaccaaacggcaccttgtgccgggggccccctttttattgcaggccctggtgagagagatgagtggctctccggcatcaggaatcccagtgaaggtgagcgctacagtctcgtccccagggagcgtgcctgaggtacaggacattcagcagaatactgatggaagcggtcaggtgtcaatccctatcattattcctcagaccatttccgagctacaactctctgttagcgccggatccccccatccagcaatcgcccgtctgaccgtggcagctcctccaagcgggggtcctggatttcttagtatagaaaggccagatagccggcccccgagagtgggtgatacattgaacttaaatttgcgcgcagtaggtagcggagcaactttctcacactattattacatgattttatcacgtggacagatcgtctttatgaacagagaaccaaaacggaccttaacctctgtatccgtattcgttgaccaccacctcgcaccttctttttatttcgtggccttctattatcacggcgatcaccccgtggcgaattctctccgcgtggatgtgcaggccggcgcatgcgagggcaaactcgagctgtcggtggacggggccaaacagtataggaacggcgaatcagtcaaactgcatctggagaccgattcactggccctcgtggccctgggtgcacttgataccgcactgtacgctgccggatcaaagtcacacaaacctcttaatatggggaaagtcttcgaggccatgaacagctacgacctggggtgtgggcctgggggcggcgactcagcgctgcaagtgtttcaggctgccggccttgcgttctccgatggggatcagtggaccttgagccgaaagaggctgtcttgtcccaaggaaaaaacaactaggaagaagcgcaatgttaatttccaaaaggctataaacgaaaagctaggacagtacgcctctccaactgccaaacgctgctgccaagacggcgtgactagactgccaatgatgaggtcctgtgagcagagggctgcccgggtgcagcagcccgactgtcgcgaaccatttctgtcatgctgtcagtttgccgagtccctgagaaaaaaatctcgcgacaaaggacaggccggacttcaaagggctcttgagatattgcaggaagaggacctgatcgatgaggacgacatccccgttaggtctttcttccccgagaactggctttggagagttgaaactgtagatcggttccagatcctgaccctgtggcttccagactcgctgacaacgtgggaaattcatggactgtctctctctaagacaaaagggctctgcgtagccaccccagttcagcttagagtgtttagggaatttcatctgcaccttcgactgccaatgtcggtcagaaggttcgagcagctagagctgcgaccggtgctgtataattacctcgacaagaacctaactgtcagtgtgcatgtatctcccgtcgagggcctttgccttgcaggtggaggcggtctggctcagcaggtcctggtccccgccggatctgctcggcccgtggccttctccgtggtcccaacagccgctgctgcggtgagcttaaaagtggtcgctcgcggctcatttgaattccctgttggcgatgcagtctccaaagtccttcagatcgaaaaggagggcgcaatccatcgtgaggagctggtgtatgaacttaaccctctcgatcataggggcagaacattagaaatacctggtaactcagatcccaacatgatccctgatggagactttaacagttacgtgcgagtcaccgcctcagatcctctggatactctggggtcggagggcgccctgtcaccagggggggtggccagtctgctgcgtctgcctcgaggctgcggtgagcagaccatgatctaccttgcaccgacgctggcggcatcacgctatctggacaagacagaacaatggagcacattgccacctgaaaccaaggatcatgccgtggacctgatccagaagggctacatgcggatacagcagttcagaaaagcagatggttcctacgcagcttggctctccagaggctccagcacctggctgacagcatttgtgctgaaggtgctgagtctggcccaggaacaagtgggagggtctccagagaagctccaagagactagtaactggcttctcagccagcagcaggcagatggtagctttcaggatctaagccctgttattcaccgatctatgcagggcggtttggtggggaacgatgagaccgtggcattgacagcttttgtgacaatcgctctccaccacgggctcgccgtctttcaggacgaaggtgcagagcctctgaagcagcgcgtggaggccagcatcagtaaagcatcttcattcctgggagagaaagcctcggccggattactgggggcgcatgcggcagctatcactgcatacgccttaacactgactaaggcccctgcagatcttcgcggcgttgcacataacaacctaatggcaatggcacaggagactggcgataatttgtactggggttctgtgacagggtcccaaagtaacgccgtcagtcccactcctgcgccacgaaatcctagtgaccctatgccccaagctcccgctctgtggatcgaaaccacagcttacgccttgttacatctgttactgcacgaaggaaaggccgaaatggcggatcaggccgcagcgtggctgactagacaaggttcctttcagggaggtttccgcagcacacaggatactgtgatcgctctggacgccctgtcagcatactggatagccagtcacactactgaagaaagaggcttaaacgtgaccctttctagcacaggccggaacggattcaaatctcacgcccttcaactgaacaatagacagatccgcggattagaggaggaactccaatttagtctgggctctaagatcaatgtcaaggtgggagggaactcaaagggaacacttaaggtcctgcgaacttataatgtgttagatatgaagaataccacatgccaagacctgcaaattgaggtgacagtcaaggggcacgtagaatataccatggaagctaatgaggactacgaagattacgaatacgatgaactcccggcaaaagatgatcctgacgcgcctttacagccagtgactccgttacaactgtttgagggacggcggaatcgacgaaggcgagaggcaccaaaacttacgagtctgagtgacagatatgtgagccacttcgagaccgaaggaccacatgttctgctctatttcgacagtgttccgactagccgagaatgcgtaggattcgaagcagtacaagaagtcccagtcggactcgtgcagcctgcttcggcaaccctgtatgattattataacccagaaaggcgttgttcagtgttttatggtgcgcccagcaagagtaggctactggccaccctctgttccgccgaggtgtgtcagtgtgcagaggggaaatgtccgcggcaaaggcgcgccctggaaagaggtctgcaggacgaagacgggtatcggatgaagttcgcatgttactatccccgggtggagtatggctttcaagtgaaagtgctgagagaggactctcgcgccgcctttaggcttttcgagaccaaaattacccaagtgctccatttcaccaaggacgtaaaggcggccgcaaatcagatgcgcaacttcttagtccgggcaagttgtagacttcggctcgagccaggcaaggaatacctaatcatgggattagatggggctacatatgacctagaaggccatccacagtacctccttgacagtaattcatggatcgaagagatgcccagcgagagactttgtcggtccactagacagcgcgctgcttgcgcacaactgaacgattttcttcaggagtatggaacacagggctgccaggtgtag

SEQ ID NO: 13429 - RNA, 726 nt, synthetic construct
  misc_feature 1..726: note = source = /note="Description of Artificial Sequence: Synthetic coding sequence"
  source 1..726: mol_type = other RNA
atgaaattcattcttctttgggctcttttgaatttaacagtcgctctggcctttaacccggattatacagtttcctccacccctccttaccttgtctatcttaaaagcgattatctgccctgcgccggcgtcctcatacaccccttatgggtaatcaccgctgcccactgcaacctcccaaagctaagagtgattttaggcgtgactatccctgccgactctaacgagaaacatttacaagtaatcggctatgagaagatgattcaccacccgcacttctccgtcaccagtattgaccacgatatcatgcttattaagctcaaaacagaagcagagttgaacgattatgtgaagctggctaatctgccatatcagaccatatccgagaacacaatgtgctcggtcagtacatggtcttacaacgtttgcgacatctataaagaacccgattcactccagactgtcaacattagtgtgattagcaaaccgcaatgcagagacgcctataaaacctataatattaccgagaacatgctgtgcgtaggaattgtgcccggccgacgccagccctgtaaagaggtgagcgctgctccggctatttgtaacggcatgctgcaaggcattttgtctttcgccgacggttgtgtgttgcgggccgatgtgggaatatatgcaaaaatcttctattatattccttggattgaaaacgtgattcagaataactag

SEQ ID NO: 13430 - RNA, 732 nt, synthetic construct
  misc_feature 1..732: note = source = /note="Description of Artificial Sequence: Synthetic coding sequence"
  source 1..732: mol_type = other RNA
atgggacctgaggctttgagttcactgctgttactactccttgttgcctctggcgatgctgacatgaagggacactttgatccagcaaagtgtaggtacgccctcggaatgcaggaccgcacaataccggatagcgacatttctgcaagctcctcctggagtgatagcacagctgctaggcatagccgactggagagcagtgatggcgatggtgcgtggtgccccgcaggctccgtctttcctaaggaggaagagtatctccaggtcgatctccagaggctgcatctcgttgcactcgtaggcactcaaggaagacatgcggggggactggggaaagagtttagccggtcctaccggttgcgttacagtagggacggacggagatggatgggatggaaagatcgctggggacaggaagtgataagcggcaatgaggatccagaaggcgtggtgctgaaggacctcggaccccctatggtggctcggctcgttcgattttacccacgagctgatcgtgtaatgtctgtttgcttgcgtgtggagctgtatggatgtctgtggcgtgattgttcgatgggcgtgtgggcatcttggcagatggtctggtggggctggatgactctaggtcgtgtacggtcgtgtgggtctggccaggccatgaccatgtgggatggcgccaccactgcatcccccgtggcaatgtggcgctggagtctctccctgaccggttag

SEQ ID NO: 13431 - RNA, 1986 nt, synthetic construct
  misc_feature 1..1986: note = source = /note="Description of Artificial Sequence: Synthetic coding sequence"
  source 1..1986: mol_type = other RNA
atggacttagtgctgaaacgctgtctcctccacttagcagtgattggtgccctcctcgctgtaggggctacaaaagtgccacggaaccaagactggcttggcgtaagccgtcagctgcgaacaaaagcctggaataggcagctttaccccgagtggacagaggcacagcggctggactgctggcgcggcggtcaagtgtcgctgaaagttagtaatgacggtcccacccttattggcgcaaatgcttcctttagtatcgctttaaacttccccgggtcccagaaagtgctaccagacggccaggttatatgggtgaataacacaatcatcaacggctctcaggtgtggggcgggcaacctgtgtaccctcaggagacagacgatgcctgcattttcccagacggaggaccatgtccctccggcagttggtctcagaaaagaagcttcgtgtacgtgtggaagacctggggacagtactggcaggtgctgggaggccccgtgagcggtcttagcatcggcaccgggagagctatgctcggcacccatacaatggaggtgaccgtgtaccatcgaagaggtagcagaagctacgtaccgttagctcatagtagctcggccttcaccattacagaccaggttccgttctccgtctccgtgtcccagctcagggccctggacggaggaaacaaacattttctgcggaatcagccactgacctttgccctgcagctccatgacccaagcggttatttggctgaggccgacttgagctatacatgggatttcggggactcctcaggtactctgatttcacgtgctctggttgttactcacacgtacctagagcccggacctgtgactgcacaggtggtcttgcaggccgcaattcccctcaccagctgtgggtcctctccagtgcctggcaccactgacggccatagaccaactgcagaagcacctaatacgaccgcaggccaggtccccactacagaagtcgtcggcactactcccggccaggccccaaccgcggagccatctggtacaacttccgtccaggtgcccactaccgaggttattagtactgccccggtacagatgcctaccgcagagagtacagggatgaccccagaaaaggtgcctgtgagcgaggtgatgggtaccacacttgcagagatgtctactccagaggctacaggaatgactccggcagaggtgagtatagttgttctttccggaactaccgctgcacaggtaactacaaccgagtgggtcgagacgaccgctcgcgaacttcccatccctgagccagagggacctgacgcctccagcatcatgagcactgaaagcatcacaggctctctgggccccctgttggatggaaccgccaccctccgcctagttaaacgccaggttcctctagattgtgtgttgtatcgatacggctccttctccgtgacgctggacatcgtccaagggattgaaagtgctgagatactgcaagctgtaccaagcggggagggtgatgcgttcgagctcaccgtgtcctgccagggtggtctgccaaaggaagcctgtatggaaatctcaagtccaggatgccagccccccgctcagcgattgtgccagccagtgcttccctcacccgcatgccaactggtactacaccagatcttgaagggcgggagtggaacttattgcctgaacgtgtccctagctgatacaaacagtttagcagtggtctctactcaactaataatgccgggccaggaagccggcctggggcaagtccctctgattgttggtatattgttggtcctcatggctgtggtgctcgcctccttgatctaccggcggcgtcttatgaagcaggacttcagcgttccccagttgccccactcaagttcacactggctgcgactgcccagaattttctgctcttgccctattggcgagaattctccgctgctcagcggtcaacaggtctag

SEQ ID NO: 13432 - RNA, 2760 nt, synthetic construct
  misc_feature 1..2760: note = source = /note="Description of Artificial Sequence: Synthetic coding sequence"
  source 1..2760: mol_type = other RNA
atgggccctgaagccctttcctcccttctgctccttttactggttgccagcggagacgccgatatgaagggccactttgatccagccaaatgcagatacgcgctgggtatgcaggaccgcactattcccgattctgacataagtgcctcatcttcttggtcagatagtacagcagcccggcatagtcgcctggaaagtagtgacggcgatggagcctggtgccccgctggctctgtcttccccaaagaagaggagtatctgcaagttgacctgcagagactgcatttagtggctttggtcggcactcagggaaggcacgcaggcggtttgggtaaggaattcagccggagttaccgcttgaggtatagtcgagacgggagacggtggatgggatggaaggaccggtggggccaagaagtgatctcgggcaatgaagatcctgagggcgtcgttttaaaggatttgggcccccccatggtggcccgcttagtgaggttctatccgcgcgccgatagggtgatgtctgtttgcctgcgcgtggagctgtacggatgcctgtggagagatggtctcctctcttacacagcccctgtgggtcagacaatgtacctctccgaagcggtatatctcaatgatagcacgtatgacgggcataccgtgggggggttacagtacggtggactagggcaattggccgatggcgtggtcgggctggacgatttccgcaagtcacaggaactgagagtgtggcctggatacgattacgtgggctggtcaaaccattcgttttcaagcggatacgtagagatggagtttgagttcgacaggctgagagcctttcaggcaatgcaggtccactgcaataatatgcacactttgggggcaaggctgccaggtggcgtcgagtgtcgtttccggcggggccccgccatggcctgggaaggagaacccatgcggcataatttggggggaaaccttggggaccctagagcacgggccgtaagcgttccacttggaggccgggtggccaggtttctgcagtgcagatttttatttgcagggccctggttgctgttcagtgagatttcatttatatcagacgttgtaaacaattcatcaccggcactgggtggcacctttcctcctgccccatggtggcccccggggccgccccccacaaacttcagctctctcgaactggaaccacgaggtcagcagccagtcgctaaagccgaaggttcgccaaccgctattttgataggctgcctagtcgccattatcctgctactcctcttgatcatcgccttaatgctttggcgtttgcactggagaagattgctgtccaaagctgaaagacgtgtgctggaggaggaactcacggtgcacctcagtgtgccaggggatacaatccttattaataatcgcccaggccccagggaaccgcctccctaccaggaacccaggccaagaggtaatcctccgcactcagccccatgcgttcctaacggtagcgcattgctgttaagcaacccagcctaccggctgttgctggctacctatgcccggcccccccgaggaccaggaccacccaccccagcatgggcaaaacccaccaacacacaagcctattctggtgattatatggagccagaaaaaccaggcgctcctctgttacctcctccaccccaaaatagcgtcccgcattacgccgaggcggatattgtgactctacagggcgtaactgggggaaatacctatgctgttccagcactcccccctggagcagttggcgatggaccaccaagagttgactttcctaggagcaggcttcgctttaaggaaaagctcggggaggggcagtttggagaagtgcatctgtgtgaagtggatagcccccaagatctggttagcctagattttccactgaacgtcagaaagggacatccattgctggtagccgtaaagattctgcgtcccgacgccaccaagaatgcatctttctcactttttagccgcaacgacttcctgaaggaagtgaaaattatgagtcggttaaaggaccctaacattatcagattactaggcgtgtgtgttcaagacgacccgctttgcatgatcacggattacatggagaatggtgatctgaaccagtttcttagcgcccatcaactcgaagacaaagcagccgagggggcacccggggatgggcaggccgcccaagggcctactatttcctacccaatgttgctacacgtagccgcccagattgcctccgggatgaggtatttggccactctgaacttcgtacatagggacctggcgactaggaattgcctggtgggagagaattttaccataaaaatagccgactttggtatgtccagaaacctgtacgctggagactattatagagtgcaaggaagggcggtgctccccattagatggatggcctgggaatgtattcttatgggtaaatttaccaccgcttcagacgtctgggcgttcggtgtcacgctttgggaagttttaatgttgtgccgagcacaaccctttgggcaactcaccgacgagcaggtgatcgaaaacgcgggtgaattcttccgcgaccaaggaagacaagtgtatctgtcccgacctcccgcctgcccccaggggctctacgaactgatgctgaggtgctggtctcgggagtctgaacagaggcccccattctcccaactccacaggttcctcgccgaagacgcgctgaacaccgtctag

SEQ ID NO: 13433 - RNA, 216 nt, synthetic construct
  misc_feature 1..216: note = source = /note="Description of Artificial Sequence: Synthetic coding sequence"
  source 1..216: mol_type = other RNA
atgcccgctggagtcccgatgtcaacttatttgaagatgtttgcagcaagccttctggctatgtgcgccggagccgaagtcgtccacagatactataggccggatctcaccatcccagaaatccctccgaagcgaggcgagctcaaaacagagttactgggcctcaaggaaagaaagcataaacctcaggtgtcacaacaagaagaactgaagtag

SEQ ID NO: 13434 - RNA, 2685 nt, synthetic construct
  misc_feature 1..2685: note = source = /note="Description of Artificial Sequence: Synthetic coding sequence"
  source 1..2685: mol_type = other RNA
atgtcgttgcccaggtgttgcccccatccattacgacctgagggttccggtgcaatgggaccagaagcattgagtagtctgctgcttttactgctggtggcatctggggatgcggatatgaaaggccacttcgatccggccaaatgtcggtatgccctggggatgcaggaccgtaccattccagacagcgatatcagtgcatctagcagctggtctgacagcactgcagcgcggcatagtcgactggagagctcagacggagacggtgcttggtgccctgccggcagcgtcttcccaaaagaagaggagtatcttcaggtagaccttcagcggctgcacctcgtagcactcgtggggactcagggccggcacgctggcggcctcggcaaagagtttagtagatcttaccgcctgaggtatagcagagatggccggaggtggatgggctggaaagaccgctgggggcaggaagtgatttctgggaatgaagatcctgagggagttgtgcttaaagacctgggtccacccatggtagccagacttgtgaggttttacccaagagcagaccgggtgatgagcgtctgcctacgtgttgagctgtatgggtgcctgtggagggacggtctgctgagttatactgcacccgtgggccagacgatgtacttatctgaagccgtttatcttaatgacagtacatacgatggtcataccgtgggcggcttgcagtacggaggtctgggacaactcgccgacggcgtcgtgggtctcgatgactttcgcaaaagtcaagagttgagggtgtggcctgggtacgactatgttggatggtctaaccacagtttttctagcggttatgtggagatggaatttgagtttgaccgcttacgagcctttcaagcaatgcaggtgcactgtaacaacatgcatactctcggggcccgactcccaggaggggtggagtgtcgtttccgcagagggcccgctatggcctgggaaggggagcccatgcggcacaatctcggcggcaacctgggggatcctagggcccgggctgtgtccgtccctctaggtgggagagtcgcaaggttccttcagtgtcggtttcttttcgcaggaccttggctgttgttctccgagataagcttcatttccgatgtggtgaataattcgtcccctgccctcggcggcacatttccacctgccccatggtggcctccgggtccacccccaaccaacttcagcagcctggagctcgaacctaggggtcagcagcccgtcgccaaagctgagggcagtcctaccgctattctgataggttgtctcgttgctatcattttgctgctactgctgataatcgctctcatgctctggagactgcactggaggaggcttctctctaaggctgaaaggcgagtcctggaggaagaactgacggtccacttgtctgtgcccggggacactattctgattaataataggcctggaccaagagaacccccaccataccaagaaccccgtcctaggggcaatccccctcattcagcaccgtgcgtcccaaacggctctgcctatagcggtgattacatggaaccggagaagcccggcgcccccctgctcccaccacccccccagaacagtgtcccgcattatgcagaagcggatatagttactcttcagggtgtgaccggtggtaacacgtatgctgtgccagcactcccaccaggggccgtgggtgacggcccccctcgggtggactttcctcggtcccgtctacgcttcaaagaaaagttgggtgaaggtcagtttggcgaagtccacctttgtgaagtcgattctccacaggaccttgttagcctcgatttccccctaaacgtgcgaaaaggccaccccctgttggtcgccgtgaaaattcttaggcccgatgcgaccaagaacgcaaggaatgatttcctgaaagaagttaagatcatgagccggttaaaggaccccaatatcatcaggctacttggagtttgcgtgcaggatgatcccctttgtatgatcaccgactacatggaaaatggcgacctcaaccagtttctgtcagcacatcagctcgaagataaagctgctgaaggggcccccggggacggccaagccgcccagggacccactatttcatatcctatgctgttacacgtagcagctcagattgcatcggggatgcgatacctggctacattgaatttcgtgcacagggatcttgcaacccggaactgtctggtgggtgaaaatttcactataaagattgctgacttcggtatgtctcggaacctgtatgccggcgactattaccgagtgcagggtcgtgctgtgctgccaataagatggatggcctgggagtgcattctcatgggaaagtttacaaccgcatctgatgtgtgggcatttggcgtaacactttgggaagtgctgatgctctgtagggcccagccgtttgggcagctgaccgatgagcaggttatcgaaaacgctggagagttctttcgggaccagggcaggcaggtgtatctgtcgcgtcccccagcatgtccccagggactctatgaactcatgttgaggtgctggagtcgggagagcgagcagcgaccgccttttagccaactgcatagattccttgccgaggacgccctgaataccgtgtag

SEQ ID NO: 13435 - RNA, 273 nt, synthetic construct
  misc_feature 1..273: note = source = /note="Description of Artificial Sequence: Synthetic coding sequence"
  source 1..273: mol_type = other RNA
atgcagcttttcttactcctatgtctcgtgctgttgagcccacagggagcgtctctgcacagacatcatccccgagaaatgaagaagagggttgaagatctccatgttggagcaactgtcgccccaagctcaagacgagatttcacctttgatctatatcgcgctctcgcatctgctgccccctcccagtctatatttttctcccccgtatccatctctatgtccctggccatgctctccctgggagccgggagctctacaaagatgcagtag

SEQ ID NO: 13436 - RNA, 618 nt, synthetic construct
  misc_feature 1..618: note = source = /note="Description of Artificial Sequence: Synthetic coding sequence"
  source 1..618: mol_type = other RNA
atgatgcgaactctaattacaacccaccctttgccattgttgctgctgccccagcaattgctgcaattggttcagtttcaggaggtggataccgactttgatttccctgaggaagacaaaaaagaggaattcgaggagtgcctggaaaagtttttcagtaccggtcccgcgagacccccaactaaggagaaagtgaaaagaagagtgctgatagaacccgggatgcccctaaatcacattgaatattgtaatcatgagattatgggcaagaatgtctattataaacatcgctgggtcgcagaacattacttcctgctgatgcaatacgatgaactgcagaaaatttgttacaatagattcgtgccatgtaagaacggcattcggaaatgtaacaggtccaagggacttgtcgagggcgtgtattgcaaccttaccgaagcctttgaaatcccggcttgcaagtacgaaagcttgtacaggaagggatacgtgctaataacatgtagctggcagaatgagatgcaaaaaaggataccccataccatcaacgatcttgtggaaccccctgaacatcggtcttttctctctgaagacggtgtatttgtaatttccccctag

SEQ ID NO: 13437 - RNA, 30 nt, synthetic construct
  misc_feature 1..30: note = source = /note="Description of Artificial Sequence: Synthetic coding sequence"
  source 1..30: mol_type = other RNA
atgtccttctccgcaactattctgttttag

SEQ ID NO: 13438 - RNA, 600 nt, synthetic construct
  misc_feature 1..600: note = source = /note="Description of Artificial Sequence: Synthetic coding sequence"
  source 1..600: mol_type = other RNA
atgtctttcagtgcaacgatcctgttttccccaccatctggatctgaagcaaggtgctgttgctgcgcgtgtaaaagcgagacaaacggtggtaataccggatctcagggagggaacccaccccccagcacgcctatcacagtcaccggccacggactggccgtgcaatcaagcgaacaactactacacgtcatataccaaagggttgataaggccgtcgggctggcagaagccgctcttggacttgccagggctaataacgaactgcttaaaagattacaggaggaagtgggcgacctccggcaggggaaggttagtataccagacgaagacggagaatccagggctcatagcagcccacctgaagagccaggtcccctaaaagaaagccctggggaggcgttcaaagcactcagcgcggtggaggaagagtgcgattcagtgggttccggcgtacaagtggtgatcgaggagcttcggcaacttggcgctgcctcagtcggtcccggaccccttgggtttcctgccacccaacgagatatgcgactgccaggatgtaccctagccgcgtcagaagccgccccattactgaacccttag

SEQ ID NO: 13439 - RNA, 633 nt, synthetic construct
  misc_feature 1..633: note = source = /note="Description of Artificial Sequence: Synthetic coding sequence"
  source 1..633: mol_type = other RNA
atgagcgctggaaaaatgatgcgcacattgatcactacccacccgctgccactgctcctcctgccccaacagctgttacagctcgtccaatttcaagaggtggacaccgactttgattttccggaggaagacaaaaaagaggaatttgaggagtgccttgagaagtttttcagcacgggtccagcacgccccccaaccaaggaaaaggtgaaacggagagttttaatcgaacctggaatgcccctcaatcatatcgaatactgtaatcacgagataatgggcaaaaacgtgtattacaaacatcggtgggtcgccgagcattattttcttctgatgcaatatgacgaactgcagaaaatatgctacaatcgatttgttccttgcaaaaatggaattcgcaagtgcaatcgctccaaaggcctagttgaaggagtttactgcaatcttaccgaagcttttgagatccctgcatgcaaatatgagtctctataccggaaagggtacgtgctgattacatgctcttggcagaatgagatgcagaagcggattccccataccattaatgatctggtagagccacctgagcatagaagttttctttccgaggacggtgtgttcgttatctccccctag

SEQ ID NO: 13440 - RNA, 1221 nt, synthetic construct
  misc_feature 1..1221: note = source = /note="Description of Artificial Sequence: Synthetic coding sequence"
  source 1..1221: mol_type = other RNA
atgcagctgtttctgttgctgtgccttgtcctcctaagtccccaaggggcttcgctccatcgacatcaccctcgagaaatgaagaaacgtgttgaagacctccatgtgggcgctactgtcgctccgagttccaggagggacttcaccttcgatctctaccgcgcgctcgcatccgcagcacccagtcaaagtattttcttctctcccgtgtcaatctcgatgtcgctagccatgttgagccttggcgccggttcgagtaccaagatgcagatactggagggattgggcctcaatcttcagaagtcttccgagaaggagctgcacagaggcttccagcaactgcttcaggaattgaatcagcccagggatggctttcagctcagtctgggcaatgccttatttaccgatctggtcgtggacttgcaggatacttttgtgagcgcgatgaagacactatacctcgcagacacattcccgacaaacttcagagactccgccggagccatgaaacaaatcaacgattacgtcgccaagcagactaaaggaaagatcgtcgatctgctgaagaatctggactccaacgcagttgtgattatggttaactatattttcttcaaggctaaatgggagacctcatttaaccacaagggcactcaggaacaggatttttatgtgacctccgaaactgtggttagggttccaatgatgtccagggaggatcagtaccattacctcctcgatcgtaatctgagctgtagggttgtgggtgttccgtatcagggcaacgcgactgcccttttcattcttccaagcgaaggaaagatgcagcaagttgagaatggcctgagcgaaaagacattaagaaagtggctgaagatgttcaagaagcgacagttagagttgtatctccccaagttttccatcgagggatcctatcagctcgagaaggtgctcccttccctcggcataagcaatgttttcacatctcacgctgacctctcggggatttctaaccatagcaacatccaggtgtctgaaatggtacataaggccgtggtcgaggttgatgagagcgggacacgagcggccgccgctaccgggacgatttttaccttcaggtcagctaggctgaactcacaaagactcgtttttaacagaccctttctgatgttcatagtagacaataacatcttattcctgggcaaggtaaatagaccctag

SEQ ID NO: 13441 - RNA, 600 nt, synthetic construct
  misc_feature 1..600: note = source = /note="Description of Artificial Sequence: Synthetic coding sequence"
  source 1..600: mol_type = other RNA
atggagaccttcccactcctcctcctgagcctgggactggttctcgcggaggcgtccgagagcactatgaagatcatcaaagaagagtttaccgacgaagaaatgcagtatgacatggccaagtcaggacaagaaaagcaaaccattgagatactgatgaaccccattctcttggtgaagaacacatccctgagcatgtccaaagacgacatgtcaagtaccctgctgacattccgaagcttacattacaacgatcctaaagggaactcaagtggaaatgacaaagagtgttgtaacgatatgactgtgtggcgaaaggtttctgaggcaaacggatcctgcaaatggagtaataatttcattcgttccagcaccgaagtgatgcgaagagtgcatagggccccgagctgtaaattcgttcagaatccaggcattagctgttgcgagtctctggaactggagaacacagtgtgtcagtttacaacaggaaaacagttccccagatgtcaataccactccgtaacaagcctcgagaagatattaacagttcttactggccacagtctcatgagctggttagtttgtggctccaaactatag

SEQ ID NO: 13442 - RNA, 411 nt, synthetic construct
  misc_feature 1..411: note = source = /note="Description of Artificial Sequence: Synthetic coding sequence"
  source 1..411: mol_type = other RNA
atgtccttctccgccacaattctcttttctcctcctagcggttcagaggcaaggtgctgttgttgtgcctgcaagtcagagacaaatggcggtaacacaggctcccagggaggaaatcctccgccttccacaccaatcaccgttactgggcacgggttggcggtgcaatcctctgaacaactgttgcacgttatttatcagcgggtggataaggccgtgggcctcgcggaagccgcactggggctggcacgagcgaacaacgagctcctcaaaagactgcaagaagaagtcggtgatctcagacagggtaaggtgtcaatacccgatgaagacggcgaaagccgggcacattcctcccctcctgaagagcctggcccactcaaagaaagtcctggtgaggcttttaagtag

SEQ ID NO: 13443 - RNA, 252 nt, synthetic construct
  misc_feature 1..252: note = source = /note="Description of Artificial Sequence: Synthetic coding sequence"
  source 1..252: mol_type = other RNA
atgtctttttcagctaccattctgttttcccccccttccggatcagaggcacgatgttgctgttgcgcatgcaaatcagaaacaaatggcggaaacactggttctcaaggtggtaatcctcctccttccacccccattactgtgaccgggcacggcctggctgtgcagtcttcggaacagctcttgcatgtgatctatcagcgtgtagataaagctgtcggattagctgaggcggcgcttggcctggcatag

SEQ ID NO: 13444 - RNA, 30 nt, synthetic construct
  misc_feature 1..30: note = source = /note="Description of Artificial Sequence: Synthetic coding sequence"
  source 1..30: mol_type = other RNA
atgtcgttctccgccaccatcctgttttag

SEQ ID NO: 13445 - RNA, 519 nt, synthetic construct
  misc_feature 1..519: note = source = /note="Description of Artificial Sequence: Synthetic coding sequence"
  source 1..519: mol_type = other RNA
atgcagctatttttactactttgccttgtacttctctctcctcagggtgccagccttcatcgccatcaccccagggaaatgaagaagcgtgtcgaagatctccatgtcggggccacagttgcgcccagttcaaggagggactttaccttcgacctgtatagagctctagcctccgcagcaccatctcaatcgatttttttttctcctgtgagtatctctatgagtttggcaatgctgagcctgggggctggcagcagcactaagatgcagattctggaagggttagggctgaatttacaaaagtcaagtgagaaagagcttcacaggggctttcaacagcttctgcaagagctgaatcaaccccgcgatggtttccagctgagccttggaaatgcacttttcacggacctggtggttgatttgcaagacacgttcgtttctgcgatgaaaactctctacctcgccgacacgttcccaactaactttcgggacagcgccggtgctatgaaacagatctag

SEQ ID NO: 13446 - RNA, 615 nt, synthetic construct
  misc_feature 1..615: note = source = /note="Description of Artificial Sequence: Synthetic coding sequence"
  source 1..615: mol_type = other RNA
atgcctggcggaaagaaagtggctggtggtggttcttcaggggccacccctacttcggctgccgcaactgcgccatcaggcgtgagacgccttgaaacttctgaggggacttctgcccagagagacgaagagcccgaggaggagggggaggaggatctacgtgatggtggtgtcccattttttgtaaatcgcggggggctaccggttgatgaggccacatgggaaaggatgtggaaacatgtcgccaaaatccacccagacggagagaaagttgcccaacgcatcagaggcgctacagacctaccaaaaattcccattccttccgtgcctacgttccagccgtcaacaccggtaccagaaagacttgaggccgtccagcggtacattcgtgaactgcagtacaatcacactggcacccaattcttcgagattaaaaagagcagacccctcacgggactgatggacctggcaaaggagatgaccaaggaagccctgccaattaagtgcctggaagctgtcatcctgggaatgtatcccagctctccagagggcgaaggatccggattattatgggcttctgctagctgcagtgaaagtgagggcggggtggggtag

SEQ ID NO: 13447 - RNA, 1221 nt, synthetic construct
  misc_feature 1..1221: note = source = /note="Description of Artificial Sequence: Synthetic coding sequence"
  source 1..1221: mol_type = other RNA
atgcagctctttttgcttctgtgtctggtgcttctctcaccccagggtgcatctctacaccgtcatcatccgcgtgagatgaagaaacgcgtcgaggatttgcatgttggggcgacagtggccccttcctcgagaagggacttcacattcgacctatacagggcgcttgccagcgctgccccgagtcaatccattttcttttccccagtctccatctccatgagcctcgcaatgctgtctcttggcgcaggatcttccacaaagatgcaaattctagaaggtcttggactaaacctgcagaaaagtagcgaaaaagaactacacaggggatttcaacaactgctgcaggaactgaaccagccacgggatggatttcagctctcattaggaaatgcattattcaccgaccttgttgtggacctgcaggacacatttgtcagcgccatgaaaactttgtacctggcggataccttccccaccaacttcagggacagtgccggagcaatgaaacagattaatgactatgtcgccaaacaaactaagggtaaaattgtagatctactgaagaatctagattccaatgctgttgttattatggttaattatatcttcttcaaggctaaatgggaaacgtcatttaaccacaaaggcacccaggagcaggatttctacgtcacttcagagacagtagtgcgcgtccccatgatgtcccgagaggaccagtaccactatctgctggaccggaatttgtcatgccgagtagtaggcgtgccataccagggcaatgctacagcactgttcattctgcccagtgagggaaagatgcagcaggtggaaaatgggctcagcgagaagacattacgtaagtggctgaaaatgtttaagaagagacagctggaactataccttccgaagttcagcattgagggaagctaccagctagagaaggttctcccttcgctggggattagcaacgtttttaccagccacgctgatctttctggcattagtaaccactccaatatccaggtatccgaaatggtgcacaaagctgtcgttgaagtggatgagagtggtacaagggcggccgcggccacaggaactatttttactttccggtctgctcgtttgaattcccagaggttagtattcaatcggccattcctgatgtttatcgtcgacaataacatcctgtttctaggcaaggtgaaccgcccctag

SEQ ID NO: 13448 - RNA, 3837 nt, synthetic construct
  misc_feature 1..3837: note = source = /note="Description of Artificial Sequence: Synthetic coding sequence"
  source 1..3837: mol_type = other RNA
atgcgcctgttgctgctggtgcccctgctcttggcccccgctcctggaagtagcgcacccaaggtcagaagacaatccgatacctggggcccgtggtcacagtggtcaccatgtagcagaacatgtggcgggggtgtgtccttccgcgaaagaccgtgctattcccaaaggcgggatggtggttcttcatgtgttgggccggcccggagccacaggtcatgcagaaccgagtcttgcccagatggcgctcgcgatttcagagccgaacaatgcgctgagtttgacggggctgagtttcagggacgacgctacaggtggctaccgtactattcagcaccaaacaagtgtgaattaaactgtataccaaagggagaaaacttttactacaaacatcgcgaagctgtggtggacggcacaccttgcgagccaggtaaacgagacgtctgtgtagacggaagttgcagagttgttggatgtgaccacgagcttgatagttcaaagcaggaggataaatgcttacggtgcggcggggatgggacaacctgctaccccgtagccgggacttttgacgctaatgatctgtcccggggctataatcagattttgatcgtgcctatgggtgctacatccatactgatcgacgaggctgccgcctccagaaacttcctggccgtcaagaacgtgaggggcgaatattacctaaatgggcactggacgattgaagccgctagggccctcccagccgcttcaaccatcctccactatgagcggggtgccgagggcgacctcgcaccggaaaggctgcatgcacgaggcccgacgtctgagccgctggtgatcgagctgatctctcaggagcctaatcctggagtgcattacgaataccacctcccattacgccgccctagtccaggcttctcatggtctcacgggtcctggtcagactgctccgctgagtgtgggggcggccaccagagccggctggtcttctgcactatagaccacgaagcttaccctgaccatatgtgtcagaggcaacctagaccggccgaccgcaggtcttgtaacctgcacccatgcccagagacaaaaagatggaaagcaggcccctgggcaccatgctccgcctcctgcggtggcgggtcccagagcaggtccgtctattgtatttctagtgatggagctggcatacaggaggcggtcgaagaagccgaatgtgctggtttaccagggaagccaccggcaattcaggcctgtaatctccagagatgcgctgcatggtctccagaaccatggggtgagtgtagcgtcagttgcggcgtgggagtccgaaagcgttctgtgacctgcaggggtgagagaggctccctattacacactgctgcgtgtagccttgaggatagacctcccttaacagaaccatgtgtccatgaggactgccccctccttagtgaccaggcatggcacgtgggtacatggggcctgtgtagcaagtcatgtagctcaggcactcgccggcggcaggtgatctgtgcaatcggtcctccttcccattgcgggagtttgcagcactcgaagcccgtagacgtcgaaccatgcaacactcagccatgccacctccctcaggaggtgccatccatgcaggacgtgcatacgccagcctccaacccctggatgcccctgggaccgcaggaatctccggcgagtgactcacgtggtcaatggtgggcagcgcaagaacacccatctgctcgcggtgatcacaggggcgaacgaggcgatcctaggggcgatcaagggacacatttaagcgccctcggacctgcaccttcgctgcagcaacccccctaccagcagcccttaagaagcgggagtggaccccacgactgtagacactccccacacggctgctgcccagacgggcacaccgcttctcttggcccacagtggcagggttgccccggagcaccttgccagcaatcccggtacggatgttgtcccgatcgggtaagcgtggcggagggaccacaccatgccggatgtacgaaatcatacggtggagacagcactgggggcatgccgaggtcaagagctgtcgccagcactgtgcataacacacatcagccacaggcacaacagaacgaacctagcgaatgtagaggctcgcagtttgggtgttgttatgacaatgtcgccaccgccgcggggccactcggagagggctgtgtgggtcagccgagccatgcatatcccgtccgttgtctgctcccatcggcccatggctcttgtgccgactgggctgctcgatggtattttgttgcctccgtgggacagtgcaaccggttttggtatggaggttgtcacggaaatgccaacaatttcgcgagcgagcaggaatgtatgagcagttgccagggaagcttgcatgggccaagacgcccacagcctggagcttcaggtcggtcaactcataccgatggtggcggttcttctcccgcgggcgagcaggagccttcacagcatagaacaggggcagccgtgcagcggaagccctggccctctggtggcctgtggcgccaggatcagcagcccggtccaggtgaagctcctcatacacaagccttcggagaatggccctggggccaagaactgggcagccgcgctccaggccttggcggggacgctggttcccctgcaccccctttccactcctctagctaccgcatctctcttgccggagtggaaccatcgctcgtgcaagccgccctgggacagctggtgagattgtcttgttctgatgataccgctcctgagtctcaggctgcctggcagaaggatgggcaacccattagttcagatcgtcacaggctccagtttgatgggtccctcattatccatccgctccaggccgaagatgctgggacgtattcatgcggctctactagacctggtagggacagtcagaagatccagcttcgaattatcggtggtgacatggcagttttatcggaagcagagttgagtcggttcccgcagccaagggatcctgcccaggatttcggccaggctggcgccgctggacctttaggagccattcctagctctcatccgcagcctgccaatcgcttacgccttgatcagaatcagccgagggttgtggatgcatccccaggccaacggatcaggatgacttgtcgcgcagaaggcttccctccccctgcaatcgagtggcagcgggatggacaacccgtgtcatcccctcgccatcagttacaaccggacggatctctcgtgatttcaagagttgccgtggaagatggcggattctacacttgcgtggcttttaacggacaggaccgtgatcagagatgggtgcagctgagagtgctcggggagctgactatctccggattgccaccaaccgtgacagtgcccgaaggcgacaccgctaggctgctatgcgtagtagcgggagagtccgtcaatatacggtggagtcgaaacggactgcccgttcaggcggacgggcatagggtgcaccagagtcccgacggaacccttcttatctataatctgcgagctcgcgacgaggggtcatatacttgcagcgcatatcagggatcacaagcggtgagtcgttccaccgaggttaaagtggtctcgccagcccctacggcgcagcctagagatcccggccgtgactgtgtggatcagccggagctggctaactgcgacctgattcttcaggcacagttgtgcggaaatgagtactacagttccttctgctgcgcttcttgctccagatttcagccccacgcccaacctatttggcagtag

SEQ ID NO: 13449 - RNA, 261 nt, synthetic construct
  misc_feature 1..261: note = source = /note="Description of Artificial Sequence: Synthetic coding sequence"
  source 1..261: mol_type = other RNA
atgcaactgttcctcctactgtgtctcgtgctgttgagcccacaaggtgcatctttgcacaggcatcatccccgcgaaatgaagaagcgcgtggaagatctgcatgtcggcgccaccgtagccccctcatctaggcgcgattttaccttcgacctttaccgagctctcgctagcgccgcaccgagtcagagtattttctttagtccagtatctatttccatgagcctcgcaatgcttagtctcggcgccggtagctcatag

SEQ ID NO: 13450 - RNA, 906 nt, synthetic construct
  misc_feature 1..906: note = source = /note="Description of Artificial Sequence: Synthetic coding sequence"
  source 1..906: mol_type = other RNA
atgcaactgttcctcctgttgtgcctagtgctgctctcaccgcagggggcctctctccacagacaccatccaagagagatgaagaagcgagttgaagacctgcatgtcggagccacagtcgccccatcatctagaagagattttacatttgacctctaccgcgcattagctagcgctgcgcccagccaatccatcttctttagccctgtctctattagcatgagcttggcgatgctcagtttgggcgccgggtcctccaccaagatgcagattttagagggcctgggtttaaatttgcagaaaagctctgaaaaagaactgcaccgaggttttcaacagctccttcaagagctcaaccagcccagggatgggtttcagttgtctttaggaaacgcactatttacggatttggtcgtggatcttcaggatacattcgtcagcgcgatgaaaaccctctacctcgccgacaccttcccaaccaacttcagagattccgccggagctatgaagcagattaacgactatgtggctaagcaaacaaagggcaagattgtggatctgctcaagaaccttgactccaacgcggtcgtcatcatggtcaactacatattctttaaagccaagtgggaaacttctttcaaccataaaggtactcaggagcaggacttttacgtgacctcagagacagttgttcgggttcctatgatgtctagagaagatcagtaccactatttgctggatagaaatctaagctgcagggtggtcggtgtaccatatcagggtaatgccacagccctttttattttgccttctgaaggaaagatgcagcaggttgaaaacgggctctccgaaaaaacactcagaaagtggctaaagatgttcaaaaaacggtacttccaaacttag

SEQ ID NO: 13451 - RNA, 411 nt, synthetic construct
  misc_feature 1..411: note = source = /note="Description of Artificial Sequence: Synthetic coding sequence"
  source 1..411: mol_type = other RNA
atggagacctttccattgcttcttctaagcctggggctcgttctagctgaagcaagtgaaagcaccatgaagataataaaagaggagtttacagacgaggaaatgcagtacgatatggccaaaagcggacaggaaaaacagactatcgaaatattaatgaacccaatcttgctggtaaagaatacatcactgtctatgtctaaagatgatatgtcctcgactcttctgaccttccggtctcttcattacaatgacccaaaaggaaactctagcggtaatgacaaggagtgctgtaatgacatgacggtctggcgcaaggtgagcgaagctaatgggtcatgcaaatggtctaacaattttatcagaagttctaccgaggttatgcggcgagtccaccgagccccttcatag

SEQ ID NO: 13452 - RNA, 1221 nt, synthetic construct
  misc_feature 1..1221: note = source = /note="Description of Artificial Sequence: Synthetic coding sequence"
  source 1..1221: mol_type = other RNA
atgcaactattcctgctgttatgtttggtcctcttgagcccccaaggcgcctccctccatcgacaccacccacgcgaaatgaagaaaagagttgaagatttgcacgtgggcgccacagtcgctccctcatctaggagggatttcacctttgacctgtatcgcgcgctggctagtgccgcccctagccagtcaatcttttttagcccagtgtcgatctcgatgtctcttgccatgctgtctctaggggctggatcttcaactaagatgcagatactggagggcctgggtctcaacctccagaagagttctgagaaggagctgcataggggctttcagcagctgctgcaagagcttaatcagccaagagatgggtttcagctcagtctcggtaatgcactgttcaccgacctcgtcgtggatcttcaggataccttcgtgtccgccatgaaaactctgtacctggccgatacattccccactaactttagggacagtgccggtgctatgaagcagatcaatgattacgtggctaaacagacgaaaggtaaaattgtcgacctgttgaaaaatctggattctaacgccgttgtgattatggtgaactatatatttttcaaagccaagtgggagacctcctttaaccacaagggaacccaggagcaagacttctatgtgacatctgaaaccgttgtgagggtaccgatgatgagccgggaagaccagtatcattatctgcttgatagaaatctgagctgccgggtggttggcgtcccctatcagggcaatgcaaccgccttgttcatactccccagtgaaggtaagatgcaacaggtagagaatggtttgtcagaaaaaacactgcggaaatggctgaaaatgtttaaaaagagacagcttgaactctacctccctaaattcagtatcgaagggtcctatcaactggagaaagtcctcccgagcttggggattagcaatgtatttacaagtcacgccgacctgtccggtatctctaaccacagcaatatacaagtgagcgaaatggtacataaggccgtcgtggaggttgatgaatccgggacacgggctgctgcagcaactggcacaatctttacttttcgatcggctcggctcaactcccaacggcttgtattcaaccggccttttctgatgtttatcgtcgataacaacatcctgtttctgggcaaagtcaaccgcccttag

SEQ ID NO: 13453 - RNA, 618 nt, synthetic construct
  misc_feature 1..618: note = source = /note="Description of Artificial Sequence: Synthetic coding sequence"
  source 1..618: mol_type = other RNA
atgatgcgcacccttattaccacccatcctcttcccctcttacttttaccacagcagctgctacagctagtgcaattccaagaggtcgacacggacttcgatttccccgaggaggacaagaaggaagaatttgaagagtgcttggagaaattttttagcaccgggcctgcacgcccccctactaaagagaaagttaagagaagagttctgatcgaacccggtatgcccttgaatcatattgaatactgtaatcacgagattatggggaagaacgtatactataagcacagatgggtagctgaacattatttcctactaatgcagtatgatgagttgcagaagatatgttacaacaggttcgtcccctgtaagaacggtatccgtaagtgcaaccgctcaaaggggctcgtggaaggagtctattgcaatctgacggaggcgtttgagattcccgcttgtaagtatgagtctctatacaggaaaggatacgtcctgatcacttgctcgtggcaaaacgaaatgcagaaacggatcccccacactatcaatgatctggttgagccacccgagcatcgaagttttctctcagaggacggagtttttgttatttcaccatag

SEQ ID NO: 13454 - RNA, 240 nt, synthetic construct
  misc_feature 1..240: note = source = /note="Description of Artificial Sequence: Synthetic coding sequence"
  source 1..240: mol_type = other RNA
atgtcatttagcgccacaattctattttcccctccctctggatctgaagctaggtgctgttgctgcgcttgcaagtccgaaactaacggcgggaacacaggctcccagggcggcaaccccccccctagtacccccattacggtgaccggccatggactcgctgtgcagtcttctgaacagctactacatgtcatctatcaacgcgtggacaaggccgtcggcctcgcagaagccgcgtag

SEQ ID NO: 13455 - RNA, 618 nt, synthetic construct
  misc_feature 1..618: note = source = /note="Description of Artificial Sequence: Synthetic coding sequence"
  source 1..618: mol_type = other RNA
atgatgcgtaccttgattacgacacatcccctgccgctactcttgctgccacaacagctgttgcaactggttcagtttcaggaggtggataccgatttcgattttccggaagaagacaaaaaagaagaatttgaggagtgtcttgagaagttcttctcaaccgggcccgcccggccacccactaaggagaaagtaaagcgacgggtgctcattgagcctggaatgccactcaatcacatcgagtactgtaatcatgaaattatgggcaaaaatgtgtattacaagcatcgatgggttgccgaacactatttcttgttgatgcaatatgatgagttacaaaaaatctgctataataggttcgtaccttgtaaaaacggcataagaaagtgtaacagatccaagggactggtagaaggtgtgtattgtaatcttacagaggcctttgagattccagcttgcaagtatgagagtctgtacagaaaaggttacgtcttaatcacgtgctcctggcagaatgagatgcagaagcgaattcctcatacaattaatgatctggtcgaacctcccgagcatagatctttcctttctgaagatggtgtttttgtcatctccccttag

SEQ ID NO: 13456 - RNA, 3789 nt, synthetic construct
  misc_feature 1..3789: note = source = /note="Description of Artificial Sequence: Synthetic coding sequence"
  source 1..3789: mol_type = other RNA
atgaggctgctcctactcgtccccctcttgttagcacccgcacctgggtcaagtgccccgaaggtccgacggcaatcagatacatggggaccctggtcccagtggtctccttgctcgagaacgtgtggcggcggcgtttcattccgtgaacggccttgctactcccagagacgtgacggcggttccagctgtgttggccctgccaggagtcaccgctcctgtaggaccgagagttgcccagacggcgccagggacttccgagctgagcaatgtgccgaattcgacggagctgagtttcagggacgccgctatcgctggcttccctactactctgcccccaacaagtgtgaattgaactgtatcccaaaaggtgagaatttttactataagcatcgggaggccgtcgttgacgggacaccctgtgaacccggtaagagagatgtctgcgtggacgggtcatgcagagtggtaggatgcgatcacgaattagactcatcaaagcaggaagataagtgcctgaggtgcgggggagacgggactacatgctaccctgtggcgggcacctttgatgccaacgatctgtctagggggtataatcagatcttgattgtgcccatgggggcaacttcaatcctgattgacgaagccgccgcatcaagaaactttctggctgttaaaaacgtcaggggcgaatattatctcaatggacattggactattgaagccgcaagagctttaccagctgcctccacaattctccactacgaacgtggggctgaaggtgatctggcaccagagaggctgcacgcccggggtcccacctcagaacccttggtgatagaactgatttcccaggagccaaaccccggggttcactacgagtaccacctgccattacgtagaccttctcccggtttcagctggtcacacgggtcttggtccgattgctccgccgagtgcggcggcggtcaccagtctagattagtcttctgcaccatagatcacgaagcctatcctgaccacatgtgccagcggcagcctcgccccgctgatcgaagaagctgtaacctgcatccctgccccgaaaccaagaggtggaaggcaggcccatgggcaccctgcagcgcgtcctgtggaggagggtcacagtctcggtccgtgtactgtatctcctctgatggcgccgggattcaggaagcagtcgaagaagctgagtgcgccggactgccaggaaagccgccggctatacaggcttgtaatctccagaggtgtgccgcatggagccccgagccctggggggaatgtagcgtctcttgtggcgtcggagtacgcaaacgttctgtgacatgtcgcggtgaacgcggaagtctcctgcataccgctgcgtgctctctagaggacaggccccctctgaccgagccttgcgtacacgaggattgccccttgttgagcgaccaggcatggcacgtggggacctggggactttgcagcaaatcctgcagctcgggcaccaggcgtaggcaagttatctgcgcaatagggcctccgtcccattgcggctctttacagcatagtaaacccgttgacgtggaaccatgtaatacacagccctgccacctcccacaggaggtcccatcaatgcaggacgtacatacccctgcgtcaaacccatggatgccactcggaccacaagaaagccccgcgagtgactccaggggccaatggtgggcagctcaggaacatccaagcgcccgaggcgatcatcggggggagcgcggggacccaagaggggaccaaggaacccatttgtccgcactcggcccagccccgtcactgcagcagccaccctaccagcagcccctgaggagtggaagcggaccgcacgactgccgacactctccacacggatgctgtcccgacggacataccgcatctttggggccccagtggcaaggctgtccaggagccccttgtcagcagtctaggtacggttgctgtccagatcgcgtcagtgtagctgagggccctcatcacgctggttgtactaagtcctacgggggagattccacaggcggcatgcctcgctctcgggctgtggcctccacagtgcataatacacaccagccacaagcccagcaaaacgaaccatccgaatgtcgcggatctcagtttggctgttgttacgataatgtagctacagccgctggcccattaggagaaggatgcgttggccagccttctcatgactgggccgcccggtggtacttcgtagcaagcgtggggcagtgcaatcgtttctggtacggaggatgtcacggaaatgccaacaattttgctagcgaacaggagtgtatgtcatcatgccagggatccctccacggaccgagaaggccacagcccggcgcaagcggccgtagtactcatacagacggcggcggcagcagcccagcaggagagcaggagccctcacagcataggactggagcagcggtgcaacgaaagccgtggccgtccggaggcctttggcggcaagatcagcaaccagggcccggggaagcgcctcacactcaggcattcggcgaatggccatggggacaggagcttgggtcaagggcacctggtttaggcggcgacgccggctcccccgctcctccattccattcttcttcttacagaatctctctggctggagtagaaccatcgctcgttcaagctgcgcttgggcagctggttcgcctgtcatgtagtgacgacaccgcacctgagagccaagctgcatggcaaaaggacggccagcccatcagttccgaccgtcatcgactgcagttcgacggcagcttaattattcaccccctacaggctgaagacgctgggacatattcctgcggctcgaccaggcctggccgagactctcagaagatacagttaagaatcatcggcggggatatggccgtgctcagtgaagcagagctctcccgattccctcagccccgcgaccccgcgcaggacttcggacaggctggtgccgccggtccgctcggtgccatccctagcagccatccccagcccgccaacagactgaggcttgatcagaaccagccgagggtcgttgacgctagtccaggacaaaggattcggatgacctgcagagcggagggcttccctcctccagctatcgagtggcagagggatggacaaccggtttcaagccccaggcatcagctacaacctgatggctcactggtaattagccgcgtggccgttgaggacggtggcttctatacatgcgttgccttcaatggtcaggacagagaccaacgatgggtgcagctgcgggtgttgggcgagttgacaatttctggcctgcctcctaccgtcaccgtgcccgagggcgacaccgcgaggctgctgtgcgttgtggccggggaatctgtcaatattcgctggagtcggaatggactgcccgttcaggctgacggacatagggtgcaccaatcccctgacgggactctcctgatttacaacttgcgagccagagacgaggggtcctacacctgttctgcataccagggatcccaagccgtgtccagatctactgaggtgaaagttgtgtccccagcaccaactgcacagcctcgagatcccggcagagattgcgtcgaccaaccagagttggcgaactgtgacctgattctccaggcacaactgtgtggtaatgagtattactcttctttctgttgtgccagttgttcgcgcttccagccgcatgcgcagcctatatggcaatag

SEQ ID NO: 13457 - RNA, 321 nt, synthetic construct
  misc_feature 1..321: note = source = /note="Description of Artificial Sequence: Synthetic coding sequence"
  source 1..321: mol_type = other RNA
atgtcattttcagcaactattctcttttcccctccctccggttctgaggcccgatgctgctgttgtgcttgcaaaagcgaaaccaatggcgggaataccggaagtcaaggggggaatcctcccccatccacacccatcacagtgaccggccatggactggcagtgcagtccagcgaacaacttctacacgttatttaccagcgtgtcgataaggcagtgggcctggctgaagcggcattaggattagcaagggcaaataatgaactcctcaagcggctgcaggaagaggtgggtgatctgcgtcaaggtaaggttagctag

SEQ ID NO: 13458 - RNA, 444 nt, synthetic construct
  misc_feature 1..444: note = source = /note="Description of Artificial Sequence: Synthetic coding sequence"
  source 1..444: mol_type = other RNA
atggcactccaaagaacccactcactgttgctgctgctgctgttgactctgctcggcttaggtctggtgcaaccgagctacggccaggatggcatgtaccaacgttttcttcgccagcacgttcaccctgaagaaaccggaggttctgacagatactgtaacctaatgatgcagcgtaggaaaatgaccctctaccattgcaagcgttttaacacattcatacacgaagacatttggaacattcgctccatctgctctacaacaaatatccagtgtaagaacggaaaaatgaattgtcatgagggggttgtgaaggtcaccgattgtagagatacgggctcctctcgggccccaaactgccgctaccgcgctattgcttcgactcgccgggtggtgattgcttgcgagggcaatccccaggtgcctgttcacttcgatggttag

SEQ ID NO: 13459 - RNA, 435 nt, synthetic construct
  misc_feature 1..435: note = source = /note="Description of Artificial Sequence: Synthetic coding sequence"
  source 1..435: mol_type = other RNA
atgcagctgttcctgctcttatgtctggtacttctgagtccgcaaggcgcctccttacacagacatcatccccgtgagatgaagaagcgggtagaagatcttcacgtgggtgcaactgtggcccccagcagcaggagggacttcacctttgacctgtaccgtgcattggcctccgcagccccctctcagtcaattttcttttctccggttagcatctcgatgagcttggccatgctttctcttggagcagggtcttccactaagatgcagatattagaaggccttggattaaacctacagaaatcatccgagaaggaattacaccgggggttccagcagctacttcaggaactgaaccagcctcgcgatggtttccagctaagccttggaaatgcattattcactgaccttgtcgtagacttgcaggacacatag

SEQ ID NO: 13460 - RNA, 540 nt, synthetic construct
  misc_feature 1..540: note = source = /note="Description of Artificial Sequence: Synthetic coding sequence"
  source 1..540: mol_type = other RNA
atggggtcgtccgggctgttgtccttactggtactctttgttctgttggctaatgtccagggccccgggctgaccgactggcttttcccccgccgttgtcctaagattcgtgaagagtgtgaatttcaagaacgcgacgtgtgtactaaggatcgtcagtgccaagacaataagaagtgttgcgttttctcctgtggaaagaaatgtttggacctgaagcaagacgtttgcgagatgcccaaggaaacaggaccctgtctagcctatttcctacactggtggtacgacaagaaagataacacctgttccatgtttgtgtatgggggctgtcaaggcaacaacaacaactttcagtcaaaagccaactgccttaatacatgcaagaacaaacaaccctgtcctaaaattaaggtagagtgtgaggttgaagagatcgaccagtgcacaaaacctagggattgtcccgaaaacatgaaatgttgcccattcagcaggggcaaaaaatgtcttgatttcaggaaagcatctctgagtacttag

SEQ ID NO: 13461 - RNA, 444 nt, synthetic construct
  misc_feature 1..444: note = source = /note="Description of Artificial Sequence: Synthetic coding sequence"
  source 1..444: mol_type = other RNA
atggccttgcaaagaactcactctctactgcttctgctgctgttaactctattgggtctgggattagtgcagccctcatatgggcaggacgggatgtatcaaagattcctgcggcagcatgtacaccctgaagagactggcggcagcgataggtactgtaatcttatgatgcaacggcggaaaatgacattgtaccactgcaaaagatttaatacattcatccacgaagacatctggaatatcaggagtatatgcagtacaacaaatattcagtgcaagaacggcaaaatgaattgccatgagggagttgtgaaagtcactgattgtcgcgacacaggatcaagcagagcgccaaactgtaggtaccgggcgattgccagtacgcggagggtcgtgatcgcatgtgagggcaatccacaggtacccgtgcactttgacggttag

SEQ ID NO: 13462 - RNA, 600 nt, synthetic construct
  misc_feature 1..600: note = source = /note="Description of Artificial Sequence: Synthetic coding sequence"
  source 1..600: mol_type = other RNA
atggagaccttccccctcctgctccttagtctcgggctggttctggccgaagcgtcggaaagcacaatgaaaataatcaaagaggaattcaccgatgaggagatgcagtacgacatggcaaaatctggtcaggagaagcagaccatcgagattctcatgaatccaatactgctagtaaaaaatacctcgctttccatgtccaaagatgatatgagtagcactttgcttaccttccgaagcctgcactataatgaccctaaaggtaactctagtggtaacgataaagaatgttgcaacgatatgaccgtgtggcgcaaggtgtccgaagctaatggctcttgtaagtggtctaacaatttcatcagaagcagtactgaggtcatgagaagagtgcacagagccccaagttgcaagttcgtccaaaacccgggcataagttgttgcgaaagcttagaactcgaaaataccgtgtgccagtttacgacaggcaagcagttccctcgttgtcagtatcactcagtcaccagtttagaaaagatcctcaccgtccttactgggcacagtttgatgtcctggctagtgtgtggtagcaaactgtag

SEQ ID NO: 13463 - RNA, 153 nt, synthetic construct
  misc_feature 1..153: note = source = /note="Description of Artificial Sequence: Synthetic coding sequence"
  source 1..153: mol_type = other RNA
atgagtttctcagccacaattctcttttccccgccttcaggatccgaggcgcgttgttgttgctgtgcctgcaaatctgaaacaaacggcgggaatactggttcacaaggtggcaatccccctccatcaacacctattacagtgacaggatag

SEQ ID NO: 13464 - RNA, 75 nt, synthetic construct
  misc_feature 1..75: note = source = /note="Description of Artificial Sequence: Synthetic coding sequence"
  source 1..75: mol_type = other RNA
atgcagctgttccttttactttgcttggtactgctctctccacaaggcgcctcactacaccgccaccacccttag

SEQ ID NO: 13465 - RNA, 633 nt, synthetic construct
  misc_feature 1..633: note = source = /note="Description of Artificial Sequence: Synthetic coding sequence"
  source 1..633: mol_type = other RNA
atgagtgcaggcaaaatgatgcgcacactgataacaactcacccactcccactgcttctcttgccccagcagctgctgcaactagtgcaattccaggaggttgataccgattttgactttcctgaagaggacaaaaaggaggaattcgaggaatgcctggagaaattcttcagcacaggtcccgcgcggccaccgaccaaggaaaaggtgaaaagaagagtgcttatcgaacccggaatgccgttaaatcacatagaatattgcaaccacgagataatgggcaagaacgtatattataaacaccgttgggtagcggagcactactttctcctgatgcaatacgacgaactacagaaaatttgttacaacaggttcgtgccctgcaaaaacggtatacgcaagtgcaataggtcaaagggactggtggagggcgtctactgcaacctgacagaagccttcgagataccggcttgcaaatatgagtcgttataccggaaaggatacgttctaatcacctgtagttggcaaaacgagatgcaaaagcggatacctcatactatcaatgacctcgtcgaaccgcccgagcacaggagttttctatctgaagacggagtcttcgtgatttctccctag

SEQ ID NO: 13466 - RNA, 36 nt, synthetic construct
  misc_feature 1..36: note = source = /note="Description of Artificial Sequence: Synthetic coding sequence"
  source 1..36: mol_type = other RNA
atgtcattttccgccacaattttgttctcgccctag

SEQ ID NO: 13467 - RNA, 444 nt, synthetic construct
  misc_feature 1..444: note = source = /note="Description of Artificial Sequence: Synthetic coding sequence"
  source 1..444: mol_type = other RNA
atgattatcatggttatcatcttcctggtcctgctcttctgggagaatgaagtaaacgatgaagccgtgatgtccacactcgagcacctgcatgtggactatccccaaaatgatgtgcccgtgccagcacggtactgcaaccacatgatcatccagagagtgattagagagccagaccatacttgtaaaaaggaacacgtttttatacacgaacgcccaagaaagattaacggcatctgtatatcccccaagaaagtcgcttgtcagaatctctccgccatcttttgtttccagtccgaaaccaagtttaagatgactgtctgccagctaattgaaggtactagatatccagcctgtcgatatcactacagccccacagagggatttgtcctcgttacatgtgacgacttacgacccgacagctttttgggttatgtgaaatag

SEQ ID NO: 13468 - RNA, 696 nt, synthetic construct
  misc_feature 1..696: note = source = /note="Description of Artificial Sequence: Synthetic coding sequence"
  source 1..696: mol_type = other RNA
atgcagttgtttttactcttatgtctcgtgcttttgtcacctcagggcgcgtcactgcacaggcaccacccaagagaaatgaagaagagggtcgaagatctgcacgtgggcgctaccgttgctccttcaagtcgccgtgacttcacttttgacctctaccgcgccttagcatcagccgctccctctcagagcatatttttctccccagtgagcatttccatgtcactcgcaatgctcagcctgggtgcaggctcttctaccaaaatgcagattctcgagggcctcggcctgaatctgcagaaatcctccgaaaaagagttacaccgcggctttcagcagctacttcaggaactcaaccagccaagagacggctttcaactgtccctgggtaacgcactgttcacagacctggtcgtcgatttgcaggatacttttgtgagtgccatgaagactctgtatctcgcagataccttccccacaaatttcagagacagtgcaggggctatgaaacagattaacgactacgtcgcaaaacagacaaaagggaagattgtggacttactgaaaaacctggatagcaacgctgtggtaatcatggtgaactacatattctttaaggcgaaatgggaaacaagctttaatcacaaaggcacacaggaacaagatttttatgtgacaagcgagaccgtcgtttag

SEQ ID NO: 13469 - RNA, 1626 nt, synthetic construct
  misc_feature 1..1626: note = source = /note="Description of Artificial Sequence: Synthetic coding sequence"
  source 1..1626: mol_type = other RNA
atggctaagtttggtgtgcataggatcctgttactggctatatccttaactaagtgtctggagtctacaaaattgctggccgatctaaaaaaatgtggggacctggagtgcgaagccctgatcaatagagtctcagccatgagggactatcgtgggccagactgcagatatctaaacttcactaaaggggaagagatcagcgtgtacgtaaagttggcaggagaaagggaggatctgtgggcaggaaagggaaaggaattcggctactttccccgtgacgctgttcagatcgaggaggtattcatatccgaagagatccagatgagcactaaggagagcgactttttatgcctgcttggagtctcctacacttttgacaatgaggattctgagctgaacggagactacggagaaaacatctatccgtacgaggaggacaaggacgagaaatccagcatctacgagtccgatttccaaatagaaccagggttttatgccacctacgagtctacactgttcgaagaccaggtccctgccctcgaagctccagaggacatcggtagcacgtccgagagcaaggattgggaagaagtggtggtagagtcaatggaacaggataggatccctgaggtgcacgtacccccttcatcggctgtaagcggcgttaaagaatggttcgggttggggggagagcaggcagaggagaaggccttcgaatcagtgatcgaacccgtgcaggagtcatcattcaggtcacggaaaattgccgttgaagacgagaacgatctcgaagagctgaacaacggagagcctcagacagagcatcagcaagaatctgagtcagagatcgattccgtgcccaagacccagtctgaattggcatcagagtccgaacatataccaaaaccacagtctacaggctggtttggaggcggcttcacctcctacctcggattcggtgacgaggacaccgggctagaacttatcgccgaagaatcaaaccccccacttcaagacttccccaactccattagcagtgacaaagaagctactgtgccttgtactgaaatcctgaccgaaaaaaaagataccatcacaaatgattctctctcattaaaacccagctggtttgacttcggctttgccatcctgggcttcgcctatgccaaagaagacaaaatcatgcttgatgaccgcaagaacgaagaagatgggggcgccgatgaacacgaacacccactcacctccgaattagaccccgagaaagaacaagagatcgagacgattaagataattgaaaccgaagaccagatcgacaaaaaaccagtatctgaaaaaacggacgagagcgatacaattccatatctcaagaagtttttgtataactttgacaatccatggaacttccagaatattcccaaggaaactgagttaccgtttccaaagcagattctcgatcagaataatgtaatagagaacgaagagacaggcgagttcagcattgataattaccctactgacaatactaaggtgatgatttttaaatctagctacagtctatctggctggtacgagaacatctatattaggatttacttcattttcaagcacaatctgtttctctag

SEQ ID NO: 13470 - RNA, 1245 nt, synthetic construct
  misc_feature 1..1245: note = source = /note="Description of Artificial Sequence: Synthetic coding sequence"
  source 1..1245: mol_type = other RNA
atgaatccaaccctcggcctggccatttttctcgctgtcctacttaccgtgaagggactgctcaagccgtcattcagtccacggaattacaaagcactctcagaggtacagggatggaaacaacggatggcagccaaggaactggctagacaaaatatggaccttgggttcaagcttcttaagaaactggccttttacaatcccgggcggaacatctttctctctccactcagcatctcaacagcattctcaatgttgtgtcttggggcccaggactctaccttagatgagattaaacagggattcaatttccgcaagatgccagagaaagacttacatgagggattccactacatcattcatgagcttacacagaaaacacaggatctgaagcttagcatcggaaacactttattcattgaccagagattgcagccacaaaggaaatttctcgaagatgctaagaacttttactccgctgagactattctgacaaactttcagaatctggaaatggcacagaagcagatcaatgatttcattagccagaaaactcacggcaagataaacaatctcatcgagaacatagatccaggaactgtcatgctgctggcaaactacatatttttccgtgccaggtggaagcacgaattcgaccctaacgttactaaagaagaagatttcttcctggaaaaaaacagctccgtgaaggtccctatgatgtttagaagcggtatataccaggttggttatgacgacaagctatcctgtacaatcctcgagatcccctatcagaaaaatatcacagctattttcatcctaccagatgagggaaaactgaaacacctggagaagggcctgcaagtcgatacatttagccgatggaagaccctgctctcgagacgcgttgtagacgtttcagtaccgagattacacatgactggcacattcgatctgaagaaaaccctctcatatataggcgtatctaagatttttgaagaacacggtgatctgacaaagattgccccccataggtctctgaaggtcggtgaggcagttcacaaggcggagttgaaaatggatgaacgaggcactgagggtgctgccggaaccggagcccagacccttccaatggagacccccctggtcgtaaagattgataaaccatacctgttactgatttacagcgagaaaattccttccgtcctgtttctgggcaaaatcgttaatccaatcggcaagtag

SEQ ID NO: 13471 - RNA, 618 nt, synthetic construct
  misc_feature 1..618: note = source = /note="Description of Artificial Sequence: Synthetic coding sequence"
  source 1..618: mol_type = other RNA
atgatgagaacactcataacaacgcacccgctccccctcctcttgttacctcaacagctgttgcaactggtgcagttccaagaagtcgacaccgatttcgacttccctgaagaggataaaaaggaagaatttgaggagtgcctagaaaaattcttttcaacaggtcctgcccggccacccacaaaagaaaaggtaaaaaggcgcgtcctgatcgaacccggaatgcctctgaatcatattgagtattgcaaccacgagatcatgggaaagaatgtatattataaacatcgctgggtagctgagcattatttcctcctcatgcagtatgacgagcttcagaagatttgctacaaccgcttcgtaccttgtaaaaatggcattcgtaagtgtaaccgctccaagggcctggtcgagggcgtttattgcaaccttacagaagcttttgaaatcccggcttgtaaatatgaaagcttataccgcaaaggatatgtgctcattacctgttcatggcaaaatgagatgcaaaagagaatccctcatacaatcaatgacttggtggagcccccggaacaccggtccttcttgagtgaagacggggtgttcgtcatttctccatag

SEQ ID NO: 13472 - RNA, 516 nt, synthetic construct
  misc_feature 1..516: note = source = /note="Description of Artificial Sequence: Synthetic coding sequence"
  source 1..516: mol_type = other RNA
atggaaacattccccctcctactacttagtcttggcctggtgctcgcagaggcttccgagtcaaccatgaagataatcaaagaagaattcaccgatgaagagatgcagtacgacatggcaaaaagtggacaggagaagcagaccatcgagatcttaatgaatcccatcttactggttaagaacacctctttgagcatgagtaaggacgacatgtcttctacactgcttacctttagaagcctccactataacgatcctaaaggcaactcttccggaaacgataaagaatgttgcaacgatatgaccgtttggcgcaaagtgagtgaagcgaacggctcctgcaaatggtcgaataatttcattcgctcatctacagaagtaatgcgacgggtgcatcgcgccccgtcttgtaaatttgtgcagaaccctggaatctcttgctgtgaaagcctggagctcgagaacacagtctgtcagtttacaaccgggaagcagtttccccgctgtcagtactag

SEQ ID NO: 13473 - RNA, 633 nt, synthetic construct
  misc_feature 1..633: note = source = /note="Description of Artificial Sequence: Synthetic coding sequence"
  source 1..633: mol_type = other RNA
atgagtgcaggaaaaatgatgcggacactgataaccacacatcccttacccctgctgctgctgccccagcagctgctccaattggtccagtttcaagaagtcgataccgactttgactttccagaagaggacaagaaggaagagtttgaggaatgcttggaaaaattcttttctaccggtccagcccggccaccaactaaggaaaaggttaagcggagagttctgatagagcctggtatgccgttgaaccacatagagtactgtaaccatgaaattatgggaaagaacgtgtactacaagcatcgctgggttgctgaacattactttctgttaatgcaatacgacgagttacaaaagatttgttataatcggttcgttccatgtaagaatggtatcaggaagtgtaatcgttccaagggactagttgaaggcgtctattgtaatctgactgaagcgttcgagattccagcctgtaagtatgagagcctgtaccgtaagggttatgtgcttatcacctgttcctggcagaacgagatgcagaaacgtatacctcacacaatcaacgatttggtcgagccccctgaacatcgcagcttcctgagtgaagatggagtctttgtgattagcccatag

SEQ ID NO: 13474 - RNA, 537 nt, synthetic construct
  misc_feature 1..537: note = source = /note="Description of Artificial Sequence: Synthetic coding sequence"
  source 1..537: mol_type = other RNA
atggaaaccttccctttgctgctgttatcactgggcttggttctcgcggaggcttctgagagcacaatgaagatcatcaaggaagagtttacggacgaggaaatgcagtatgatatggctaaatctggccaagagaagcagacaatcgagatcttaatgaatcccatcctactggtgaagaacacaagtctgtctatgtcgaaggatgatatgtccagtacactcctgacatttagatccttacactataatgatcccaaaggtaactcatctggcaatgataaagaatgctgtaatgacatgaccgtgtggagaaaagtttccgaggcaaatggttcatgtaagtggtctaataattttatccgttcaagcactgaggttatgcgacgggtacatagggcgccttcttgcaaattcgtgcagaatccaggtattagctgctgtgaatccctcgagctcgaaaatacagtgtgtcaatttaccactggcaaacagtttccgaggtgtcagtaccatagtgtcacctctttagagtag

SEQ ID NO: 13475 - RNA, 474 nt, synthetic construct
  misc_feature 1..474: note = source = /note="Description of Artificial Sequence: Synthetic coding sequence"
  source 1..474: mol_type = other RNA
atgcagctgtttcttctcttgtgcttagtcctcctatcaccccaaggggcctccctgcaccgccaccatcccagggagatgaagaaaagagtggaggatcttcatgttggagcgactgtggctccgagcagcagacgagattttacttttgacctgtatagggcccttgcatccgctgctccctctcagtcgatcttcttttctcctgtgtcaatatctatgtccctggcgatgctctccttaggcgccggatcttcaactaagatgcagattctggaaggccttggtctgaacctgcaaaagtcctccgagaaagagttacatcgaggctttcagcaattactgcaagaattgaatcagccgagagacggatttcagctttcactgggtaatgccctgtttaccgatttagttgtagatttgcaggacacttttgtctccgcaatgaaaacgttgtacctggccgacacctag

SEQ ID NO: 13476 - RNA, 1035 nt, synthetic construct
  misc_feature 1..1035: note = source = /note="Description of Artificial Sequence: Synthetic coding sequence"
  source 1..1035: mol_type = other RNA
atgcctcctcgtatgctggtcgctcccctccccctgcactttctgttagccgcagtgtctagtgagaacaggtccggtagaagacagtggcagcaggctgtggctgcaggatccgggcccggcagaaactcatccagagccattcattggtctttaccccgagctctggtcccggcaactggcacaagagcctccggatctcagaaaaggcaacggccgcctaagggacaagaggctttatggtctcggccacattcaagacattccgccgagcgcgccggagggtcccatagcgacccgggacgattgtccgctccgcttggactgggcctcccttcaggccggggtcggcttaccgcaatgccaggtcgagcacctctaaggactgttcccggcgcactcggggcttggctgttgggcggcctgtgggcctggaccctttgtggactctgtagcctgggcgctgtcggtgctcccagaccctgtcaggcaccccagcaatgggagggccgtcaagtgatgtatcaacagagcagcggtcgaaattctagggccttattatcttacgacgggttgaatcagagggtgcgagttctcgatgagcgcaaagccctcatcccttgtaaaagacttttcgagtacattctgctgtataaagatggagtcatgttccagatcgatcaagcgacaaaacagtgctcaaagatgacacttacccagccttgggatcccttggacattccgcaaaacagcacctttgaggaccagtactctataggtggaccccaggaacagatcaccgttcaggaatggagcgacaggaaatccgcccgatcttacgagacgtggatcggaatttacacagtgaaagactgttaccctgtacaggagacattcactattaattatagtgtgattctgagtactcgattctttgatatccagttaggtataaaggacccatctgtcttcacaccaccttccacatgccagatggctcaattggagaagatgtctgaggattgtagctggtag

SEQ ID NO: 13477 - RNA, 321 nt, synthetic construct
  misc_feature 1..321: note = source = /note="Description of Artificial Sequence: Synthetic coding sequence"
  source 1..321: mol_type = other RNA
ggccagcctaaagccgcacccagcgttactctgttccccccttcctcagaggaattacaagccaacaaagccacattagtttgcctggtttctgacttttatcctggcgcagtcaccgtggcatggaaggcagacggatcccccgtcaaggtgggcgtcgagacaacaaaaccctccaaacagagcaataacaaatacgcagccagctcttacctgagcttgacccccgagcaatggaaatcccaccggagctatagttgccgcgtcacacatgagggaagcaccgttgaaaagacagtggccccggcagaatgcagttag

SEQ ID NO: 13478 - RNA, 672 nt, synthetic construct
  misc_feature 1..672: note = source = /note="Description of Artificial Sequence: Synthetic coding sequence"
  source 1..672: mol_type = other RNA
atgcgactgcaaaggccccgacaagcacccgccggcggacgaagggctccacggggtggcaggggttcaccctataggccggatcctggtagaggtgcgcgtcgcttacgtaggtttcagaaaggcggggaaggtgcgccaagggccgaccccccatgggctccactcggaacaatggctttgttagcccttctgctggtcgtggccctgccacgtgtttggactgacgcaaatttaaccgcacggcagcgtgatcccgaagattcccagcgaacagacgagggcgacaatagggtgtggtgtcatgtgtgcgaacgagagaatacattcgaatgtcagaatccaaggaggtgcaagtggacagagccttactgcgtgatcgctgcagtcaaaatttttcctcgcttttttatggtggccaagcagtgctctgctggctgtgcggccatggagcgtccgaaacccgaggaaaagaggttcctgcttgaggagcctatgccatttttctacctcaagtgttgtaaaattcgttactgcaacttagaaggccctcccatcaactcatcagtgtttaaggaatacgccggtagcatgggggagagttgtgggggcttgtggctggctatactattgcttctcgctagtattgctgctggactctccttgtcctag

SEQ ID NO: 13479 - RNA, 1542 nt, synthetic construct
  misc_feature 1..1542: note = source = /note="Description of Artificial Sequence: Synthetic coding sequence"
  source 1..1542: mol_type = other RNA
atggcacctgcacgcactatggctcgcgccagacttgctcccgccggaatcccagcggtggctctgtggctgctgtgcactctgggcttgcaaggaacccaagccggtccacctcccgctccaccagggcttccagccggagctgactgcctcaattcattcacggccggcgtccccggcttcgtgctcgacacaaacgcatccgtgtcgaatggtgcgacttttcttgaaagtcctactgtgaggcggggctgggactgcgttagggcctgttgcacgacccagaactgcaacctggctcttgttgagctccagcctgatcgaggagaagacgcaatagctgcatgctttctcatcaattgtctgtacgaacagaactttgtgtgcaaattcgcaccacgcgagggtttcattaattacctgaccagagaagtgtatcgttcgtatcggcagctgcgtacacaaggtttcggcgggtctggtatccctaaagcatgggccggcattgacttgaaggtgcagcctcaggaacctcttgtgctgaaagacgtggagaacaccgattggcgcttgctgcgcggggacaccgatgtccgtgtagaacgtaaagaccctaaccaggttgagctttggggacttaaagagggaacgtaccttttccagctgacagtaacatcatcagatcaccctgaggacaccgccaacgtgaccgttacagtgctttctaccaagcagactgaggactactgtttggcttcaaacaaggttggtcgatgtcgtggatcatttcccagatggtattatgatcctacagaacaaatctgtaagagttttgtatacggtggctgtcttgggaacaaaaataactatctgcgggaagaggaatgtatcttggcatgccggggagtccaaggccccagtatggaacggcggcatcccgtatgtagcggaacttgccagcccacccagtttcggtgttctaatggatgctgcatagattccttccttgaatgcgatgatacacctaattgcccggatgctagcgacgaggctgcctgtgaaaaatatacaagtgggttcgacgagctccagagaattcattttccctctgacaaaggacactgtgtggacctcccagatacaggcttgtgtaaggagtctattccccgttggtactacaatccattcagtgaacactgtgcaaggtttacttacggaggttgctatgggaataagaataacttcgaggaagagcaacagtgcctagagtcatgccgtgggatttccaagaaggatgtgtttgggcttaggcgggaaatccccattccatcaacaggctcagttgaaatggcagtcgctgtgttcctcgtgatctgtatagtcgtggtggttgctattctcggatactgttttttcaaaaatcagcgtaaggatttccatggtcaccaccaccatccccctcctactccggcatcttctacggtgagtacaaccgaagatacagagcatctggtctacaaccatacaactcggccactctag

SEQ ID NO: 13480 - RNA, 1341 nt, synthetic construct
  misc_feature 1..1341: note = source = /note="Description of Artificial Sequence: Synthetic coding sequence"
  source 1..1341: mol_type = other RNA
atgctgcacccggagacctcccctggtcggggacatctgctggcagtgctgttggccttgctgggcactgcttgggcagaggtctggcccccccaactccaggagcaagctcctatggccggggcattgaacagaaaagagtccttcctgttgctgtcattgcacaacagactcaggagctgggttcagcctcccgccgcggatatgcgtagactcgattggtcggactccttagctcagcttgctcaggctagagccgctctgtgtggcatccccaccccaagccttgcatctggtctgtggcgtacgctccaagtcgggtggaatatgcagctgctacccgctggactcgcatcgttcgtagaagttgtcagcttgtggttcgccgagggacagcggtactcccacgccgcaggagaatgcgcccgcaatgctacatgcacgcattatacgcaactggtgtgggccacctccagccaactagggtgtggcaggcatctgtgttcggccggccaggctgccattgaggccttcgtttgtgcctattcacccagaggcaattgggaagtcaatgggaaaacaatcgttccatacaaaaagggggcctggtgtagcttgtgtacagcctccgtgtctggctgctttaaagcatgggaccatgccggcggtctgtgtgaggtgccgcgtaatccatgcagaatgtcatgtcagaaccatggtcggcttaatatctcgacgtgccactgccactgcccaccaggatacaccggccgctattgtcaagtgcgatgctcccttcagtgcgtacatggacgattccgggaggaagagtgctcctgcgtgtgtgacatcggttatgggggtgcacagtgtgcaaccaaggtccatttcccatttcacacctgcgatctacgaatcgatggggattgctttatggtgagctccgaggcggatacctattatagggcacgaatgaaatgtcagaggaagggcggagtcttagcacaaataaagagccagaaagttcaggacattttagcattctatctgggacggttggagaccacaaatgaggttattgatagcgacttcgagactcggaatttctggatagggctgacatacaagactgcgaaggactcctttcgctgggccacaggcgaacaccaggcctttacatcattcgctttcggacaaccagataatcatggctttggtaactgcgtggagctgcaggcttctgctgcatttaattggaacaatcagcggtgcaagactagaaataggtacatttgccagtttgcacaggagcacatctcacgttggggccccggatcatag

SEQ ID NO: 13481 - RNA, 936 nt, synthetic construct
  misc_feature 1..936: note = source = /note="Description of Artificial Sequence: Synthetic coding sequence"
  source 1..936: mol_type = other RNA
atgggcgtcatggccatgctgatgctccccctccttctcctggggatctcaggtttacttttcatataccaggaagtgagccggctctggtctaagtccgccgtgcagaacaaagttgtcgttatcactgatgcgatctcagggctgggcaaggagtgtgctcgggtatttcacactggcggggccaggcttgtcttatgcggcaagaactgggaaagattagaaaacctctacgatgccttgattagcgtagctgaccccagcaagacttttactcccaagctggtactgttggatctgagcgatattagttgtgttcccgacgtggcaaaggaagtgctcgattgctacggctgcgtcgacattcttatcaataacgcttcagttaaggtgaaggggccagcgcataaaatcagcctggagttagacaagaaaatcatggacgccaactactttggaccaataaccctcacaaaagctttactgcctaatatgatctcccgacggactggtcagattgttcttgtgaataatatccagggaaagttcggtataccctttagaaccacctatgcggccagcaagcacgccgccctgggattcttcgattgtctgagggcagaggtcgaggagtatgatgttgttattagtacagtgtcccccacatttattcgaagctatcacgtatatcccgaacagggcaattgggaagcatctatttggaaatttttctttcgcaaactgacgtacggagtgcaccccgtggaggtggccgaggaggtgatgagaaccgtgaggcgcaaaaaacaggaagtatttatggccaacccaattcccaaggccgccgtatatgtacgcacctttttccccgagtttttttttgctgttgtcgcctgcggcgttaaagagaagttgaatgtacccgaggagggttag

SEQ ID NO: 13482 - RNA, 594 nt, synthetic construct
  misc_feature 1..594: note = source = /note="Description of Artificial Sequence: Synthetic coding sequence"
  source 1..594: mol_type = other RNA
atggctaagaatggactagtcatctgcatcctggttattaccttgctcctggaccagaccacatcacacacctcaagactaaaggcacgcaagcactcaaagcgacgcgtacgtgacaaggacggtgacctgaaaacacaaatagagaagctatggactgaggttaatgctctgaaggagatccaggccctccaaaccgtctgcctgaggggaacaaaagtgcacaagaagtgctacctcgcgtccgaaggcctgaagcacttccacgaagccaacgaagactgtatcagcaaaggcggcatccttgtcattccaagaaattccgatgaaatcaatgctctgcaagattatgggaagcggagcctgcccggggttaatgatttttggttgggtattaacgacatggtgacggaagggaagttcgttgacgtaaacgggatagctatttcattcctcaattgggacagggctcaacctaacggcgggaaaagagaaaattgtgtgcttttctcacaatctgcgcagggaaagtggagcgacgaggcttgtcggtcaagtaaaagatacatctgcgaattcactattccccagtag

SEQ ID NO: 13483 - RNA, 705 nt, synthetic construct
  misc_feature 1..705: note = source = /note="Description of Artificial Sequence: Synthetic coding sequence"
  source 1..705: mol_type = other RNA
atgaaagttctgctcttaacaggtttgggtgccctgttttttgcttattattgggatgacaatttcgatccgggaggactcgactatcttgtactgaaccatattggaggggcacctgccggcactagagcacggagtccccaggccactcgatggctgatgcaggttaacttcgttagctacgtgcaactgacttctagagctctaccaagtttgactgacagtaagggctccctcgtggttgtctcctccttgttgggccgggtgcctacctcattcagcaccccatactccgccgctaaattcgctctggatggcttctttggcagtttaagacgggaactggacgtccaggacgtaaacgtcgccataactatgtgtgtgcttgggctccgcgatcgcgccagcgccgcagaggccgtgcgatcatccacaagtagaccccgacagcccgagcatcggggagtgcccctacaatcacagaccgcaatgtttctcccccctaccgtgccaggcgcccggacactcacggaaacccccttgcgcgggtggccacaacccaaaatgaaaagttcccgccagaagtcaaaaaccgagaaaaacgatggtcatctcgagccagtcacggcatgggaagtccaagttccccgtgtgcgccgtctctgccgcggcctggctagaccacatctgttcggccatgattag

SEQ ID NO: 13484 - RNA, 228 nt, synthetic construct
  misc_feature 1..228: note = source = /note="Description of Artificial Sequence: Synthetic coding sequence"
  source 1..228: mol_type = other RNA
atgaaagttcttttactgacagggctcggggccctattttttgcttactattgggacgacaattttgatccagcatctctccaaggagcaagggtgctattgaccggggctaacgcaggtgttggcgaggaacttgcttaccattatgctagactgggaagtcatttagttctgactgcacacacagaagccctcttgcagaaggccggctggacaacatcgtgctag

SEQ ID NO: 13485 - RNA, 225 nt, synthetic construct
  misc_feature 1..225: note = source = /note="Description of Artificial Sequence: Synthetic coding sequence"
  source 1..225: mol_type = other RNA
atgcaacccagcgaaatggtcatgaatcctaaacaagtgtttctttcagtgttgatctttggagtagcaggattattgctgttcatgtacctgcaggtttggatcgaagagcagcatacaggaagggtcgagaaacgcagagagcagaaagtcacatccggttggggtcccgtgaagtatctccgccctgtcccgagaatcaagccccaggtctcccacgcctag

SEQ ID NO: 13486 - RNA, 861 nt, synthetic construct
  misc_feature 1..861: note = source = /note="Description of Artificial Sequence: Synthetic coding sequence"
  source 1..861: mol_type = other RNA
atgaaagtgctgttactgaccggactgggagcgctgttttttgcctattactgggatgacaattttgaccccgcatctctgcaaggagcgcgggttctgcttacgggtgctaatgccggcgtcggagaagagctggcctaccactacgcccgactgggcagccacctcgtgttaaccgcccacaccgaagcacttcttcaaaaagtcgtgggtaactgccggaaacttggcgcccctaaggttttttacatcgctgcagacatggcctcaccggaagccccagagtccgttgtgcaatttgctcttgataaacttggcggtctggattacttagtactaaaccacatcggcggcgctcccgcaggaacgagagctcgatctccacaagctacccgctggctgatgcaggttaatttcgtaagctatgtgcaattaactagccgcgctctgccatcacttactgactcaaaagggagcttggtcgtggtgtctagtctgcttggacgagtgcccacttcattctctactccatactccgccgctaagttcgctctagacggtttctttggatctttgaggcgggagctcgacgtgcaggacgtcaacgtcgcgattaccatgtgcgtgctcggcctgcgagatagggcctcggccgctgaagcggtgaggggagtgacgcgcgtgaaggcggcccccggtcctaaggccgccttagctgtaatcaggggcggggcaacacgcgccgcaggcgtgttttacccttggaggttccgcttgttgtgcctgctgcgccgatggctgccaagaccacgagcatggtttattcggcaggagcttaatgtgaccgcagccgccgcttag

SEQ ID NO: 13487 - RNA, 459 nt, synthetic construct
  misc_feature 1..459: note = source = /note="Description of Artificial Sequence: Synthetic coding sequence"
  source 1..459: mol_type = other RNA
atgcaggttaatttcgtatcctatgtccagttaacgtctagagcccttccatcactcaccgattcgaaaggctccctcgtggtggtctcatcactcctgggacgagtgccaacgtcattctccaccccttactcagctgccaaattcgcactcgacgggttttttggttccctcagaagagaactggatgtgcaagatgtcaatgtggcgatcactatgtgcgtgctcggattacgtgacagggcatcagccgccgaggcagtgcgtggagtgaccagagttaaggcagctccgggacctaaagcagctcttgctgttatacgtggcggcgccacccgagcggccggggttttctacccttggagattcagactgctgtgcctgctgaggcgttggctgccacggcctcgggcttggttcatccgccaggaacttaacgtcaccgccgccgcagcctag

SEQ ID NO: 13488 - RNA, 2856 nt, synthetic construct
  misc_feature 1..2856: note = source = /note="Description of Artificial Sequence: Synthetic coding sequence"
  source 1..2856: mol_type = other RNA
atgcgagtgttagcatgcttattagctgcgctggtcggaattcaagctgtcgaaaggttaaggttagctgatggcccacatggatgcgctggtaggttggaggtatggcacggcggccggtggggcaccgtgtgcgacgatggatgggatctgagagacgcagcagttgcatgtcggcagctgggctgtggaggcgccctggccgcaccaggtggtgccttcttcggtgaaggcgccggaccagtatggctctctgagctggcctgtagggggaatgaagggcagctgggactctgccatcatagaggctggaaagcccacatttgcagtcacgaggaggatgcaggcgtggtttgtgcaggacagagggtagcaaattctagggacgattccactagccctcttgacggtgccccatggccaggccttctcctggagctttcaccctctactgaggagccgttggtcacgcatgctcccagaccggcaggaaacccccaaaacgcctcccgaaaaaagagccccaggcccaagcaggcaaagagtacccgggctcctttgctgacaaccggggccccacggcaggaaaggctgagacttgtgagtgggcctcaccggtgtgctggccggctcgaggtgtggcacgggggacgctggggaacagtttgtgacgacgggtgggacttgagggatgcagcagttgcatgtcgagagctcggttgtggtggggctctggcagctcctgggggtgctcgcttcgggcccggcgcaggccccgtctggatggacgatgttggctgtggtggaggtgagcaggcactcagggattgcccaaggtcaccatgggggagaagcaattgcgaccactctgaggatgctgggctcgtatgtacagggccagcccccagattgagattggctgatggcccacatggctgcgcaggtcgtctggaagtgtggcatgggggacgctggggtagcgtgtgcgacgatgcatgggacttacgggacgccgccgtggcctgtcgggaattgggttgcggtggggcactggccgccccaggaggagcatttttcggagaaggatctggtccaataatcctcgatgacctacgctgcagaggcaatgagacagccctgcggttctgccccgcaagaccgtggggacagcacgactgtcaccaccgcgaagacgctggggcagtatgtgacggaatgcctctcggttacgtgccgccgactgcccctaccgactctaataactctacccccagggaggcagctagtaggccccccagtaccatgacaagtcaagcacctgggacggccggcgtgagtccaccgccagcttcgccaacagtgttatgggagcccggaccagaggcaggttctccacagctgagactggttgccggacccagtaaatgcagcggccggctcgaggtttggcacgaccagcgctggggtaccgtgtgcgatgacagttgggacatgcgcgattccgctgtggtctgtcgtgaactcgggtgtggcggcccacaacaaccagaccctgctgctgggagatttgggtggggcgccggccctatctggcttgacgacgtcggttgtgtggggactgaggcgtcactctcggactgtccagcagccccttggggcaaacataactgcgctcacaatgaggacgtaggtgtgacgtgtactggacctcccgggctggattccatcagcgaccccttcagttggagctggatccccggactgggccgggatagagatgcatggctgcctggtgaattagccacgaagccctccgcctccgtgactgcctccgtgcttgaaaagaccaccactaaagctcctggcaagatgccaaagtcaacaaagaaatgggtaaccaagaacgcaaaacgacccactacccaacctccagttatgcccacgacgaagcactcccgggcacagagtcccccagatctgacgtcccagaccaccgccgctctgactaccgaggcctcacgccgacccacttctgaattcacccgaaggcctaccacagaggcacctcaacgctggacatctcacactacagcgaccctcacccctcaagcaccacgggaaaggacaactaagaccatggcaatgctgacaacccaaggcccacaggagatgaccagcgagagcacaattaaatctatccctcaagcctcgctggaacccagcgccgagatcccggagggtagccctgagtcgcctaaggatccagccccctccccttcggtgagcaccacaggagaatcgggtctgttccgcgttagactggcagatgggcctaatcgctgcgcagggcggttagaggtctggcatgctggacgctgggggacagtgtgcgatgacaactgggatctacgggacgcgaccgttgcttgctgggaactaggctgtggcaaggtgcgcccacgggtaggaaagactcattatggtcctggtacaggcccgatttggttggacgatatgggctgcaaaggatccgaagcatccctttccgattgcccctcgggtgcatggggtaagcacaattgtgatcacgaggaggatgtgggtctcacgtgtacggggtatacagattatgacgactaccctccctggacttgggatccaacatcccgcgaagacctagccaagggcacaacaactgcaggagtgccaggccataccctgccctggaggactacaaggaggcccggctccagctcgcctgcaatcagaagattacccgacacggagcccgaggccggagcccccagaggggacgctccacgaagtcgcacggctagagtggccgctcctccttag

SEQ ID NO: 13489 - RNA, 8430 nt, synthetic construct
  misc_feature 1..8430: note = source = /note="Description of Artificial Sequence: Synthetic coding sequence"
  source 1..8430: mol_type = other RNA
atgactcttgaggggctctaccttgcccgtggaccactggccaggcttctgctcgcctggagtgctctgctgtgcatggccggaggccagggtcgctgggacggcgccttggaggcagccggcccaggaagagtgaggcgacgcggaagtccaggcatccttcaaggacctaacgtgtgcggctctcgcttccacgcctattgctgccctgggtggagaacattccctggacgttcccagtgtgtggtgcctatctgtcgtagagcttgcggagagggattctgcagccagcccaatctctgtacctgtgcggacggcaccctggctccatcatgtggtgtgtctcgcggaagcggctgctccgtgtcctgcatgaacggtgggacctgcaggggagcctcttgcctgtgtcagaagggttacactggcacagtgtgcggccagcctatttgtgaccgaggctgtcacaatggcgggaggtgcatcggaccgaatagatgcgcctgtgtctatggattcatgggtcctcagtgcgagagggattatcgaactggcccgtgcttcggacaagtaggacccgagggttgccagcaccagctaacaggcctggtctgcactaaagccctgtgctgcgcaaccgtgggcagagcctggggccttccctgtgaactgtgtcctgctcaaccccatccttgtcggagaggctttattccaaacatccacaccggggcatgtcaggacgtggatgagtgccaggctgtgcccgggctgtgccaagggggatcatgcgttaacatggtgggttccttccactgcagatgccccgtgggccatcggttgtcagattcgagcgccgcctgtgaagattatcgcgccggagcgtgtttttccgtgctctttggcggccggtgtgccggcgatcttgccggacactatacacgcaggcagtgttgctgcgatcgcggtcgctgttgggccgccggtccagtccctgaactgtgcccgccacgtgggtctaacgaattccagcagctctgcgcccagcgcttgccgctgctcccgggccatccaggccttttccctggtctcctgggatttgggtccaatgggatgggaccccccctggggcctgctcggttgaacccccatggcagcgatgctaggggcattccgagcctcggtccaggtaattccaacattgggactgccaccttgaatcagaccattgacatctgtcggcacttcacaaatctgtgtttgaatgggcgttgtcttcccacaccaagcagctatcggtgcgaatgcaatgttggatatactcaggacgtccgcggtgagtgcattgacgtggacgagtgcacgtcatccccctgccaccacggagactgcgtgaacattccaggcacctatcattgtcggtgctatcccggattccaagcgactcctacaagacaggcgtgcgtggacgtagatgaatgcatagtctctggtggcctgtgccatctaggaagatgtgtgaatacagagggatcattccaatgtgtctgcaacgccggattcgagttatctccggacggcaagaattgtgtggaccataatgagtgtgcaacaagcaccatgtgcgttaatggtgtatgcctgaatgaggacggcagcttctcctgtctgtgcaaacctgggttcctcctggcacccggaggacactactgcatggatattgatgaatgtcagacaccaggaatttgtgttaacggccactgtaccaacaccgagggctcctttcgatgtcagtgtctcggcggacttgccgtggggacggatggtcgggtttgcgtggacacccacgtgagatctacatgctacggtgccatcgagaaaggcagctgtgcacggccttttcccggaactgttaccaagtcagagtgttgttgcgctaatcctgaccatggatttggagaaccttgccagctctgtcctgcaaaagactctgctgagtttcaggcactctgtagttccggcttggggatcactaccgatggacgtgatatcaatgaatgcgccctagatcccgaggtgtgtgccaatggggtgtgtgagaacttaagagggtcttatcgatgcgtatgcaacttgggctacgaggccggagcctccggcaaggactgtaccgacgtggacgagtgcgccctgaactccctcctgtgtgacaatgggtggtgtcagaactcacctggtagctattcatgcagctgcccaccgggttttcatttttggcaggatacagagatttgcaaggatgttgacgagtgccttagctccccatgtgtgtctggggtgtgtcgaaatcttgccggttcttacacttgcaaatgtggcccaggctcccgactcgaccctagcggcacattttgcttggatagtacaaagggcacttgttggctgaagatccaggagagccgatgtgaggtcaatctgcagggcgcatccctgaggtcagaatgttgtgctacacttggtgctgcctggggatccccatgcgaacgttgcgaaattgatccagcatgcgcccgtgggttcgccagaatgaccggagttacctgtgacgacgtgaacgaatgtgaatccttccctggcgtctgtcctaatgggcgatgtgtaaacaccgcaggctccttcagatgcgaatgccctgagggactgatgttggatgcctctgggcggctttgtgtcgacgtccgcctcgagccttgctttctgaggtgggacgaggatgaatgtggggtgaccctgccaggcaaataccgaatggacgtctgttgttgcagcattggcgccgtgtggggggtggaatgcgaggcctgtcccgacccggagtccctcgagtttgcctcactgtgtccaagaggactggggtttgctagccgggatttcctgagcgggagacccttttataaggacgttaacgaatgcaaggtctttcccggcctgtgtactcatgggacctgtaggaatacagtcgggtcatttcactgtgcctgcgccggcggcttcgccctggacgctcaggagcggaattgtacagacatcgacgagtgcaggattagcccagacctttgcgggcagggaacctgcgtgaatacacctggctcattcgagtgcgagtgtttccccgggtacgagagtggtttcatgctgatgaagaactgtatggatgttgacgagtgcgctagagaccccttattatgtcgcggcggtacatgcacgaatacagacggcagttataagtgccagtgcccacctggccacgagcttaccgccaaaggcaccgcttgcgaagatatcgatgagtgttcactgtcggatggcctgtgcccacatggacaatgcgtaaatgtaatcggcgccttccagtgtagctgtcacgctgggttccagagcaccccagatcgacagggctgtgtggacataaacgaatgtcgggtccaaaatgggggatgtgacgtccactgtataaacacagaagggtcttaccggtgctcatgcggccaaggctactctctcatgcccgatggaagagcctgtgcagacgtggacgagtgtgaggaaaacccacgcgtgtgcgaccaggggcattgcaccaatatgcctggcgggcacagatgcctgtgttacgacggctttatggcgacgccagacatgcgaacttgtgtggacgtggatgagtgcgatctcaatccccacatctgcctgcacggcgactgtgagaacacaaagggatccttcgtatgtcattgccaattaggctatatggtccgtaagggcgcaacaggttgctctgacgtcgacgagtgtgaagtggggggccataattgtgattcacacgcctcatgtttaaatattcccggctcattctcgtgcaggtgcttacccgggtgggtcggtgatggtttcgagtgtcacgacctcgatgaatgtgttagtcaggagcatagatgttcccccaggggagactgtctgaacgtaccgggtagctataggtgcacatgcaggcagggttttgctggcgacggcttcttttgcgaagatcgagatgagtgtgccgaaaacgtagacctgtgcgacaacggacagtgcctgaatgctcccggaggctaccggtgcgaatgcgaaatgggcttcgatcccacagaggaccatagagcgtgccaggatgtagacgagtgtgcacaaggcaatctctgcgccttcggatcttgtgagaatcttcctggcatgtttaggtgtatatgcaatggggggtacgagcttgacagaggaggagggaactgtaccgacatcaatgagtgcgctgaccctgtgaactgtattaatggagtgtgcatcaatactcctggtagttatctatgttcttgcccccaagactttgaactgaacccaagtggcgtgggttgtgtggatacacgagctggcaattgttttctggagacccatgacaggggagactccggcatctcctgcagtgccgaaataggcgtcggggtaactagggccagctgttgctgttcactgggaagagcatggggcaatccttgcgaactatgccctatggccaacaccaccgaatatcgtactctgtgcccaggtggggagggctttcagccaaatcgaatcaccgttattctggaagatattgatgagtgccaagagctgccaggtctgtgccagggcggtgattgtgtaaacacctttgggtccttccaatgtgaatgtccaccaggctatcatttgtctgagcatacacggatttgcgaggacatcgacgagtgttccacccactccggtatctgcggccctggaacttgttacaatactcttgggaattacacctgcgtgtgccctgctgaatatcttcaagtcaacggagggaacaattgcatggacatgcgaaagagtgtgtgttttaggcattacaatggcacttgtcagaacgaactggctttcaacgtgacccgaaaaatgtgttgttgctcatacaacattgggcaggcttggaaccgtccctgtgaagcctgccccacccctataagtcctgattatcagatactctgtggaaatcaagcccctggtttcctcaccgacatacacacaggcaagccattggatatagacgagtgtggggaaattccagccatttgcgcaaatggcatctgcattaaccagatcgggtcttttcggtgtgagtgccccgctgggttcaattacaattcaattctactcgcgtgcgaggacgttgacgagtgcggctccagagaatctccgtgtcaacagaacgccgattgcattaatatccctggcagctatcggtgcaagtgtactaggggctacaagctctcaccaggcggcgcttgtgtgggccgcaatgaatgccgtgaaattcccaacgtgtgctctcacggcgactgtatggacactgaagggagctacatgtgcttatgtcaccgcggattccaggccagtgctgatcagaccctttgtatggacattgatgagtgtgaccgacagccatgtggcaatggaacatgtaagaacattatcggaagctataactgtctgtgcttccctggctttgttgtaacccacaacggggactgcgtggactttgatgagtgtactacactcgtaggtcaagtgtgccgtttcggtcactgcctgaataccgctggttcatttcactgtctgtgtcaggatggattcgaactcaccgccgacgggaaaaactgcgtcgacacaaatgagtgcctgagcctcgccgggacatgtctccctgggacttgtcaaaacctggagggttcatttaggtgtatttgcccacccgggttccaggtgcaatccgatcactgcattgatatagatgaatgttctgaagagcctaatttgtgtctctttggcacgtgcacaaactctcccggctccttccagtgtctgtgccctccggggtttgtgctctctgacaatggccatagatgtttcgataccagacagtctttctgtttcactaggttcgaagccggcaaatgctcagtgcccaaagctttcaacacaaccaaaacaagatgttgttgctccaaacgtcctggagagggctggggcgacccctgtgagctctgtccccaagagggttctgccgcctttcaggagctatgtccttttgggcacggagccgtccccggccctgacgattctcgagaagacgttaatgaatgtgccgaaaacccaggtgtctgtactaacggggtttgtgtgaatacagacggctctttccgatgtgagtgcccattcggctacagcttggatttcaccggcattaattgtgtggatacagacgagtgctcggtggggcatccctgcggacaggggacctgtaccaacgtcatcggaggatttgaatgtgcctgtgccgacgggtttgaacctggtctcatgatgacctgtgaagacatagacgaatgctccctaaatccattgctgtgtgcatttcgttgccacaacactgagggctcctatctgtgcacatgccctgctggctacacccttcgcgaagacggagctatgtgtcgggacgtagatgagtgcgccgacgggcagcaggactgccacgcgcggggaatggagtgtaagaacctgattgggactttcgcctgtgtctgcccaccagggatgcggcccctgcctggctcaggcgaaggttgcacagacgataatgaatgccacgcacaaccagatctctgcgtgaatgggaggtgcgtgaacactgccggaagcttcaggtgtgattgcgatgaaggtttccagccatccccgacactcactgagtgccacgatattcgtcagggaccttgtttcgcggaagttctgcaaacaatgtgcagaagtctgtcgagtagtagcgaagctgtaacccgcgccgagtgctgttgcggaggcggaagaggctggggaccaaggtgtgagctctgcccattgcctgggacttccgcctacagaaaattatgcccacatgggtcaggctatactgctgagggtcgtgacgtggacgaatgccgcatgctggcacatttgtgtgcacatggggagtgtatcaacagcctgggctcgtttcgctgtcactgccaggccggctataccccagacgcaactgcaacaacatgtttggatatggacgaatgcagccaggtgcccaagccgtgcacctttctatgcaagaatacaaaaggctcatttttatgtagctgtccgagaggttatttgttagaagaagatggaagaacatgcaaagacttggacgagtgcactagcaggcaacataattgtcagttcctttgcgtcaacacagtaggggcttttacttgcagatgcccccccggattcacccaacatcatcaggcttgctttgataatgacgaatgtagtgctcaacctgggccctgtggtgcacacggccactgccataacacaccggggtctttccggtgcgagtgccaccagggcttcacattggtgtcctctggacatggatgcgaagatgtgaacgagtgcgacggacctcaccgatgtcagcatggctgtcaaaaccaactgggtgggtaccggtgcagctgtcctcagggctttacacagcattctcagtgggcgcagtgtgtggatgagaacgagtgcgcactgtctcctcctacatgtggatccgctagttgtagaaatacccttggcggtttccgctgcgtgtgccccagcggattcgatttcgaccaggctctgggtggttgtcaggaagttgacgagtgtgcaggccgtcgtggcccctgttcctatagttgcgctaacacccctggaggtttcctttgtggctgcccccagggctatttccgggctggccaggggcattgtgtctccggactgggtttctcacctggaccacaagacacgcccgacaaagaagaactcctgtcctcagaggcctgctacgagtgcaaaatcaacggactgtccccgcgtgacagaccgaggcgcagcgctcaccgagaccaccaggtgaatctggccaccctcgacagtgaagctctgctcaccctcgggttgaacctcagccacctggggagagcagagagaattctcgagctccgtcctgcactggaaggtctggaggggagaatccggtacgtgatcgtgcgcggaaatgagcaagggttttttcgcatgcaccacttgaggggcgtaagcagtcttcagctcgggcgacgcaggccaggaccgggaacttatagactcgaggttgtcagtcacatggctggcccatggggggtacagcccgagggacaacccggcccatgggggcaagctctgcgcttaaaagtccagctgcagctcctgtag

SEQ ID NO: 13490 - RNA, 291 nt, synthetic construct
  misc_feature 1..291: note = source = /note="Description of Artificial Sequence: Synthetic coding sequence"
  source 1..291: mol_type = other RNA
atgcgcgttacaagcgccacatgcgccctcctgttagccctgatctgtagcgtgcaattgggtgatgcctgtctggatattgataaactccttgctaatgtagtttttgatgtgagccaggacttgcttaaggaggagcttgctagatacaacccctcgcctctgaccgaagaatcctttttgaatgttcagcaatgtttcgcaaacgtaagcgttactgaaaggttcgcccatagtgttgtcatcaagaaaattttacaatcgaacgattgcattgaggctgctttttag

SEQ ID NO: 13491 - RNA, 1890 nt, synthetic construct
  misc_feature 1..1890: note = source = /note="Description of Artificial Sequence: Synthetic coding sequence"
  source 1..1890: mol_type = other RNA
atgcaacaggatggcttaggagtgggcactcgcaacggttcaggtaagggacggtctgtacacccctcttggccgtggtgcgccccaaggcccctgcgttattttggcagggacgcacgggcacgccgtgcccagaccgccgccatggccctactcgctggaggcctgagcagaggtctgggttcccaccccgccgcagccggtagagacgcagtagtcttcgtatggttactgctgtccacctggtgcaccgcacccgccagggcgatccaggtcacagtatcaaacccatatcatgtggtgatactgttccaaccagtaacactgccatgtacttatcagatgacttccacgcccacgcagcccatcgtgatctggaaatataagtcattctgccgagatcgaatagccgatgccttttccccagcctccgtggataaccaacttaacgcccaactcgcagctgggaatccagggtataatccctacgtcgagtgtcaggattcagttcggactgtgcgcgtcgtggccactaagcaggggaatgccgtgacgctgggagactattaccagggtcgacgcattacaatcacaggtaatgccgacttaacattcgaccagaccgcttggggggacagcggagtctactattgttctgtcgtgagtgcacaggatctacagggtaacaacgaggcatatgcggagctgattgtcctggactggctgtttgttgttgtggtgtgtctcgctgcatttctgatattcctattgctgggtatctgttggtgccagtgttgccctcatacctgctgttgttacgtgcgctgcccatgttgccccgacaagtgttgctgcccagaagctctctacgcagctggcaaagctgcgaccagtggcgtgcccagcatttatgccccttcaacttacgcgcatctaagtcccgccaagaccccacccccccccgcaatgatccctatgggccccgcttataacggctatccaggcggatatcccggggacgtggatcggtcaagcagcgctgggggccagggttcctatgtaccgttacttagagacactgactcttctgtcgcgagcgtccgctctggttatcgcatacaagccagtcaacaggatgattctatgcgggtgctctattatatggaaaaggaattggccaatttcgacccaagccggcctggcccaccaagcggtcgcgtggagcgagctatgtcagaagtgacttccctgcacgaggatgactggcggagcagaccatctcggggaccggccctcactcccatccgggacgaagagtggggggggcacagcccgcgctcacccagaggatgggatcaggagcccgccagagagcaggcaggcggaggctggcgcgctagacgacctagagctcggtccgtcgacgccttggatgacctgacccctcctagcacagcagaaagcggatcaagaagtcctacctcaaacggcggccgaagcagagcctacatgcccccccgcagccggtcaagggatgacctgtacgaccaagatgactctagggacttccctcggtcacgtgatccccattacgacgattttagatccagggagagaccacccgccgaccctcggagccatcaccaccgcacccgcgatccaagagataatgggagcaggagcggagacctgccctacgacggacgtttactggaagaagctgtgcggaagaagggaagcgaggagcgaagaaggccacacaaggaggaagaagaagaggcatactacccccctgccccccccccctattcggagaccgattcccaagcatcccgtgaacgccgattgaaaaaaaacctcgctttgtccagggaatctctagtggtctag

SEQ ID NO: 13492 - RNA, 591 nt, synthetic construct
  misc_feature 1..591: note = source = /note="Description of Artificial Sequence: Synthetic coding sequence"
  source 1..591: mol_type = other RNA
atgtcccgcagaagtatgctactcgcatgggcattgccttctctactgagactaggtgcggcccaggagacagaggaccctgcctgctgttccccaattgtgccgcggaacgaatggaaagctctggcaagcgaatgtgcccagcatctttccctgccgctccgttacgttgttgtgtctcacaccgccggttcatcatgcaacaccccagcctcctgtcagcaacaggccaggaatgtgcaacactaccacatgaaaacgttgggatggtgcgacgtcggttacaattttctcatcggggaggatggcctggtgtacgaaggcagaggctggaatttcacgggcgctcacagcggacacttgtggaacccgatgtccatcggtatcagctttatgggaaattacatggacagagtgcctaccccacaagccattcgcgctgcacagggactgctggcctgcggagtcgcacagggggcactccgctccaactacgtgctgaagggtcacagggacgtgcaacggactctctcgcccggaaaccaactgtaccacctaatccagaattggccccactaccgctccccctag

SEQ ID NO: 13493 - RNA, 1056 nt, synthetic construct
  misc_feature 1..1056: note = source = /note="Description of Artificial Sequence: Synthetic coding sequence"
  source 1..1056: mol_type = other RNA
atggaagctttcgcactgggacccgcaaggagaggacgtaggagaacgcgagccgccggttcattactctcaagggctgccatcttattattcataagcgctttccttgttcgagtccctagctccgtggggcatctagttaggctccccagagcattcaggttgaccaaggattcggtcaagatagtagggtctactagtttccctgtcaaagcctacgtcatgcttcaccagaagagtccacacgtcctgtgcgtcacccaacaattacgtaacgccgaactaatagatcccagtttccagtggtatggaccaaaaggcaaggtagtttctgttgaaaaccggaccgcccagataacctcaaccgggtcccttgtttttcaaaattttgaggagtcaatgagtggtatttacacatgttttctggaatacaagcccaccgtggaagagatagtcaaacgcctccagctcaagtacgcaatctatgcctacagagagccacattactactaccagtttacggcccgatatcacgccgcgccatgtaacagtatttacaatatctcattcgaaaagaagttacttcagatcctgtccaaacttctgttagatctttcttgtgaaatcagcttgctgaagtccgagtgccacagggtgaagatgcaaagagccgggttgcagaacgaactgttttttgcctttagcgtgagttcattagatactgagaagggacccaagcgttgtactgaccataactgcgagccatacaagaggctttttaaggccaaaaacctgattgagcgcttctttaaccaacaggtcgaaattctcggaaggagagccgaacaactccctcagatctattacattgaaggaactcttcaaatggtgtggatcaataggtgttttcctgggtatggaatgaacgtgcagcagcatcctaagtgtcctgagtgttgcgtcatatgctcccctggctcctacaacccccgcgacggaatccactgcctccagtgcaattcatcattagtatacggcgcaaaaacctgcctttag

SEQ ID NO: 13494 - RNA, 420 nt, synthetic construct
  misc_feature 1..420: note = source = /note="Description of Artificial Sequence: Synthetic coding sequence"
  source 1..420: mol_type = other RNA
atggagaccaatgttttccaccttatgctgtgcgtcactagcgcccgaacacacaagtcaacatccctttgcttcggccatttcaattcatatccaagcctgccactaatacacgatcttctcctggaaatttcatttcagctcagtgcaccacacgaggatgctcggctgactcccgaggaacttgaacgcgcctctttgctccagatcctccccgagatgctgggcgctgaaaggggcgatattctccgtaaggctgactccagtacaaacatttttaacccccgtggtaatctgagaaagtttcaagatttttctggccaagatcctaacattctcttgagtcacctattagccagaatttggaagccttacaagaaaagagaaacacctgattgcttttggaaatattgcgtgtag

SEQ ID NO: 13495 - RNA, 606 nt, synthetic construct
  misc_feature 1..606: note = source = /note="Description of Artificial Sequence: Synthetic coding sequence"
  source 1..606: mol_type = other RNA
atgggttcggggcgccgtgctctttccgccgtgcccgcagtcctgctggtgcttactcttcccggacttcctgtatgggcccagaacgacactgaaccgatagtgctggaaggcaagtgcctagttgtatgtgactccaatccggcaaccgattcaaagggtagctcctcttcccctttaggcatatcagtccgggctgctaactccaaggtagccttttccgccgttagatccaccaaccatgaaccttccgaaatgtccaataaaaccagaatcatctattttgaccaaatcctggtcaatgtcggcaattttttcacactggaatccgtgtttgttgctccacgcaagggaatctattccttctctttccacgtcattaaggtctatcagtcacagacaatccaggtaaatctaatgcttaatggcaagcccgtgatctcagccttcgctggtgacaaggatgttacaagagaagccgctactaacggagtgctgctctatctcgataaggaagacaaggtgtatttgaagctagagaaaggaaacctggtgggcggatggcaatattccacatttagtggctttttagtctttccgctttag

SEQ ID NO: 13496 - RNA, 264 nt, synthetic construct; identical to SEQ ID NO: 11857
  misc_feature 1..264: note = source = /note="Description of Artificial Sequence: Synthetic coding sequence"
  source 1..264: mol_type = other RNA

SEQ ID NO: 13497 - RNA, 1098 nt, synthetic construct
  misc_feature 1..1098: note = source = /note="Description of Artificial Sequence: Synthetic coding sequence"
  source 1..1098: mol_type = other RNA
atgccaggcggtaagaaggtcgctggaggtgggtcatcaggagctacacccaccagtgccgcagctactgcccccagcggagtgcggcggcttgaaacatcagaaggaacgagtgcccagcgcgatgaggaaccagaagaggagggtgaagaagatctgcgcgatggaggcgttcctttcttcgtgaatcgtggcggtctgccagtcgatgaggcgacctgggagcgaatgtggaagcacgtggccaaaatccatcccgatggagagaaagtcgcacagaggatcaggggagccacagacctgccaaagatacccataccatctgtccccacatttcaaccaagtacacccgttcccgaaaggcttgaggccgtccagcgttacattagagaactccaatacaatcatacaggcacccagttcttcgagatcaaaaagtcccgcccattaacgggtctcatggacctggctaaggagatgactaaggaagccctgcctatcaagtgtttagaggctgtcattctgggcatatatctgaccaattctatgcctactctggagagattcccgatatccttcaaaacttacttttctggaaactacttcagacatatcgtgctcggagtcaatttcgcaggacggtatggagccctgggaatgagccgaagagaagatctcatgtataaaccacctgcatttaggacactgtctgaacttgtgctggattttgaagccgcttatgggcggtgttggcacgtgcttaaaaaggtgaagctaggtcagagtgtttcccacgacccacattcagtggagcagatcgagtggaaacatagcgttcttgatgtcgaaaggctcggacgggatgactttaggaaggaactggaacgccacgcccgcgatatgaggctgaaaattggaaagggtacaggtccaccatcacctaccaaagataggaagaaggacgtaagctcaccccagcgcgcacagtcctcaccccatcgacgaaatagtagaagcgaacggagaccaagcggtgacaaaaaaactagcgagcccaaagccatgcctgacctgaatggataccagattagagtgtag

SEQ ID NO: 13498 - RNA, 1377 nt, synthetic construct
  misc_feature 1..1377: note = source = /note="Description of Artificial Sequence: Synthetic coding sequence"
  source 1..1377: mol_type = other RNA
atggcttgggcctctcggcttggcctcctgctcgccctcctgctgccagttgtgggagccagtactcccggtaccgtcgttagactgaataaggctgccctgtcctatgtttctgagattggtaaggccccactacaacgcgccctgcaagtgactgtgcctcactttctggactggagtggcgaagccctgcaacctacacgcatccggatccttaatgtccacgtaccacggctgcatcttaagtttatcgcaggatttggagtacgattactcgctgcagctaactttaccttcaaggtgtttcgcgctccagagcccctagaactaacgctacccgttgagctgctcgccgatacgagagtgactcaatcttccattcgaaccccagttgtttctataagtgcctgctccctgttttccggtcatgccaacgagtttgatggatccaactcaacctctcacgctttattggtgcttgtccagaaacacattaaagctgtgctctcaaacaaactctgtctctcaatttccaacctcgtgcaaggcgtgaacgttcatcttgggaccctgataggtctaaatcctgtgggcccagaatctcagatcaggtattcaatggtttcagtccctacagttactagcgattacatctccttggaagtgaatgcagttctgttcctgctaggaaaacctattatcctcccaaccgatgcgacccctttcgtacttcccagacacgttggaacagaagggtccatggctaccgtgggactgtctcagcagctcttcgactccgccctgcttctgctccaaaaagccggggccctgaacctggatatcaccggacagctacgcagcgacgacaatctcctgaacaccagcgccctcggaaggttgattcccgaggtcgcccgccagttcccagagcccatgccagtggtcctgaaagtcagactaggcgcaacaccagtggctatgctgcatactaataacgccaccctcagactgcagccatttgtagaggtcctcgccaccgcctcaaactccgcttttcaatccttgttttcactcgacgtcgtggtaaacttaagactgcagctgtccgtctctaaagtcaaattgcaaggcactacttccgttctcggcgatgtccagcttactgtggcctcaagtaatgtggggttcatagacacagatcaggtcaggaccctaatgggcaccgttttcgaaaaacctctacttgatcatttaaatgctttgctggctatgggaatcgccctaccaggggtcgtcaatctgcactatgtggctccagagattttcgtatatgagggatatgtcgtgattagctcagggctcttttatcagtcctag

SEQ ID NO: 13499 - RNA, 1815 nt, synthetic construct
  misc_feature 1..1815: note = source = /note="Description of Artificial Sequence: Synthetic coding sequence"
  source 1..1815: mol_type = other RNA
atgatgagggccgtgtgggaagcattggccgcgttagccgccgtcgcttgcctggtgggagcagtccgaggcggccctggcttatccatgtttgccggacaggccgcccagcccgatccatgctccgacgaaaatggacatcctaggagatgcattcccgactttgtaaatgcggctttcggcaaagatgtgcgggtttctagtacatgtggaagacctcccgccagatattgtgtcgtgagtgagagaggcgaggagcgactccgcagttgtcatctgtgcaatgcatccgatcctaagaaagcgcacccccccgcatttcttacagacctaaacaatcctcacaacctcacctgctggcaatcagaaaactatctgcaattcccccataacgtaacactgacactctccctgggtaaaaaattcgaagttacatacgtatcactgcagttttgctctccacgccctgagtcaatggctatttacaaaagcatggactatggacggacatgggtaccttttcaattttactctacacagtgcagaaaaatgtacaatcgaccacatagggcaccaatcactaagcagaatgagcaggaggccgtgtgcactgattcacacaccgacatgcggcctctgtctggcggactgatagccttttccactctggacggtcgaccctccgctcacgacttcgacaatagccccgtgctgcaggattgggtaaccgccaccgatattagggtcgctttttctaggctgcatacgtttggcgatgagaatgaggacgattccgaactggccagggacagttacttttacgcagtatccgacttgcaagtgggagggagatgcaaatgtaatggccatgctgctagatgtgtaagggaccgcgatgattctttggtttgtgactgcaggcataataccgctggaccagagtgtgatagatgtaagccttttcattacgatagaccttggcaaagagccactgctagagaagcaaacgagtgcgtggcttgtaactgtaacctgcacgctcgtaggtgtcggtttaatatggagctctacaagctgagtgggcgaaaaagtggaggtgtatgtctaaactgcaggcataatactgctggccgccattgccattactgtaaggaggggtattaccgtgacatggggaagcctatcacccaccggaaggcatgcaaggcatgcgactgtcatccagtgggagccgcaggtaagacatgcaatcagaccaccggccaatgtccctgtaaggacggggtgaccggtatcacatgtaaccgatgcgctaaaggatatcaacaaagcaggtcccctatagccccgtgcatcaaaatcccagtagcacctcctacaaccgccgcaagctccgtggaagagccagaagattgtgattcgtattgtaaggcctcaaaagggaaattgaaaattaatatgaagaaatattgcaaaaaggattatgccgtacagattcacatcttgaaagctgataaggccggagactggtggaaattcactgtgaatatcataagcgtctataaacagggcacttctcgcatccgacggggggatcagtctttgtggatccgatctagagacatagcctgtaaatgtccaaaaatcaagcccctcaaaaaatatctattgttggggaatgcggaggactctccggaccagtcagggattgtagcggataagtcaagcctagtgatacagtggcgtgacacttgggcccggcggttacgaaagttccaacaaagagagaagaaaggaaagtgtaaaaaagcctag

SEQ ID NO: 13500 - RNA, 675 nt, synthetic construct
  misc_feature 1..675: note = source = /note="Description of Artificial Sequence: Synthetic coding sequence"
  source 1..675: mol_type = other RNA
atgcccgggagggcccccctccgcacagttcctggagccctcggtgcttggttgctgggggggctgtgggcatggactttgtgtggactttgttctctgggtgctgtgggcgcacctagaccctgtcaggcacctcagcagtgggaaggcagacaggtaatgtaccagcaatccagcggcagaaatagcagagccctactgtcatacgatggcttgaaccagcgagttagagtccttgacgagcggaaagccctgataccgtgtaaacggttgttcgaatacatactcctgtataaagacggggtaatgttccagatcgatcaggctactaaacagtgcagcaagatgacccttactcaaccatgggatccattggacatacctcagaacagtactttcgaagatcagtattctattggcggtccccaggaacagattacagtccaggaatggtccgatcgcaagtctgctcgtagctacgaaacgtggattggcatatatactgtaaaggattgctaccctgtacaagagacttttacaatcaactattcagtaattcttagtacccgctttttcgatatccagctgggaatcaaggacccttcagtgtttacccccccttcaacctgccaaatggcccagctcgaaaaaatgtctgaagattgctcatggtag

SEQ ID NO: 13501 - RNA, 5106 nt, synthetic construct
  misc_feature 1..5106: note = source = /note="Description of Artificial Sequence: Synthetic coding sequence"
  source 1..5106: mol_type = other RNA
atgggctttcttccaaagctcttactgctggcctccttttttccagccggccaggccagttggggcgttagctccccccaggacgttcaaggcgtgaagggttcttgtctcctaattccctgtatcttttcattcccagcagacgtcgaggtgcctgacggtataactgccatatggtactacgattacagcggacagcgccaagtggtgtctcacagtgcggacccaaaactcgtggaagctcgttttcgcggaaggactgagtttatggggaatcctgagcaccgcgtctgtaacctgctcctgaaagatctccaacctgaggatagcggtagctacaacttccgtttcgaaatctccgaggtgaaccgctggtcagatgtgaagggtacccttgtcacagtgacagaagaaccccgagtgcccactatagctagccctgtggaacttttggaaggtactgaggttgattttaattgctccaccccatacgtctgtcttcaagagcaagtccgcctccagtggcagggccaggacccagcgcgttctgttacttttaatagtcagaagtttgaacccacgggcgtcggtcatcttgagaccctacacatggctatgtcttggcaggaccatggacgcattctgcgctgtcaactaagtgtggcaaaccatagagcacagtccgaaatccatctccaggtgaaatacgcacccaaaggtgttaaaatcctgctgtccccctcggggcgaaatatcctgcccggagaattggtaacactaacctgccaagttaacagctcttatcccgctgtaagctcaatcaaatggttgaaggatggagttcgcctgcaaacaaagaccggagtcctacatttgcctcaggcagcctggagcgatgccggagtttacacctgccaagctgaaaacggtgtaggttcactggtgtctcccccaatctccctgcatatctttatggccgaagttcaagtctcccccgccggacctatcctcgagaatcagacagtcaccctcgtatgtaataccccgaacgaggcaccttccgacctccgttacagctggtacaaaaatcacgtgctgttagaggacgcacatagtcataccctccggctgcacctcgccacccgcgccgatacagggttttatttttgcgaagtccagaacgtacacgggagtgaaagatctggtccagttagtgtcgtagttaaccatccgccactgacacccgtgctgacagcatttttggagacgcaggccggcctggttggaattttacactgtagtgtggtaagtgagcccctggctacattagtgttatcacacggagggcacatcctggctagcacttcaggagactctgaccattctccacgattttcaggcacatctggcccaaactcactccgccttgaaatcagagacctcgaggagactgacagcggcgagtataagtgcagcgcaaccaactctttagggaatgcaacttccacgcttgatttccacgccaatgccgcccgactgttgatttcgccagccgccgaggtcgtcgaaggccaagccgtcacactttcttgcaggtcaggacttagccccaccccagacgcaaggttctcatggtacctaaacggtgccctcctccacgaaggccctggttcatcgctactgctgccagccgcctcatcaacggatgccggctcctaccactgtagagctagagacgggcacagtgcctcaggtccaagctcccccgccgttctgactgtgctctatcctccccgccagcctacttttacgaccagactggacctcgatgctgccggtgcaggagccggtcgacgcggcctgttgctgtgcagagtcgatagtgatccacctgcccggttgcaactgctgcataaggatcgggtcgttgctacaagcctgccgtccggtggcggatgttctacttgtgggggatgttccccgaggatgaaggtaaccaaggccccaaacctcctgagagtcgaaatccataacccattgcttgaggaagagggattgtatctgtgcgaagcttctaatgctttgggtaacgcttcaacttctgctacattcaatggccaagctacagtcctcgctattgccccatctcatacactgcaggagggcaccgaggccaatcttacatgtaatgtcagccgggaggccgccggctcacctgcgaacttctcatggtttcgtaacggagtgctttgggctcagggaccactcgagactgtcactctgctgcctgttgctagaactgacgcagccctgtacgcttgcagaatcctcactgaggcaggagctcagctgtccaccccagttctgctgagtgtgttgtacccaccagatcgaccgaagctatcagcactgcttgatatggggcagggacatatggctctttttatttgcaccgttgacagcagacccctcgctctcttagctcttttccatggtgaacatttactggctacatctcttggaccgcaagtcccttcccacggtcgattccaggcaaaggctgaagctaatagccttaagttggaagtgcgggaactggggctgggagattccgggtcctaccggtgcgaagcaacaaatgtactgggaagcagcaacacaagtcttttcttccaggtccgtggggcctgggtgcaggtctcgcccagccccgagttacaagaagggcaagccgttgtcttgagctgccaggtccatacaggggtcccagaaggcacttcctacaggtggtatcgggatggacagccccttcaagaatccacctcggcaaccttgagatttgccgccatcacgctgacccaggcgggagcttatcattgtcaggcccaagcaccaggctctgcaactacaagccttgccgctcctatcagcctccacgtgtcctatgctcctcgccacgtgaccctaacaactttgatggatacaggtcctggaagattgggactgctactctgccgcgtggatagtgaccctcccgcacagctgcgattgttgcacggagataggttggttgcttccacacttcaaggggtcggaggtccggaggggtccagcccaagactacatgtggctgtcgctcctaatactttaaggctcgagatccacggcgccatgctggaggacgagggcgtgtatatttgcgaagcttctaacaccttaggacaggcatcagcctcagctgactttgatgcacaggctgtcaatgttcaagtatggcccggcgcaacagtgcgagaaggtcagcttgtgaacttaacgtgtcttgtgtggaccacacatcctgctcagctcacctatacttggtaccaagatggtcaacagagattggacgcccattcaattcctcttcccaacgtaactgtccgagatgccacaagctatagatgcggagttgggccgccagggcgggcccccaggctgagcagacccatcaccctagacgtactttatgctccccgtaacctcaggctaacttatctactggagagccatggcggacagctagccctggtcctgtgcactgtcgacagccgccctcccgcccagttggccctgtcccacgccggccgccttctcgccagttcgaccgccgcctcagtccctaacacacttcggttggaactacgcggaccccaacccagggatgaggggttctattcctgctctgcacgttcacctcttggtcaagctaacacctcgctagagctacgtctggaaggtgtcagggtgatactcgctcccgaagcagcagtccctgagggtgcccccattacagtcacttgcgccgacccagccgcacatgctccaaccctgtatacctggtaccacaacggcagatggctgcaggaaggacctgcagcgtccttatcttttttagtcgcaactcgcgcacacgccggagcttattcgtgtcaggcgcaagatgcccagggtactcgttcatctaggcccgccgcactccaggtgctttatgctccacaagatgctgttctcagttcattccgcgactcacgtgccagatccatggcagttatccagtgtaccgtggattctgaacccccagctgaactcgcactctcacatgacggaaaggtcctagcaactagttctggggtccactcccttgcctcgggcacgggacatgtgcaagtagcccggaatgctttgcgcctgcaagttcaggacgtccctgctggcgatgacacttatgtctgcactgcacaaaacctgcttggttccatttcaactattggacgcttacaggtcgagggagcacgggtggttgccgaacctggcctggatgtccccgagggcgccgcgctgaatttgagctgcaggctgctgggaggtcccggtccagtcggaaactctacatttgcctggttttggaacgacagacggctgcatgctgagcccgtgcccacactagcttttacccatgtggcgcgggcacaggctggaatgtaccactgtttggccgaactcccgactggcgcagccgcttccgcccccgtgatgctgagagtgctataccctccaaaaactccaaccatgatggtgttcgtggaacctgaaggcggcctcagggggattctggactgccgcgtcgactcagagcccttggcctcacttacgttgcaccttggaagtcgcctggtcgcctccagccagcctcaaggagctcccgcagagccacacatccatgtcctagcctccccgaatgcactcagagtcgacatcgaggccttacgacctagtgaccagggcgagtacatttgctccgctagcaacgtgctgggcagcgcttccacctcaacatatttcggcgttcgagctctccaccgtttgcaccaatttcaacagcttctctgggtgctagggttgctcgttggcctgctgctgttgctactggggctcggagcctgttacacctggagcagcttgattctgatgcaaccgcatgtccgccctcaacctgttcctcacccatgggccgatcaatggtgctgcctgccatctggtggtgaatcgggacagaatctatag

SEQ ID NO: 13502 - RNA, 708 nt, synthetic construct
  misc_feature 1..708: note = source = /note="Description of Artificial Sequence: Synthetic coding sequence"
  source 1..708: mol_type = other RNA
atgaccgtgctggcgcccgcctggtcacccaccacgtacttattgcttctcttgctactttctagtggtctgtcaggcacacaagactgcagttttcagcatagtccaatcagctcggatttcgcagtgaaaatcagagaactctcagattacctattacaagattaccctgtgacggtggcaagcaatctgcaggacgaggagctttgtggggggctatggagactcgtgttagcccaaagatggatggagagactcaaaactgtcgctggaagcaagatgcaaggacttttggagagagtgaatacagagatccacttcgtcaccaagtgtgcctttcagcctccaccttcctgtttgcgatttgtacagaccaacatcagccgactcctacaagaaaccagtgagcagctcgtggctctgaagccatggatcacccgacagaatttcagcagatgccttgaacttcagtgccaacctgactcgtcaaccctgccacccccatggtcccctcggcctcttgaggcgacagcccccacagcccctcagccaccactacttctactcctcctgttacccgtgggcttactgttactcgccgccgcctggtgccttcactggcagagaacgcggcgacgtacaccaagacccggcgaacaagtaccaccggtacccagccctcaggacctccttctcgtagaacactag

SEQ ID NO: 13503 - RNA, 5472 nt, synthetic construct
  misc_feature 1..5472: note = source = /note="Description of Artificial Sequence: Synthetic coding sequence"
  source 1..5472: mol_type = other RNA
atggccctaagcagcgcctggcgcagcgtgctgccactctggctcctgtggtccgccgcctgctctagggcagcctccggggatgacaacgccttcccatttgacattgagggctcaagcgctgtggggcgtcaagacccccctgaaactagtgaacctcgcgtggcattaggtcgcctgccccctgctgccgaaaagtgtaatgctggtttttttcatactctgagtggagagtgtgtcccttgtgattgtaatggcaactcaaacgaatgccttgacggatccggatactgcgtgcactgccaacgaaacaccacaggtgagcattgcgagaagtgtctggacggttatattggagactctatccgcggagcacctcaattctgtcaaccctgtccctgccctttaccacacttggctaactttgctgaaagttgctatagaaaaaacggcgctgtgaggtgcatttgtaacgagaattacgccggccccaactgtgagcgctgcgccccgggatattacggcaacccccttctgatcggcagcacttgcaagaaatgcgattgttccgggaatagtgatccaaatctgatttttgaggactgcgacgaggtgaccggccagtgccgaaattgcttaaggaataccaccggattcaagtgtgaaaggtgcgctcccggatattacggggatgccaggatagccaagaattgtgccgtttgcaattgtggaggaggtccgtgcgactccgttacaggcgaatgcctagaggaaggcttcgaaccacctacaggaatggactgtcccaccattagctgtgacaaatgcgtctgggatctaactgatgctttgagattggctgcgctgtccatcgaagaagggaagagcggtgtactcagcgtgtcaagcggcgctgctgcccatcgacacgtgaatgaaattaacgccacgatctacctgctgaaaaccaaactgagcgagagggagaatcaatacgctctcagaaaaatccaaatcaataatgcggagaacaccatgaaatccctgctttccgacgtggaggaactagtggaaaaagaaaatcaagctagtcgcaaaggtcaattagtccagaaggagagcatggacacaataaaccatgccagccagctagtggaacaagcccacgacatgcgcgataaaatccaagaaattaataacaagatgctctactatggagaagaacacgaattgtctcccaaggaaatcagcgagaaactagtgctggcccaaaaaatgctggaggagatacgtagtagacaaccctttttcactcagagagagctcgttgacgaagaagcagacgaagcatatgagctgctcagtcaggcggagagttggcagcgcctacataacgagacccgtacgttatttcccgtggtactagaacagttagatgactacaacgcaaaacttagcgaccttcaggaagccctcgaccaggcactcaactacgtccgagacgccgaggacatgaaccgtgcaactgccgctcgccaacgcgatcacgagaaacagcaagagagggtacgggagcagatggaggttgtgaatatgtcccttagtacctcggcagactctctaactacaccacggcttaccttatctgagctcgatgatataattaagaatgcttctggaatttatgctgaaatcgacggggcaaaatcagaactgcaggtgaaattatcaaaccttagcaacctttcccacgacttggtgcaggaggccatcgaccacgctcaggacttgcaacaggaggcaaacgagcttagcaggaagcttcacagtagtgacatgaacgggctggtgcaaaaagccctcgatgcctcaaacgtgtacgagaacatagtgaattatgtgagcgaagccaacgaaactgcggaatttgccctcaataccactgacagaatctatgacgccgtatcaggaatcgatacacagataatctatcacaaagacgagagtgaaaatctgctgaaccaggcaagagaactccaggcaaaggctgaatcctcaagcgacgaggcggtagcagacacgtcccgaagagtcggaggcgcactcgccaggaaatccgctctgaaaacccgactatccgatgcggtcaaacagctacaggcggccgaacgtggagacgcacagcagagacttggacagagtcgactcattacagaggaagctaacaggacaacgatggaagttcaacaggccactgctcctatggcaaataatctaaccaactggtctcagaatctacagcactttgatagcagcgcctacaacaccgccgtgaattcagcccgggacgccgtgcgaaatttaacagaagtcgtcccacagctccttgaccagctgaggaccgtggagcagaagaggccagcatctaacgtctctgccagtatccaacgaatacgggaactgatcgctcaaaccagaagcgtcgcatccaaaattcaggtgtctatgatgtttgacggtcaaagcgctgtcgaggtacattcaagaacttctatggacgatctgaaggcgtttacttccctgtctctgtacatgaaacccccagtcaaaaggccagagctgaccgagactgcagaccagtttatcctttacctgggctcaaaaaacgcaaagaaagagtatatgggccttgccatcaagaacgataacctagtgtacgtttataacctgggcacgaaagacgtggagattcccctcgactccaagcctgtgtctagttggcctgcttactttagcatcgtgaaaatcgagagagtcgggaaacatggcaaagtctttttaacagtccctagcttaagctctaccgccgaagaaaagtttatcaaaaagggcgaattctctggcgatgattcattacttgaccttgaccccgaagacacagtcttttacgtgggcggagtgccttctaactttaagttacccacgtcactgaatctgcctggatttgtgggttgtctagaactcgccactctaaacaatgatgtaattagtctgtataatttcaagcacatttacaatatggatccatccacctcggttccatgcgccagagataaacttgcatttacgcaatccagagctgcttcatacttcttcgacgggagtggatatgcagtcgtccgcgatatcacgcgtaggggcaaatttggtcaagtaaccaggtttgacatagaagtcaggactccagcagataatgggctgattctcctcatggtcaatggctccatgttttttcgcctagaaatgagaaatggatacctgcacgtgttttatgactttggatttagcggcggaccagtacacctcgaagacacactgaagaaggctcagataaatgacgcgaaataccatgaaatttcgattatatatcacaatgacaagaaaatgatactggtggtggatcggaggcacgtaaaatctatggacaacgaaaaaatgaaaattccatttacagatatatatatcggaggcgctccaccagaaatcctgcagagtcgtgccctgcgggctcacttgccattggacataaactttagaggttgcatgaaaggcttccaatttcagaaaaaggactttaacctgctcgagcaaacggagacccttggggttggctacggatgtcccgaggattccttgatttcccggcgagcttatttcaatggccagagctttatagccagtattcaaaagatcagcttcttcgatggattcgaaggtgggttcaattttaggacgctccaaccaaacggcctgctattctattacgcatcagggagcgatgtgttctcaatctccctggacaacggaaccgtcattatggatgtgaaaggaattaaagtgcaaagcgtcgacaaacaatataatgatggcctctcccattttgtcatcagttccgtctcacctactagatatgaattgatcgtggataaatctcgggtcgggtccaagaacccaacgaaaggcaaaatagaacaaacacaggctagcgaaaagaagttttattttggtgggagcccaatttctgctcagtatgctaacttcacaggttgcatttcgaacgcttacttcacacgggtcgatcgcgacgtcgaggttgaagacttccagcgctacaccgaaaaagtccatacatccttgtatgaatgccctatagaatctagtcctctgttcctcctccacaaaaaaggtaaaaatttgtctaagcccaaagccagtcagaataaaaaggggggcaagtcgaaggatgccccctcctgggatcccgtagccctcaagctccccgaaagaaatacgccccgtaactctcattgtcacctgtctaattctccacgcgccatcgaacacgcatatcagtatggaggcactgctaactcgcgccaagagtttgaacatctgaaaggagattttggcgctaagtctcaattttccataagacttcggacgcggtcttcacatggcatgatattttacgtgtccgatcaggaggaaaacgattttatgacactgttcttggcacacgggaggctcgtgtatatgtttaacgtcgggcataaaaagttaaagataaggtctcaggaaaagtacaacgacggtctttggcatgacgttatctttattagggaacggtcaagcggcagactggtaattgacgggctgcgcgttctagaggaaagtctgccacccactgaagcaacatggaaaataaaaggtccaatatatttgggaggagtggccccaggaaaggcagtcaagaacgtgcagatcaattccatctactccttctccggttgtctaagtaacttgcaactaaatggggcttcgatcacctcagctagccagacatttagcgtgaccccctgtttcgaaggaccaatggagaccggcacatatttctctacagaaggcggctatgtcgtgttggatgaatccttcaatatcggcctgaaatttgagatcgcctttgaagtccgtcctcgctcttcatccggtacactcgtccacggccactcagtcaatggagagtacctcaatgtgcatatgaaaaacggacaggttatagtgaaagttaataacggaatccgcgacttttctacgagtgtgacacctaagcagtctctgtgtgacggtcggtggcataggatcacagttattcgggattccaatgtggtgcaactagatgtggattccgaagttaatcacgtcgtcgggccgctgaaccccaaacctatcgaccatagagagcccgtttttgtcggaggagtgcccgagagcctgctgacacctcgccttgccccctcaaagccattcacgggctgcatacgccacttcgttatcgacggccatcccgtctcgttcagtaaggctgcactcgtgtctggagcagtatccataaattcttgccccgccgcctag

SEQ ID NO: 13504 - RNA, 1434 nt, synthetic construct
  misc_feature 1..1434: note = source = /note="Description of Artificial Sequence: Synthetic coding sequence"
  source 1..1434: mol_type = other RNA
atgacatccaagttcctccttgtgtccttcatactggctgctctctcacttagcaccaccttctcccttcagcccgaccagcagaaggtcctgctcgtctcttttgatggttttaggtgggattacctttacaaggttccaactcctcacttccattatatcatgaaatacggagtgcacgtcaaacaagtgactaacgtattcattaccaaaacttatcctaaccattatacacttgtcaccggtctgtttgctgagaatcacggtatcgtggcaaatgatatgtttgatccaataaggaacaagtcatttagcttagatcatatgaacatttacgattcaaagttctgggaggaagcaactccaatctggattaccaaccaacgcgccggtcatacttcaggagctgccatgtggcccggcacagatgtgaaaattcacaagaggtttccgacccattacatgccgtacaacgaatctgttagttttgaagaccgtgtagcaaagataattgagtggttcacttccaaagaacccattaaccttggtctactgtactgggaagatccagatgacatggggcatcacttgggacccgacagtccactgatgggacccgtaatttctgacattgacaaaaagctgggctacctgattcaaatgcttaagaaagcgaagctctggaacacattgaacctaataattacatccgaccacgggatgacgcaatgtagcgaggagcggctgattgaattggatcaatacttagataaagaccactacacactgattgatcagtccccggtagcggccattctgcccaaggaagggaaattcgacgaagtttatgaagccctcacacacgcacacccaaacctcaccgtctacaaaaaagaagatgtgcctgagcgctggcattacaagtacaattctcgcatccagcccatcatagctgttgcagatgaagggtggcacattcttcagaacaaaagcgatgattttctgctgggtaatcacggatacgacaatgcactcgccgacatgcacccaatttttcttgctcacggtcccgcctttaggaaaaacttcagcaaggaggctatgaactcaaccgatctctatccgctactctgtcaccttctgaatatcaccgctatgcctcataatggaagcttctggaacgtccaggacctgttgaatagcgctatgccacgtgtcgttccctatactcaatctaccatcttgctgcctggatctgtcaaacccgctgaatacgaccaggaagggtcttatccatacttcataggcgtttcactcggcagcatcatcgttattgtgtttttcgtcatattcatcaagcatctgatccatagccagattcctgctctccaagacatgcacgccgaaatcgcccaaccattgctgcaggcctag

SEQ ID NO: 13505 - RNA, 1131 nt, synthetic construct
  misc_feature 1..1131: note = source = /note="Description of Artificial Sequence: Synthetic coding sequence"
  source 1..1131: mol_type = other RNA
atgctaaaaaaaatttctgttggtgtagcgggggatctaaatactgtcactatgaaactcggctgtgtcttaatggcctgggcactttacttatctctgggggtgctgtgggtggctcagatgctgctggccgcctctttcgaaacactgcaatgcgagggaccagtgtgcaccgaagagagcagctgtcataccgaagacgatttgacagacgcacgcgaagcgggatttcaggtcaaagcatacactttctctgaaccttttcacctgatcgttagttatgattggttaattctgcagggccctgccaaaccggtgttcgaaggggatctgttagtactccggtgccaggcgtggcaggactggcccctgacccaagtgacattctatagagatggcagcgcccttggtccacctggaccaaaccgggaattcagtataacggtagtccagaaggcagactccggtcactaccactgctcagggatcttccaatcacctggtccaggcatccccgagactgccagtgtcgttgcgattaccgtacaagaacttttccctgcaccgatcctaagagctgtgccaagtgccgagccacaagctgggtcaccaatgactctgagctgccagacaaaacttccactacaacgctcagccgcacggctgctgttcagcttctacaaggacggacggattgtacaaagcagaggcctgtcttccgagttccagatccctacagcttccgaggatcacagcggatcatattggtgcgaggctgccacagaagacaatcaggtttggaagcaatccccccagttagaaattcgtgtacagggcgcatcttcctccgctgctcctccaacactgaaccctgccccccaaaaaagcgctgcacctgggacagcaccagaagaggctcccggcccactgcccccaccccccacacccagctcagaagatccaggattttcgtctccactcggaatgcctgatccacacctttaccaccaaatgggtctgctcctcaagcacatgcaggacgtgagagtattgctcggccacctgttgatggaactgagggagctgagcggccacaggaaacctggaaccaccaaggccacagcagagtag

SEQ ID NO: 13506 - RNA, 1572 nt, synthetic construct
  misc_feature 1..1572: note = source = /note="Description of Artificial Sequence: Synthetic coding sequence"
  source 1..1572: mol_type = other RNA
atggccagaaaagctcttaaacttgctagttggactagcatggcattagccgcatctggcatatacttctactccaataaatatctcgatcccaacgatttcggcgccgtacgcgtgggaagggctgtggcgacgacggctgtgatttcatacgattatttgacatcgctcaagagtgtcccctacgggtccgaagagtatctccagttacgttcgaaagtgcatctgcgcagcgcccgacgcctctgcgaactttgttgcgctaacaggggaacctttattaaagttggtcagcatctgggggctctggattatctcttgcccgaagaatacacttccacactcaaagttctgcatagccaggccccccagagttccatgcaagaaatcagacaggtgattcgcgaggatctcgggaaagaaatccacgacctgttccaatccttcgacgacacccccctcggcaccgctagtctggctcaggtgcacaaagcagtactacacgatggcaggactgtagccgtaaaagtgcagcacccaaaagttagagcgcagtcttctaaagatatcctccttatggaggtgcttgtgttagccgtcaagcaattgtttccagagtttgaatttatgtggctagttgacgaagctaaaaaaaaccttcccctggagcttgattttctgaacgagggcagaaacgcggagaaggtttcacagatgctgcgtcatttcgactttctgaaggtgcccaggattcattgggatctcagcaccgagcgagtgttacttatggaatttgtggacggcggacaggtgaatgacagagattatatggagagaaataagatcgacgtgaatgaaatctccaggcatttggggaaaatgtacagcgagatgatatttgtcaatggatttgtgcactgtgatccgcaccccggtaatgtgttagttaggaagcacccaggaaccggcaaagccgagattgttttactggaccacggactgtatcagatgctgaccgaagagttcaggttaaactactgtcacttatggcagtctctaatctggactgacatgaagcgggtaaaagaatattctcagaggctaggagccggtgacctttatcccctcttcgcatgtatgcttaccgcccgaagttgggactctgtgaatagaggaatttcccaggccccagttaccgccacagaagacctcgaaatccgaaacaacgctgccaactacctgcctcagatctcacacctcctcaatcatgtgccccgacagatgctcctcatcctgaagaccaatgatttgttacgcgggattgaggccgccttagggacccgagccagcgcctctagctttctgaatatgtcgagatgttgtattcgagccttagcagaacacaagaaaaaaaatacctgttccttctttcgtcggactcagatctcattcagcgaggctttcaacctgtggcagatcaatctgcatgaactcatcttacgcgtcaagggactgaaacttgccgaccgagttcttgcactgatctgctggctgttccctgccccactctag

SEQ ID NO: 13507 - RNA, 1197 nt, synthetic construct
  misc_feature 1..1197: note = source = /note="Description of Artificial Sequence: Synthetic coding sequence"
  source 1..1197: mol_type = other RNA
atgtggttgctacttaccatggcctccctgatttccgtgctcggaacgacacatgggctattcgggaagcttcaccctggcagccctgaagttacaatgaatatctcgcagatgattacatactggggctatccaaatgaagaatacgaggtggtgactgaagatggctatatcctagaagtgaatcgcatcccctatgggaaaaaaaacagcggaaatacaggccagagacctgtggtgtttttgcagcacggactcttagcctctgcaacaaactggatttctaatctgcctaacaacagcctcgctttcatactggcagatgccggctatgatgtttggttggggaattcaagaggtaacacatgggctcgacgcaacctttattactcgccagactcggtagaattctgggcctttagcttcgatgagatggccaagtacgatctgccagccaccatagactttatagttaagaaaactggacagaaacaattgcactacgtcggacatagtcaggggaccacaataggcttcatagctttcagtaccaacccctccctcgcaaaaagaatcaagacgttttatgctttggctcccgtagccaccgtgaaatataccaagtccttgatcaacaaacttcgtttcgtcccacagtcactcttcaagtttatttttggggataagatcttctaccctcacaatttcttcgaccaattcttagccaccgaagtgtgcagtagggaaatgctcaaccttttatgctccaacgccctgtttatcatttgtggttttgacagcaagaactttaatacatcgagactagacgtttacctgtctcataatccagctggcacatcagtccagaacatgtttcattggacccaagccgttaagtcgggtaaatttcaagcatacgattgggggtcccctgtacagaataggatgcattatgaccagtctcagccaccttattacaatgtgactgctatgaacgtccctattgctgtttggaacggtggcaaggacttattggctgatccgcaggatgtgggactgctgctgccaaaactgccaaatctgatttaccataaagagattcctttctataaccatcttgattttatttgggctatggatgcaccgcaggaggtttataacgatatagtgtcaatgataagcgaagataaaaagtag

SEQ ID NO: 13508 - RNA, 555 nt, synthetic construct
  misc_feature 1..555: note = source = /note="Description of Artificial Sequence: Synthetic coding sequence"
  source 1..555: mol_type = other RNA
atgagggggcagggcaggaaagagagtctaagtgattccagagatcttgatggatcctatgatcagcttacggatagtgtggacgacgaattcgaactaagtaccgtatgccataggccagagggcctagaacagttgcaagagcagacaaaattcacgagaaaagaacttcaggtgctgtatcgaggtttcaagaacgagtgtccatccgggattgttaacgaggagaatttcaaacagatttactcccaattttttcctcagggagatagtagcacttacgcgacctttctgttcaatgctttcgatactaatcatgacggttccgtgagcttcgaagaaatgttggatatcatgaagagcatctacgacatgatgggcaaatatacgtatccggcgctgcgggaagaagcccctcgggagcacgtggaaagtttttttcagaaaatggatcgtaataaagatggagtggtcacaatagaggagttcatcgagagttgtcagaaggtacaactacccgccctttacattacgttaacctggacacaagcctag

SEQ ID NO: 13509 - RNA, 3900 nt, synthetic construct
  misc_feature 1..3900: note = source = /note="Description of Artificial Sequence: Synthetic coding sequence"
  source 1..3900: mol_type = other RNA
atgagtcttcaggaaatgtttagattcccaatgggcctgctgcttggctcagttctcttagttgcctcagcaccagcgactctagaaccgcccggctgcagtaataaagagcagcaagtgacagtatctcacacatataagattgatgtgcccaagtccgcactcgtgcaagtagatgcagatccacagcctctgagcgacgatggtgcatctctgttggcactgggggaggctcgcgaagaacaaaacatcatatttagacataatatccgcctgcagacgccccaaaaagactgtgagctggcaggttcggttcaggatttactcgctcgagttaagaaattagaggaggaaatggtggagatgaaggaacaatgcagcgcacaacggtgttgtcagggggtcacagaccttagtaggcactgctcaggacatggaaccttcagcctagagacgtgcagctgtcattgtgaagagggaagagaaggccctgcgtgcgaacgactggcgtgccccggggcctgtagtggtcatggccgttgcgtcgacgggagatgtctgtgtcacgaaccttatgtaggcgcagattgtggatacccagcctgcccagaaaattgttctggacacggggaatgcgtccgaggtgtctgtcaatgtcacgaagacttcatgagcgaagactgttccgaaaaacgctgtcctggtgactgcagcggtcacggcttctgtgatactggtgaatgttactgcgaggagggattcacagggctggattgtgcacaagtcgttacacctcagggattgcagctgctcaaaaacacagaagactcccttctcgtttcctgggaaccaagctcacaagttgaccattacttactatcctactacccactgggcaaagaactcagcgggaaacaaatccaggtgccaaaggagcagcatagttacgaaattcttggcctcctgcctggcacaaagtatattgtgacccttaggaacgttaaaaacgaggtatcgtcttcaccccaacacctacttgccactacagacttagcagtcctgggaactgcatgggttaccgacgagaccgagaactccttagacgtggaatgggaaaatccctctaccgaagtggactactataaattaaggtatggccccatgactggacaggaggttgctgaggttactgtgcctaaatcaagcgaccctaagtctaggtacgatattactggattgcatccgggcactgagtacaagatcacagtagtgcccatgcgcggagaactagaaggcaagccaattctgctaaacgggaggaccgaaatagactcacctacaaatgtagtaacagatagagtgacggaggacacagccacagtctcatgggacccagtacaggcagtgatcgataagtatgtggttcgatatacgagtgctgacggcgatacaaaggagatggctgttcacaaggatgaaagctcgactgtgctaaccggtctaaaaccgggagaagcatacaaggtatacgtttgggctgaacggggcaatcaggggtcaaaaaaagccgacacaaacgccctcacagagattgactctcccgccaacttagttacggatagggtgacagaaaatacagccaccatctcctgggacccagtacaggcaacaattgacaagtacgttgtgcgatatacatctgccgacgatcaagaaactcgggaggtcctcgtcggaaaagaacaatcctcaactgtgttgacaggattgcgccccggagtcgagtacacggtgcatgtgtgggctcagaagggagatagagagtctaagaaagctgatacaaacgcccccacagatatagattcgcctaaaaatttagttacagaccgcgttacagaaaatatggctaccgtgtcttgggatcccgttcaggccgctatcgataaatatgtggttcggtataccagcgcagggggagagacaagggaggtccctgtgggtaaagaacagagttcaacagttctcacgggtttgcgaccagggatggagtacatggtacacgtgtgggctcagaagggtgatcaggaatctaagaaagccgataccaaggcccagaccgacatcgacagcccgcaaaacctcgttacagaccgtgtgaccgagaatatggcgaccgtgagctgggaccccgtgagagcgacaattgacagatatgttgtccgttacacctccgctaaagatggggagactcgtgaagtgccagtaggcaaggaacaatcgtccaccgtgctgacgggcctcagacctggagtagaatataccgttcacgtatgggcacaaaaaggcgcccaggagagcaagaaagccgacacaaaagcacaaacagatatagactctccacagaacctggtgacagactgggtcacagaaaatactgctactgtttcatgggaccctgtgcaggcaaccatcgatcgttatgttgttcactatacttcagccaacggcgaaactagagaagtcccagtgggaaaagaacaatcttcaaccgttttgactggccttcgcccagggatggaatatactgtgcacgtgtgggcacaaaaagggaaccaggaatcgaagaaggcagacaccaaagcccaaactgaaatcgacggaccgaagaaccttgtgacagactgggtaaccgagaacatggccaccgtgagttgggatcccgtccaagcaacaatagacaaatacatggtgagatacactagtgccgacggagaaacccgcgaggtccccgtaggtaaagaacactctagcactgtcctgacaggtttgcgtcccggaatggagtacatggtacacgtctgggcccagaagggcgcgcaggaatcaaagaaagcagacacgaaggctcaaacagaactcgatcctccaagaaatctgcgcccatcagctgtgacccaaagcggaggtattctgacttggacgccgccgtctgctcaaatccacgggtacatcctcacctatcaattcccagatggtacagtgaaagaaatgcaactgggcagagaggatcagagatttgcgcttcaaggtctagaacagggcgccacataccccgtatcccttgttgcattcaagggaggaaggagaagccggaatgtgtcgacgacactttctaccgtaggagcaagattcccacacccttctgattgctcacaagttcagcagaattctaacgcagcctccggtttgtacacaatctatctccatggcgacgcgagccggccactgcaggtgtattgcgatatggagaccgacgggggaggctggattgtcttccagagacgcaacacaggacaactggatttttttaaaaggtggcgaagttatgttgaaggatttggagaccccatgaaggaattctggctcggcctagataagttacataaccttacaactggaacacccgcccgctatgaagtgcgagtggacttacaaacagccaacgagagcgcttacgccatctacgactttttccaggtggccagcagcaaagaacggtacaagcttaccgtgggcaaatatagagggactgccggcgacgcccttacataccacaacggatggaaatttacaacctttgacagagacaacgatatcgcactgtctaattgtgctctgacacaccatggggggtggtggtacaaaaattgccacctcgcgaatcctaacggccgatacggcgagaccaaacattcagagggagtcaattgggagccttggaagggccacgaattctctattccatatgtcgaattaaaaatccgcccacatggttacagtagagagcctgtgttaggtcgaaaaaagcgtactcttaggggacgcctccggactttttag

SEQ ID NO: 13510 - RNA, 1662 nt, synthetic construct
  misc_feature 1..1662: note = source = /note="Description of Artificial Sequence: Synthetic coding sequence"
  source 1..1662: mol_type = other RNA
atgacaagaggcggtcccggcggtcgacctggcctgcctcagcctccccccctactgctgcttcttcttctcttgccgcttttattagtgacagccgagccacccaagccagcaggcgtgtattacgctactgcttactggatgccagccgaaaagacagtgcaggtcaagaatgttatggataagaacggagatgcatacggcttttataacaatagcgttaaaacaacaggatggggaatcctggaaatccgtgcggggtacggctctcaaaccctgtccaacgagattataatgtttgtggctgggtttctagaaggctatcttacagctcctcacatgaacgaccactatacaaatttgtatccacagctcatcacaaaaccgagtattatggacaaggtccaggactttatggaaaagcaggataagtggacaagaaagaacatcaaagaatacaaaactgactccttttggcggcacactggatatgtgatggctcaaattgacggcctctacgtgggcgctaagaaaagagctattctggaagggactaagcctatgacactgtttcagatccaattcctcaattctgtgggagatctcctggacctgattccaagcctctcccccactaagaacggttcactgaaagtatttaaacgatgggatatgggacattgctcagcattaatcaaagtgctccccggattcgagaacatcctctttgcccattctagttggtacacatacgccgctatgttgagaatttacaaacattgggacttcaacgtgatcgacaaggacacgtccagttcccggctgagtttcagcagctatcctggattcttggagtctttggatgacttttatatactgtcaagtggcctcatcctattgcagactacgaacagtgttttcaataagacccttctgaagcaagtaattccagagacattgctatcctggcagcgcgttcgagtggcaaatatgatggccgactccggaaaacgatgggcagacattttctctaaatacaacagcgggacctacaataatcaatatatggtgcttgacctgaaaaaagtaaaattgaaccattcactcgacaagggaacactgtacatcgtcgaacagattcctacgtatgtggaatatagcgagcagaccgacgttctgcggaaagggtactggccgagttacaacgttccattccacgagaagatttacaattggtccggttatcctttgctagtgcaaaagctcggcctcgattactcctatgacctcgcaccccgtgcgaagatctttaggcgggaccaaggaaaagtgaccgacaccgcttcaatgaagtatatcatgaggtataacaattataaaaaagacccctatagccgcggcgatccatgcaacaccatctgctgcagagaagacctgaatagtccgaaccctagccctggcggatgttacgatactaaggtggcagatatctatctggcctcccaatacaccagctacgctataagcggaccgaccgtgcagggaggattaccagtattcagatgggaccggttcaataaaacgctgcaccagggaatgcctgaggtttataacttcgatttcatcacaatgaagcctattctgaaactcgacattaagtag

SEQ ID NO: 13511 - RNA, 2271 nt, synthetic construct
  misc_feature 1..2271: note = source = /note="Description of Artificial Sequence: Synthetic coding sequence"
  source 1..2271: mol_type = other RNA
atgagtagacctggtactgctacacccgccctggccttggtgctcttggcagtgacgttggcaggtgtaggcgcacagggtgccgccctcgaagacccagattactatgggcaagagatttggagccgggaaccttattacgcaagaccagagccagaactcgaaacattttccccaccactgccagcgggtcctggcgaagagtgggagcggcgaccacaagaaccgagacctcccaaaagagccaccaaacctaaaaaggcccccaagcgagagaagagcgcccccgaaccacccccaccaggtaaacatagcaacaagaaggtaatgaggacaaagagttcagagaaggcggcgaatgacgatcactccgtgagagtagcaagagaagatgttagagaatcatgtcctcctttgggcttagaaaccttgaaaatcacagatttccaacttcacgcctcaacagtgaaacggtatggcctaggcgctcaccgagggaggctgaacatccaagctgggatcaacgagaacgacttctatgatggcgcttggtgcgcggggcgcaacgacctgcagcagtggattgaggtggatgcccgacgcctcacacgatttactggagtgattacacagggtcggaattccctgtggctctctgattgggttacaagttacaaagtcatggtgtctaacgactcccacacctgggtgactgttaaaaatggtagcggtgatatgatattcgaagggaatagtgaaaaggagatcccagtactgaatgaattgccagtcccgatggtggcacgctatattagaatcaacccacaatcctggtttgacaacggctctatatgcatgcgaatggagattctcggatgccccctgcccgaccccaacaactattatcaccgacggaatgaaatgactacaactgacgacttggacttcaagcaccataactataaagagatgagacaactgatgaaagtcgtcaatgaaatgtgcccaaatataacccggatttataacatcggaaaatctcaccaaggactaaaactttacgccgtagaaatctcggaccatccaggggagcacgaggtgggggagcccgaattccattatattgctggcgctcatggtaatgaagtgctcggtcgtgaacttctcctactcctagtgcagtttgtctgtcaggaatatctcgcccgcaatgccagaattgtgcatctggttgaggagacccggatccacgtcctgcccagcctaaacccggacggctatgaaaaggcatatgaaggcggttctgaacttggagggtggtcactggggcgatggacacatgatggtatagatatcaataacaactttccggatttgaataccctgctttgggaggcggaagatagacaaaacgtcccacgcaaagttccaaatcactacattgccattcctgaatggttcttatccgaaaatgccacggttgctgctgaaacacgagccgttattgcttggatggagaagattccctttgttctgggtggcaacttacagggaggtgagcttgtggtggcgtacccatatgacctagtgaggtctccttggaagactcaagagcatacacccactcccgatgaccacgtatttagatggctggcatactcttacgcatctacccaccgtcttatgactgacgcaagaaggagagtttgtcatacagaagattttcagaaggaggaaggaacagtcaatggagctagctggcacacagtggccggttctctcaacgactttagttatcttcacacaaactgtttcgaactatctatatatgtcggctgcgataaatatccccatgaatctcagctgcccgaggagtgggagaacaatagagaaagtctgatcgtctttatggagcaggtccaccgcggcattaaaggtctagtccgagactctcatggcaaaggcattccaaacgctattatcagcgtcgagggaattaatcatgacattcgcacagctaacgatggtgattattggaggttactcaatcccggggagtacgttgtgaccgccaaagctgaagggtttactgctagcactaagaattgtatggtcggctacgacatgggtgccacaaggtgtgattttacgctctctaagaccaacatggcgagaattagggaaattatggagaaattcggtaaacaacctgtcagcctcccagccagaagattgaaactgcgaggccagaaaagacgacagaggggatag

SEQ ID NO: 13512 - RNA, 702 nt, synthetic construct
  misc_feature 1..702: note = source = /note="Description of Artificial Sequence: Synthetic coding sequence"
  source 1..702: mol_type = other RNA
atggccacccccccgtttcgtctaatacgcaagatgttctcctttaaggtgagtcggtggatgggcctagcttgcttcagaagtctcgccgcctcaagcccatcaatcagacagaagaagctcatgcataaactgcaggaggaaaaagctttcagagaagagatgaagattttccgcgagaaaatagaggactttagagaagaaatgtggactttcaggggcaagattcatgcattccgagggcaaattttaggattttgggaggaggagaggccattctgggaggaagagaaaacgttctggaaagaggaaaagagtttctgggaaatggaaaaaagttttagggaggaagaaaaaaccttctggaagaagtatcgcacattctggaaggaagacaaggccttttggaaagaagataacgcattatgggagagagacaggaatctgttgcaagaagacaaagctctttgggaggaagaaaaggcactctgggtggaagaaagggccctgcttgagggagaaaaggccttatgggaggacaaaaccagtttgtgggaggaggagaatgccctgtgggaagaggaaagagctttttggatggagaataacggccatatcgcaggggaacagatgttggaggacgggccacacaatgcaaatcgaggacagcggcttttggcctttagtagaggaagagcctag

SEQ ID NO: 13513 - RNA, 696 nt, synthetic construct
  misc_feature 1..696: note = source = /note="Description of Artificial Sequence: Synthetic coding sequence"
  source 1..696: mol_type = other RNA
atgatgctgagttgcttatttctgttgaaggccctcttagcactgggctctttagaatcatggatcactgcaggtgagcatgctaaggagggagaatgcccaccacataagaacccatgtaaggaactatgccagggagatgaactttgccccgctgaacaaaaatgctgcactacaggctgcggacggatctgcagagatatccctaaaggaaggaagcgggactgcccacgagttatcaggaaacaaagttgccttaagagatgcatcacggatgagacctgcccaggagtaaagaagtgttgtacactcgggtgtaacaagtcctgcgtggttccaatttctaaacagaaactcgccgagtttggtggagaatgcccagccgatcctctgccctgtgaagaattgtgcgatggggatgcgtcatgcccccagggacataagtgttgcagcacaggatgtgggcggacttgcttaggggacatagagggtggaagaggaggagattgtcctaaggtgctggtggggctctgcatcgtgggctgtgtgatggacgagaattgtcaggccggcgagaaatgttgtaagtctggttgtggccgtttctgcgttcctcccgtgctgcctcctaaattgactatgaaccctaactggactgtcagatctgattccgagctcgagatacctgtcccctag

SEQ ID NO: 13514 - RNA, 1050 nt, synthetic construct
  misc_feature 1..1050: note = source = /note="Description of Artificial Sequence: Synthetic coding sequence"
  source 1..1050: mol_type = other RNA
atgggcccgattagcgcaccatcctgcaggtggcgtataccttggcaaggcctgctgctcaccgcctccctttttaccttttggaatccaccaaccaccgcccagctgactatcgaagcagttccctcaaatgccgccgaaggaaaagaagtgctcctcttggttcacaatctaccccaggatcctagaggatacaactggtataagggcgaaacggtcgatgcgaatcgcaggatcataggatatgttatctccaatcaacagatcacaccagggccagcctacagcaatagagagacaatctaccctaacgccagccttctgatgcggaatgtgacaagaaacgatactggcagctatacattacaagtgatcaagctaaacctgatgagtgaagaagtgaccggtcagttttctgtccacccagagaccccaaaaccaagtatctcctccaataattctaatcctgtagaggataaagacgccgtggcatttacctgcgaacccgaaacccagaacaccacctacctttggtgggtgaacggccaatcactgccggtgagcccaagactgcagctgagtaatggtaaccggacgctgacacttttatctgttactcgcaatgatgttggcccttacgaatgcgagatccagaatcccgcctccgccaatttttccgatcctgtcacactgaatgtcctgtacggcccggacgcccccacaatctctcctagtgatacttattaccatgccggtgtcaacctaaacctatcttgccatgcagcctctaaccccccctcccaatactcatggtccgtgaatggcacattccaacagtacactcagaagctcttcattcctaatattaccacaaagaacagtggttcctatgcatgccacaccacgaacagtgcaacaggacgaaatagaacaactgtgagaatgataacagtctccgatgcgttagtccaaggatcatcacccggactgtctgctcgtgccaccgtttcgatcatgattggggtgttggcaagagtagcgttgatttag

SEQ ID NO: 13515 - RNA, 510 nt, synthetic construct
  misc_feature 1..510: note = source = /note="Description of Artificial Sequence: Synthetic coding sequence"
  source 1..510: mol_type = other RNA
atgaccgcaggaaggcgaatggagatgctctgcgccggaagggtgcccgcattgcttctttgcctgggcttccaccttctccaagccgttctaagtaccacggttatcccctcatgtatcccgggcgagtcttccgataactgtactgctttggtgcagaccgaagataatcccagagtcgcgcaggtgtcaatcactaaatgtagctccgatatgaatggctattgtttgcacggccagtgtatttacctagtggacatgagtcagaattactgtagatgcgaagtgggctataccggggttaggtgtgagcactttttcctgaccgtccaccaaccactgtctaaggagtatgtcgctttaaccgttattctcataatactgttcctcataaccgtggtcggctctacatattatttttgccggtggtacagaaataggaagtccaaagagccaaaaaaagaatacgaacgagtcacaagtggtgatccagagctgccccaagtgtag

SEQ ID NO: 13516 - RNA, 273 nt, synthetic construct; identical to SEQ ID NO: 11877
  misc_feature 1..273: note = source = /note="Description of Artificial Sequence: Synthetic coding sequence"
  source 1..273: mol_type = other RNA

SEQ ID NO: 13517 - RNA, 429 nt, synthetic construct
  misc_feature 1..429: note = source = /note="Description of Artificial Sequence: Synthetic coding sequence"
  source 1..429: mol_type = other RNA
atgccccgctgtagatggctctccctcatcctgctcacaattcccctggctttagtggcgagaaaggacccaaagaaaaacgagaccggcgtgctcagaaaactgaaaccagtgaatgcatcaaacgccaacgtcaaacaatgcctctggttcgccatgcaggaatataataaggaaagcgaagacaagtatgttttcttggttgtgaagactttacaagcccagcttcaggtgaccaatttgttagaatacttgatagacgtggagatagctagatcagactgtagaaaacctctttctacaaacgaaatatgcgctattcaggagaactccaagttaaagcggaaattatcttgttctttccttgtcggagcactaccatggaacggagagttcactgtgatggagaagaaatgtgaggacgcctag

SEQ ID NO: 13518 - RNA, 438 nt, synthetic construct
  misc_feature 1..438: note = source = /note="Description of Artificial Sequence: Synthetic coding sequence"
  source 1..438: mol_type = other RNA
atgggtatcggctgctggcgaaaccctttgttgctgcttatcgccctcgtcctctctgctaagttaggccattttcaacggtgggagggctttcaacaaaagctaatgagcaagaaaaacatgaatagtacactcaatttttttattcagagctataataacgcatccaatgatacatacctgtaccgtgtgcagcgccttatccgcagccagatgcagttaactactggagtagaatatattgtaacggtcaaaattggatggactaagtgcaaacgaaatgatacttctaattcctcatgtccactgcaatcgaagaagcttagaaagtccctgatctgcgaaagcctcatctacaccatgccatggatcaattattttcaactctggaataacagctgcttggaagccgaacatgttggtagaaatctccggtag

SEQ ID NO: 13519 - RNA, 552 nt, synthetic construct
  misc_feature 1..552: note = source = /note="Description of Artificial Sequence: Synthetic coding sequence"
  source 1..552: mol_type = other RNA
atgaagctgctgttccccatcttcgcaagtcttatgctgcaatatcaagtgaacactgaatttatcggactgagacgatgccttatgggtctcggaaggtgtcgagaccactgcaatgtcgacgaaaaggagattcagaaatgcaaaatgaagaaatgctgtgtaggccccaaggtcgtgaagctcattaaaaactatctccagtatggaacccccaatgtattgaatgaagacgtgcaagaaatgttgaaacctgcaaagaactcatctgctgtgattcaacgtaaacacattttatccgtgttgcctcagatcaaatcaacgagtttttttgcaaacaccaatttcgtcatcatccccaacgccaccccaatgaattccgccacgatcagtactatgacacccggacagatcacttatacggctactagcaccaaaagcaatactaaggagagcagagactccgcaaccgccagtccaccacctgccccgcccccacctaacattctgcccacaccatcacttgagcttgaggaagccgaagagcaatag

SEQ ID NO: 13520 - RNA, 609 nt, synthetic construct
  misc_feature 1..609: note = source = /note="Description of Artificial Sequence: Synthetic coding sequence"
  source 1..609: mol_type = other RNA
atgagaggtcacccatctttgctgcttctgtatatggcgctcacaacttgcttggatacttccccttcagaggagaccgatcaggaggtctttttgggacccccagaggcacagtcattcctgtcatctcacacacgcatacctcgcgcaaaccactgggacctcgaactgctgaccccggggaacctggaacgagaatgcttagaggaacggtgttcttgggaagaggccagggaatacttcgaagacaacacgctcaccgaaagattttgggaatcttacatttataacgggaaaggagggagaggacgcgtggatgtggcatctttggcagtcggccttacaggcggtatccttcttatcgtgcttgccggccttggggcattctggtatctccgttggagacagcatcgcggacaacagccttgcccacaggaagctggcctaatctctcccttgtctccccttaacccactgggccccccgacccctcttccacctccaccacccccgccacccgggctacctacatatgagcaggccctagctgcatcaggcgtgcatgacgctccaccgcccccctatactagcctgagaagaccacactag

SEQ ID NO: 13521 - RNA, 558 nt, synthetic construct
  misc_feature 1..558: note = source = /note="Description of Artificial Sequence: Synthetic coding sequence"
  source 1..558: mol_type = other RNA
atgagacttttgatactgacctgcctcgttgcagttgcactggctcgtcctaagctccctctccgctaccctgaacggctccagaatccatccgaaagttccgaacccatcccactggaaagcagggaggaatatatgaatggcatgaatagacagagaaacatcttgagggagaagcagacagacgagatcaaggataccagaaatgagtccacccagaactgtgtggtggctgagcctgagaaaatggaaagcagcataagctcttcgtccgaggaaatgagtctaagcaaatgcgctgaacagttctgtagactgaacgagtacaatcagctgcagctccaggccgcacacgcccaagaacagatcaggcgcatgaatgagaactcacacgtccaagttccctttcagcaactcaaccagttggcagcttatccgtacgcagtatggtattatccacagatcatgcaatacgttccattccccccattcagcgacattagtaacccgactgcccacgaaaattatgagaagaataatgtgatgcttcagtggtag

SEQ ID NO: 13522 - RNA, 1410 nt, synthetic construct
  misc_feature 1..1410: note = source = /note="Description of Artificial Sequence: Synthetic coding sequence"
  source 1..1410: mol_type = other RNA
atgatcactgagggcgcacaggctccccgtcttttgttaccgcccctcttgctactgctgacactgcctgccactggctcagatcctgttctctgcttcacccagtacgaagagagcagcggaaaatgtaaagggctcctcggcgggggagttagtgtggaagattgctgcctcaatacggcatttgcttatcaaaagcgttcaggtggtctatgccagccctgccgctctcctcgctggtcgctgtggtctacctgggctccttgtagcgtgacgtgttcagaaggaagtcaacttcgctatagaagatgcgtcggatggaacggacagtgttcgggaaaggtcgcaccggggacactcgagtggcagctgcaggcttgcgaggaccaacagtgctgtcccgagatgggtggctggtcgggatggggaccatgggaaccatgcagtgttacctgttccaaagggacccggactcgacggagggcctgcaaccaccccgcccctaagtgtggagggcattgccccggtcaagcccaagagtcagaagcttgcgacacccagcaagtgtgccccacccatggcgcctgggctacttggggcccgtggacaccctgtagtgcgagctgccacggtggccctcacgaacctaaggaaaccaggagcaggaagtgcagcgcccctgagccatcccagaaaccgcctggcaaaccgtgtcccggcttagcttacgaacagcgaaggtgcaccggtctcccaccctgtcctgtggctggagggtggggtccctggggaccagtctcaccctgccctgtaacctgcggtctaggacaaaccatggaacaaaggacgtgcaatcacccggtaccccagcacggaggcccattctgcgccggcgatgctactaggacccatatctgcaacaccgcggtgccttgccccgtagatggcgagtgggactcttggggcgagtggtcaccttgcattcggcgaaatatgaaatctatttcctgtcaggagataccaggacagcagagcaggggaagaacatgcagaggaagaaaattcgatggccatagatgcgctggccagcagcaggatatcagacactgttattccatccagcactgtcctcttaaaggtagttggagcgaatggagcacgtggggactatgtatgcccccttgtggcccgaacccaacacgagcaagacagcggctatgtacccccctgctgcccaagtaccctccaacagtctccatggtcgaaggacagggcgagaaaaacgtgaccttttggggccggccactcccccggtgcgaggaattacaagggcagaagttggtcgtggaggaaaagagaccatgtctgcacgtgcccgcttgtaaggacccagaagaggaagaattatag

SEQ ID NO: 13523 - RNA, 453 nt, synthetic construct
  misc_feature 1..453: note = source = /note="Description of Artificial Sequence: Synthetic coding sequence"
  source 1..453: mol_type = other RNA
atgctaatcgctacctctttctttctcttcttcagtagtgtcgtcgcagcacctactcactctagcttttggcagtttcaacgcagagttaagcatatcaccgggagatccgcttttttttcttactacggctacggctgctactgcgggttgggagataagggtatccccgtggacgatacagactcccccagctctccatctccctacgaaaaactgaaggaattttcatgccagcccgtactcaatagttatcagtttcacatcgtcaacggagctgtggtgtgtggctgtacactgggccccggcgcctcatgtcattgtcgtttgaaggcctgcgagtgcgacaaacagtctgtgcactgttttaaggagtccctcccaacatacgagaagaatttcaaacagttctctagccaaccccgatgcggacggcataaaccctggtgttag

SEQ ID NO: 13524 - RNA, 1347 nt, synthetic construct
  misc_feature 1..1347: note = source = /note="Description of Artificial Sequence: Synthetic coding sequence"
  source 1..1347: mol_type = other RNA
atgcgagaatgcatatctgtccacgtcgggcaggccggtgtgcagatggggaacgcttgctgggagttatactgtctggagcacggtatacaaccggatggtcagatgccgtctgacaagacaatcggagggggcgacgatagtttcactactttcttttgcgagaccggagcgggaaaacatgtaccgagggcggtgttcgttgacctcgaacctaccgttattgacgagattagaaatggaccatatagacagttgttccatccagagcagttaattacaggtaaagaagacgctgccaacaattacgccagaggccattacacaatcggcaaagagattatcgaccctgtgttggaccgcatccggaagctttcagaccagtgtacaggcctccagggattcttggtcttccacagctttggcggcgggactggcagtggcttcacatcacttctaatggaaagactctccgtcgactacggtaaaaaaagcaagttagaattctctatatatccagcaccccaggtgagcaccgccgttgtagagccatacaacagcattttaactacacatacaacacttgagcattcagattgcgcttttatggttgataatgaagctatttacgacatttgtaggcgaaaccttgacatagaaagaccaacctatacaaacctcaaccgactcatttctcagatcgtgtcctcaatcaccgcctccctgcgctttgacggcgcgctaaacgtggatttgacagaattccaaacgaacctggttccataccctcgcatccattttccgctggccacttatgcgccggtaatatcagcagaaaaggcctaccacgagcagctgtccgttgcagagatcacaaacgcctgttttgaaccagcgaatcagatggtgaaatgcgatcccagacatggaaaatacatggcctgttgcttgctttacaggggtgatgttgtcccaaaagacgtgaacgctgcaatagccgcaataaaaactaaacggagcattcagtttgttgactggtgtcccaccggtttcaaggtaggcattaactaccagccaccaaccgttgtgcccggaggggacctggcaaaagtccagagagccgtatgtatgctttcgaacaccacagccatcgctgaagcgtgggcaaggctagatcacaagtttgacctgatgtacgccaaaagggcatttgtgcattggtatgtgggagaaggtatggaagagggcgaatttagtgaggccagggaagacatggcagcactcgagaaagattacgaagaggtgggcatcgactcgtatgaagacgaagacgagggggaggaatag

SEQ ID NO: 13525 - RNA, 942 nt, synthetic construct
  misc_feature 1..942: note = source = /note="Description of Artificial Sequence: Synthetic coding sequence"
  source 1..942: mol_type = other RNA
atgagagtcgtgaccattgtgatcctgctttgtttctgtaaagccgcggagctgcgcaaagctagtccaggatctgtgaggagccgggtgaatcacggccgtgctggaggaggaaggagaggctccaatcctgtcaaacgctatgctcccgggctgccgtgcgacgtctatacatatctccacgaaaaatatcttgattgccaagagcggaaattggtttacgttctgccaggctggccacaggacttactgcacatgctgcttgcacgaaataaaatacgaacattaaaaaacaacatgttttcaaagtttaagaagctcaaatccctggacctacaacagaacgagatttccaaaattgagagtgaagccttttttgggttaaacaagctgactaccctactgctgcagcacaaccaaattaaggtcctcaccgaagaggtgtttatctatactcccttgctatcatacttaaggctctatgacaacccctggcattgtacctgtgaaatagaaacactgatttctatgctgcagatccctcgaaaccggaatctgggtaactatgcgaaatgcgagtctccccaggaacaaaaaaacaagaaactccgtcagatcaagtccgagcagctgtgtaacgaagaggagaaggagcagctggatcccaagcctcaggttagtgggcggccccccgttattaagccagaagtggattcaacattctgccataattatgtatttcccatccaaaccctagattgtaaaagaaaagaactcaaaaaagtcccgaacaacattccaccagacatcgtaaaactggacctgagttacaacaaaatcaaccaattgcggccgaaggagttcgaagatgttcatgaactcaaaaagctgaatctcagctcgaatggaattgaatttatagaccctggatcgttgagatag

SEQ ID NO: 13526 - RNA, 972 nt, synthetic construct
  misc_feature 1..972: note = source = /note="Description of Artificial Sequence: Synthetic coding sequence"
  source 1..972: mol_type = other RNA
atgcaggcagcttggttactaggcgcgctggtggtacctcaactcctggggttcggccacggggctcggggagctgaaagggagtgggagggaggatgggggggtgcgcaggaggaggaacgggagagggaagcattgatgttgaaacacctccaggaggccctgggattaccagccggccgcggagacgagaacccggcaggaacggtcgagggaaaagaggattgggaaatggaggaagaccagggggaagaggaggaggaggaggctacaccaacacccagctcaggaccaagtccctcccccacccctgaggatattgtgacctacattctgggcagactggcaggtctggatgccggcctccatcagttacacgttagattacacgcattggatacgcgggtggttgagctaacccagggtttgcgccagcttcggaacgccgctggggacactcgtgatgcagtccaggctctacaggaggcacagggcagggccgaacgggagcatggcagactagagggctgtctcaaaggacttcggctgggccacaaatgcttcctgcttagtagagacttcgaagcccaagccgccgctcaggcgcgctgtacagctcgcggtgggtcactggcgcagcccgccgatcggcagcagatggaggctttgacccgctacttacgggctgctctcgccccatataattggcctgtctggttaggcgtgcatgataggcgagccgagggattgtacctttttgagaatggacagcgtgtctctttttttgcatggcataggtcccccaggcctgagctcggagctcaacctagcgcgtctccccatcccctcagtcccgatcaacccaacgggggtacactcgaaaactgtgttgcccaagctagcgacgacggttcgtggtgggatcatgattgccaacgccgactttactatgtatgcgaatttccattctag

SEQ ID NO: 13527 - RNA, 1086 nt, synthetic construct
  misc_feature 1..1086: note = source = /note="Description of Artificial Sequence: Synthetic coding sequence"
  source 1..1086: mol_type = other RNA
atgaatggactgagcctgagcgagctgtgttgtctcttttgctgtccaccatgtccaggaagaattgccgcgaagctggcattcctgccaccagaggccacctacagcttggtgccagaaccagagcccggaccgggcggagccggagcagccccccttggaactttgcgcgcctcttctggagccccaggaaggtggaaattacacctcacggagcgggccgattttcagtattctcaacgggagttggacacgattgaagttttccctaccaagtctgcccgaggtaaccgtgtatcttgtatgtacgttcgatgcgtgccgggggcacgacagggtcaccaggctcagggaggccacccacaactggcctgggtgggcagacttggcgattcaaacaatccggcccctggtggttgtctgctcgggaaaagctgggggacgggcgctgcactagcctgcgggtatatccatcttctcgctagatacactgtgctgttctctcatggtaacgctgtagatctgggacagatgtctagcttctatatcggacttggctcaagactgcactgtaatatcttcagctatgactatagtggctacggtgcatctagcggccgcccatccgagcgaaatctttacgcagatatcgacgcagcctggcaggcactgcgcacaagatatgggatttcccccgattctattattttatacggtcagagcattggcaccgttccaaccgtggacctggcgagcagatatgagtgtgccgctgtggtacttcactcccctctcacatctggtatgagagtagctttcccggacaccaagaaaacctattgtttcgatgcctttcctaatatagagaaagtctcaaaaattacaagtccagtgctgattattcacggcacagaagatgaggtcatagacttttctcatggtctagccttgtatgagagatgccctaaggccgtcgagcctctatgggtggaaggtgccggtcataatgacatcgaattgtattctcaatatcttgaacgtctgcgcaggtttatctcccaggaactgccatctcagagggcatag

SEQ ID NO: 13528 - RNA, 1404 nt, synthetic construct
  misc_feature 1..1404: note = source = /note="Description of Artificial Sequence: Synthetic coding sequence"
  source 1..1404: mol_type = other RNA
atgaggaccgctccatctcttagacgttgtgtgtgtctgctgctggctgctatccttgacctcgcccggggttacctcactgttaacatagagcctctgcctcctgtggtggccggagacgctgtgacattaaaatgtaattttaaaaccgacgggaggatgagggaaatcgtttggtatcgagtcaccgacgggggaacaatcaagcaaaagatattcaccttcgacgccatgttctctacaaactactcacatatggaaaattacaggaagcgagaagaccttgtgtatcagtcaaccgtcagattgcctgaagtgcgaatctccgacaatgggccctatgaatgtcatgtcggaatctacgatagagcgacccgcgaaaaagtcgtgctcgcttcagggaatatattcctaaatgtaatggcgcccccgacatccattgaagtggtagccgcagacacccccgcaccattctccagataccaagctcaaaacttcacactagtctgcattgtgtctggaggtaagcccgcacccatggtctatttcaagcgtgatggcgaacccatcgacgctgtccctctcagcgagccccctgccgcaagctctggaccgcttcaggattcccggccgtttcgatccctactgcaccgcgatcttgacgacacaaaaatgcagaagtcactgagcctacttgatgcagaaaaccgtggtggcagaccttacacagagcgtccaagcaggggacttactcccgatcctaatattctcctacagccaacaacagagaatatccccgaaactgtggtgagccgcgaatttccaaggtgggtgcattcggcagaaccaacttattttcttcgacactcccggacacccagctccgacggcaccgttgaggtcagagccctcctgacatggacattaaatccacaaattgacaatgaagcacttttctcatgtgaggttaaacaccctgcactgagcatgcctatgcaagccgaggttactcttgttgcaccaaagggcccaaagatagttatgactcccagtcgcgcccgggttggggacactgtgcggattctagtccatggattccagaacgaagtattccctgagcctatgtttacttggactagagtagggtctcgcctgctggatggaagtgccgaatttgatggaaaggagctcgtactggaaagagtgccggctgaactcaatggctccatgtatcgttgcaccgcccagaaccccctaggcagtacggacacccacacccgtttgatagtctttgagaaccccaatattccacgaggtacagaagattcaaacggatccataggcccaacgggagcaagacttaccctggtgctggcattaactgttatccttgaattgacctag

SEQ ID NO: 13529 - RNA, 783 nt, synthetic construct
  misc_feature 1..783: note = source = /note="Description of Artificial Sequence: Synthetic coding sequence"
  source 1..783: mol_type = other RNA
atggcgagacctggaatggaacggtggagagaccggctggcccttgtgacgggagcgagcgggggcataggtgccgccgtggcccgcgctttggttcaacagggcctcaaagtggttggttgtgctcgtactgttgggaatatcgaggagctagctgctgaatgtaaatctgccggataccctggtacactcatcccctacagatgtgacctttctaacgaggaagacatactaagcatgttctctgcaatacgatctcaacattctggagttgacatatgtattaataacgctggtctcgcccggcctgatacactgctctctggatctactagcggatggaaagacatgttcaacgtgaacgtcctggctctttcaatttgcacacgggaagcctaccagtccatgaaagaacggaacgtggacgacgggcatatcatcaatattaacagcatgtctggacatcgggtgctgcctcttagcgtgacccatttttatagcgccactaagtatgccgtgactgccctcaccgaaggcctgagacaggaactccgcgaagcccaaacccacatccgcgcaacttgcattagccctggagtggtagagacacagttcgctttcaaacttcatgacaaggatcctgaaaaagccgccgccacatacgaacaaatgaaatgcctgaagcccgaagatgtagcagaggcagttatttacgtgctttcgacccccgctcatatccagattggggatattcagatgagacctaccgagcaggttacctag

SEQ ID NO: 13530 - RNA, 1218 nt, synthetic construct
  misc_feature 1..1218: note = source = /note="Description of Artificial Sequence: Synthetic coding sequence"
  source 1..1218: mol_type = other RNA
atgagtagccccgcattaacagccggtgcatcaggcaaggtgatggatttcaataatggtacttaccttgtttccttcacactcttttgggaaggacaggtgtcactcagcctcctgctcatccacccttcggagggagccagtgccttgtggagggcccggaaccaagggtacgacaagatcatattcaagggtaagttcgttaacggtacctcacacgtttttactgaatgcggcctcactttgaacagtaatgcagagctttgcgaatacctggatgatagagatcaagaagctttttactgtatgaaaccccagcacatgccatgtgaagctttgacatatatgaccacacgcaacagagaagtttcctacctaacagataaagagaacagcctgtttcacagatcaaaagttggtgttgaaatgatgaaagacagaaagcatatagatgtaaccaattgcaacaaacgagagaagatcgaggaaacttgtcaggtcggaatgaaaccacctgtgccaggaggttacaccctgcaaggaaaatggatcaccaccttctgcaatcaggtccagctcgacacaataaagataaatggctgtctaaaggggaaacttatctacctgctgggtgactcaacactgcgacaatggatctactacttcccaaaagtggttaagaccctcaaattcttcgacctccacgagacgggcatttttaaaaagcatttgcttctggacgcagaaaggcacacccagatccaatggaagaagcacagctaccctttcgtaacatttcagttatactccttgatagatcacgactacattccccgggaaatcgatcgcctatctggagacaaaaacactgcgattgtcattacttttggccagcactttaggcctttccctattgacattttcattcgccgcgctattggggtgcagaaagcaattgagcggttattcctgaggtcacccgcaactaaagtaattattaaaacagagaacattcgagaaatgcacatagaaactgaaaggtttggggacttccatgggtacattcactatctgatcatgaaggacatctttaaggatttaaacgtcgggattatagacgcctgggatatgactatcgcttatggtacggacaccattcatcctcccgaccacgttattggcaaccagataaatatgtttctgaattacatctgctag

SEQ ID NO: 13531 - RNA, 597 nt, synthetic construct
  misc_feature 1..597: note = source = /note="Description of Artificial Sequence: Synthetic coding sequence"
  source 1..597: mol_type = other RNA
atgcccgtacctgccttatgtctcctgtgggcactcgctatggttactcgcccagcatcagccgcgccgatgggcggcccagaattggcccagcacgaggaactgacgctgctttttcacggaacactgcagctcggccaagctcttaatggcgtgtatcggactacagaaggcagactcacaaaggcacgaaattctctcggactctacggcagaactattgagctactcggccaggaggtgagcaggggacgagacgccgcccaagagctgcgcgcaagcctccttgaaacacagatggaggaggatatcctgcagctacaagcagaagccaccgccgaggtcttaggtgaagtcgcacaggcccaaaaggtgctcagagatagtgtccaacggctagaggtgcagctgcggagtgcctggctgggcccagcctatagggaattcgaagtcttaaaggctcacgctgacaagcagtcacatatattgtgggctctgacaggccacgtgcagagacagaggagggagatggtagctcaacagcatcggttgcgacagattcaggaacgacttcatacagcggccctccccgcgtag

SEQ ID NO: 13532 - RNA, 1455 nt, synthetic construct
  misc_feature 1..1455: note = source = /note="Description of Artificial Sequence: Synthetic coding sequence"
  source 1..1455: mol_type = other RNA
atggccggtccatggacatttaccctgctgtgcggtctgttagcagctaccctgatacaggcgacattatctcccacagctgtattaattctgggccctaaggtgattaaggagaagctgactcaagagctgaaggaccataacgctacgtcgattctccagcagcttccacttctaagcgccatgcgagaaaaacccgccggaggcatccctgtcttaggaagtttagtcaacaccgtgttgaagcatatcatctggctgaaagtcattaccgcaaatatcctgcagttacaggtgaagcccagcgcgaacgatcaggagctgttagtcaaaatacccctggacatggtggccggcttcaatacacctctcgtgaagacaattgtggagtttcatatgaccactgaggcccaggctacgattaggatggatacatctgctagtggacccacacggctcgtactgtccgactgcgcaaccagccatggaagtctgcgaattcaacttttgcataaactgtcctttctcgtcaacgctctggccaaacaagtcatgaatttactcgtgcccagcctccccaacctcgtcaagaaccagctctgccccgtgatagaggcttctttcaacggtatgtacgctgatctgcttcaactggtcaaggtccccatatcactttcaatagacaggctggagtttgacttactgtaccccgctattaaaggcgacactattcaactttatcttggcgctaaacttctggattcccaagggaaggtgactaagtggttcaacaactctgcagcatctctcaccatgccaacactcgataatatccctttttctctcatcgtgtctcaagacgtcgttaaagcagcagtcgccgccgtgttgtcacccgaagaatttatggtactgttagactcagtacttcccgagtcagctcacaggctgaaaagtagtattggcttgatcaatgaaaaggctgcagataagttgggctcaacccagatagtaaaaatcttgacacaagacacaccagaatttttcatcgaccagggtcacgccaaggtagctcaactgatcgtgctcgaagtttttccttcttccgaagctctgcgtcctctttttacactagggatcgaggcttcttcagaagctcagttttacacgaaaggcgaccagctgatcctgaatctcaataatatttcatcagataggatacagcttatgaattctgggataggatggtttcaaccagatgttcttaaaaacataataaccgagattatacattcaatcctgctccccaatcaaaacggcaagctaaggtcaggggtgccagttagtttagtcaaagcattgggatttgaggcagcagaaagctctctgaccaaagacgccctggtgctaacacctgccagcctgtggaagccctcgagcccagtaagtcagtag

SEQ ID NO: 13533 - RNA, 750 nt, synthetic construct
  misc_feature 1..750: note = source = /note="Description of Artificial Sequence: Synthetic coding sequence"
  source 1..750: mol_type = other RNA
atgcttcagttatggaaattagtgttactctgcggagtcctgaccggaacctccgagagtctcctcgataatcttggcaatgatctttcgaacgtggtcgacaaacttgaaccagtcttgcacgaaggcctggagaccgtagataataccttgaagggaattctggagaagctgaaagtagatctaggagttctccagaaatccagcgcctggcaattagcgaagcaaaaagctcaggaagccgaaaagctgctcaacaacgtgatttcaaagctgttgcccaccaatacagacatctttggcctcaaaatctctaacagcctaattctggacgtgaaagcagaacctatcgatgacggtaaaggattgaatctctcattcccagtcacagcgaacgtcaccgtagccggacctattattggccagattattaaccttaaagcgagcttagatttgctgacagccgttactatagagacggacccacagactcatcaaccagtagccgttttgggagaatgtgcctccgaccctacctcaattagtctatcgctcttggacaaacattctcagatcatcaacaagtttgtcaattccgtgatcaatactctaaagagcactgttagtagcctcctccagaaggaaatctgtcctcttatccggatttttatacatagtttagacgttaacgtgatacagcaggtggtcgacaaccctcaacataaaacacaactccagaccctcatatag

SEQ ID NO: 13534 - RNA, 1959 nt, synthetic construct
  misc_feature 1..1959: note = source = /note="Description of Artificial Sequence: Synthetic coding sequence"
  source 1..1959: mol_type = other RNA
atgcaaggccctcttcttcttcctggactgtgtttcctgctctctctgtttggcgcggtaacccaaaaaactaaaacatcatgtgccaagtgccctccgaacgcttcctgcgtaaataatacacactgtacatgcaaccacggttatactagcggtagcggccagaaactttttaccttcccactcgagacttgtaatgacattaatgagtgcaccccgccatattcggtctattgcggtttcaacgctgtgtgctataatgtggaaggttctttttattgccagtgtgtgccaggttaccgcctccactccggaaatgagcagttctctaactcaaacgaaaatacctgccaggacaccacaagttctaagacaactgaggggcgcaaggaattgcagaagattgtcgataaattcgaatcactactcaccaatcagacactttggcgaacagaggggcggcaagaaataagcagtacagccactacaatcctgcgcgacgtcgaatcaaaggtcctcgagacggctctcaaagaccctgagcagaaggtgcttaaaatccaaaacgatagcgtggcaattgagacccaggcaataaccgacaattgtagcgaggaacgtaagacttttaaccttaatgtgcaaatgaactcaatggatattcggtgttctgatatcatacagggtgacacccaaggaccatccgccatcgcattcataagctactcctctctggggaatatcatcaatgcaacattcttcgaagagatggataagaaagaccaagtttatctcaattcccaggtggtaagtgcagctattggccccaaaaggaatgtttctttatctaaatcggtgacacttacatttcaacacgtgaagatgacgcctagcaccaaaaaggtgttctgtgtctattggaaaagtaccggccaggggtcccaatggtcacgcgacggatgtttcctgatccacgttaacaaatcccacacaatgtgtaactgtagccacctgtcgagcttcgcagtccttatggcactgacctcccaagaggaagatcccgttctcactgtcatcacctatgttgggctgagcgtctctctgctgtgcctcctgttggcggctctgacttttttgctgtgcaaagctatccgcaatacgtccacatccctccatctgcaactgtcactctgccttttccttgctcaccttttatttctggtagggattgaccgcactgaacctaaagtcctttgcagcatcattgctggagccctgcactatttgtatttagcggcattcacttggatgcttctcgagggggtacacttatttctcaccgcccgcaatctgactgttgtgaattattcttccatcaatcggcttatgaagtggataatgtttccagtcggttacggtgtgcctgctgtaaccgtagccatttctgccgctagttggccacacctctacggaaccgcagacagatgttggctgcacctggatcaggggttcatgtggtcatttctgggacctgtctgtgcgatcttttctgctaacctagtcctgtttattctggttttctggatcctcaaaaggaaactgtccagcctcaattccgaggtcagtacaattcaaaatacaagaatgcttgcatttaaggcaaccgcacagctgtttattttaggatgtacttggtgccttggattgcttcaagtcggcccagcagcacaggtgatggcctacctgtttaccatcattaacagccttcaaggtttcttcattttcttagtttattgtctccttagccaacaggtgcaaaagcagtaccagaagtggttccgagagatagtaaagagcaaatcagaatccgagacatatacgctcagttctaagatgggtcctgattcaaaaccctcagaaggtgatgtatttcctgggcaggtcaaaagaaaatattag

SEQ ID NO: 13535 - RNA, 1263 nt, synthetic construct
  misc_feature 1..1263: note = source = /note="Description of Artificial Sequence: Synthetic coding sequence"
  source 1..1263: mol_type = other RNA
atgtccccacccccacttctccagccattactgctgttacttccgctccttaatgtggaacccagcggcgccaccctgattcgaattccactgcaccgcgttcagcccggccgccgcattcttaacctgctaaggggctggcgggaaccagctgagctcccaaaacttggcgccccttctcctggcgataaaccgatcttcgttccattgagcaactacagagacgtgcagtatttcggcgaaattggactcgggacgccgccccagaacttcaccgtagccttcgataccggatcgtccaatttgtgggtcccttctagacgttgtcatttcttcagtgtcccatgttggctccatcacagattcgaccctaaggcgagctcatcattccaggcaaatggaaccaaatttgctatacaatacggcacaggcagagtggatggtatcttgtcagaagataaacttacaattgggggtataaagggcgccagtgtcattttcggcgaagctctatgggagcctagtttagtgtttgcctttgctcacttcgacggtattctcggcttgggttttccgatcctgagcgtggaaggcgtgaggccccccatggatgttcttgtggagcaagggttgctggataagcccgtattttccttttacctcaatcgagatcctgaggagcctgacgggggcgagcttgtgctgggaggatctgatcctgcccattatattccccctcttacattcgtgcccgtgacagtccccgcctattggcaaatccatatggagcgggtcaaagtcggaccagggctgacactttgcgccaagggttgcgctgctatactcgacactggaacctcactcattactggacccaccgaagaaatcagagccctacatgcagctattggtggaatacccctccttgccggagaatatattatcctttgctctgaaatcccaaagttacccgcagtgtctttcctcttgggcggggtgtggttcaaccttactgcacatgattacgtgatccagacaaccaggaatggcgtaagattatgcctgagtggttttcaagccctggatgtacctccccctgccggaccattttggattctcggcgacgtgttccttggcacctacgtagcagtttttgaccggggagatatgaaaagttctgcacgcgtaggtctggctcgggcaaggacgagaggtgcggaccttggatggggtgaaacagcacaagctcaatttccaggatag

SEQ ID NO: 13536 - RNA, 1293 nt, synthetic construct
  misc_feature 1..1293: note = source = /note="Description of Artificial Sequence: Synthetic coding sequence"
  source 1..1293: mol_type = other RNA
atggcatggaccttcgagtgctcacgcaccacatcacctgagcctttaagcacatctccatgcagaaccacatctagcaggaactcacctacaatgtcttgtccagcatctgtggcatgcgagcctagcacatctactaccacctcgagccctcccaagttatcagtcgcaccccaatttctccctcgttctctgagagtcgctgacttagccgcaaaccaagtgatggaaatcttccccttaaccttcggtgaaaagcccgccctgaggtcagtctacttgcataataatcagctttccaacgccggtctaccccccgacgccttcagaggctccgaagcaattgccactttgagtctctcaaataaccagctgagctacttaccaccttcactacccccttcacttgaacggcttcatctgcagaataatctgatttccaaagtgccccgcggtgcactctctagacagacacagctgagagaactatacctgcagcacaatcagctgaccgacagcgggctggatgcaacgactttttctaagttacacagccttgagtacctggatctttctcacaatcagctaacaacggtgcccgcagggctgccccgaacacttgctattctacacttgggacgtaatcggatccggcaagtcgaggccgccagactccacggggcccgggggctgcgatatctcttactccaacacaaccaacttggttcaagtggccttcccgctggcgccctgcgtcctcttcgcggactccacacactgcacctgtacggcaacgggctcgaccgagtcccccccgcgctgccccgtcgactaagagcattggtactgccacacaaccacgttgctgccctaggcgctcgggacctcgtggccacccccggcctcacagaattgaatctcgcttacaatcgcctggcatccgcccgcgtacaccaccgcgcctttcgacgtctaagagccctgcgatccctcgatcttgccggcaaccagcttacccgattgcccatggggttacccacaggattacgtacacttcagcttcaaagaaaccaattaaggatgcttgagccagaacctttggctggattggaccagctcagagagctgagccttgcgcataatcgccttcgcgtgggggatataggacctggcacttggcatgagttgcaggccctgcaggtacgccatcgacttgtctcccatacagtccctagggcccctcccagcccctgcctgccatgccacgttccaaacattttagtctcctggtag

SEQ ID NO: 13537 - RNA, 3162 nt, synthetic construct
  misc_feature 1..3162: note = source = /note="Description of Artificial Sequence: Synthetic coding sequence"
  source 1..3162: mol_type = other RNA
atgtggcagccccgcagaccttggccgcgcgttccatggcggtgggctctggccctcctcgcactggtcggcgccggactgtgtcatgccgggcctcagccaggctatcctgcgaggccttcagcacgaaacaaaaactggtgcgcctatatcgtgaacaaaaacgtgagctgtagcgtccttgaaggttcggagtcatttatccaagctcaatacaactgcgcctggaaccaaatgccctgtccctcagctcttgtatacagagtgaattttcgccccagatatgtgactaggtataagactgtgacccagctcgaatggagatgttgtcccggcttccgtggaggtgattgtcaggaaggaccaaaagatcctgtcaaaacgctccggccaacccccgcacgccctcgcaatagtctgaagaaagcaacagataatgaaccgagccagttctcagaaccaaggaagaccttgtctcccactggaacagctcagccgtcatggggagttgacccaaaggagggccctcaagaactgcaggaaaagaaaattcaagtgctcgaagaaaaggttttaaggctcacccgcacagttctggacctacagtcctcccttgccggggtcagtgaaaacctcaaacacgccacccaggatgatgccagtcgcactcgtgcgcctggtctcagctctcaacatcccaaaccagacacaactgtgagtggcgacacagagacaggacaaagccccggagtgtttaatactaaggaatcgggaatgaaggacattaaaagcgaactggccgaagtgaaggataccctgaagaataagagcgacaagcttgaagaattagacggaaaggtcaagggctacgagggacagttaagacagctacaagaagccgctcagggaccgactgtgaccatgaccactaacgaactatatcaggcatatgtggactctaaaattgacgcactccgggaagaacttatggaaggaatggatagaaagctggccgatcttaagaactcttgcgagtataagttaacaggtctgcaacaacaatgcgatgactacggatccagctatctgggcgttattgaactaatcggggagaaagaaaccagcctgcgaaaagaaattaataacctgcgcgcccgactgcaagagccaagcgcccaggccaattgttgcgacagtgaaaagaacggcgatattggccagcagataaagactctagaccaaaagatagagagggttgcagaagccaccagaatgctcaatggaaggttagacaacgaatttgaccgcctaatagtacccgagcctgacgtggacttcgatgcaaagtggaatgagcttgatgctcgcattaacgtgaccgaaaaaaacgcagaggagcactgcttttatatagaggagacactcagaggtgcaatcaatggagaggtgggggacctgaaacagcttgttgatcagaaaatccagtccctggaggatagactcggctcagttcttctgcagatgacaaacaatacaggcgcagagttgtcccctcccggtgccgcagcgctgccgggggtaagtggctccggagatgaacgcgtaatgatggagcttaatcacttaaaagataaggtgcaggtggttgaagatatctgcctacttaatatccagggcaaaccgcacggaatggaaggagcactgccaaacagagaggaccgtgcggtgcgggactccttacacctgctgaaaagccttaatgatacgatgcacagaaagttccaggaaacagaacagactatccagaaattgcagcaagatttctcattcctctatagtcagttgaaccacaccgaaaatgacgttacccacctccagaaggaaatgtcaaactgtagggcaggcgaaaacgccggaatgggccggtttaccaaggtcggagagcaggagcgcacagttgatactctcccttcccctcagcatcctgtggcccactgttgctctcaactagaagagcgttggcagaggcttcagtcccaggtaatcagtgagctcgacgcatgcaaggagtgcacacagggagtacagcgggaggtctccatggtggaagggcgagtctcgcacatggaaaaaacctgctctaagttagatagcatctctggtaatcttcagcgcataaaggaaggactaaataagcacgtgtccagcttgtggaattgcgtgcggcagatgaacggcaccttgcgaagccactctcgagatatttcagggcttaagaatagcgttcagcagttttactctcacgtcttccaaatctcaaccgacctccaagacctcgttaaatttcaacccagtgccaaagctccctcccccccaccccctgcagaagctcccaaagaacccctgcagcctgaacccgcacctcccagacctagtggacctgctacagcagaagatcccgggcgaagacccgtacttccccagcgccctccggaagagaggccccctcagccacccgggtccacaggagttatagcagagaccggccaagctggacccccagccggagctggtgtttccgggcggggcttgccgagaggagtggacggtcaaacaggatccggcacagtgcctggagccgaaggatttgctggggcgcctggctatccaaagagtcccccagtcgccagcccaggcgccccagtcccatctttagtgtctttttccgcgggccttacacagaagccctttccaagcgatgggggtgtggtgctgtttaataaggttctagtcaacgacggcgatgtgtataacccttcaaccggtgtctttaccgccccttacgacggtcggtatctgatcaccgcaactctgacccctgaacgcgacgcctacgtagaagctgtcttgagcgtgagcaatgcctccgtggctcaactgcacaccgccggataccggagggagtttcttgaataccaccgaccaccaggagctctgcacacttgcggaggaccgggggcatttcaccttattgttcatctgaaagctggcgatgctgtaaacgttgtggtcactgggggaaaactggcacataccgatttcgatgaaatgtactcaactttcagtggagtcttcttgtatccctttcttagccatttgtag

SEQ ID NO: 13538 - RNA, 1548 nt, synthetic construct
  misc_feature 1..1548: note = source = /note="Description of Artificial Sequence: Synthetic coding sequence"
  source 1..1548: mol_type = other RNA
atggcccagcttttcttgcctcttctggcagcactggtgctggcccaggcccccgccgcattggccgatgttctggagggagattcaagtgaggacagagcctttcgcgtgaggattgcaggggacgcacctctacagggcgtccttggaggagcactgaccattccatgccacgttcattacctacgacccccacctagcaggagagcggtacttggcagcccacgggtgaaatggacttttctgagccgtggtagggaagccgaggttttggtcgcccgcggagtcagagtgaaggtgaacgaagcatatcgatttagggtcgctttgcccgcatatcccgccagccttacagacgtctcattggcgcttagcgagttacggcccaacgattcaggcatctacaggtgcgaggtgcagcacggcattgatgactcatccgatgcagttgaagacagccagctctacccaatccagacacctcgcgaagcctgctacggagacatggacggatttcctggcgtacgcaattacggcgtggtcgatcccgatgatttgtacgacgtgtactgttatgctgaggacttgaatggtgagttgttcctgggcgaccccccagagaagctcacactcgaggaagcaagagcttattgccaggagcgtggcgctgaaatcgccactaccggacaactgtatgctgcttgggacgggggccttgatcattgttcccccggttggttggccgacggaagtgtcagatacccaatcgtcacaccgtcacagcgatgcggcggcggtctacccggagtcaagactttgtttctgttcccaaaccagaccgggttccccaacaagcactcccgattcaacgtctactgctttcgtggtagtacatgcctgttgcccagcctgcgaccccccacccagcccccaactcaagacggactcgaggcaatcgttacagtgaccgagaccttggaggagttgcaattgccgcaggaggctacagaatccgaatctcggggagctatctattcaatacccattatggaggatggcggagggggatcaagtacaccagaggatcctgccgaggccccgagaacgctgcttgaatttgagacgcaatccatggtgccccctacaggctttagtgaagaggaagggaaggctctggaggaggaggaaaaatacgaggacgaggaagaaaaagaggaagaagaagaagaggaggaggtagaggatgaggctctgtgggcctggccttctgaactgagtagtccgggtccagaagcttccctccccactgagccagctgcccaagaggagtctctctcacaggcccccgctagagcagtgctacaacccggcgcgtctcctttgccagatggagaatctgaggctagtagaccaccgagggttcatggaccaccaaccgagacgctcccaacaccccgggaacgaaacctagctagtccttccccaagtaccttggttgaagccagggaggttggggaggccaccggaggaccagagttgagcggatag

SEQ ID NO: 13539 - RNA, 1023 nt, synthetic construct
  misc_feature 1..1023: note = source = /note="Description of Artificial Sequence: Synthetic coding sequence"
  source 1..1023: mol_type = other RNA
atgcctggttggttaacgctacctactctatgtagatttcttctgtgggcgttcaccatcttccacaaggcgcagggggatccagcctcccatccaggcccccattaccttttgcctccaatccacgaggttatccacagccatagaggagccactgccacactgccctgcgtgttggggacaaccccacctagctataaggtgcgatggtctaaggtcgaacccggcgaactcagagagaccctgattctgatcacgaacgggctgcacgcacggggatacggaccactcggaggacgcgcacgtatgagacgaggacatcggctagatgccagcttggtgattgccggagttagactggaagacgagggccgatatcgctgtgaattgatcaatggcattgaggatgagtcggttgccctgacactgtcacttgagggagtcgtgtttccctatcagcctagcagaggccgctatcagtttaattattacgaggctaagcaagcatgtgaggagcaggacggccgccttgccacatatagccaactctatcaggcatggaccgaaggtctagactggtgcaatgccggctggctcttagaaggctccgttagatatcccgtcctgacggctcgggcaccatgcggaggacgggggcggcccggaatacggtcctacggacccagagataggatgcgagaccgctacgatgcattttgcttcacaagcgcacttgcagggcaggtcttttttgtaccaggcaggctaacattgtcagaagctcatgctgcgtgccgaaggagaggcgctgtcgtggccaaagttggccatctttatgcggcctggaaatttagcggattagaccaatgtgacggaggatggttggctgatggatctgtacgtttcccaatcactaccccaagaccccgctgtggaggactgccggatccaggcgtgcgctcttttggatttccccgaccccagcaggctgcctacggaacatactgttatgccgaaaactag

SEQ ID NO: 13540 - RNA, 690 nt, synthetic construct
  misc_feature 1..690: note = source = /note="Description of Artificial Sequence: Synthetic coding sequence"
  source 1..690: mol_type = other RNA
atggatctgctgcagttccttgcatttctgttcgttctgctgctctctggtatgggcgcgacaggcacactgcggacgagtctggaccccagcctggaaatttataaaaaaatgtttgaggttaaaagacgtgagcagctcctggctttgaaaaacttggcccagctgaacgatatccaccaacagtacaaaattttggacgttatgctgaagggcctatttaaagttctagaagatagtagaaccgtcctcaccgcagccgatgtcctccctgatggccccttcccacaagatgagaaattgaaggacgccttctcgcatgtggtagagaacacagcgttcttcggggacgtagtgctgcgctttccccgcatagtccactattattttgaccacaactccaattggaacctgctaattcgctggggaatcagtttctgtaaccagacaggcgttttcaatcagggcccccatagtcctatcctttctcttatggcccaagaactcggcatctctgagaaagattccaattttcagaacccgtttaaaatcgaccgcacagaattcataccctccacagacccttttcagaaagctctgagagaggaggagaaaagacgaaagaaggaggaaaaaagaaaggaaatcagaaaggggccaagaatcagtaggagccagagcgagctgtag

SEQ ID NO: 13541 - RNA, 465 nt, synthetic construct
  misc_feature 1..465: note = source = /note="Description of Artificial Sequence: Synthetic coding sequence"
  source 1..465: mol_type = other RNA
atgtcagtgggcacaagcctagagcaagcccagatgagcactttaacctgccccttatttattccgaccgtgggaagaaagaccgccctgcatagtggtgaggacttccagaccctgctctttgagagggtgttcgtcaatttggatggctgctttgatatggccacaggccaattcgccgccccattacgaggaatctactttttctccctcaatgttcactcctggaactataaagaaacgtacgttcacatcatgcataatcagaaagaagctgtgatcctgtatgcccaaccctccgagagatctataatgcaaagccagtctgttatgcttgacctcgcctatggagatagagtgtgggtgagattgttcaaaagacagcgcgagaacgcgatatatagcaatgactttgacacttacattacattcagtggtcacctcataaaagccgaagacgattag

SEQ ID NO: 13542 - RNA, 900 nt, synthetic construct
  misc_feature 1..900: note = source = /note="Description of Artificial Sequence: Synthetic coding sequence"
  source 1..900: mol_type = other RNA
atgagatccgttggcgaaggcgctcgggagtggattagagagtgccagcaccaattccgccaccatagatggaattgcactactttagaccgtgaccatacagtatttggaagagttatgctgagaagtagcagagaggccgcctttgtgtacgcaataagctccgctggcgtagttcatgctattacacgggcatgtagccaaggggaattaagcgtttgtagttgtgatccttatacacgaggcaggcaccatgatcagagaggtgactttgattggggaggctgctctgacaatattcactatggggtgaggttcgccaaagcattcgtcgatgcgaaggaaaaaagattgaaggatgctagagcacttatgaacctacataacaatagatgtggaagaaccgctgtgcgcagatttcttaagctcgagtgtaagtgccacggggtgtccgggagctgtacattgcggacttgttggagggccctgtccgacttcagacgcacaggagattatttgaggagaaggtacgacggggctgtacaggtgatggcaacccaggacggggctaatttcacagccgctagacagggctacaggcgcgcaacacggacagacctggtctatttcgacaactctcccgattattgtgtgctggacaaagcagccgggtcactaggcaccgccggaagagtttgtagcaaaacgtcaaagggaaccgatgggtgcgagatcatgtgctgcggtagaggctacgacactactcgggtaaccagggtcactcagtgtgagtgcaagttccactggtgctgtgccgtcaggtgtaaagaatgtaggaacacagtggacgtgcatacctgtaaagctcctaagaaggccgaatggctcgaccagacctag

SEQ ID NO: 13543 - RNA, 1710 nt, synthetic construct
  misc_feature 1..1710: note = source = /note="Description of Artificial Sequence: Synthetic coding sequence"
  source 1..1710: mol_type = other RNA
atgctacttctcttttctgtgatcttgataagctgggtttcaaccgtggggggtgaaggtactctctgcgattttcccaagatccatcatggtttcctgtacgatgaggaagattataaccctttcagccaagtgccgactggagaggtgttctattacagctgcgagtacaactttgtaagtcccagtaaatcattttggacccggataacttgtacagaggaaggttggagccccacgcccaaatgtttgagaatgtgttcttttcctttcgtcaagaacggacattcagaatcatctggactaatccatctagagggagacacagtgcagataatatgtaatacaggctattctcttcagaataatgaaaagaatattagctgcgtggaaagaggatggtctacaccccctatttgtagcttcacgaaaggcgagtgccatgtcccaatcctggaagcaaatgtggatgcacaaccgaagaaggagagttataaagttggagatgtgttaaagtttagctgccgcaagaatctgattcgagtgggaagtgactctgtgcagtgctatcagttcggctggagtccaaatttccctacttgcaaaggccaagttcggagttgcggaccgcctccccagttgagtaacggcgaagtcaaggagattagaaaggaagaatatggacacaatgaagtcgtggagtacgactgcaaccccaactttattattaatggacctaaaaaaatacagtgcgttgatggagaatggacgacactccctacttgcgtggagcaagtcaagacctgtgggtacatccccgaattagaatacggatatgttcagccatcagtgccaccataccaacatggcgtgtcagtcgaagtgaactgtagaaatgaatacgcaatgatcggcaataacatgatcacctgcatcaacggaatatggaccgagctacctatgtgcgtagctacccatcaactgaagagatgtaagattgctggcgtaaacatcaagaccctactgaaactctctggtaaggagtttaaccacaactcccgaatccgctatagatgttccgatattttccgataccgccactccgtttgtatcaacgggaaatggaacccagaagtagactgcaccgagaagcgggaacagttttgtccaccacctccacagattccaaatgcacaaaacatgactaccacagtcaactaccaggacggcgagaaagtggccgtgctttgcaaagagaattatctgttgccagaagccaaagagatcgtgtgcaaagatggaagatggcaaagcttaccacgttgcgtcgaatccaccgcatactgcggtccacccccttctataaataacggagacacaacctccttccctttatctgtgtacccgccgggatccaccgttacatatagatgtcagagcttttacaagctgcagggttctgtgactgtcacatgccgaaacaagcagtggagcgagcccccccgatgtctggatccatgtgttgtgagcgaggagaatatgaacaaaaataacatacaactgaaatggagaaatgatggtaaactttatgctaagacaggtgacgctgtcgaattccagtgtaaattcccacataaggctatgattagttcgcccccatttagggctatttgtcaggagggcaaattcgaataccccatttgtgagtag

SEQ ID NO: 13544 - RNA, 351 nt, synthetic construct
  misc_feature 1..351: note = source = /note="Description of Artificial Sequence: Synthetic coding sequence"
  source 1..351: mol_type = other RNA
atgaagggtttaaggtcacttgccgcaacaaccctggccctgttcctggtcttcgtgttcctaggaaatagttcatgtgccccacagaggctcctggagagacggaattggaccccacaggctatgctctacctaaagggagctcagggaagacgatttatctccgaccagtccaggagaaaagacctgagcgacaggccactacccgaacgtaggtcaccgaatccccaattgctgacaatccccgaagccgccaccattcttctggcctcattgcaaaagtcccccgaagatgaggaaaagaactttgatcagacaagatttctggaggactctcttttaaattggtag

SEQ ID NO: 13545 - RNA, 192 nt, synthetic construct; identical to SEQ ID NO: 11906
  misc_feature 1..192: note = source = /note="Description of Artificial Sequence: Synthetic coding sequence"
  source 1..192: mol_type = other RNA

SEQ ID NO: 13546 - RNA, 567 nt, synthetic construct
  misc_feature 1..567: note = source = /note="Description of Artificial Sequence: Synthetic coding sequence"
  source 1..567: mol_type = other RNA
atggttccaggagccgcaggctggtgctgtctggttctctggttgcccgcctgtgtcgctgcccacggattcagaattcatgattatctctatttccaagtattaagcccaggagatatccgctacatcttcacagcgactcccgccaaagactttggaggtatcttccacacacggtatgaacagattcacctagtgcccgctgaacctcccgaagcttgtggcgaactgtctaatgggttctttattcaagatcaaatcgcattagtggaaagaggtgggtgctcatttctgtctaagactcgcgtcgttcaagagcacggaggcagagctgtgataatctcagataacgccgtggacaatgatagtttctacgtggagatgattcaagattctacccaaaggaccgcagatataccggcattattcctgctcggtcgagatggttatatgattcgcaggagtctggagcagcatggtctcccctgggccatcatttctattcctgttaacgtcacttcgattcccacttttgaacttctccagcccccgtggaccttctggtag

SEQ ID NO: 13547 - RNA, 2559 nt, synthetic construct
  misc_feature 1..2559: note = source = /note="Description of Artificial Sequence: Synthetic coding sequence"
  source 1..2559: mol_type = other RNA
atgaagccaatgcttaaagacttctctaacctcttgctggttgtcctctgtgactacgttctcggggaagctgagtatttactcctgcgggaacccggacacgttgctctttcaaatgatacagtgtatgtcgacttccaatacttcgatggagcgaacggaacgttgaggaatgttagcgttcttctgcttgaggcgaacaccaaccagacggtcaccactaaatacctgctgacaaaccaaagccagggaacactgaagttcgaatgtttttactttaaggaagccggagactattggtttacaatgacccctgaagcaacagacaactcaacgccctttccatggtgggagaagagtgcttttctcaaagtggagtggcctgtttttcacgtagatctcaatagaagtgcaaaagcagctgaaggtacttttcaggtgggactctttacctctcagccattgtgcccattccctgtagataagcccaatattgtagtcgatgtgatctttacgaatagccttccggaagccagacgtaattctcgccagccattggaaattaggaccagcaagaggaccgaactcgcacagggccaatgggtggaattcggttgtgcccccctgggaccagaagcctacgtcaccgtggttctaaaactcctaggccgggattctgttataacgtccaccggtccaattgatcttgctcagaaatttggttataaactggtgatggtgcccgaacttacatgtgagagcggagttgaagtcaccgtgctgccaccaccatgcacttttgttcagggagtggtaacagtgtttaaagaggctccaagatatccaggtaaaagaactatccacttagctgagaattcgctaccactcggagagagaaggactatctttaattgcaccctttttgatatgggtaagaacaagtattgttttgattttggcatttcaagcaggagccattttagcgcaaaagaagaatgtatgctgatccaacgaaataccgaaacctggggtctgtggcagccctggtctcagtgctccgcaacctgcggtgacggggtacgtgagcggaggcgagtgtgtctgaccagtttcccttcctcccctgtctgtccaggaatgtctctggaagcctctttatgttcactagaggaatgtgccgcctttcagccatcctctccaagccctctgcaaccacaaggacccgtgaagagcaacaacatagtcaccgtgaccggcatctcactttgcctgttcattattatcgccactgttctcatcacactgtggcgacgtttcggccgccccgccaaatgtagcacacctgctcgacacaattccatccattccccttctttcagaaagaatagtgatgaagaaaatatttgcgaactgtccgaacaacgtggctccttcagtgacgggggtgacggcccaacaggatccccaggcgacaccggaatcccactgacctatcgcagaagcggtcctgttccacccgaagatgacgcatctggttccgaatcttttcagtcaaatgcccagaagatcatcccaccactgttctcctacagactggcccagcagcagttgaaagagatgaagaagaaaggtctaactgagacgaccaaggtttatcacgtatcccagtcgcctttaacagataccgccattgacgcagctcctagcgccccactcgacctggagtcacccgaggaagctgcagccaataagtttagaataaaatccccctttcccgagcagcccgctgtctctgccggtgaacgccccccttcaaggctcgatcttaatgtgacgcaggcaagctgcgcaatctctccttctcaaaccctcatcagaaagtctcaagccagacatgtcggaagccgcggcggaccatccgagaggagccacgccagaaacgcccactttagaagaacagcatcctttcatgaggcgagacaagcacgacccttcagagaaagatcaatgtccactcttacccctcggcaagcgcccgcttacagctctcggactaggacttgcgagcaggctgaggacaggttccgtccacagtctcgcggcgctcaccttttccctgagaaactcgagcacttccaagaagcttcaggcacccgtggcccgctcaatccgttgcccaaatcctacaccctgggccaacccctgaggaagcctgatctgggagatcaccaagccggcctggttgccggaattgagcgcaccgagcctcaccgcgcaagacgtggcccctcacccagtcacaagtccgtttcccggaagcaatccagcccaattagccctaaagacaattatcaaagagtctcctccctctcacctagtcagtgtagaaaagacaaatgccagagctttcctacacaccccgagtttgccttttatgataacaccagtttcggcctgactgaagccgaacaaaggatgcttgacctgcctggctattttggctccaatgaagaagacgagacaacatccacactctctgtagagaagttggtgatttag

SEQ ID NO: 13548 - RNA, 369 nt, synthetic construct
  misc_feature 1..369: note = source = /note="Description of Artificial Sequence: Synthetic coding sequence"
  source 1..369: mol_type = other RNA
atgggctttcatttctgtatttggataatcttccttctgcccccaccttgtaagaaatgcctctcccctcctactatgaatcttcgaccccctaagagctgtggaaatgtgttttactgggtgctggtactaaatagtggtctcctgtataagttttgtcagacaattaagtgccgagctaattggcggccagctcgcgctccaagaggatggaatgaagctacagagcgacaccaggaacgacggacacagatggaaacagagatggggggcatcagcaccacatattggcaccggctatgcacttgtacagatcgaagggccgaaaaactggtaatggacgggaataactgctggtttcacaaatag

SEQ ID NO: 13549 - RNA, 978 nt, synthetic construct
  misc_feature 1..978: note = source = /note="Description of Artificial Sequence: Synthetic coding sequence"
  source 1..978: mol_type = other RNA
atgcagggacgagtcgcaggcagctgtgcgcctttgggcctgcttctggtatgtcttcacctgcccggtctgttcgcgaggtctataggagtagtagaggagaaggtctcgcagaaccttggcacgaatctcccccagctgggacagccctctagtaccggcccctctaactcagagcacccacagcccgcccttgacccacgcagtaacgatcttgccagagtacccctgaaactttccgttccagccagtgacgggttccctcccgcaggaggctctgcggttcagcgttggccccctagttggggcctgccagcgatggactcttggccgcccgaagatccctggcaaatgatggccgccgcggctgaggatagactcggggaagctctgccggaggagttatcgtatctgagctcagccgccgctcttgccccaggatctggccccctccccggagaatcctcacctgacgccaccggactgtctccaaaggctagtcttcttcaccaggattctgaaagcagacggcttcctcgttcaaacagcttaggtgccggcggtaaaattctgtctcagcgcccaccctggtccctgattcaccgagtccttcctgatcacccctggggcactctaaatccatcagtttcttggggcggcggcggacctggaacagggtggggaacccgaccaatgccccatcctgaaggaatttggggcataaacaaccagcctcccggaacgagctgggggaacattaaccggtaccctggaggcagctgggggaacattaatagatatcctggtggctcctggggcaacattaatcggtatcctggcgggtcatggggcaacattcatctttatcccggcatcaacaaccctttccctcctggggtgctgcgtccaccagggtcttcttggaatattcctgccggcttcccaaacccaccctcacctagattgcagtggggctag

SEQ ID NO: 13550 - RNA, 2631 nt, synthetic construct
  misc_feature 1..2631: note = source = /note="Description of Artificial Sequence: Synthetic coding sequence"
  source 1..2631: mol_type = other RNA
atgggacctgaggcactgtcgtcccttctccttctattactggtcgcctctggagatgctgatatgaagggtcactttgacccagctaagtgccgatatgccctgggcatgcaggatcggactatccctgattcggacataagcgcatcttctagctggtccgactccacagctgctagacattcgagactagagtcttctgatggtgatggcgcctggtgtcccgccggtagcgtgttcccaaaggaagaagaatacctccaagtcgacttgcaaagattacaccttgtcgccctggtcggaacccaaggaaggcatgctggcggtctcggtaaagagttttctagatcttacagattaaggtactccagagacggacgtcgatggatgggatggaaagacagatggggacaggaagttatctccggcaatgaagacccagaaggcgttgttctgaaagacttgggtcccccaatggtcgctcggttagtacgtttttacccccgggcggatcgtgttatgagcgtttgtcttcgggtggagctatacgggtgcctttggcgcgatggcttactttcatatacagcgcccgtggggcagacaatgtacctatccgaagctgtttacctcaacgactcaacgtacgacggacatacggtcgggggcctccagtacggcggccttgggcaattggccgatggcgtggtcggtctcgacgactttcgcaaatcccaagaactgcgcgtttggccaggatatgactatgtaggctggtctaaccactccttttcatcaggttatgtggagatggagttcgagttcgatagactgagagcatttcaagcaatgcaagttcattgcaacaatatgcacactctgggtgcccgccttccaggaggcgtagaatgtcgattcagacggggtccagctatggcctgggaaggagagccaatgcgacacaacttaggcggcaatttgggggacccgagagcacgggccgtgagtgtgccactcggtggaagagttgccagatttctgcagtgtaggtttttgttcgctggtccatggctcctgttctccgaaatatctttcatcagtgacgtggtaaacaactcctctccagctcttggaggtacctttccccctgctccttggtggcccccgggccctcctccaacaaacttttcatcactggaattggaaccgcgaggtcagcaaccagttgcaaaagctgaaggatcacccaccgctatcctgattgggtgcttagttgccattattctgctcctgttactgatcatagccctgatgctgtggcgccttcactggagaagactccttagcaaagccgagcggcgtgtgctcgaagaagaactcaccgttcatctctcagtcccgggtgataccattcttattaacaacagacccggccctagagaaccacctccataccaagaaccacgacctcgggggaacccgcctcattcagcgccatgtgtacctaacggtagtgcttacagcggagattatatggaacccgagaaaccaggggcccctttgctcccacctccaccccagaacagcgttcctcattatgcagaggcagatatagtgacacttcaaggtgtgactggcggaaacacatatgccgtgcccgccttaccacccggcgcagtaggagacggccctccaagggtggatttccctcgctccagactcaggttcaaggaaaagttgggtgagggtcagttcggcgaagtccatctttgtgaagtcgactcccctcaggaccttgtctccttggacttccctctgaatgtgaggaaagggcacccactcctcgtagcagtcaaaattctcagacccgacgccactaaaaatgcacggaatgactttttgaaagaagtgaaaattatgtcaagactcaaagacccaaacatcattagacttctgggagtgtgcgtccaggatgaccccctgtgcatgatcacagattacatggagaatggagacttgaatcagtttctgtccgcccatcagctggaagacaaagccgcagaaggagcgcccggagatggacaggcagcgcagggcccaacgatctcttaccccatgcttttgcacgtggctgctcagattgccagcggcatgcgttatctcgcaaccctcaacttcgtgcacagagaccttgctactaggaattgtctagtgggggaaaattttactatcaaaatcgcagactttggaatgtcaaggaacctgtacgccggtgattactatcgagttcaaggaagagccgttcttccaattaggtggatggcttgggaatgtatcctcatgggcaagttcactaccgctagtgacgtgtgggcgttcggggttactctctgggaggttctcatgttgtgtcgggcccagccatttggccaacttacagacgaacaagtgatcgagaacgctggggaattcttccgagatcagggcaggcaggtttacttatctcggccccccgcatgtccccagggattgtacgaactgatgctgagatgctggtcaagagaatccgaacagcgaccccccttttcccagctacataggtttctggcagaggatgcattgaataccgtgtag

SEQ ID NO: 13551 - RNA, 672 nt, synthetic construct
  misc_feature 1..672: note = source = /note="Description of Artificial Sequence: Synthetic coding sequence"
  source 1..672: mol_type = other RNA
atgaagtttgtaccctgtctccttctagtcactctgagctgtctgggtacactggggcaggccccaagacaaaaacagggtagtacaggcgaggaatttcactttcagacaggcggtcgagactcctgcaccatgaggccttcttccctggggcagggagcaggggaagtgtggctgagagttgattgccggaacaccgaccagacatattggtgcgagtaccgcggccaacccagcatgtgccaggccttcgcagcagacccaaagccctattggaaccaggctctccaggaattacgtagattgcaccacgcatgtcagggcgcccccgtcttgaggccatccgtttgcagagaagctggccctcaggcacacatgcagcaggtaacaagctctcttaagggttcccccgaacctaaccaacagccagaagcaggtactccctccctacgacccaaggccaccgttaaattgaccgaggcaacccaactggggaaggacagtatggaagaacttggaaaggccaagccaacaacacggcccaccgctaaacctacgcagcccggccctaggcctggcggaaatgaggaggctaagaagaaggcctgggaacattgctggaaaccatttcaggccctgtgtgcatttttgatttcttttttccgtgggtag

SEQ ID NO: 13552 - RNA, 585 nt, synthetic construct
  misc_feature 1..585: note = source = /note="Description of Artificial Sequence: Synthetic coding sequence"
  source 1..585: mol_type = other RNA
atgactatgcgtcacaactggactcccgatctttcacccttgtgggtcctgctgctgtgtgctcatgtcgtcacattactagtgagagcaactcccgtttcccagactaccacagctgccactgcaagcgtaaggagtactaaagacccctgcccatcccaacctccagtgtttcccgctgcaaagcaatgtccagctttggaagtgacttggcccgaggtcgaggtcccacttaatggaactctcagcctaagttgtgtggcatgttcccgcttccctaatttttccattttatattggctgggtaacgggtcttttatcgagcacttgccagggcgattgtgggaaggctctacgtctcgcgagcggggctctactgggactcaactgtgtaaggcactggtcttggagcagcttacaccagctttgcactcaactaacttctcctgtgtccttgtcgaccccgaacaggtagtacagcgacatgtcgtccttgctcaactgtgggcagggctgcgggctactcttccccctacacaagaagcgctcccaagctctcattcatctcctcagcagcagggctag

SEQ ID NO: 13553 - RNA, 777 nt, synthetic construct
  misc_feature 1..777: note = source = /note="Description of Artificial Sequence: Synthetic coding sequence"
  source 1..777: mol_type = other RNA
atgatcgcaatttccgcagtgtcctccgcccttctattttcactcctgtgcgaagcctctacagttgttctccttaattccaccgatagctcccctccgaccaacaactttacagacatcgaagcggcattgaaagcacagctggactccgcagatatacctaaagcccgacgcaagcgctacattagccagaacgatatgattgccatcctcgactaccataatcaggtacgcgggaaggtttttcctccagctgctaacatggagtacatggtgtgggacgagaatctcgctaaaagcgcagaagcttgggcagctacctgtatttgggatcacggaccttcataccttctgcgctttctggggcaaaacctttctgtgcgaacaggccggtacagatctatcctacagctggtgaagccttggtacgatgaggtcaaagactacgccttcccatatccccaggattgtaatccacggtgcccaatgcgttgctttggaccaatgtgcacacattacacccaaatggtctgggctacttcaaatcggattggatgcgccattcacacgtgccagaacatgaatgtttgggggagcgtatggcggcgggccgtgtacctggtctgtaattatgcacccaaaggcaactggatcggtgaggctccttacaaggttggggtaccgtgcagctcttgtccacccagttatggaggcagttgcactgataatttatgttttcctggcgtaacgagcaattatctgtattggtttaaatag

SEQ ID NO: 13554 - RNA, 906 nt, synthetic construct
  misc_feature 1..906: note = source = /note="Description of Artificial Sequence: Synthetic coding sequence"
  source 1..906: mol_type = other RNA
atgctgcctttaaccatgacagttctcatcctgctgttgctcccaacaggtcaggcagcccccaaagacggcgtgacccgccccgattcggaggttcaacaccaactcctgccaaacccattccagcccggccaggaacagctgggattattacaatcttacctcaagggactcgggaggactgaagtacagctggagcacttaagtagagaacaggtgttgttatatttgtttgcccttcacgactacgaccaatcaggccagctcgatggactcgaattattatctatgcttacagccgcactcgctcctggcgccgcgaattcccctaccaccaaccctgtgatactgattgttgataaagtattggaaacacaagatttgaatggagacggccttatgacccctgccgaattaatcaattttccaggtgtggctttaagacacgtggaaccgggcgaacccctggcaccttccccacaggaaccacaggccgtaggccggcagtcactcctagcaaagtcccctctgagacaggaaactcaggaagcgcccggcccccgtgaggaagcaaaaggacaggtggaggcaaggcgggaaagcttggatccagtgcaggagccaggaggacaggcagaagcagatggtgacgtgcccggaccacgaggagaagccgaaggccaggctgaggccaagggcgacgcacccggaccgaggggcgaggcgggaggccaggcagaggcagaaggtgatgctccgggtcccaggggagaggcgggaggccaggcagaggcccgcgagaatggcgaagaggcaaaggagctgcccggtgaaacactggaatctaaaaatacacagaacgacttcgaagtgcacatagttcaggtggagaatgacgagatttag

SEQ ID NO: 13555 - RNA, 969 nt, synthetic construct
  misc_feature 1..969: note = source = /note="Description of Artificial Sequence: Synthetic coding sequence"
  source 1..969: mol_type = other RNA
atgaagacgctggccggtcttgttttgggacttgtgatcttcgatgctgccgtcactgcacccacactcgagagtattaactacgactccgaaacctacgatgcgaccctggaagatctggacaatctctataattatgaaaatatccccgtcgataaggtcgaaatcgaaatcgcaacggtaatgccatccggaaatagagaactgctcaccccaccaccacaacccgagaaagcacaggaggaagaggaggaggaggaatctactcctagactgatagatggatcatcaccacaggaacctgagtttacaggtgtcctgggacctcacacaaacgaggattttcccacctgcctgctctgcacatgcattagcaccaccgtgtattgtgacgaccatgaactcgacgccattccccctcttcccaaaaacacagcctatttttactcccgatttaatagaattaaaaagatcaataagaacgatttcgcatcactttccgatcttaagagaattgacctgacgtccaacctaatttcagaaatcgatgaagatgcattccgcaaactgccacagctgagagaacttgtgcttagagataataagattagacaactccctgagttacctactacattgacctttatcgacatatccaataaccgcctgggtagaaaaggcataaagcaggaggctttcaaagacatgtatgaccttcatcacctttatctcaccgacaataatttggatcatatccctctccctctacctgagaacctccgagccttacacctacagaacaacaacatcttggagatgcatgaggatactttttgcaacgtaaagaatctgacctacatccgtaaggccctggaagacatcagactggacggcaaccccataaacctctccaaaacccctcaagcctatatgtgtctccctcgccttcccgttggatcattagtctag

SEQ ID NO: 13556 - RNA, 618 nt, synthetic construct
  misc_feature 1..618: note = source = /note="Description of Artificial Sequence: Synthetic coding sequence"
  source 1..618: mol_type = other RNA
atggtgaatctggccgccatggtctggcggcggttacttcgaaagcggtgggtactagcacttgtctttgggctgagcctcgtttatttcttgagttccacatttaaacaggaagaaagagctgtgagagacaggaatttgctgcaggtccatgatcacaatcagccaatcccttggaaagtgcagtttaacctcgggaatagcagtaggccatctaatcagtgcaggaattctatccaaggaaaacatcttatcaccgatgaactaggatatgtatgtgaaagaaaagatctgctagtgaacggctgttgtaacgttaacgttccgtcgaccaaacaatactgctgtgacggctgttggccaaatggatgctgctccgcctacgagtactgtgtcagttgttgcttacaacctaacaagcagcttctactagaaaggttcctgaacagagcagctgtcgcctttcagaacttgttcatggccgtggaggaccactttgaactctgccttgctaaatgtcggacgtctagtcaatctgtccagcatgagaatacttacagagaccctatcgcaaagtactgttacggtgagtcaccccccgagttattcccagcatag

SEQ ID NO: 13557 - RNA, 3057 nt, synthetic construct
  misc_feature 1..3057: note = source = /note="Description of Artificial Sequence: Synthetic coding sequence"
  source 1..3057: mol_type = other RNA
atggtgagtcactttatgggcagcttgtctgtgctttgctttcttctactgttgggctttcaattcgtgtgtccccagccttctactcagcataggaaggttccacagcgcatggccgctgaaggcgccccagaggatgatggagggggcggtgcacccggagtttggggtgcgtgggggccatggtctgcgtgcagtcggtcatgcagcgggggggtaatggagcaaacccgtccatgcttgcctagatcttaccgtcttcgaggaggccaacgtcctggagcccctgcgagagcgtttgccgatcacgtcgtgagcgcggtaagaacttcagtgcccctccacagaagtagagacgagactcctgccctggctggcaccgatgcgtccaggcagggccccacagtgttgagaggttcgcgtcatccccagcctcaaggacttgaagtcacgggcgataggaggagccggactagagggacaattggccctggtaaatatggttatggcaaagccccctacatcctccctttacagacggacacggctcacacccctcaacggttacgtcgacagaaactttcttcacgccactctagaagccagggcgcctcctcagcccggcacggctattcctcgccagcacatcaagtccctcaacacggtccactgtaccaaagcgactccggcccacggtccggtctccaggccgccgaggctcctatctaccagctaccactcactcacgatcaaggatatccagcggcctcctctctgtttcacagcccggaaacatctaataatcacggcgttgggactcatggcgcaacacaatctttcagtcagccagctcgttcaactgcaatcagctgtatcggggcctacaggcagtataaattgtgtaataccaatgtgtgtcctgaatcatcccgaagcatcagagaagttcagtgcgcttcatataacaacaaaccatttatgggccggttttatgagtgggaaccatttgctgaggttaaaggaaacagaaaatgtgaattaaactgccaggccatgggctaccggttctatgttcggcaggctgaaaaggtaattgacggaaccccatgcgaccagaacggaacggccatttgcgtgtctggccagtgtaaaagcatcggatgcgacgattacttgggaagtgacaaggtggtagacaaatgtggggtgtgcggcggtgataacacaggatgtcaggtggtgagcggcgtttttaaacacgcactgacctcattgggctatcatcgagtagttgagataccagagggggccacgaaaattaatatcacagaaatgtataagagcaacaactacttggcgctgcggtcgaggagcggcaggagcatcattaacggcaattgggctatcgacaggcccggaaaatacgaagggggcggcaccatgtttacatacaaacggccaaacgagatttcgtccactgcaggggaatcattcctggctgaaggaccaactaacgaaatactcgacgtgtacatgatacaccaacaaccaaaccccggcgtgcattacgaatatgttattatgggcactaatgcgatctcaccacaagtgcctccccaccggcggccaggagaaccatttaacggacagatggtaacagagggacgatctcaagaggaaggcgagcaaaaagggaggaacgaagaaaaggaggacctaagaggggaagctcccgagatgtttacatcagagagcgctcagacctttcccgtccgacaccctgaccgcttctcccctcaccgtcccgacaacctcgtgccacccgcccctcaacctccacgacggagcagggatcacaactggaaacaacttggaaccaccgagtgctccactacctgcggtaagggatcacaatatccaatttttagatgcgtccaccggtctactcacgaagaagccccagagtcctactgtgatagttcaatgaaacctacacctgaagaagaaccttgtaatatcttcccctgcccagcattctgggatataggcgagtggtcagagtgcagcaagacgtgcggactgggcatgcagcacaggcaggtgttgtgcagacaggtctacgcaaaccgatccctcaccgttcagccctaccgatgccaacatctggaaaagcccgagaccacttcaacttgtcagctaaagatctgctcagagtggcagattcgtactgactggacgagttgctcagtaccatgcggcgttggtcaacgcacccgggacgtgaaatgtgtttctaacatcggagacgtggtcgacgacgaagaatgtaacatgaaactacgacctaacgacatcgagaactgcgacatgggcccttgcgcaaaatcctggtttttgacggagtggagtgaaagatgttctgccgaatgcggggctggagtgaggacacggtctgttgtttgcatgacaaaccacgtctcttctttacccctcgagggctgtgggaataatcgccctgctgaggcaacaccatgtgacaatggaccgtgcacaggcaaggtggagtggtttgcaggatcatggtctcagtgtagcattgagtgcgggagcgggacacaacaaagggaggtcatatgcgtgcgcaaaaacgccgatacattcgaagtgctggacccctctgagtgtagctttttggagaaacccccaagtcaacagtcctgccacttaaagccctgcggagcaaagtggttttctaccgagtggagtatgtgttccaaatcttgtcagggtggatttcgggttcgcgaggtccgctgtctgagtgatgatatgaccctctccaacttatgtgacccccagctcaaacccgaagagcgcgaatcttgtaatccacaggattgtgtacctgaggtcgacgagaattgtaaagataagtactacaactgtaatgtcgttgtccaggctcgcctgtgtgtttataactactacaagaccgcttgctgcgcctcttgcacccgtgtcgccaatcgccaaactggattccttggatctcgctag

SEQ ID NO: 13558 - RNA, 1503 nt, synthetic construct
  misc_feature 1..1503: note = source = /note="Description of Artificial Sequence: Synthetic coding sequence"
  source 1..1503: mol_type = other RNA
atgaagtgtacagctagggaatggcttcgcgttacaacagtgctttttatggcccgcgccatacccgccatggttgtccccaacgccaccctcctggagaaactgctggagaaatatatggatgaagacggtgagtggtggattgctaagcagaggggaaaaagagctatcaccgacaatgacatgcagagtatcctagaccttcacaacaagttgagatcacaggtgtatccaacagccagcaatatggaatatatgacgtgggacgtcgagctagaacgcagcgctgaatcttgggcagaatcatgcctctgggagcacgggcctgcctcactgttaccttctatcggccaaaaccttggggctcattggggccgttatagacctccaacctttcatgtccaaagctggtatgatgaggtgaaggatttctcttacccatacgaacatgaatgcaacccttactgccctttccgctgctccggtcctgtatgtacccattatacacaggtcgtctgggccacctctaacagaataggctgcgccatcaacctgtgtcacaacatgaatatttggggccagatctggccgaaggccgtgtacttggtctgcaactatagtcctaaggggaattggtggggccatgccccttataagcacggaaggccttgttccgcatgccctccttcctttggaggcggttgtcgtgagaatttgtgttataaagagggcagtgacagatactacccaccccgtgaagaagaaaccaatgaaatcgagaggcagcagtcacaggtacacgacacacacgtgaggacccgtagtgacgatagctcccgaaatgaagtcatttcagcccagcaaatgtcccagattgtgtcttgcgaagtacggctgcgggaccagtgtaaaggtactacctgtaacagatacgagtgtccggccggatgcctggactcaaaagctaaggtaatcggctctgtccactacgagatgcagtcttctatatgtcgcgccgctatccactacgggatcattgacaacgatgggggttgggttgatattacacgccagggcaggaaacattattttattaaatcaaatcgcaacggcatacaaaccataggtaagtatcagagcgccaattcatttactgtttccaaggtcacagtgcaagccgtaacttgtgaaacaaccgtagagcagttatgcccttttcataaaccggctagtcattgcccgagagtatactgcccccggaattgtatgcaggcaaatccccactacgccagagtgatcggtaccagagtatattcagacctctcatccatttgcagggctgccgtccacgcgggtgtggtcagaaatcacggtgggtatgtggatgtaatgcccgtagataagcgcaagacttacatcgcctctttccagaacggtattttttccgaatccctgcagaatccaccaggcggcaaggcattcagagtgtttgccgtggtatag

SEQ ID NO: 13559 - RNA, 2070 nt, synthetic construct
  misc_feature 1..2070: note = source = /note="Description of Artificial Sequence: Synthetic coding sequence"
  source 1..2070: mol_type = other RNA
atgaaattcggggcagtcacacggattggggggcccccactgggaaatcaatcacccagtagttgcagccttctccatgaaaaggaccctccgacgactagcggacctcagacagaccaaccaaagaagcatctcaccaacttcaagagcgccactcgtagagtcgcaagaacccaatggctgacagcagatcgacaaacatgggcaagtatctcttcagttccttgggctcagacaattagcgaaaagaaaccaggaggtagcttatgggaaaccagaagctcccctcccaccactgcgggcacggaagaagctatgaacaccacctcattgttggccccagctgcagagataatggccactcctgggagtccctcgcaagcaagccctacccttggcgcatttacacacgggacacagactcccagtcccaccaaagccacagcccctaggtatccccaaaccggagatttgtccgctgaatggcctttcacggccggggaagaaccggttcttgtgccacgccctcatcaagtcagtcgcgtccgctccagttgttgtttatcaccaattctgtgtagtcccgctatgatcgccttcctcctgacctccgtgctcatgatcccccacgccggcggccatcccctggacactccccacctgccccaggagttaccaccgggcctccctaataatatcaatataaccttcttcagcggtatgttcaagaacgtcgaatccgtcgctgaaatattcgattgcttaggccctcattttacttggttgcaagcagtatttacaaactttccagttctgattcagttcgttaatggcatgaagtgtgttgccggtctgtgtcccagagattttgaagactacggatgcacttgtcgcttcgagatggaaggtttgccagtggatgagagtgactcttgctgttttcaacaccgtagatgctacgaagaggccgctgaaatggattgtttacaggatcctgcaaagttaagtaccgaagttaattgcgtctccaagaagattatatgtgaatccaaagataactgtgagcacctcctttgtacgtgtgacaaagccgcaatagagtgtctggccaggagctcactcaattcgtcattaaatttgttggacaccagcttctgccttgcccaaacacctgagactacaataaaagaggatctaacaacactgttgccccgtgttgtaccagttgaacctaccgacacaagtctaaccgctctctccggcgaggttgctgctgaaacggaagccgaccgcttgatcaccctgagcaaaaaaaaggccggccatgatcaggaaggcgttggagcagcccgcgccacgagtcccccgggttccgccgagatcgtagctacccgagtcacagccaagatagtgaccttagtcccagccggcattaagagcctcggactggctgtcagctccgtggagaacgatccagaagaaactaccgagaaagcctgcgacagatttactttcctacacctgggttccggagacaatatgcaagttatgcctcagctgggggaaatgctattctgtttgaccagtcgatgccctgaagagtttgagagctatggttgctattgtggacaagagggaagaggagagccccgcgacgatctcgacagatgctgcttatctcaccactgttgccttgagcaggttcgccgcctgggatgtctgctggaaaggctgccatggagcccggtggtctgcgtggatcatacacccaagtgcgggggccagtccctctgcgagaagctactatgcgcatgcgaccagacagccgctgaatgtatgacctctgccagcttcaatcagtctcttaaatcccccagtagactcgggtgtccaggccaacccgccgcgtgcgaggactcgctgcatcctgtgcccgccgcacctacactcggtagcagttcagaagaggactcggaggaagatccacctcaagaagacctgggtcgcgccaagagatttctccgcaagagcctgggaccattgggcatcggcccgttgcacggaagatag

SEQ ID NO: 13560 - RNA, 1359 nt, synthetic construct
  misc_feature 1..1359: note = source = /note="Description of Artificial Sequence: Synthetic coding sequence"
  source 1..1359: mol_type = other RNA
atggaactcgccctacggcgatcccccgttcccaggtggctgcttctgctcccattgctgctggggcttaacgccggcgctgtgatcgactggcccaccgaagaagggaaagaggtgtgggactatgtcactgtaagaaaagacgcatatatgttctggtggttgtattacgctaccaattcttgcaaaaattttagtgagttgcctctcgtgatgtggctgcagggcggtccaggcggttctagcactggtttcggaaactttgaagagataggtccattggattcagacttaaaaccaagaaagacaacctggctacaggctgcatctctgttgtttgtggataaccctgtgggcacaggtttcagctacgtgaatggaagcggagcttacgcaaaggatctcgcaatggttgccagcgacatgatggtcttgctaaagacatttttcagctgtcacaaagaattccaaaccgtgcctttttatattttttctgagtcatatggtggaaaaatggccgccggaataggcctggagttgtacaaggcaattcagcgtggcacaataaaatgtaatttcgctggggtggctctgggggacagttggattagtccagtcgactcagtcctgtcatggggcccatacttgtactctatgtcacttctggaagataaggggctggcagaagttagcaaagtggccgaacaggtcctcaatgcagtaaataaaggtttgtaccgggaggctaccgaactctggggcaaagcagagatgattatcgaacagaacaccgacggagttaatttttataatatcctcacaaaatccactcctacctctacaatggaaagttctctggagtttacacagtcacacctagtgtgtctctgtcagaggcacgtgcggcatctccagagggacgccttgagtcagctgatgaacggcccgatacggaaaaagctcaaaataatcccggaagatcagtcctggggaggacaagctaccaatgtcttcgtgaatatggaagaagattttatgaaacctgtgatttcaattgtggatgaattgctcgaggccggaataaacgttactgtgtataacgggcagcttgacctgatagtggacacaatggggcaggaggcatgggtgcgaaaactcaagtggcccgaactgcctaaattctctcagctaaagtggaaagccctttattccgatcctaagagccttgagactagtgcctttgtgaagagttacaagaacctcgccttctattggattttaaaagccggccatatggtgccaagcgatcaaggtgatatggcactgaaaatgatgagacttgtgactcagcaagagtag

SEQ ID NO: 13561 - RNA, 1395 nt, synthetic construct
  misc_feature 1..1395: note = source = /note="Description of Artificial Sequence: Synthetic coding sequence"
  source 1..1395: mol_type = other RNA
atggtgaggctggctgctgagctcctcctcctcctaggcctcctgctcttgacgttacacatcactgtccttaggggttccggagccgctgacggccctgatgccgctgcaggaaacgcaagtcaggcacagctgcagaacaacctcaacgtcggatccgatacaacgagcgagacttcattttccctctcaaaggaggcaccccgcgaacatctcgaccatcaggctgctcatcagcctttcccccggccccgcttcaggcaagagactggccatccttcccttcaaagagactttcccaggagcttcctacttgatttgcccaactttcctgacctgagcaaagctgatataaacggacaaaaccccaacattcaagtgactatcgaggtggttgacgggccagactcagaggcggacaaagaccaacacccagagaataaaccttcatggagtgtacccagtccagattggcgtgcatggtggcaaaggagcctgagcctggctagagcgaactccggagatcaagattacaaatatgacagtacaagcgacgattcaaatttcctcaacccacccaggggatgggatcataccgccccgggacatagaacttttgaaactaaagaccaacccgagtacgattctacagatggagagggcgattggtcattgtggtccgtgtgtagcgtgacatgtggcaatggaaatcagaagcggactcgatcctgcggatacgcctgcacagcgactgagagcagaacctgcgacagaccaaattgtcccggaatcgaggatacctttcgcaccgcagctaccgaggtctctcttctggcaggcagcgaggagttcaacgccacaaagttatttgaagtcgatacagactcttgtgagagatggatgtcctgcaagtcggagtttttgaaaaagtacatgcacaaagttatgaatgaccttccttcttgtccttgcagctatcctaccgaagtggcttatagtaccgccgatatctttgatagaatcaaaagaaaagattttagatggaaagacgcttctggtcctaaagagaaactagagatctacaaaccaaccgcaagatactgcatacgatcgatgctttccctggagtcaaccacactcgctgctcagcactgttgttacggcgacaacatgcaactaataacaaggggaaagggcgccgggaccccgaatttaatatctacggaattcagtgctgaactacattataaagtggacgtgctaccatggattatctgtaaaggcgattggtcaaggtacaacgaagcaagacctccgaacaatggtcagaaatgcaccgaatccccctctgatgaagactatataaaacagtttcaggaagcaagggagtactag

SEQ ID NO: 13562 - RNA, 1536 nt, synthetic construct
  misc_feature 1..1536: note = source = /note="Description of Artificial Sequence: Synthetic coding sequence"
  source 1..1536: mol_type = other RNA
atgttggtagacggcccttccgaacgcccagctctgtgcttcctgctgttggccgttgccatgtccttctttggttcagcactatccatagatgagactagagcacatcttcttctgaaggaaaagatgatgaggttaggaggtagattggttctgaatacaaaagaagagttggcaaatgagagactgatgacactgaaaattgcagaaatgaaagaggccatgcgaacacttatattccctccctccatgcacttcttccaggctaagcacctgatcgagagatcccaagtcttcaatatcttgcgcatgatgcccaaaggagcagctcttcatctccatgatatcggcatcgttactatggactggctcgtgcggaacgtcacatacaggccccattgccacatatgttttacgcctcgtggaatcatgcaatttagattcgctcacccaactccgagaccctcagagaaatgtagtaaatggattctattggaggattataggaagagagtacaaaacgtaacggagtttgatgacagccttctccggaatttcacgttggtcacgcagcaccccgaagtgatctacacaaaccagaacgttgtttggtccaaatttgagacgatttttttcactattagtggcctgattcattacgcccctgtgttcagggactacgtctttagaagcatgcaggaattctatgaagataatgtgttatatatggagattcgcgcaagactccttcctgtttacgagctcagcggcgagcatcacgacgaggagtggagcgttaaaacgtatcaagaggttgctcaaaaatttgtcgaaacccatcccgagtttattggcataaaaataatttattcagaccataggagtaaggatgtcgcggttatcgctgaaagcatacgaatggcaatgggtctgcgcattaaattccccacagttgtcgcaggtttcgatctcgtgggccatgaggacaccggacactctctgcatgattacaaggaagccctaatgatacctgctaaagatggcgtaaaattgccctatttctttcatgcgggcgaaacagactggcagggaacctctatcgaccgaaacattttggacgccctgatgcttaacacaaccaggataggacatggtttcgccctgtctaaacaccccgctgttagaacatatagttggaaaaaagacattcccattgaagtttgcccaataagtaaccaggtcctgaaactcgtctctgaccttagaaatcaccccgttgccacattaatggccactggtcatcccatggtcatcagttccgacgatcccgctatgtttggcgctaaagggctcagctatgacttctacgaggtgtttatgggaatcggcgggatgaaagctgatttgaggaccttaaagcagctagcaatgaatagcatcaagtacagcactctcctcgagagcgaaaaaaatacctttatggagatatggaaaaagagatgggataagttcattgccgatgtcgctacaaagtag

SEQ ID NO: 13563 - RNA, 777 nt, synthetic construct
  misc_feature 1..777: note = source = /note="Description of Artificial Sequence: Synthetic coding sequence"
  source 1..777: mol_type = other RNA
atgaagcagatacttcatcctgctctcgagactacagccatgacactattcccagtattgctgtttctagtggccggcctcttgccgtctttccccgccaatgaagataaggaccccgcattcacagccctcttgacaacccaaactcaggtgcaacgcgagatcgtaaacaaacacaacgagcttcgcagagccgtttccccccccgcacgcaacatgttgaagatggagtggaataaggaagccgctgctaatgctcagaaatgggctaaccaatgcaattatcgccactccaaccctaaagatcgcatgacttccctgaagtgcggcgaaaacctgtatatgtcaagcgcctcctcaagctggagccaggccattcaaagttggtttgatgagtataacgactttgacttcggcgtaggccctaaaactccgaatgccgttgtcggtcattatacccaggttgtgtggtattcctcatatctcgtgggctgcggcaacgcatactgcccaaaccaaaaggttttaaagtattactatgtctgccaatactgtcccgctggcaattgggccaatcgtctgtatgtaccttacgagcaaggagctccctgtgcctcctgccctgataactgcgacgatggcctgtgcactaatggatgtaaatacgaggacctctattccaactgcaaatctctcaagttaactctcacttgcaaacaccaattggtacgcgattcctgtaaagcaagctgtaattgctcgaacagtatctactag

SEQ ID NO: 13564 - RNA, 714 nt, synthetic construct
  misc_feature 1..714: note = source = /note="Description of Artificial Sequence: Synthetic coding sequence"
  source 1..714: mol_type = other RNA
atggttacgcctccccctccccctgtgtttagcctgctaaaaatcagccagcgaatagtctgcctcgtactggataagtctgggagtatgggtggaaaggatagactgaataggatgaaccaggctgctaagcactttctgctacagactgtagagaatggatcttgggtcggaatggtacactttgatagcaccgctactatcgtgaataaattaatacaaataaagtcctctgacgagcgaaatactctaatggccggactccctacataccccctaggcggtacttctatctgttccggaatcaaatacgcttttcaagtgattggagaacttcattcccagctggacggatcagaagtgctactcctgacagatggagaagacaatacagccagctcatgtatagatgaagtgaagcagtcaggtgcaatcgtgcactttatcgcgctgggcagagcggccgacgaggcagttattgaaatgtctaaaattaccggagggagtcatttttacgtcagtgatgaggctcagaacaacggcctgatcgatgccttcggcgctttaacctcaggaaatactgaccttagccagaaatcccttcaggtccgcgtgctcattccctgggtctttatgttcacattcgccacacgtaagaaccatctggtggtcatttcttttgaattccatatcttccttaaagtaaatttctag

SEQ ID NO: 13565 - RNA, 459 nt, synthetic construct
  misc_feature 1..459: note = source = /note="Description of Artificial Sequence: Synthetic coding sequence"
  source 1..459: mol_type = other RNA
atggataacgttcaacccaagattaaacaccgcccattttgtttttcagttaagggtcacgtgaagatgctccgtctcgcccttactgtgacatccatgactttcttcataatcgcgcaggctccagagccatacatcgtcataaccggcttcgaagtcaccgtgatcttattctttattctgctgtacgtcctcagattggaccgcctgatgaagtggctgttctggcccctcctcgatatcattaactccctcgtcaccacagtattcatgcttatcgtgtccgtccttgccctcattcctgaaacaactacccttacggttggcggcggcgtgttcgcccttgtaacagcagtctgttgtttggctgatggggcccttatttatcggaaattactttttaatccaagcggaccttaccagaagaaaccggttcacgagaagaaagaagttctctag

SEQ ID NO: 13566 - RNA, 3744 nt, synthetic construct
  misc_feature 1..3744: note = source = /note="Description of Artificial Sequence: Synthetic coding sequence"
  source 1..3744: mol_type = other RNA
atgctcgcatccagctcacgaatcagagctgcatggacccgcgctctacttctgcccttactcctcgcaggccccgtgggctgcctctccagacaggagctgttcccctttggcccgggacaaggcgacctggagcttgaggatggtgacgactttgtcagcccagccttagaactctcaggcgctctgcgattttatgatcgctccgatatcgatgcagtatatgtgacaaccaacgggattatagctactagcgaaccacctgccaaagaatcacatccgggcctgttcccaccaacgttcggtgccgtagctccttttttagccgacctcgacactaccgacggcctgggtaaagtgtactacagggaagacttatcaccttccatcacccagagggccgctgagtgcgtacatagaggctttccagagatatctttccagccttcgagcgccgtggttgtgacctgggagagcgttgccccttatcaggggccatcccgagaccccgatcaaaaaggcaaacgcaacacattccaagccgtgctggcttcctctgatagctcctcttacgcgattttcctttatccggaggatgggctgcagttccacaccacatttagtaaaaaggagaacaatcaggtgcctgccgtggtggctttctcacagggtagcgtgggcttcttatggaaatcaaacggcgcatacaacatatttgccaacgatcgtgaatcagtcgagaacctggcgaagtcaagtaactcagggcaacagggcgtttgggtgttcgagatcggctcccccgctacaaccaatggagtggttcctgcagacgttatcctggggaccgaagatggcgccgagtacgacgatgaagacgaagattatgacctggccacgacaagattaggattggaggacgtaggtacaacaccgtttagctacaaggcactacgaaggggcggtgcggacacctactccgtcccaagtgttttgtcccccaggagggctgccactgagaggcctctgggtcccccaacagagcgtacaagaagttttcagctggcagtcgaaacattccaccaacaacatccgcaagtgatcgatgtagatgaggtcgaggaaactggcgtcgtattctcttacaacaccgactcaagacagacatgcgcgaacaaccgacatcagtgtagcgtccacgccgagtgtagggactatgccaccggcttttgttgttcttgtgtcgcagggtatacaggcaacggacggcaatgcgtagctgagggatctcctcagagggtaaacgggaaggtgaagggcagaatcttcgtcgggtctagtcaggttccaattgttttcgagaatacggatctccactcatatgttgtgatgaatcatggcaggagttacaccgcgatctccacgatcccagaaacagtcgggtattcactgttgcctttggccccagtggggggaataataggctggatgttcgctgtcgaacaggatggcttcaaaaacgggttttctatcaccggcggcgagtttacacggcaggctgaggtgacatttgtcggacatcccggaaatctggttatcaagcagagattttctggcatagatgaacatggacaccttactatagacacagagctagaaggcagagtgcctcagatcccctttggctcaagcgtgcatatcgaaccgtatactgaattgtatcattactcaacatctgtgatcacctcatccagcactcgggagtatacagtcacagagccagagcgcgacggggcaagcccatcaagaatttacacataccagtggcgacagaccataaccttccaggagtgcgtgcatgacgattctagacccgccttaccgtccacacagcagctgtccgttgattcagttttcgttttatacaaccaggaagagaaaatacttcggtacgccctatcaaattccatcggtccagtacgcgagggatctccggacgcccttcaaaatccatgttatattggtactcacggctgcgatacaaacgctgcctgtaggcctggtcccaggacacagtttacatgcgaatgttctataggctttcgaggggatggtcgcacatgttatgatatcgacgagtgctccgaacaaccgagtgtgtgtggatcccatactatctgcaataaccatccaggcacttttcggtgtgagtgtgtagaaggatatcaattttctgatgaaggtacctgcgttgccgtggtggatcagcgccccattaactattgcgaaactggcttacataactgtgatatcccccaaagagctcagtgcatctataccggaggaagctcttacacttgcagctgcttacccgggttttccggcgacggccaggcctgtcaagatgtggacgagtgtcagccttccagatgtcatccagacgcattttgctataacactcctgggtctttcacatgtcagtgtaaaccaggttaccagggagacgggtttcgctgcgttcctggcgaagttgaaaaaacaagatgccaacacgaacgagaacatatcctgggggccgccggcgccaccgatcctcagagaccgataccccccgggctctttgtccctgaatgtgacgcccatggtcactacgctcccacccaatgccacggctcgaccgggtactgctggtgtgtggaccgcgacgggagagaggttgagggaacgcgaacccgacccggaatgacccctccctgcctatccactgtagcaccacctatacatcaagggcccgctgtacccaccgccgttatcccactgccccccggaacacacttgctttttgcccagacagggaagattgaacgactccccctcgagggaaatactatgagaaagaccgaggccaaggcctttctacacgtccccgccaaggtcataatcggtctggccttcgattgtgtagacaaaatggtctactggacagacatcacagaaccaagtattggtagagccagtctacatgggggagagcctacaaccattatacgacaagatctggggagtcctgaaggcatcgctgtagaccacctcggaaggaacatcttttggacagacagtaacctggatagaatcgaagtcgctaagctggacggtacccaacgccgtgtgctgttcgagacagacctggtcaatcctagaggtattgttaccgactccgtcagaggcaacctgtactggactgactggaaccgagataatccaaaaatcgaaacatcctacatggacggaacgaatagaaggatccttgtacaagatgatcttggcttgcctaacggacttacttttgacgccttctcttcacagttgtgttgggtcgatgcaggaaccaaccgtgctgaatgcttaaaccctagccagccatcccggagaaaagcgcttgagggcctgcagtatccattcgctgtcacctcatatgggaagaatctgtacttcactgattggaagatgaactccgtggtcgctctggatctcgccatatctaaagaaacagacgccttccagcctcacaaacagacccgactatacggtatcactacagcattgtctcaatgtccccaggggcacaattattgcagcgtgaacaacgggggatgcacccatctttgccttgccactccaggatctcggacgtgcagatgcccagataacacactcggtgtggactgtatagaacaaaagtag

SEQ ID NO: 13567 - RNA, 525 nt, synthetic construct
  misc_feature 1..525: note = source = /note="Description of Artificial Sequence: Synthetic coding sequence"
  source 1..525: mol_type = other RNA
atgctccgcaccgaatcctgccggccccgatcacctgctggccaagttgcagccgccagtccactgctactgctgctcctgttactcgcgtggtgtgctggtgcttgtcggggagctcccatcctgcctcagggattgcagcccgaacagcaactgcagctctggaacgaaattgacgatacatgctctagcttcctttccattgactcccagccacaggcctcaaatgcccttgaagagctatgcttcatgattatgggtatgttgccaaagccccaggaacaagatgagaaagataacactaaacgtttcctctttcattattcaaagacgcagaagctcggcaaatccaacgtggtcagttctgtagtgcaccccttgctccaactggtcccccacttacatgaaagacgtatgaaacggtttcgagttgatgaagaatttcagtcccctttcgcaagtcagagccggggatatttcttgttccggccaaggaatgggcgcagaagtgctgggttcatctag

SEQ ID NO: 13568 - RNA, 1218 nt, synthetic construct
  misc_feature 1..1218: note = source = /note="Description of Artificial Sequence: Synthetic coding sequence"
  source 1..1218: mol_type = other RNA
atggacacgattttcctctggtcactcctactgctgttcttcggatctcaggcgtcacggtgctccgctcagaaaaacaccgaattcgctgtcgatctataccaagaggtttcactctctcataaagataacatcatcttctccccccttggaattacattggtgctcgaaatggtgcaattgggcgccaaagggaaggcccagcaacagatacgtcaaaccctcaaacagcaagagacctccgctggcgaggagttcttcgtccttaaatcatttttctccgcgatctctgaaaaaaagcaagaatttacattcaacttagcaaacgcgctgtacctgcaagaggggttcaccgtcaaggagcagtacctccatggcaataaagaatttttccagagcgccatcaagctggtggattttcaggacgctaaggcctgtgccgagatgattagcacttgggtggagagaaagaccgacggaaagatcaaagacatgttcagcggcgaggagttcggtccccttactcggctcgtactcgtaaacgccatatacttcaagggtgattggaagcaaaaattccggaaagaagacacacagttgatcaatttcacaaaaaagaacggcagtactgtaaagatacctatgatgaaggccctcttgaggacaaaatacggctacttttcagaaagcagcttaaactatcaggtactcgagctaagctataagggggatgaattcagcttaattattatactccctgccgagggaatggacatcgaagaggtcgagaagcttatcaccgctcagcagattctgaaatggttaagtgagatgcaggaagaggaagtagaaatctcccttccaaggttcaaagtggagcaaaaggtagacttcaaggatgtgttgtatagccttaacataaccgaaatttttagtgggggatgtgaccttagtggtattaccgacagctctgaagtttatgtgagccaggtgacccaaaaagtattctttgaaattaatgaagatggttccgaggctgctacatctactggaatccatatccccgtgatcatgtccctcgcgcagtcacagtttatcgcaaatcacccatttctgttcataatgaagcacaatccgaccgagtctatcctctttatgggacgagtcaccaatccagatactcaggagatcaaaggacgcgatctcgactctctatag

SEQ ID NO: 13569 - RNA, 3687 nt, synthetic construct
  misc_feature 1..3687: note = source = /note="Description of Artificial Sequence: Synthetic coding sequence"
  source 1..3687: mol_type = other RNA
atgaaaggtgcccgattgtttgttttactgtcctcattatggagtggcggaattggccttaataactcaaagcacagctggacaataccagaggatggcaattcccaaaagacaatgccttcagcctcagtcccccccaacaagatccagtccttgcagattctgccaaccacccgagttatgagcgctgaaattgccacaactccagaagcccgcaccagcgaagattccttactgaaatctacactgcctccttctgagacatccgcccctgcagaaggtgtacggaaccagaccctgacgagcacggaaaaagcagaaggcgttgttaaactacaaaatttgactctccctaccaatgcctcaataaaattcaacccaggagccgagagcgtggtcctgtccaactccactttaaagtttcttcagtcctttgcgcgaaagtcaaatgagcaagctacctcactcaacacagtcgggggaacgggaggaataggcggcgtcggggggacagggggggtggggaatcgggcacctagagaaacttatttatcacggggggattcctcatccagccagagaactgactatcagaaatccaatttcgaaactacaaggggaaaaaattggtgtgcatacgtgcacacacggttaagtcctacggtgattcttgacaatcaggttacgtatgtaccgggtggcaaggggccttgcgggtggacaggaggatcatgccctcagagatctcagaagattagcaaccccgtctacagaatgcagcacaagattgttacttctctcgattggagatgttgcccagggtactcaggacctaaatgtcagctaagagcccaggaacagcagagccttattcataccaaccaggcagaatctcacacagccgtgggacgtggagttgccgagcagcaacagcagcaaggatgcggcgaccccgaagtgatgcagaagatgactgaccaggtgaactatcaagctatgaaactgacactgctgcagaagaagattgacaatatcagcttgacagtaaacgacgttcggaatacatactccagtctggagggaaaggtttcagaagataaaagcagagagttccagagtctcctgaagggcctgaaaagtaagtcaatcaacgtgctgatcagagatatcgtaagggagcagttcaagatctttcaaaatgatatgcaggaaacagttgcccagctgttcaagactgttagctctctctctgaggatcttgagtctacccgtcaaatcatccaaaaggtgaacgaatctgttgtttccattgctgcacagcaaaagtttgtactggtacaggagaaccgaccaactcttaccgatatcgtagaactgcgtaaccacatagtgaacgtccgccaagaaatgaccctaacgtgtgagaaaccaataaaggagcttgaagtgaaacagacacacttagaaggagcactggaacaggaacactctcgcagtatcttgtactacgagagtctgaacaaaaccctaagcaaactaaaggaagtccacgaacaactcctgtcgactgagcaagtgagtgaccagaagaacgccccagccgctgaaagcgtaagcaacaatgtgacagagtatatgagcaccctccacgagaatattaaaaagcaatccctgatgatgttgcagatgttcgaagatttgcatattcaagaatctaagatcaacaaccttaccgtgagcctggagatggagaaagaaagcctgcgcggtgaatgcgaggacatgctgtccaagtgcagaaacgattttaaatttcagctgaaagataccgaggagaatctacacgtgctgaaccaaacactcgccgaggtgctcttccctatggataataaaatggacaaaatgagtgagcaactgaacgatctgacctacgacatggagatattgcaacctttactcgagcagggcgcttcactgagacagaccatgacatatgagcaacctaaggaagcaatagtcattcggaagaaaattgagaacctcacatccgctgtgaattccctgaacttcatcattaaggaactcaccaaacgtcacaacctacttcgtaatgaggtacagggccgagatgacgcactcgaaagacgcataaatgagtatgcactcgaaatggaggacggcttaaataaaacgatgaccatcataaacaacgccatcgatttcatccaagacaactatgcattgaaggaaaccttatcaacaatcaaagacaatagcgagatccaccataaatgtactagtgatatggaaacaattctcacctttatcccccagttccaccgtctcaatgattctatccagacacttgtaaatgataatcagagatacaactttgtgctgcaggtagccaagacattagcaggaatccctcgtgacgaaaagcttaaccaaagtaactttcaaaaaatgtatcaaatgtttaacgaaaccacctcacaggtcagaaagtaccaacagaatatgagccacctggaggagaagttgctgctcaccactaagatcagcaagaattttgagaccagactgcaggacattgaatctaaagtgactcagactctaataccatactatatcagtgtgaagaagggcagtgttgttaccaacgaacgcgatcaggctctacaattacaagtcctgaatagtcggttcaaggccctcgaagccaagtctattcacctttcaattaacttcttctctttgaataaaaccttacacgaagttcttactatgtgtcacaatgcctccacttctgtttccgagttgaatgccaccattcctaagtggattaagcacagcctgcctgatatccagctgctgcaaaaaggcttaaccgagtttgtggagcctattatccagattaagacacaagccgcgctctctaaccttacatgttgtattgatagaagtctcccaggctctttagcgaacgtggtgaagagtcagaagcaagtaaaaagtttaccgaagaagattaacgcgctcaaaaaaccaacggtgaacctcacaaccgtgttaatcggaaggacacagaggaacacagacaacatcatttatccagaagagtactcatcttgttcacgccacccctgccaaaacggaggtacttgcattaacggtcgtaccagctttacctgtgcttgtcggcacccttttaccggagacaactgcaccattaagctcgtcgaagaaaacgctctggcccccgacttctctaaggggtcttatcgctatgcccctatggttgcttttttcgcatctcacacctacggcatgacaatcccaggccccattctatttaacaacctagacgtaaattatggcgcctcatacacccctcggacaggaaaattcagaataccatatttaggcgtgtatgtcttcaaatataccatcgaatcgttctctgcgcacatatccgggttccttgtggtggatggtatcgataagctggcatttgaatccgaaaacataaactctgaaatccattgcgaccgcgtgctgaccggcgacgcactgctcgagttaaattacggccaggaggtgtggctcaggctcgctaaaggaacaatccctgccaaatttccccctgttacaacattttctggctacctactctatagaacctag

SEQ ID NO: 13570 - RNA, 1365 nt, synthetic construct
  misc_feature 1..1365: note = source = /note="Description of Artificial Sequence: Synthetic coding sequence"
  source 1..1365: mol_type = other RNA
atgtggccactgacggttccacccccactcctgcttctgttgtgttctgggttagccggccagacgttgttccagaaccctgaggagggatggcaattatacacatccgcgcaggcacccgacggtaaatgcatttgtaccgccgtcattcctgcccagagtacatgttcaagggatgggcgaagcagggagctgagacaattgatggagaaggtgcagaatgtgtcccagtctatggaagtcctagagctaagaacttaccgagaccttcagtatgtgcgaggaatggaaactctgatgcgatccttggatgccaggctgcgagccgcggatggttccctctccgctaaatctttccaggaactgaaagatcgtatgactgaactgctgccactgtcatctgtgctggagcaatataaagcagatacacgaaccatagtgcgcctgcgcgaagaagtacggaatctctctggcagtcttgccgcaatccaggaagagatgggcgcctacggatatgaagacttacagcagagagtcatggcactcgaggctaggctgcatgcttgcgcacaaaagttaggatgtggaaagctgaccggcgtcagtaatcctattacagtgcgagctatgggaagtcgtttcggctcttggatgaccgatactatggctccctctgcagatagtagggtttggtatatggatggatactacaaaggtcggcgcgttcttgaattcaggactttgggagatttcatcaaaggtcagaacttcatacagcaccttttaccccagccttgggcaggaactggtcatgtggtctataatgggagtttattctataacaaataccagtcaaatgtggtcgtcaagtatcattttagaagccgctccgttctggtgcagcggtctctgcctggagcgggttacaacaacacctttccatactcctggggcggcttttccgacatggacttcatggtcgatgagtcagggctctgggcggtctatacaactaatcaaaatgcaggaaacatagtcgtctctaggctggaccctcataccttagaggttatgagatcatgggacactggttacccaaaaagaagtgctggggaagcattcatgatttgcggcgtgctctacgtgaccaattcacatctagctggcgctaaggtatattttgcctacttcacaaatacgagcagctacgaatatacagacgttcccttccacaaccaatactcacatatcagcatgctggactataacccacgcgaacgggccctgtacacatggaacaacggccaccaagtactgtacaatgttaccctgtttcacgtcattagcaccagcggcgatccctag

SEQ ID NO: 13571 - RNA, 909 nt, synthetic construct
  misc_feature 1..909: note = source = /note="Description of Artificial Sequence: Synthetic coding sequence"
  source 1..909: mol_type = other RNA
atgtgtgccgagcgcctcggacaattcatgacactggctttagttcttgccaccttcgaccctgcccggggaacggacgcgacaaatcctcctgaagggccacaggatcgatctagtcagcagaaagggcggctgagcctgcaaaataccgcagagatccagcactgcttggtgaacgcgggagatgtggggtgcggagtctttgaatgtttcgaaaataattcttgtgagatacgtggactgcatggcatttgcatgacatttctacacaacgccggcaagttcgatgcccagggaaaatccttcataaaagacgccctgaaatgcaaagcccacgccttgaggcatcgctttggctgcatctccagaaagtgccccgccatccgagaaatggtaagccaattacagagagagtgttacctcaagcacgatctctgcgcagccgcccaggaaaatactagagtcattgttgaaatgatccacttcaaagacctacttcttcatgagccctacgtcgacttggtgaatcttctattaacctgcggagaagaagtcaaagaggccatcacccactcagttcaggttcagtgtgaacagaactggggctctttgtgctccatcttatcattctgcacgtccgcgattcagaaaccccctaccgcacccccagaacgacaaccacaggttgacaggactaagctatcgcgcgcgcaccatggagaagccggccatcacctaccagagccaagttctcgcgaaaccggtcgaggagcaaagggagagcgcgggtctaaaagtcatcctaatgcccacgctagaggccgggttggggggctgggggcccaaggacctagtggcagttctgagtgggaagacgagcagtcagaatacagcgatataaggcgatag

SEQ ID NO: 13572 - RNA, 2529 nt, synthetic construct
  misc_feature 1..2529: note = source = /note="Description of Artificial Sequence: Synthetic coding sequence"
  source 1..2529: mol_type = other RNA
atgaagccgggcggtttctggctgcatttaaccctcttaggggcttccttaccagcagcactcggatggatggatcccggaacatctaggggtcccgatgtgggcgtcggcgagtctcaggccgaagagcctaggagtttcgaagtgacaagaagggaggggctgtcttctcataatgagttgcttgcaagctgtggcaaaaaattctgtagtagaggatcccgatgcgtgctcagtagaaaaaccggagaaccagagtgccaatgtctcgaagcatgccgcccctcttacgttccagtgtgcggaagcgacggaagattttacgagaatcactgcaaactgcacagggccgcttgtctactaggaaagcggattacagtaatacacagcaaagactgcttcctgaaaggggatacttgcactatggccgggtatgctagactcaaaaatgttctgcttgctttgcagactagacttcagccgcttcaagagggggatagccgtcaggatcctgcaagccagaaacgacttctcgtggagagcctttttagggacctggatgccgatggcaatggccaccttagtagcagcgaactcgctcagcatgtgttaaagaagcaggatctagacgaagacttgctaggctgctccccaggcgatctgttaagatttgacgactacaattcagacagctcactgactctccgcgagttctatatggctttccaggtagtacaactgtcattagcaccagaggacagggtatctgtcacaaccgtgactgtaggattgtctaccgttttgacatgtgctgtgcacggcgaccttaggcctcccataatctggaagaggaacggacttacattaaacttcctcgatttagaagatattaatgactttggcgaggacgatagcctgtatataaccaaagtgaccacaattcatatgggtaactacacatgccatgcctcgggacacgaacagctctttcagactcacgtgcttcaggttaacgtccctccagtcatcagggtctatcccgaatctcaagcccaggaacccggagttgccgcatcactgaggtgtcatgcagaagggataccgatgcccaggatcacctggcttaagaatggtgtagacgtatccactcagatgagtaaacaattgtcccttctcgcaaatggaagtgagctccacatttcgtctgttagatacgaggacacaggcgcctacacttgcattgcaaaaaatgaagtcggcgtggacgaagatataagctcactgttcattgaggacagcgcaagaaagacactggctaacatcctttggcgcgaggaggggctctctgtaggtaatatgttctatgtgttctccgacgatggtatcatcgtgattcatcccgtcgactgcgaaatacagaggcacctaaaaccaaccgaaaaaatatttatgtcttacgaggagatttgcccccaacgagaaaagaatgccacccaaccttgccagtgggtgtcagctgtcaatgttcggaatcggtacatttatgtggcccagccagccctctcccgggtgctcgtggtggacattcaggcccagaaggtgttgcaatctatcggcgtcgaccccctgcctgcaaagttgtcttacgataaatcacacgatcaggtatgggtgctttcttggggagatgtacacaaaagccgaccaagcctccaggtcattaccgaagcctcaactggacaatctcagcatctaataagaaccccctttgcgggggtggacgatttctttattcccccaactaacctaattattaaccatattcgctttggctttatttttaacaagtccgaccctgccgtgcataaggtcgatctggaaactatgatgccacttaagactatcgggcttcaccaccacgggtgcgtgccccaggcaatggcccacacccacctgggaggatactttttcatccaatgccgccaggactcacccgcctccgcagccagacaattgttggtagactcagtcaccgactccgtcctcggaccaaatggcgatgtcaccggcactccccatacttcaccagacggcagattcatcgtgtccgctgcggccgattcgccatggcttcacgttcaggaaataacagtacggggtgaaatccaaacattatacgatctgcaaattaattccggcatcagcgatctcgcattccagagaagtttcacagagagcaatcagtataacatatacgccgccctgcacaccgagccagacctcctttttttggagctatcaacaggaaaggtcgggatgctgaaaaacctcaaagagccaccagccggaccagcccagccatggggaggcactcataggattatgcgggattctggactttttggccagtatttactaacaccagctcgcgaatcactgtttctcataaatggaaggcaaaataccctgcggtgcgaagtgtctggaatcaaaggcggaaccactgttgtgtgggtgggagaggtttag

SEQ ID NO: 13573 - RNA, 2256 nt, synthetic construct
  misc_feature 1..2256: note = source = /note="Description of Artificial Sequence: Synthetic coding sequence"
  source 1..2256: mol_type = other RNA
atggcatttcgcacgatttgcgtattggtgggcgtgtttatatgctcaatctgtgtgaaaggcagttcacaaccacaggcaagggtgtatctgaccttcgatgagctaagggaaacgaaaacctcagaatactttagcctctcccaccacccgctcgattaccggatccttctcatggatgaagaccaggaccgtatatatgtcggatccaaagaccatatcctgtctctcaacattaataacattagccaagaggcattatccgtcttttggcctgcttcgacaatcaaagtagaagaatgcaagatggctggaaaagaccctacacatggatgtggcaatttcgtacgggtgattcaaacgtttaaccgcactcacttatacgtctgtgggtccggcgcattttccccggtttgtacatatctcaaccgcggaagaagatctgaggatcaagtgttcatgatcgactcgaaatgtgaatccgggaagggacgctgctcgttcaatcctaacgtcaacacagtctcagtaatgatcaacgaagagctattctccggcatgtatatcgatttcatgggaacagacgccgcaatctttagatctctaactaaaagaaatgctgttcgaactgaccaacataattctaaatggctctctgagccaatgtttgttgatgcccatgtgatacccgacggaactgacccaaacgacgccaaagtttacttcttttttaaagagaaactgactgataacaatagatcaaccaagcaaatacattctatgatcgcccgcatctgccccaacgacactgggggtttacgaagtcttgtgaacaagtggacaactttcctaaaagccaggctggtgtgctctgttactgacgaggacgggcctgagacgcatttcgacgagctggaagacgtattcctgttagagaccgataatccaagaactaccctcgtgtatggcattttcactacgtcttcatctgtgtttaagggatcagccgtgtgcgtgtaccacctgagcgacatccagacagtgtttaatggcccttttgcccacaaggagggacccaatcaccagctgatttcctatcagggccgcattccatacccaagaccaggaacatgcccaggtggagctttcacgcccaatatgagaacgaccaaagagttccctgatgatgttgtaacgtttatcagaaatcatccactgatgtacaacagcatttaccctatccacaagcgcccactcatcgtacgtataggtaccgactacaaatatacaaagatagcggttgacagggtcaacgcagccgacggcagataccatgtgctgtttctggggaccgaccgcggtaccgttcagaaagttgtagtgctaccaaccaacaacagcgtaagcggggaattaatcctggaggagctggaagtgtttaaaaatcatgccccaatcaccacaatgaaaatctcttctaaaaaacagcagctctacgtctctagtaacgaaggtgtgtcacaagtgtccctgcacagatgccatatttacggtaccgcctgcgcagattgctgtctggcccgcgacccctactgcgcatgggatgggcacagctgttcaagattctaccccactggaaagcgaaggagcagaagacaagacgttaggcacggaaacccattaacgcagtgtcgcggtttcaacctgaaggcctaccggaacgctgctgagatagtgcaatacggcgtgaaaaacaataccacgttcctcgaatgcgccccaaaatctcctcaggcttcaatcaagtggctgctacagaaagacaaggatcgccgcaaagaggtgaaattaaatgagcgcatcatagccacatcacagggtttgctgatccggtcagtgcaggggtccgatcaggggctttatcattgtattgccaccgaaaactcatttaagcaaactattgccaagatcaatttcaaggttttagacagcgagatggtagccgtggtaacagacaaatggtctccctggacatgggcatcgagtgtgcgggcccttccttttcatcctaaagacatcatgggagcattttctcactcggaaatgcagatgataaaccagtattgcaaagacactcgccagcagcatcaacagggcgatgaatcacagaagatgcgcggagattacggaaaactgaaagccctgataaacagtaggaagagcagaaacagaaggaatcagcttccagagagctag

SEQ ID NO: 13574 - RNA, 2316 nt, synthetic construct
  misc_feature 1..2316: note = source = /note="Description of Artificial Sequence: Synthetic coding sequence"
  source 1..2316: mol_type = other RNA
atgggctggttaacaagaatagtgtgcttgttttggggagtgcttctgaccgcaagagccaactatcagaatggtaaaaataatgtgccgagactaaaactgagctacaaggagatgctagaatctaacaacgtgatcacatttaatggactggcaaactcttcaagctaccatacatttctactggatgaagagcgcagtaggctgtatgtgggggccaaagatcatattttttcattcgacctcgttaatatcaaagactttcagaaaatagtgtggcctgtgagttatacacgcagagacgagtgcaaatgggccggcaaagatattttaaaagaatgtgccaacttcattaaagtcctaaaggcatataatcagacgcacctttatgcatgcgggactggggccttccatccaatctgcacatacatcgagatcggacaccaccccgaagataacatatttaagctggagaattcacacttcgagaacggaagaggtaagagcccttatgatccaaaactgctgactgcgtcattactgatcgacggtgagctctactctggcacagccgctgactttatgggtagggacttcgcaatctttcgcacgttaggacaccatcatccaatacggacagagcagcacgattccaggtggttgaacgaccccaaatttatttccgcccacctaatcagcgaatcagacaatccagaggacgacaaagtgtacttcttctttcgcgaaaatgctatcgatggcgaacactctgggaaagcaacacacgctcgaataggacagatttgtaaaaacgacttcggtggacaccgctcactggtcaacaagtggaccaccttcctcaaagcccggctgatatgttccgtgcctggccccaatgggattgatacccactttgacgaacttcaggacgtgtttttgatgaacttcaaggacccgaaaaaccccgtcgtgtatggagtattcaccaccagttctaatatcttcaaagggtctgcggtctgtatgtattccatgtctgacgtgagacgagtgtttctgggtccttacgctcaccgagatggaccgaactatcaatgggtgccctaccagggacgtgtaccatatccccggcctggaacttgcccttctaaaacgttcggaggcttcgactccacgaaagatctgcccgatgatgttatcacttttgcacgctcccacccagccatgtataatcccgtcttcccaatgaacaatagacctatagtgattaaaaccgacgttaattaccagtttactcagatagttgtggatcgagtcgatgctgaagatggacaatacgacgtcatgtttattggcactgacgtgggcaccgtgttaaaggttgtcagcatccccaaagagacatggtacgatctggaggaggtgctgctcgaggagatgacagtctttcgcgaaccaacagcaatatctgccatggaactaagtacaaaacagcagcagctgtatataggcagcacggcaggagtggctcagctccccttacatagatgcgatatatatggaaaggcatgcgcagaatgttgtttagcgcgagacccgtattgtgcctgggatggttccgcctgctcaaggtacttcccgaccgcaaaaaggagaacacgtcgtcaagacattaggaatggcgatcctctgacccattgtagcgatctgcatcatgataaccaccacgggcactccccagaagaaaggatcatctatggcgtggaaaattcaagtacctttctggaatgttcgcctaagtcgcaaagggccctggtatactggcagttccaaagaagaaatgaggagagaaaagaggaaatccgcgttgatgatcacattattcggactgatcaggggttattattacgtagcctccaacaaaaggactccggaaattacctctgccatgctgtagaacatgggttcattcagacgttgttaaaggtgaccctcgaagttatagacacagaacatttagaggagctgctgcataaagatgacgacggggatgggtctaagaccaaggaaatgagtaactctatgacacctagccagaaagtatggtatcgggactttatgcagctcattaaccatcccaatcttaacactatggacgaattttgcgagcaagtgtggaagagagaccgtaaacaacgccgccagcgcccaggccatacccccgggaattcaaacaaatggaagcatctacaggaaaacaagaaaggcaggaacagaaggactcatgagttcgaacgagcaccgagaagcgtatag

SEQ ID NO: 13575 - RNA, 4605 nt, synthetic construct
  misc_feature 1..4605: note = source = /note="Description of Artificial Sequence: Synthetic coding sequence"
  source 1..4605: mol_type = other RNA
atggccctaactccaggatggggatcaagcgcgggccccgtgcgtcctgaactctggctactgctgtgggccgccgcgtggcggttaggcgcgtccgcttgtccagctctgtgtacctgtaccggcactaccgtggattgtcacgggaccggtctacaggcaattcctaaaaatattcctcggaacaccgagcgtcttgaattgaacggaaacaacatcaccaggatccataagaacgatttcgctggtctgaaacagctccgagtgctgcaactgatggaaaatcaaattggcgctgtcgaacgcggagcttttgacgacatgaaggaacttgagagacttcggctaaaccggaatcaactgcatatgctgcccgagctgctcttccaaaataaccaagctctgtcccgtctggaccttagcgaaaatgcaatccaggcaatacctcggaaggcctttagaggcgcaaccgacctgaagaatctccagctggacaagaaccagatctcttgcattgaagaaggggcatttagagcgctgcggggtctggaagttctgaccttaaataataataacattaccacaattcctgtctctagcttcaatcatatgcctaaactccgtactttcagattacactccaatcatctcttctgcgattgccatttagcctggctgtcacagtggttaagacagcgccccactatcggcctcttcacacagtgttccggtcctgcttcacttaggggactgaatgtcgccgaagtgcaaaagtctgaattcagctgctccgggcagggggaagccggtcgcgttcccacttgcaccctctcttccggatcatgccctgcaatgtgtacctgcagcaacggtattgtggactgccgggggaaaggcctgactgccatcccagccaacttaccagagactatgacggaaatccgacttgagctgaatggaattaaatcaatccctcccggggcctttagcccttacagaaaattacgaagaattgatcttagcaacaaccagatagcagaaatcgcccccgacgctttccagggcctgcggtcactaaatagcctggttctgtacgggaacaagatcacagacttgccaaggggtgtctttggcggcttatacaccttacaactcctcttactaaatgctaacaagatcaactgtataaggccagacgcctttcaggatctacaaaaccttagcctacttagcctctatgataacaaaatccagtctctcgctaaggggacttttaccagtctccgcgctattcaaacattgcacctcgcccagaatcctttcatctgtgactgtaacctaaaatggctcgccgattttctacgcacaaatcctattgagacaagtggcgcacgttgtgcaagccctagacgactggctaacaagcgcatcggccagatcaaatctaagaaatttaggtgttcagcaaaggagcaatattttattcccggaaccgaggactaccaactcaacagcgagtgtaattctgacgtcgtgtgtccccacaaatgcagatgcgaagctaatgtggtggagtgttccagtctgaaactgaccaaaatcccagagagaattccacagtccacagcagaactccggctgaataataatgaaatatcaatcctagaagccaccggtatgtttaaaaagttaacacatttgaaaaagatcaacctgtctaacaacaaagtctctgaaattgaagacggagcgttcgagggggccgcgtccgttagcgaactgcacctgacggcaaatcaactggaaagcattagaagcggtatgttccggggattggatggactgaggaccctgatgctgcggaacaatcggatctcttgtatacataacgattctttcaccggcctaaggaacgttaggttactgagcctgtacgataaccagatcacaacagtaagtccaggagcatttgacacactgcagagcttgtccacccttaacctgttagctaacccatttaactgtaactgccaacttgcatggctgggcggatggctgagaaagagaaagattgtcacgggtaatccaagatgtcaaaaccccgattttctccgccagatccccctgcaagatgtggcctttcccgactttcgttgcgaggaaggacaggaggaagggggttgtctccccagaccacaatgcccacaggagtgtgcctgcctagacaccgtggtgcggtgcagtaacaaacaccttcgtgccttgcccaaaggaatacctaagaacgtaacagagctctacctagatgggaatcagtttaccttagtgcccggacaattgtcaacgttcaagtacttacaattagttgacctgtcgaataacaaaattagctcactatccaattcttcctttacaaatatgtcccagctcacaactctgattttaagttataatgcacttcagtgtattccccctctcgcgtttcagggccttaggtcactccgactcttaagcctgcacgggaatgacataagcacacttcaggaaggcatcttcgcagacgtgacctccctctctcacctggctatcggcgccaatcccctgtactgcgactgtcatctacggtggctatccagctgggtaaaaacaggatataaggaacccggtattgctcggtgcgctggccctcaggatatggagggcaaactgttattaactacgcctgctaagaagtttgaatgccaggggcccccaacacttgccgtgcaggccaaatgcgacctctgtctatcctcaccttgccaaaaccagggaacttgtcacaatgacccactggaagtctatagatgtgcctgcccaagtggctataaagggcgagattgcgaagtatctttagatagctgcagtagcggcccctgtgaaaacggcgggacctgtcatgcgcaggagggcgaggatgctccttttacttgttcatgccccactggatttgagggccctacttgcggagtaaacacagacgactgcgtcgatcacgcctgtgccaacggtggcgtatgtgtcgatggcgtcggcaactacacttgtcaatgccctttacaatacgaaggcaaggcctgtgaacagttggtcgacttatgctcgcctgatctgaacccctgtcagcatgaagcgcagtgtgttggcaccccagacggcccccgatgtgaatgcatgcctggatatgcgggggataattgttcagaaaaccaagatgactgcagagaccacagatgtcaaaatggagcccaatgtatggacgaagtgaattcatactcttgtctgtgcgccgaaggctactccggacagctttgcgaaatcccccctcatctgcccgccccaaaatctccatgcgaaggtacggaatgccaaaacggcgcgaactgcgttgaccagggcaatcgcccagtctgccagtgcttgcctggattcggcggtcctgagtgtgaaaaactgctatcagtcaattttgtggacagagacacctatctgcaattcacggacctgcagaactggccccgggcgaacataacccttcaggtctccactgccgaggataatggaatcctgttatataatggtgataacgatcatatcgcagtggaactttaccaaggtcacgtcagagtgtcatatgatcccggctcctacccttctagtgctatttactctgcagagacaataaacgacgggcaattccataccgttgagctcgtggctttcgatcaaatggttaacctttccattgacggggggtcccctatgaccatggacaattttgggaagcattacactctcaacagcgaggcaccactctacgtcggtggaatgccagtggacgtgaactccgccgcctttagactatggcaaattctgaacggcactggatttcatgggtgcatacgaaatttatacattaataacgaactacaagactttaccaaaacccagatgaagccaggagtggtgcccggttgcgaaccgtgccgtaagctatactgtttgcacggtatttgtcaacctaacgctaccccaggcccaatgtgccactgcgaagccgggtgggttggcctccattgcgatcagccagcagatggcccatgtcacggccataagtgtgtccacggccagtgtgtcccattagacgccctgtcatactcctgccagtgtcaagacggatacagcggggctctctgtaaccaagctggcgctcttgccgaaccttgtagaggccttcagtgcctgcacggacactgccaggccagcggaacgaagggcgcccactgtgtgtgcgatccaggcttctccggagaactctgtgagcaggagagcgagtgtcgcggagacccagtgcgggactttcatcaggtgcaacggggctacgcaatatgccagacaacaagaccattatcatgggtggaatgtagggggtcgtgtccagggcagggctgttgccagggattgcgtttgaagcggagaaagtttacgttcgagtgttccgatggcacctcattcgccgaagaggtagaaaaaccaaccaagtgtggctgtgccctttgtgcatag

SEQ ID NO: 13576 - RNA, 342 nt, synthetic construct
  misc_feature 1..342: note = source = /note="Description of Artificial Sequence: Synthetic coding sequence"
  source 1..342: mol_type = other RNA
atggattccagacaggccgctgcactgttggtgcttctactgctgattgacggagggtgcgcagaaggtccaggtggccagcaagaggatcaactcagcgccgaggaagatagtgagccattaccaccacaggatgcgcagacctcaggttctctactccactaccttcttcaggctatggagcggcctggccgatcacaggcttttttatttcagcctcagcgctttggcagaaacacacaggggtcttggcgaaacgagtggttgtctccccgagctggagaggggcttaactcacagttttggtcactggctgcacctcagagattcggtaagaaatag

SEQ ID NO: 13577 - RNA, 2568 nt, synthetic construct
  misc_feature 1..2568: note = source = /note="Description of Artificial Sequence: Synthetic coding sequence"
  source 1..2568: mol_type = other RNA
atggccaggcatctgctcctgcctctagtgatgcttgtgatctctccgattcccggtgcctttcaggattcagccttgagcccaactcaagaagaacccgaggacctcgactgtggacgccccgagccatcagcacggatagtcggaggtagcaacgcgcagcctggtacatggccttggcaggtctccttgcatcatgggggcggccatatctgcgggggaagtttgatcgcaccttcatgggtcctttctgccgcccactgttttatgactaacggtacgcttgaacctgctgccgagtggagcgtcctgcttggcgtgcactcccaagatggcccgctggacggagcccatactagagctgttgcggcaatagtggtgcctgcaaactattcacaggtcgaacttggagctgaccttgcactcctgagacttgcttcccccgcttcactgggcccagctgtctggccagtttgtctgcctcgtgcatcacatcgatttgtgcatggtacagcttgctgggcaacaggttggggagacgtgcaggaagccgatccactcccactgccttgggtgctgcaggaagtggaattgcgtcttctcggagaagcaacttgtcagtgcctttattctcagcccggcccctttaacttgaccttgcaaatcctgcctggaatgttgtgtgccggataccctgagggaaggagagacacctgccagggagactccggaggtccattggtgtgcgaggagggcggtagatggttccaggccggaattactagctttggttttggatgtgggaggcggaatagaccaggggtgtttactgctgttgccacatacgaagcatggatccgtgagcaggttatgggaagcgaacccggccccgccttccccactcaaccacagaagacccagtctgacccacaggaacctcgagaagaaaactgtacgatagcactgcctgagtgcgggaaggcccctagacccggcgcgtggccctgggaagcacaagttatggttcctggatcgcgcccctgccacggggcattggtgagcgaatcttgggtccttgcccctgcttcctgttttttagacccaaactccagcgatagccctcctagagacctggatgcttggcgtgtcctgctaccctcccgccccagagccgaacgagttgcgcggcttgtgcagcatgaaaacgcaagctgggacaatgcctcagatctcgcacttctccagctcaggacccctgtcaatctgtcagctgcctctcggccagtctgtctcccacatccagagcattactttctacctggcagcagatgccggctcgccagatggggccgcggcgaacctgccctcggaccgggtgccctcctcgaagcagagctactcggtggttggtggtgtcattgcctctatggaagacagggtgcagcggtgccgttacctggtgacccacctcacgcactctgtccggcgtaccaagaaaaagaagaagtggggtcctgttggaatgattcgagatggtccttactgtgccaggaagagggcacctggttcctcgctggaatccgcgattttcccagtggatgtttgcggcctagagctttcttccccctgcagacacacggaccatggattagtcacgtcacccgcggcgcatatctggaagaccagctggcatgggattggggacccgacggtgaagagactgagactcagacatgcccaccgcatacagagcacggtgcttgtggactgagactggaagctgcccctgtgggagtgctgtggccttggttagctgaagtccacgttgccggggaccgagtctgcacaggaatattgctggcaccagggtgggtgcttgccgcaacccattgtgtactcagacccggctctaccactgtgccttatatagaagtgtacctaggtcgcgccggcgcaagctccctacctcaaggccatcaggtgagccggttggttataagtattcggctacctcagcatttgggcttgcgccctccactcgctttgttagaactctccagtagggtagaaccgagcccaagcgcccttccaatatgccttcacccagctggcattcctccaggtgcttcttgttgggtcctcggatggaaggagccacaggacagggtgcctgtcgctgccgccgtaagcatattgacccagcgaatttgcgactgtttgtatcaaggaattctccccccaggaactctgtgcgtcctatacgccgaaggacaagagaatcggtgcgagatgacctccgcccccccactattatgccaaatgacagaaggctcctggattctcgttggaatggccgtccaagggtctagggagctgtttgcagccatcgggccggaagaggcctggattagccagaccgtgggcgaggcgaattttttacctccgtcagggagccctcattggccaaccggtggctctaacctctgtcctcctgaacttgcaaaagctagcggcagccctcacgccgtgtacttcctcctgcttctgaccctgcttattcaaagctag

SEQ ID NO: 13578 - RNA, 912 nt, synthetic construct
  misc_feature 1..912: note = source = /note="Description of Artificial Sequence: Synthetic coding sequence"
  source 1..912: mol_type = other RNA
atgctccatcctgaaacctccccagggcgtggtcacctcttagcagttttactggctctgctcggcacaacctgggctgaagtgtggcccccacagctccaggaacaagcacccatggctggcgccctgaataggaaggagagttttttattgttgtctctgcataaccgcctccggtcatgggtccagccacctgcagcagatatgagacgcttagattggagcgattccttggcacagctggcacaggcacgagcagccctctgcggcatcccaacaccatccctggccagtggtctgtggaggacactacaggtcggatggaacatgcagttgctgccagctggactggcttctttcgtggaggtcgtttcattgtggttcgctgagggccagagatacagtcatgctgcaggtgagtgtgcccgtaacgccacatgtacccactatactcaattagtatgggcgacatcgtcccagctgggctgtggccgtcatctttgttccgcaggccagaccgcaatcgaggcatttgtatgtgcttattccccaagaggtaattgggaggtgaatggcaagacaattataccgtacaagaaaggtgcatggtgctcattgtgtacagctagcgtgtctggctgctttaaggcctgggatcacgccggaggactgtgcgaggttcctcgcaatccctgtcgtatgtcgtgtcaaaatcacggaaggttgaacatttctacttgccactgtcactgcccccctgggtatacaggccggtattgtcaggtacgatgttctctgcagtgcgttcatggacggtttagagaggaagagtgtagctgcgtgtgcgatatcggttatggagaaccatccgtgccacctagatgtattttcccatccacacccgtgacttag

SEQ ID NO: 13579 - RNA, 1158 nt, synthetic construct
  misc_feature 1..1158: note = source = /note="Description of Artificial Sequence: Synthetic coding sequence"
  source 1..1158: mol_type = other RNA
atgaagatgcttccaggcgtaggcgtgtttggaactggctcatcggccagggtcctggtaccactactaagggctgaagggtttaccgtggaagctctgtggggcaaaaccgaggaagaagccaaacagttagcagaagagatgaatatcgcattttacacatcgagaaccgacgacattctacttcatcaagatgtagatttggtgtgcatttccattccaccacccctgacccgccagatttccgttaaagccctaggtatcggtaaaaatgtcgtgtgcgagaaggcagccaccagcgtcgacgccttcagaatggtcacagcctctagatactaccctcagttgatgtccttagttggcaacgttctgagattcttgccagcgtttgttagaatgaagcagttaattagtgaacactacgtcggtgccgtaatgatctgtgatgcgagaatctatagcggcagccttcttagccccagttatggctggatttgtgatgagcttatgggaggtggtggcctgcacacaatgggcacctacatcgtcgacctgcttacacatcttactggtcggcgggccgaaaaagtgcacggacttctaaaaacattcgtgagacaaaacgcggctatccgaggcattcgccatgtgacttccgacgacttctgcttttttcagatgcttatggggggaggcgtgtgttcaacagtgacactgaacttcaatatgccaggggccttcgtgcacgaagtgatggtggttggaagcgcgggtcggttggttgctagaggcgccgatttgtatggtcagaaaaacagcgctacccaggaagaattactgctgcgggactcacttgcagttggtgccggcctccccgaacaagggccacaggacgtcccgctgctgtatctgaagggaatggtgtatatggtacaagcattgcggcaatcctttcaaggacaaggcgatcgaaggacttgggaccgcactccagtcagcatggctgccagctttgaagacggcctctatatgcaaagcgtggtagacgcaattaaaagaagcagtcggtctggtgagtgggaggccgtggaagtgctgaccgaggagcccgatacaaatcaaaatctctgcgaggcccttcaacgtaacaatctttag

SEQ ID NO: 13580 - RNA, 1470 nt, synthetic construct
  misc_feature 1..1470: note = source = /note="Description of Artificial Sequence: Synthetic coding sequence"
  source 1..1470: mol_type = other RNA
atgccagttactttcgcgttactgctcctcttagggcaggcaaccgctgacccttgctacgatccacagggccggccccaattctgtctcccaccagtcacacaactagcagccgttgctgcatcatgtcctcaagcttgcgccttgtctcccggtaaccatttgggagctagagagacttgtaacgggtcgctgacattggctcttggaggaccatttctgctgaccagtgtgtctctaagattttgcaccccgggcccccctgccttaatcctctccgcagcttgggcatcaggcggcccatggcgattgctttggcacagaccggcttggcctggcgcactgggaggccctgaacgggtgaccttccactctaccccaggaccgaaggcaacagttgcagcttcgcatttgcgtgtcgaatttggtggtcaggccggcttggctgctgcaggactccgaggaagatgtcagtgccatggccacgcagccagatgtgcagctagagctagacccccacggtgccactgccgtcatcacaccacagggcccggttgtgagagttgccgccctagtcaccgcgattggccatggagacccgctaccccgcgccatccacatccgtgcctaccctgtagctgcaaccagcatgcccgcagatgcagattcaactctgagctcttcaggctgagcggcggcagatccggaggtgtttgcgagcggtgtcgtcatcatactgcagggagacattgccattattgtcagcctggattctggcgcgacccctctcagccaattttctccagacgcgcatgtagagcttgccaatgccaccctatcggtgccacaggagggacctgcaatcaaacttccggccagtgtacttgtaaactcggcgttaccggccttacatgtaaccggtgcggtcccggataccagcagtcaagatcaccccgtatgccttgtcagagaattccagaggcaacgactaccctcgcaaccacacccggcgcctacagttccgatccacagtgtcaaaattactgcaacatgtccgacactcgggtccacatgtcccttcgtcgttactgccaacaggatcacgtactgcgggcacaggttctcgcttccgaagcagcagggcctgcctggcagagattggccgttcgcgtcctcgccgtgtataagcaaagagcacagcccgtgaggagaggagaccaggacgcttgggtacctcgtgccgatttgacatgtgggtgcctaaggctgcagccgggcactgattacctgctcttaggttccgctgtgggagatcctgacccaaccagactgatcctggatagacatggcctagcactgccctggagaccaagatgggctagacccctaaaacgcctccagcaggaagaaagagctggcggctgtcgcggagtgcgcgcccccacgccttcaccgaggccagaacattag

SEQ ID NO: 13581 - RNA, 8430 nt, synthetic construct
  misc_feature 1..8430: note = source = /note="Description of Artificial Sequence: Synthetic coding sequence"
  source 1..8430: mol_type = other RNA
atgacgcttgaagggctttacctggcaagaggccctctcgctagactgctcctggcttggtctgcattgctctgtatggccggcgggcagggacgatgggacggggctttggaggccgctggtccaggtagggtgcggcgccgtggatcccccggtattttacagggacccaacgtttgcggttctagattccacgcctattgctgcccaggctggcgcactttccccggcagaagtcaatgcgtggtccccatctgtcgcagagcctgtggcgagggattttgctcccagccaaacctgtgcacctgcgcggatggaactttggcacccagctgcggcgtttctagaggctccgggtgttcagtgtcttgcatgaacgggggaacttgtcggggcgcaagttgcctatgtcagaaaggatacacagggacagtgtgtggtcagcctatctgcgatagaggttgtcacaatggcgggcgatgtatcggccctaataggtgtgcatgcgtttacggtttcatgggaccacaatgcgagcgtgattacaggactggtccctgcttcggccaggtcgggcccgaggggtgtcagcatcagctcactggtttagtgtgcacaaaagctttgtgttgtgcaactgtcggacgcgcatggggactcccctgcgagctttgtccagctcagccacacccatgccggagaggattcatccccaacatacataccggtgcctgccaggacgtggatgagtgtcaggccgttcctgggctctgtcagggcggatcctgtgtcaatatggtcgggtcgtttcactgtagatgtcccgttggtcataggttgtctgattcctccgcagcctgtgaggattaccgtgctggagcctgttttagtgttttgtttggaggcagatgcgccggcgaccttgccggtcactatactagacgccagtgctgctgtgataggggccgctgttgggcagccggtcccgtccccgaactgtgtccgccgcgcgggtcaaatgagttccaacagctctgtgcacagcggttacctctgctgccaggacatcccggactcttccctggtctgctgggctttggaagtaacggtatgggcccgcccttaggccctgcccggttgaatccccacgggtcggatgctcgcggaattccttcactcggaccaggaaactcaaacatcgggacagcaaccttaaaccaaaccatcgatatctgccggcactttaccaacctgtgtctcaatggaagatgtcttcctactccttcttcgtatcggtgtgagtgcaatgtcggttacacccaagatgtacgtggcgaatgtatcgacgtggatgaatgcacaagtagcccttgccaccacggggattgcgttaacatacccggaacctatcattgtcgctgttacccagggttccaagccactccaacaagacaagcctgcgtggatgttgacgaatgtatcgtgtctgggggactatgtcacctgggacgatgtgtgaataccgagggatcatttcaatgcgtctgcaatgcaggattcgagctaagccctgacgggaagaattgtgtcgatcataacgaatgtgccacatctaccatgtgtgtcaacggcgtatgcttgaatgaagatgggagcttcagctgcctgtgcaaaccaggcttcctcctggcacctggaggccactactgtatggatatcgatgaatgccagacacctggaatatgcgtaaatgggcattgtaccaacaccgaaggatctttccgctgccagtgtctgggaggccttgcagtaggaactgatgggcgagtttgtgtcgatacccacgtgcggtcaacttgctacggagcaatagaaaaggggtcatgtgcccgcccgttcccagggacagtgaccaagagcgagtgctgctgcgccaatcctgatcacggtttcggtgagccatgccaactgtgtccagccaaagacagtgcagaatttcaggctctgtgcagctcaggtttgggaatcacgactgatgggcgggacatcaacgaatgcgctctggacccggaagtgtgcgccaatggagtctgtgagaacctccgaggctcctatcggtgtgtctgtaacctgggttacgaagctggcgcctctggaaaggactgtaccgacgtggatgaatgtgccctaaattcgctactctgcgataatgggtggtgccagaattcccccggctcttactcttgtagttgcccacccggatttcacttctggcaagatacggagatttgcaaagatgtcgatgaatgtctctctagtccttgcgtatctggggtgtgtcggaatcttgctgggagttatacctgtaaatgcggcccaggctctcgacttgatcctagtggtacgttttgtcttgacagtacaaagggtacatgctggctaaaaattcaggagtcccgatgtgaggtgaatctgcaaggagccagtctgagaagtgaatgttgcgccaccctgggtgccgcatggggcagcccgtgtgagaggtgcgagatcgatccagcctgcgcaaggggattcgctagaatgacaggtgtgacatgcgatgatgtcaatgagtgcgagagctttcccggtgtgtgcccaaacggaagatgtgttaatacagccgggagtttccgatgcgaatgtccggagggattgatgcttgatgcctccggccgtctttgtgtggatgtgagattggaaccctgcttcctgagatgggacgaggatgaatgcggagtaacattgcctggtaagtatagaatggacgtttgttgttgtagtatcggggcagtttggggtgttgaatgtgaggcgtgtcccgaccccgagagcctagagttcgcctcactgtgtccaagggggttaggctttgcgtccagggattttttgtccggacgcccattttataaggatgtgaatgagtgcaaagtgttcccaggtctgtgcacccatgggacatgccgtaatacagtgggttcttttcattgcgcctgtgctggaggatttgctctggacgcccaagaacgcaactgtacagacattgacgagtgccgcatatcacctgatctatgcggccaaggcacctgcgtgaacacccctggcagttttgagtgcgaatgctttcctgggtacgaatccgggtttatgcttatgaaaaattgtatggacgtagacgagtgcgctagagacccccttctttgtcgcggcggcacctgtacaaatacagatggctcttacaaatgtcagtgtccccctggacatgaacttacagctaagggtacagcctgcgaagatattgacgaatgttctttaagtgatggtctttgtccccatggacagtgcgtgaatgtgatcggtgcatttcaatgcagttgccacgctggattccaatcaacgcctgatcgccaggggtgtgtggacataaacgagtgtagagttcaaaatggcgggtgcgacgttcattgtatcaatacagaggggtcctacagatgctcttgtggacagggttacagcctcatgccggacggaagggcctgtgccgacgtggacgagtgtgaagaaaatcccagagtgtgtgatcaaggacactgtacgaacatgcctggaggacaccgctgcttatgttatgatggatttatggccacccccgatatgcggacttgtgtcgacgtggacgagtgtgatctgaacccacatatttgcttacatggcgactgtgaaaatacaaagggttcctttgtctgccactgccagctcggttacatggtgaggaagggcgccactggatgctccgacgtcgacgaatgcgaggtgggcgggcacaattgtgattcacacgccagctgcctgaatatccccggctcttttagctgtagatgtctgcccggctgggtgggtgatggcttcgaatgtcatgatctagacgaatgcgtcagtcaggagcacaggtgcagtccaaggggtgattgtttgaatgtgcctggtagctaccgatgcacatgtcggcaaggatttgctggggatggcttcttttgtgaggaccgcgatgagtgtgcagagaacgtcgacctctgtgacaatggacagtgtctcaacgcacccggaggttacaggtgcgagtgtgaaatgggttttgaccccaccgaggatcatagagcctgccaagacgtcgacgaatgcgcacaaggcaatctgtgtgctttcggatcctgcgaaaatctccctgggatgttccgatgtatttgcaatggtgggtacgagttagacagagggggcggcaattgtaccgacattaacgaatgtgcagatcctgtgaattgcatcaatggagtttgtatcaatacccctggatcatacttatgttcttgcccccaggactttgaattgaaccccagcggtgtgggttgcgtggacacgagagccgggaactgctttctcgaaacacatgatcggggcgattccggtatatcatgctctgccgaaattggcgtcggagtcaccagggcctcatgctgctgttctttgggccgggcatggggaaacccctgcgagttatgtcccatggccaataccaccgagtaccgcaccctgtgccctgggggggagggatttcagcccaatcgcatcacagttattttggaggacattgatgagtgtcaggagctcccaggcctttgtcagggcggagattgtgtcaatacctttgggtccttccagtgcgaatgccctcctggttaccacctcagtgagcacacccggatatgtgaagatatcgacgagtgttccactcactccggcatttgtggacccggaacatgttataataccctcggcaattacacttgtgtctgcccggctgaatatctgcaggtgaacggcggcaacaactgtatggatatgcgaaaaagtgtgtgctttagacattacaatggaacatgccagaacgaattggcatttaatgtgacacgcaagatgtgttgttgtagttataacattggacaggcctggaatcgcccctgtgaggcttgccctaccccaatttcccctgattaccagattctgtgtggtaaccaagcccccgggttccttactgacattcatacaggcaaaccactggatattgacgaatgtggtgaaattccagccatttgcgcaaacggaatctgtattaatcaaatcggctcatttagatgtgaatgtccagccggctttaattacaacagcatattattggcgtgcgaagacgtcgacgagtgtggcagtcgggaaagcccatgccagcagaatgctgactgcatcaacatccccggatcatataggtgcaagtgtacgaggggatacaagttatcccccgggggcgcttgcgtgggtcggaacgaatgccgagagatccccaacgtctgctctcacggtgattgcatggacaccgaaggatcctatatgtgcttgtgtcatcggggattccaggccagtgccgatcagactctgtgtatggacattgatgagtgcgataggcagccttgcggtaatggcacctgcaaaaacattataggcagttataattgtttatgtttccctggatttgtcgtgacccataacggggattgtgtcgattttgatgaatgtactaccttggtgggtcaggtatgtcggtttggccactgtcttaacactgcaggcagctttcactgtctttgccaggacggcttcgaactcacagctgacgggaaaaactgcgttgacaccaatgagtgcctcagcctggccggaacctgtctacccggcacgtgtcagaacctcgaaggctcattccgctgcatatgtccaccaggctttcaggtgcaaagcgaccattgcatcgacatcgatgagtgttctgaagagccaaacctatgcctgttcggtacgtgtacaaatagtccaggatcattccagtgtctgtgtccccccggctttgtcctgtctgataatggccatcgttgcttcgatacccgccaatctttctgttttacccgattcgaggctggtaaatgctctgttcctaaagctttcaataccactaagacgcgatgctgttgctctaagcgacctggagagggatggggcgatccatgtgagttatgtccacaggaaggatcggcggcgtttcaggagctgtgccctttcgggcatggggcagttccaggtcccgatgactcccgagaagatgtcaatgagtgcgctgagaatcccggggtgtgtacaaacggcgtgtgtgtcaatacagacggctccttccgttgcgaatgtcccttcggctattccttggactttacaggtattaactgcgtggataccgacgaatgcagcgttggacacccttgcggacagggcacctgcaccaacgtgattggcggcttcgaatgcgcttgcgccgacgggtttgaaccaggcctgatgatgacttgtgaggatatcgatgaatgtagtctaaacccgctcctgtgcgccttccgctgtcataacacagaaggaagctacctgtgtacttgcccagccggttacacccttagagaagatggggcgatgtgtcgtgatgtggacgaatgcgctgatggacagcaggactgccacgcccgcggaatggaatgtaagaacttgatcgggacatttgcatgcgtatgccctccgggaatgaggccgctgccaggaagtggggagggctgtacagacgataatgagtgtcacgctcagcccgacctttgtgtaaatgggagatgtgttaatacagcagggtcgttccgttgtgactgcgatgaaggttttcaaccatcaccaactcttaccgaatgtcatgacatcaggcaagggccctgcttcgctgaggtgctgcaaacaatgtgtcgttccttgagttctagtagcgaggccgttacacgcgctgagtgctgttgtgggggggggcgcggatggggacctaggtgcgaattgtgtccgttacctggaacgagtgcatatcgaaagctttgcccacatggttctggttacacggccgagggaagagacgtggacgaatgtcgaatgctggcacatctgtgcgcccatggcgaatgcattaactcgcttggctcgttccggtgccattgtcaggctggttacacgcccgatgctactgccactacatgtcttgacatggatgagtgttcccaagttcccaaaccgtgcacgttcctgtgtaaaaataccaaaggttcattcctctgttcgtgccctcgtggatacctcctagaagaagacggacgcacatgcaaggacctcgatgaatgcacctcacggcagcacaactgccaattcctttgtgtaaatacagttggtgcctttacttgtcgatgtccacccggctttacacagcaccaccaggcatgttttgacaacgatgaatgttctgcgcagccaggtccttgcggcgcccacggtcactgccacaataccccaggaagcttcagatgcgagtgtcaccaggggttcacattagtttcttccggacacggttgtgaggacgtgaacgaatgcgacggacctcatagatgtcagcacggctgccagaatcagctgggaggttatcgctgtagctgtccccaaggctttacccagcattcacagtgggcccaatgtgtggacgagaatgaatgcgccctctcccctccgacctgtggatccgcatcttgtagaaatacacttggaggctttcgttgcgtgtgcccatcgggattcgactttgatcaggcacttgggggttgtcaggaggtcgacgagtgcgcaggaagacgcgggccttgttcatattcatgtgccaacaccccaggtggatttctttgcgggtgcccccaaggatactttagagctgggcagggccactgtgtgtctggcctaggattttcccctggcccgcaggacacaccggacaaggaagaattactatccagcgaggcttgctacgagtgcaaaatcaatggcctgtctccacgcgacagacccagaagaagcgcccaccgcgaccaccaggtcaacttggccactttggactccgaagcactgctcacgttgggcctaaatctatcacacctggggagagctgagcgaattttggagcttcggccagcattggaaggccttgagggacgaattcgatacgtgatcgttcgcggcaacgagcaaggattctttagaatgcaccatcttaggggagtcagttccttgcagctggggcgtaggagacctggaccgggtacttacaggttggaagtagtttctcatatggccggtccctggggtgtgcaacccgaaggccaaccggggccttggggtcaagcactcagactaaaagtacaactgcaactactatag

SEQ ID NO: 13582 - RNA, 303 nt, synthetic construct; identical to SEQ ID NO: 11943
  misc_feature 1..303: note = source = /note="Description of Artificial Sequence: Synthetic coding sequence"
  source 1..303: mol_type = other RNA

SEQ ID NO: 13583 - RNA, 1404 nt, synthetic construct
  misc_feature 1..1404: note = source = /note="Description of Artificial Sequence: Synthetic coding sequence"
  source 1..1404: mol_type = other RNA
atgtggcgctgccccctgggcctgcttttattgttgcctttggccggacacctagccctcggcgcacagcagggacggggtcgaagagaacttgcccccggactccacttgcgcggaatccgagatgcaggtggaagatattgccaggaacaagatctatgctgtcggggtcgggctgatgactgcgccctgccgtacctgggtgccatctgttactgtgaccttttttgcaaccgcaccgtgtctgactgttgccctgacttttgggacttctgccttggtgttccacccccgtttcccccaatccaaggctgtatgcatggcgggagaatctaccccgtgctaggcacatactgggataactgcaatagatgcacatgtcaggaaaatcgccaatggcaatgcgatcaagaaccctgtctggtggatcccgacatgataaaggcgataaatcaggggaattatgggtggcaggctgggaaccactccgcattttgggggatgacacttgatgagggtattcggtacaggctgggcactattagaccttcctcttccgtgatgaacatgcatgagatatacaccgtcctgaaccctggcgaagtgctgccaacagcgttcgaagcctccgagaaatggcccaatttaatccacgaacccctcgaccaaggcaattgcgccggttcctgggcattctctacagctgctgtagcctcagaccgcgtgagtattcattctctgggacacatgacgcccgtcctgtcaccgcagaacttactctcatgtgatactcatcaacagcagggatgtaggggcgggcgcctcgacggagcatggtggtttctgcgtagaaggggagtcgtgtctgatcattgttacccattcagtggacgggagcgggacgaagcggggcccgctcctccctgcatgatgcacagtagagccatgggtagagggaagcgccaggcaacagcacattgccctaactcttacgtcaacaataacgatatctaccaggtgacaccagtgtacagactcgggagcaatgacaaggaaattatgaaagaattgatggaaaatggtccagttcaggctctgatggaggttcatgaagacttcttcctatacaaaggcggaatctattcccacacccccgtctccctgggaaggcccgaaaggtacagaagacacggcacccatagcgtgaaaattaccggatggggagaagaaacactgccggacggacgcacattgaagtattggaccgctgcaaatagctggggacccgcgtggggagagaggggccacttcaggattgtgaggggtgtgaatgagtgcgatatcgagagctttgtgctgggcgtgtggggaagagtgggcatggaggacatggggcaccattag

SEQ ID NO: 13584 - RNA, 2205 nt, synthetic construct
  misc_feature 1..2205: note = source = /note="Description of Artificial Sequence: Synthetic coding sequence"
  source 1..2205: mol_type = other RNA
atgttctacgtgtgttcttcttgcgtgtttttatgcggatccaacttccctaacttccctttccaagtcgcatcggcaaagtccgcccccgagattcctaccattgaccaggcctattcgaaactcagtaattctataacagttgaatgggctaccgtccccggtgcaaccagttacctcctgactgccgaagacggagatactgtgatagaaacaactgtagccaactccccaggaacggttaccgggctgaaagccgctacatggtacgaaatcacaatcaggtctatttctgcagccggacgatcacaagccagtcccccgaaacaagcaaagaccgtactcgccgcgccgattcttgaagtcagcagcccttcttccgatagcattctagtccaatgggaagcagtgtatatggccatcgcattcagcgtctccatcatgcgcgccaatggcctcggcagcatctggaaagagaatactaccaataccagcttgaccttcacttcccttgaagctggtacgctctacacaataaaggcctatgcatggaacgcaaaccgaattcctggcgacgacagtacttgtaatcagcgtacatccccacgagcaccggcaaacatacaggtttcctttgatagtggagccctgaaggccagtttctcctgggcccgggctgaaggcgcttttaactataccgtaatggccctgagcgattcctcggaactgacatgctcaaccacctttagctcatgcaccattagctccctccaatgcggcaccgagtatctgataagcgtactagctagtaatgacgccggatctagtaaatccagttctgctatgaccctcaagacagtggcttgtgcacctgggcgcgtgaccattcaggaagatccccctggtcacctcagtgtggcttggtcttccgtcgacctgggcgactactacgtagtgttcgtgaagtcagatgacgggctcgaagtgcattgcaatacttctctcacccagtgtaactttttaagcgaatgcggattcacctactttatctcagttttcgtatacaataaggctggccaatcccctctgggcgacatctttaactatacaacagcaccatgttgcccttccgacatcaaccctgtcctagtttctagcgaccgcgtggagattgtttggtctcccgtgcgaggtgccgaattatatgagacaaaagcagtcgatggctacaacatggtggagtgtaacgacacaaccccagcctgcacgctctcagctctagaatgtgacaccaagtacaacattaccgtatactcattcaacgaagtccgaggttccaacatgagttgtacacctcaattcattaccacggctccctgttcaccggaaattaagaacgtttcacgcgatgcattttccatgattaacgtccattggcgctccacaaacgatgacgcgacatacaccgtgactgctcagggcgagaaaggattatatcagtgctcctctactggcgagtcctgtaccatgagaggcctgccctgcggaagcgtctttagtgttactgccgtggccgagacccaagctggccgatcattgcccagctacagcgtacccctcgaaacagttccatgttgccccacgggactgacagttactcaaattactcaatccgttatcaacgtatcctggactatcgggcgcgttgcccaaactcatgtcgccgtgctggaaagccacaccggacagtccaagtgtcacacacaccaaaatcactgcctgctgggctgcatcacatgtggaatcaactacaccgtgacactgaaagccatctccgccactggtctcacggccgattgctcctaccagtcttacttttccggggcatgctgccctttgggtgtcaaactctacagactcggccctaacggcattcgcatctactggcaagcctcccgtgggtcagcaaactactctactgatctttatggttccaagggcatcttcacatgcactccgtccgctggcctctccttttgtgacgtcaccgagatcccttgcggagacgtatataccgtgatggtcagccccgtcgcaaagacgggtctgaaactgacattttgtcccaaaaaaatctatagcgtgacatgttctggctccacactaggtatggtgatttatcgcggcaaaagaaatgaggagtag

SEQ ID NO: 13585 - RNA, 1098 nt, synthetic construct
  misc_feature 1..1098: note = source = /note="Description of Artificial Sequence: Synthetic coding sequence"
  source 1..1098: mol_type = other RNA
atgctggatggcagccccctcgcacggtggctggccgctgcctttggactgacactgcttctggctgctttacgcccaagcgctgcctattttggtctgaccggctcggaaccgttgacaattttgcccttaactctcgagcccgaggctgctgctcaagctcattacaaggcatgtgacagactgaaactggagagaaagcagagaagaatgtgtagacgggatcccggagtggctgaaaccctggtcgaggccgtgagcatgtccgccctcgaatgccagtttcaatttaggttcgaacggtggaattgtacattagaggggcggtaccgtgcttcactcctgaaacgcggctttaaggaaacagcttttctgtatgcaatttcttcggccgggctcacccatgcgctggctaaggcctgttccgctggacggatggaaagatgcacatgtgacgaggcaccagacctagagaatcgagaggcctggcagtgggggggatgcggtgacaatctgaagtacagcagcaaatttgttaaggaatttcttgggagacgaagcagcaaggacctacgcgctagagttgattttcataacaatctcgttggtgtgaaagtaatcaaagctggtgtggaaactacgtgtaagtgtcatggcgtgtctgggtcctgtaccgtcagaacatgttggcggcagctcgctccattccacgaagtaggaaagcacctgaaacataaatacgaaaccgccctgaaagtcggttccaccaccaacgaggcagccggcgaggcaggcgccattagtcccccccgaggacgggcctccggtgctggaggcagcgacccattacctaggacacctgagcttgtgcatttagacgacagtcccagtttttgcctcgcaggccggtttagcccagggacggccgggcgacggtgccaccgggagaaaaactgtgaaagtatttgttgcggccggggacacaatactcaatcaagggtcgtgactcgcccatgtcagtgtcaagttcggtggtgttgttacgtagagtgtcgccagtgtacccagagggaggaagtctacacatgtaaaggatag

SEQ ID NO: 13586 - RNA, 795 nt, synthetic construct
  misc_feature 1..795: note = source = /note="Description of Artificial Sequence: Synthetic coding sequence"
  source 1..795: mol_type = other RNA
atgagacttcgcccattgccacttgtcgttgtgcccggactgctgcagctgctattttgtgactccaaagaagttgttcacgctacagagggccttgattgggaggacaaggacgcacccggaactttggtcggcaacgtggtgcattcccggatcatatctccattaagactgttcgtgaaacaaagccctgtcccgaagcctggtcctatggcctatgctgatagcatggagaatttctgggactggctggctaacattaccgagattcaggagcccctagcacgtaccaaacgccggccaattgtaaagacagggaaattcaaaaaaatgttcggctggggcgactttcactccaatataaagactgtgaagctaaatctcttaatcacagggaagatcgtcgatcacggcaatgggacattttcagtgtatttccggcacaatagtaccggtttgggcaacgtgagtgtatcactagtaccgccatcaaaggtcgtcgagtttgaagtctctcctcagtccacactagaaacaaaagaatccaaatctttcaactgtagaattgaatatgagaaaaccgatcgcgccaagaagactgccctgtgcaactttgatccaagcaagatatgttatcaagaacagactcagtctcacgtcagctggctatgcagcaaaccatttaaagtgatctgtatttacatcgccttctactctgttgactacaaattggtacaaaaagtttgcccagattacaattatcactctgaaacaccatatctgtctagcggctag

SEQ ID NO: 13587 - RNA, 1125 nt, synthetic construct
  misc_feature 1..1125: note = source = /note="Description of Artificial Sequence: Synthetic coding sequence"
  source 1..1125: mol_type = other RNA
atgaaacccctcttagagacgttatatctgctcggtatgcttgtcccaggcggactcggctacgatcgctcattagctcagcacaggcaagaaatcgtcgataaatccgtatcgccttggtctcttgagacttacagctataacatctatcaccctatgggagaaatttacgaatggatgcgagaaatttcagagaagtataaagaagtcgttacacagcactttctcggggtcacatatgaaacacaccccatgtattatttgaagatatcccagccctccggaaacccaaagaaaattatttggatggactgcgggatacatgcccgggagtggattgcacccgctttttgtcagtggttcgttaaggaaatcctgcaaaaccacaaggataactcatctattcggaagctcctccgtaatctggatttctatgttttgcccgtattaaatattgacggttatatatatacgtggaccacggatcgcctctggcgcaaatctagatctcctcacaataacgggacctgttttgggacagacctcaaccgtaattttaatgctagttggtgttctatcggcgcttcccgaaactgccaagaccagactttttgtgggaccggcccggtatctgagcctgaaactaaggccgttgcatcatttatcgaatccaaaaaagatgacatattatgttttctgacaatgcactcctacggacagcttatactgacaccttatggatacacgaaaaacaagtcctcaaatcaccccgagatgatccaggtcgggcaaaaggcagccaacgcattaaaggccaagtacggaaccaactacagggttggaagttcagcagatatcctgtatgcaagcagcggttccagccgggattgggctagagacatcgggattcctttctcctacactttcgagctgcgcgattctggcacctatggattcgttctgcccgaagcccagatacagcccacatgtgaggagactatggaagctgtattgtcagtcctcgatgacgtctatgcaaaacattggcactccgactccgccggacgggtgacctcagctactatgttactcggtctcttggttagctgtatgtcgcttttatag

SEQ ID NO: 13588 - RNA, 1728 nt, synthetic construct
  misc_feature 1..1728: note = source = /note="Description of Artificial Sequence: Synthetic coding sequence"
  source 1..1728: mol_type = other RNA
atggcctcatggcttcgccgcaaactcagaggcaaacgcaggcctgtcatagccttctgcctgctcatgatcctctctgctatggctgtcacccgcttcccacctcagagaccttccgccgggccagatcccggacctatggagccacagggcgtgaccggggcacctgcaactcatattaggcaggcactaagttccagccgaaggcaaagggcacgaaatatgggcttctggcgatctcgggcgctccctagaaacagcatcttagtctgtgccgaggagcaagggcatagagcacgagttgatcggagcagggaatcccctggaggcgacttaagacaccccggaagagtgagaagagatatcacactgtcgggccacccaagactgtccactcagcacgtagtgcttctacgggaagacgaggtgggcgaccctggcactaaagatctcggccatccacagcacggcagtcccattcaggagacacaaagcgaagtggttactctagtctccccattacccggctctgatatggcggcgttgcccgcatggagggccacatccggactgactctgtggccacatactgccgaggggcgagacctcctgggtgcagagaacagggccttgaccggaggacagcaggctgaagatccgacattggctagtggcgcgcatcagtggccaggtagcgtggaaaaactgcaggggtccgtgtggtgtgatgccgaaactcttctttcttcttcccgaactggaggtcaggcccctccgtggttaacagatcatgatgtacaaatgctcaggctattggcacagggtgaggtcgttgacaaggcaagagttccagctcatggacaagtgctgcaagtcgggttcagcactgaggcggctcttcaggatctctccagtccaagactgtcacagctttgctcacagggtttgtgcggactcattaagcgccccggtgatctgcctgaagtcctctccttccacgtggatagggtgctaggtcttcgccgtagtcttcctgccgtagcacggcgctttcactcccctctgcttccatacagatatacagacggcggagctcggccagtgatctggtgggccccagatgttcaacacctctcagatccagacgaagaccagaatagtctagcactgggatggttgcagtatcaggcactgctggcacattcctgcaactggccaggccaggctccctgccccggcatccatcacacagagtgggctcgccttgccctgttcgacttccttctacaggttcacgacagactggacaggtattgctgtggcttcgaacctgaacctagcgacccatgcgtggaggaacgcctgagagaaaagtgccagaaccctgccgagttacgtctcgttcacattcttgtgcggagcagcgatccatcccacttggtctacattgataacgctggcaatttacaacatcccgaggataagctcaatttccgtctgctcgagggcatagacgggttccccgaaagtgcagtaaaagtgttagcttctggttgtttgcaaaatatgctgttgaaaagcctgcaaatggaccctgtgttttgggagagtcagggcggcgcacaaggattaaagcaagttctgcaaaccttggaacaacgcggacaggttctgctgggtcacatccagaaacacaaccttacactcttccgggacgaagacccctag

SEQ ID NO: 13589 - RNA, 1680 nt, synthetic construct
  misc_feature 1..1680: note = source = /note="Description of Artificial Sequence: Synthetic coding sequence"
  source 1..1680: mol_type = other RNA
atgtggaccaatttttttaaactccgcctgttttgttgtttactggccgtcctcatggttgtcgtcctggtgattaacgtgacccaagtggaataccttgatcatgagacagtcagcgccacttttattgacagttccggccagtttgtgagctcacaggttacaggcatctcccggaacccctattgtggatatgatcagcagacactatcatcacaggaaagaatggaagaagacagtcttctcgccgccctgcacagacaggtgcccgatgtcggaccagtacccttcgtaaagagtactgacccttcctcatcctactttgtgattctgaattctgctgcatttttcaaagtaggtagccagctcgaagtcttagtccatgttcaggactttcaacgtaaaccgaaaaagtatgggggcgactatctgcaggctagaatccacagtctaaagctgcaggccggagcagttggcagggtggttgactatcaaaatgggttttataaggtctttttcacacttctatggccgggtaaggtgaaagtttcggtgtcactggtacacccaagtgagggcatccgcgtgctgcagagattacaggaagataaacctgaccgtgtttacttcaaatcactgtttcgatcaggcagaatcagcgagacaaccgaatgcaatgtctgccttcctggcaatctgcccctatgtaactttaccgacctgtatacaggcgagccatggttttgttttaagcccaaaaaacttccctgcagttcccggatcacacattttaaaggcggatacttgaaagggttattaacagctgctgagtccgcattctttcagtctggggtgaatatcaagatgccagtgaattcgagtgggcctgactgggtgacagtcattcctcgcaggattaaagagaccaattccttagaactatcccaggggagtggcaccttcccttcagggtactattacaaagatcaatggaggccaagaaaattcaagatgagacagtttaacgacccagataacattaccgagtgccttcagagaaaagtggtgcatctctttggggactccacgatcagacagtggttcgagtatctgacaacattcgtcccagatctcgtcgagtttaatttaggatcacccaaaaacgtcgggccgtttcttgccgtcgaccaaaagcacaacattctgcttaaatatcggtgtcacgggccacccatacgatttaccaccgtttttagcaacgaattacactacgtcgccaacgaactgaacgggatagtcggcggcaagaatacagtggtggcaattgccgtgtggagtcacttttcaacgttcccactggaagtatacattagaagattgcggaacattcgacgcgctgttgtgcggctgctggatcgatcgccaaagaccgtcgtggtgatacgcacagccaatgcccaggaacttggtcccgaagtaagcctctttaattctgactggtacaactttcaattagataccattctgcgcaggatgttctccggcgttggcgtataccttgttgatgcttgggaaatgacactggcgcattacctgcctcacaaactccaccccgatgaagtgatcgttaaaaatcagctggacatgttcctctctttcgtatgcccattggagacctag

SEQ ID NO: 13590 - RNA, 3624 nt, synthetic construct
  misc_feature 1..3624: note = source = /note="Description of Artificial Sequence: Synthetic coding sequence"
  source 1..3624: mol_type = other RNA
atgcggttaacccacatttgctgttgttgcctgctttaccagctcggctttctttcaaatggcattgtgtccgaactccaattcgccccagatagagaagaatgggaagtagtctttccagcactttggaggcgcgaacctgtagacccggccggggggagcggtgggtccgctgatccggggtgggtgcgcggcgtaggtgggggaggctcagcccgtgctcaggccgcaggttccagtcgtgaggtccgttcagtcgcccccgttccactggaggaacccgtcgaaggccgctccgaatccagactacgccctcccccccctagtgaaggcgaagaagatgaagagttagaatcacaggaactgccacgcgggagctcaggagccgccgctctttccccaggtgcccccgccagctggcagccccccccgccaccccagccgcccccgtcacctccacccgcgcaacatgctgagcccgacggtgatgaggtcctgctcagaattccagccttctctcgcgacttgtacctgctgcttcgacgcgacggccggtttctcgcccccagattcgcagtggagcagcgaccaaacccaggcccaggaccaacaggagccgcttctgcaccgcaaccacccgctccacccgatgccggttgcttttatacgggagctgtgttacgccaccctgggagtctggcctccttttccacttgcggcgggggactcatgggattcatccagctgaacgaggacttcatttttatcgaaccactgaatgacacaatggccatcactgggcatccacaccgcgtgtaccgccagaagaggtcaatggaagaaaaagtgaccgaaaaatctgccttacattcccactattgtggaattatttcagacaaaggtaggccgcgctcccgtaaaatcgcagaatcaggtcgcggtaagcgctattcctataaattgccccaggagtacaatattgaaaccgtggttgttgccgaccctgcgatggtttcctatcatggcgctgatgcagcccgacgttttattttaacaatcctgaacatggtctttaatcttttccaacacaagtcattgagtgtgcaggtcaacctacgcgtaattaagctgatcctgcttcatgagacccctcccgagttgtatattggacaccacggcgagaagatgcttgaaagcttctgcaaatggcagcacgaagaattcggcaagaagaatgatatacacctggaaatgtccacaaactggggggaggatatgacttcagtagatgccgccattctaattactagaaaagatttttgtgtacacaaggacgaaccatgcgatacagtggggatagcatacttaagcggtatgtgctcagagaagcgaaaatgtatcatcgccgaagacaacggccttaacctggcttttaccattgcgcacgaaatgggacataacatggggataaatcacgataatgatcacccaagctgtgctgacggccttcacattatgagtggtgaatggattaagggacagaatctcggtgacgtcagttggtctcgatgctctaaagaagacctcgaacgatttctgcgcagtaaggcctccaactgcctcctccagacaaatcctcaaagcgttaactcagtaatggtcccttccaaactgccaggcatgacctacacagctgatgaacagtgtcagatactcttcggccctttagccagcttctgccaggagatgcagcacgttatttgcacaggactgtggtgcaaggtagagggggaaaaggagtgtagaacaaaactggacccccctatggatggtaccgactgcgatcttggcaaatggtgtaaagcaggtgagtgcacgagcagaacgtcggctcctgaacacctggccggcgagtggtctttatggtcaccttgtagcaggacatgctccgccggcatatcatcgagagagagaaagtgcccagggttggactccgaagctcgcgattgcaacggacccaggaaacagtacaggatttgtgaaaacccaccttgccctgctgggttacccggtttcagagattggcagtgtcaagcatactctgtccgcaccagttctcccaaacacatcttgcagtggcaggcagtgttagatgaggagaagccctgcgccctgttctgttctccagtgggcaaggaacaacctatactgctatcagagaaagtgatggatgggaccagttgcggctaccagggacttgatatctgtgcaaacggacgctgtcaaaaagtgggatgtgatggacttttagggtctcttgccagggaagaccattgcggcgtgtgtaacggtaacggaaagtcttgcaagattattaagggcgattttaaccacactcgaggtgcaggatacgtggaagttctggtcatcccagccggcgcccgacgtattaaagtcgttgaagagaagccggcgcatagctacctcgccctcagagacgcaggaaaacaatctattaatagcgactggaaaattgaacacagcggtgcctttaatctcgcgggtactacagtccattatgtacgcagaggattatgggaaaagatttccgcaaaggggccaaccaccgcgccgcttcacctgcttgtactcctgttccaggaccagaactacgggttgcattacgagtacacgattcccagcgaccctctccctgaaaatcagtcatctaaggccccagaaccgctcttcatgtggacgcacactagctgggaagactgcgacgccacttgtgggggcggtgagcgaaagaccacagtatcctgcactaagatcatgagcaaaaatatatcgatagtggacaatgaaaaatgcaagtatctgaccaagcccgagcctcaaattagaaagtgcaatgaacagccgtgtcagactagatggatgatgaccgaatggaccccttgctctcgaacctgcggaaaggggatgcaaagtaggcaagtggcctgcacacagcaactctcaaatggaacactgatcagggcaagggaaagagactgcattggtcccaaaccggcaagtgcccagcgatgtgagggccaagattgtatgacagtgtgggaggcaggcgtttggtccgaatgctcagtgaagtgcggcaaaggaatcagacatcggaccgtgcgatgtacgaacccacgaaaaaagtgtgtcctgagtacaagacccagagaagccgaagattgcgaagactatagcaaatgctacgtctggagaatgggagactggagtaaatgcagcattacttgtggaaaaggaatgcaatcccgagtcatccagtgcatgcacaaaattaccggaaggcacggcaacgaatgcttttcaagcgagaagcctgccgcctatcgaccgtgtcaccttcagccttgcaacgagaaaatcaatgtgaacaccataaccagccccagactcgcggctcttacatttaaatgcttgggcgatcaatggcctgtttactgtagagtcatccgtgagaaaaacttatgtcaagacatgcgatggtaccaacggtgctgtgagacctgtagagacttctatgcccaaaagctccaacagaaatcctag

SEQ ID NO: 13591 - RNA, 258 nt, synthetic construct; identical to SEQ ID NO: 11952
  misc_feature 1..258: note = source = /note="Description of Artificial Sequence: Synthetic coding sequence"
  source 1..258: mol_type = other RNA

SEQ ID NO: 13592 - RNA, 2982 nt, synthetic construct
  misc_feature 1..2982: note = source = /note="Description of Artificial Sequence: Synthetic coding sequence"
  source 1..2982: mol_type = other RNA
atgggatcaggaagagtgccaggtctttgtcttctggtgctgctagtgcacgctagggctgcccaatactctaaagctgctcaggatgtggatgaatgcgtagaagggacagacaattgtcatatagacgccatctgtcagaatacaccacgtagttacaagtgcatctgcaagtccgggtatactggagatggtaagcattgcaaagatgtagacgagtgtgagagagaggacaacgccggctgtgtacacgattgcgttaatatccccggaaactacaggtgtacctgttacgacggatttcacctagctcacgatgggcacaactgcctagatgtggacgaatgtgccgaaggaaatggaggctgtcaacaatcatgcgtcaatatgatgggatcgtatgaatgtcactgcagagaaggcttttttttatccgacaatcagcatacatgcatccaaaggcccgaagagggtatgaactgtatgaataaaaaccatggttgcgcccacatttgtagagagactccaaagggaggcatagcttgcgagtgccggcccggcttcgaattgaccaaaaaccagagagactgcaaactgacttgtaattatggtaatggaggatgtcagcatacatgcgacgatactgaacaagggccaagatgcggatgccatatcaagtttgttctgcacacagatgggaaaacctgcatagagacttgcgctgttaataatggtggatgtgattccaagtgtcacgacgcagccaccggcgttcactgtacatgccccgtgggcttcatgcttcagccagaccgtaagacgtgcaaggacattgatgagtgtcggctgaacaatggaggatgtgatcacatttgtcgcaacacagtcggatcctttgaatgcagttgtaaaaaagggtacaagctgttaatcaatgaaaggaactgccaagatatcgacgagtgtagtttcgacaggacctgcgaccatatctgtgtgaatacaccggggtcattccaatgcttatgtcaccgcggctacttgttatatgggattactcattgtggcgatgttgacgagtgcagtattaaccgaggcggctgcagatttggatgtataaacactcctggctcataccagtgcacttgcccagcaggccaaggccgtctgcattggaacggaaaagattgtacagaaccactgaagtgtcagggcagccccggagcgagcaaggctatgctgagctgtaatcggtcaggcaaaaaggacacatgtgcactgacctgcccttcccgagcccggttccttcctgagagcgagaacggattcacagtctcatgcggcacgccaagccctagggccgcacccgctcgtgcaggtcacaatggcaattccacgaactctaaccactgtcacgaagccgcggtactttcaattaagcagagagcttccttcaagatcaaagatgcaaagtgtaggttgcaccttcgaaataaaggtaagaccgaggaagctggcagaatcacaggaccaggaggagcgccttgcagtgaatgtcaagtgactttcatccatttgaagtgcgacagcagtagaaaaggaaagggccgaagagcacggacacccccgggtaaagaggtcaccagactcacgctggagctggaggctgaggtcagggctgaggagaccaccgcctcttgtggtctgccctgtctaagacagcggatggaacgacgtttgaagggctcattgaaaatgctaaggaaatcaatcaatcaagaccggtttctgctacgacttgccggcctggactacgagcttgcccataaaccaggtctcgtggcaggggaaagggcagagcccatggaatcctgccgccctggacagcacagagcaggtacaaagtgcgtctcttgcccgcaaggtacatactaccatggacagactgagcagtgcgtcccttgtcctgctggaactttccaagaaagagaaggccagctgtcttgtgatctttgccccggctccgatgcccatggtccactgggagccactaacgtcaccacctgcgccggtcagtgtccccccggtcagcattctgttgatggcttcaaaccctgccaaccgtgcccccgaggcacctatcagcccgaagccggccgaacactttgctttccttgcggtggaggtctgacaacaaaacacgaaggcgctatctcttttcaagattgtgatactaaggtgcagtgcagccccggacactactacaacaccagcattcacagatgtattcgctgtgcaatgggaagttatcaacccgatttcaggcagaatttttgttcccgctgtcctgggaacacctcaacagacttcgatggatctactagcgttgcccagtgtaaaaataggcagtgtggtggtgagctgggcgaattcaccggttatatagaatcacctaactatcctggaaactatcctgctggcgtggaatgcatctggaacataaacccacccccgaaaagaaagattctcatagtggtgcctgagatctttttaccttccgaggatgaatgtggcgatgttcttgtcatgagaaagaactctagtccttccagtattacaacttatgaaacttgccagacctatgagagaccgatcgcttttacggctaggtcccggaagttatggatcaactttaaaacttctgaagcaaattctgctcgaggatttcagataccgtatgtgacctacgatgaggactacgaacagctcgtggaggacatagttagggacggcaggctgtacgcaagcgagaaccatcaggaaattctcaaagacaagaaattaatcaaagcattttttgaagtcttggcacatcctcagaattactttaaatataccgaaaaacataaagaaatgctgcccaaatcattcattaagttgctaagaagcaaggtatccagtttccttagaccctataagtag

SEQ ID NO: 13593 - RNA, 4773 nt, synthetic construct
  misc_feature 1..4773: note = source = /note="Description of Artificial Sequence: Synthetic coding sequence"
  source 1..4773: mol_type = other RNA
atgcctggcggcgcttgcgtcctggtgatcgccctcatgtttctggcctggggcgaagcacaagaatgttcacccggaggacatcagtttttacggagcccatatcgaagcgtccggttcgactcctggcatttgcaacagtccgcagtccaggacctgatttgtgatcactcactttcacccggatggtaccggtttctaatccttgaccgccccgctgaaatgcccacaaaatgcgttgagatgaaccattgtggcacccaagctcccatatggctgagcctgagagacagcgaaactttgccttcacccggggagatcaaacagctcacagcctgtgcaacctggcagttcctgttttccaccaccaaggactgttgtctttttcaaattcccgtgagcgtgcgaaattgtggcaatttttccgtttatctgctgcagccaacacaaggatgcatgggttactgtgccgaagctatcagcgatgcgagattacatccgtgtggtagtgatgaaaccgagacaggcggggattgtgtgagacagctcgctgcgagcctgccgccgcctccagccggccggccagaagtgcttgtcgaactgattgaaagccgactgttctgtcgctgcagttttgacgtgcctgcaacaaagaattcagtcgggttccatattgcgtggtctcgcctgtcatcccaagaagtgaaggaagagttgacccaagaaacaaccgtgcaagccttttcactactggagttggacggtatcaacctgcgcctgggcgatagaattttctgtagtgctagtgttttctttttggaaaacccacacgtccagtccgttgctatcgaaagccaagaattctttgctggatttaaactacagcctgagctgagcaccataagcgaggacgggaaagaatactatttgcgaattgaatcaaccgtccctattatttgttccgaattttccgagttagaccaggaatgcaaaattagcttaaagcttaagaccatagggcaggggcgcgaacatctgggcctgaatctcgcactctcatcttgtcatgtggacctgctgcaaacatccagctgcgcaaatggcacctgctctcatacatttgtctactacactgctgtgaccgatttcagtcgagacggggatagggtaagcaatatagtggtccagccaattgtgaacgaagatttcctgtggaataactacattcccgacagtattcagattaaggttaaggacgtccctaccgcatattgttatacatttactgacccccacattattactttcgacggccgagtatatgataactttaagaccgggacattcgtgctgtataagagcatgtcacgcgacttcgaggtacacgtccggcaatgggactgccgctctttacattacccagtcagctgcaattgtggattcgtagcccaggaagggggagatatcgttaccttcgacatgtgtaatggtcagttaagagaatcccaaccttacctcttcatcaaatcccaagacgttacccgtaacataaagatctcggagagttaccttggccgcaaagttacaatttggtttagctcgggcgccttcatccgggccgatttgggggagtggggcatgtccctaactatcagggctccctccgtagactataggaacactcttggattgtgcggcacctttgatgagaatccagagaatgattttcacgataagaatggaatgcagatagatcagaactttaataattacgtggccttcatcaacgaatggcgtatcctacccggaaagagcatgtctgatacacttccagtctccatgaccagccccggtaagcccagttattgtagttgctccctggataccgcagcctacccctcaagcgaggatctcgactccgtcagtaggtctgaaatagccctgggttgcaaggatctgaatcacgtgtctttgtctagccttattccagaacttgacgttacatcagaatacattaacagcgacactttagttcgagagatcaacaagcacacaagccccgaagaatacaaccttaatctcttcctgcaggagaagaagcatattaaccttacaaaattaggccttaacgtgcagaaacatcctggaaacgagaaggaggacagtttacagtaccttgcgaataaaaagtacactcagggcagaggatctcacagtcaggagatgcggtacaacaggcagaatagatggaaaagacagaacttccacgaattcccacccctatttgcttttcccagtctgtcacaaacggatctcgaagagctcacttatttctttccagaggaccatgccgaagatgttcagcaggagttctttccaagttggcccactccctccggccttaccgagtattctacacttaccctttgtcaggagacccttgcaaatagttccattgggagactctgcctggctttccttggcaaaaggttggacagcgtcatcgaaatgtgtgtaaaggatgtgttgcttaaagacgacttgtcgtgggccgaggctggcgtcgccctgctcgagaacgagtgcgaaaagagaattgtcgaagaaggcaaatacaacacagaggagtatggaacatccattgaagatatcctgtcggtcctgaagtgccccaatctgtgttctggaaacggtcaatgtatggaatgggggtgtgcttgttccccatcgttctcttcctatgattgttctgattcatacgacaaagctcctgagatcaccgaactcggcaacgctggcttctgcgacgtccagaagtacaactgcatgatggtacgcgtcttcggaaagggattcaaggaattacctagtattaaatgtgaagtgactaagctccaatataactcaagtgaatggatgccgggcgagcccatttacacccagacagtgttccataactctagagcagtggattgtcagctccctaccgatgtccagcagttcgatacaatggatcttgtcggggggaagccaaccgggaaatggcagttaaaggtgagtaatgacggctacaaattttctaatccaaagataacagtgatctatgacggagcttgtcaggtttgcggattgtacaagaatgatagttgtaccataaaggagaatgtgtgcataattgatgggttatgctatgtcgagggcgacaagaacccaacttccccgtgcctgatctgccggccaaaaataagtcgcttcacatggagctttcttgagaataaccaaccacctgtgatacaggctttacaggacaaactccagaccttttacggcgagaacttcgagtatcaatttgttgccttcgacccggagggatccgatattcatttcacactagacagtggtcccgaaggggcctcagtgagctctgcaggactgtttatgtggaagaccgatctcctcacaacacaacagatcacagttcgacttaacgacgattgcgatgccgaaaccagagttacgattgaggtcacagtgaaatcgtgcgactgcttgaatgggggctcttgcgtatctgaccggaattttagccccggatccggtgtctatctgtgtgtttgtttgccaggatttcacggatcattgtgcgaagtagacatttccggttgccaatccaacccttgcggcctcggcagctatatttcaggatttcattcttactcctgcgattgcccacctgagttaaaggtggaaacccaattcgtgaaccaatttacgacacagaccgtggtgttaactagaagcgacaagagcgtgaacaaagaagaggacgataagaatgctcagggaagaaagagacacgtgaagccgacatcagggaacgccttcaccatttgcaagtacccctgtgggaaaagtagagagtgcgtggcccccaatatctgcaagtgcaaacccggttatatcggcagcaactgtcagaccgccctgtgtgacccagactgtaaaaatcacggaaagtgtatcaagcccaacatttgtcagtgtttaccaggacatgggggtgcaacttgtgatgaggaacattgtaatcctccctgtcagcatggcggaacatgcctagccggaaatctttgcacatgcccctacggctttgtcggccccagatgcgaaactatggtttgtaatcggcactgcgaaaatgggggacaatgcttaacaccagatatttgccaatgtaaaccgggttggtacggccccacatgttcaaccgccctgtgtgatcctgtgtgtctcaacggtgggagctgcaataaacccaatacctgtctctgtcccaacggattctttggcgaacactgccagaatgctttctgccaccccccttgcaaaaacggaggacattgcatgaggaacaatgtctgtgtttgccgagaagggtatacaggcaggcggttccaaaagagtatctgcgatcccacttgtatgaatggaggcaaatgcgtgggcccctcaacctgcagttgtccaagcggttggtccggtaaaaggtgtaacacgccaatctgcctccagaaatgtaagaacggaggagaatgtatcgccccttcaatttgccattgtcccagttcatgggagggcgtgagatgtcagatccccatatgtaatcccaaatgtctttatggcggaaggtgtattttcccgaacgtatgctcttgcagaaccgagtatagcggagtgaaatgcgagaagaagatccaaattcggagacactag

SEQ ID NO: 13594 - RNA, 624 nt, synthetic construct
  misc_feature 1..624: note = source = /note="Description of Artificial Sequence: Synthetic coding sequence"
  source 1..624: mol_type = other RNA
atgagtaccaagcccgacatgattcagaaatgcttgtggctagaaatactgatgggcatctttattgctgggactttgagcctcgattgtaacctactgaacgtgcacctgagaagggtcacgtggcagaacttgcgccacttatcctccatgtccaattcctttcctgtcgaatgtctcagagagaatattgcgtttgagctcccacaggaattccttcagtatacccaacctatgaaaagagatatcaaaaaagccttctacgaaatgtcactgcaagcctttaatatcttttcccagcacaccttcaaatattggaaagaacgccacctgaagcaaatacagatcggactcgatcagcaagccgagtatctgaaccaatgcctggaagaagacaagaatgagaacgaggatatgaaggaaatgaaggagaacgagatgaagcctagcgaagccagagtgcctcaattaagcagccttgagttacggcgttatttccatagaatcgacaactttctcaaggaaaagaagtatagtgactgtgcctgggaaatcgttagagtggaaattcggcggtgcttatactatttctataaatttacagccctctttagaagaaaatag

SEQ ID NO: 13595 - RNA, 939 nt, synthetic construct
  misc_feature 1..939: note = source = /note="Description of Artificial Sequence: Synthetic coding sequence"
  source 1..939: mol_type = other RNA
atggagtcagctttacccgcggcagggtttttatactgggttggagctggcactgtcgcatacctcgcactgaggatttcatacagcctgtttactgcgttgagagtgtggggggtcggcaatgaggcaggggtgggtcccggccttggagaatgggccgtcgtgactggatcaaccgacgggattggcaaatcatacgctgaagagcttgccaaacatggtatgaaggtagtcctcatttccaggtccaaagacaagctggatcaagtcagttcagagataaaggaaaagtttaaagttgaaacaaggacaattgctgtcgacttcgccagtgaagacatttatgataagatcaagacaggcctggctgggttggaaatcggtatcctggtgaataacgtaggcatgtcttatgaataccccgagtactttctagatgtacccgacctggataacgtgattaagaagatgatcaatattaatatactcagcgtctgcaaaatgacacagctcgtcctgcctggcatggtagaacgcagtaaaggagctatcctgaacatctcatctggtagtggcatgttgcccgttcccctgctgacgatctattctgccaccaaaacatttgtcgatttcttttctcaatgcctccacgaggaatacagaagcaagggcgtgtttgtgcagagtgtgctgccttatttcgttgctaccaaactggccaaaattaggaaacccaccctagacaaaccaagcccagaaacattcgttaagagtgctattaagaccgtaggccttcagtcccgcaccaacggatacctgattcatgctcttatgggtagcatcatcagcaatcttccatcctggatttatctcaagatcgtcatgaatatgaataagagcactagagcccattacttgaagaaaaccaaaaagaactag

SEQ ID NO: 13596 - RNA, 2214 nt, synthetic construct
  misc_feature 1..2214: note = source = /note="Description of Artificial Sequence: Synthetic coding sequence"
  source 1..2214: mol_type = other RNA
atggaactcggttgttggactcaactcgggctgaccttcttgcaattactgttgataagctctctgcctcgagaatacaccgttatcaacgaggcctgtcccggggctgagtggaatattatgtgccgcgagtgttgcgagtacgatcaaatcgaatgcgtatgtccagggaaacgcgaagtggtgggctatacaatcccatgctgtcggaatgaagaaaacgagtgtgattcctgcctaattcatccaggctgtacaatctttgagaactgcaagtcatgtcgcaatgggtcgtggggcggaacgctcgacgacttctacgtcaaggggttctattgtgcagaatgccgcgctgggtggtatggcggagattgtatgagatgtggccaggtgctgagggcccccaagggacagattctgcttgaaagttaccctctgaacgctcactgcgagtggaccattcatgctaaaccaggcttcgttattcaactgcgatttgtgatgctatctttggagtttgactacatgtgtcaatacgactacgtggaagtgagagatggagacaaccgcgacggtcagattattaaaagagtctgtgggaatgagaggcctgctccaatacagtcaattgggtcatccctacacgtgctattccattccgacggttccaagaatttcgacggcttccatgcgatttacgaggaaattacagcctgctcctccagcccctgcttccacgacggaacttgtgttttagataaggccggatcatataaatgtgcttgccttgctggttataccggacagaggtgcgagaacctgttagaggctggcaaaagcaagatcaaggcatcagaggattccctctctgttcttgaggaaagaaactgcagcgatcctgggggcccagtgaacggctaccagaagatcaccggcggacccggactcatcaacgggagacacgctaaaattggaaccgtcgtctctttcttctgtaacaactcctatgtgttgagtggtaatgaaaaaagaacctgccagcaaaatggtgaatggagcggaaaacagccaatttgtattaaggcatgcagggagccaaagataagcgatttagtccgtcgtagagtcctacctatgcaagtacagtccagagagactcctcttcaccagttatactctgccgcattctcgaaacagaaactgcagtcagcaccaaccaaaaaacccgcattaccatttggcgatctccctatgggataccagcacctgcacacacagctccaatacgaatgcatcagtcccttttaccggcgactcggatcttcaaggaggacgtgcctgagaaccggaaaatggagcggtcgcgcgcccagttgcattcctatctgtggaaagatcgaaaacatcaccgcgcctaaaacacaaggactgagatggccttggcaggccgctatctaccgccgcacatcgggggtgcacgatgggtcacttcataagggtgcctggttcttagtttgctccggtgccctcgtcaatgaaagaacagtagtggtcgcagcacactgtgtcactgatctggggaaggttaccatgatcaaaacagccgacctcaaagttgttctgggcaagttctaccgcgatgacgaccgagatgaaaagactatccagtctctgcaaatttctgccattatacttcaccctaattatgatccaatactccttgacgccgatatcgctatccttaagctgctcgacaaagctagaatatccactcgcgtccagcctatctgcctggcagcatcacgcgatctttcaactagctttcaggagtctcacattactgttgcaggttggaacgtgctagccgacgtaagaagcccaggtttcaaaaatgacacccttcgaagtggcgttgtcagtgtggtagactccttgctgtgtgaagaacaacatgaagaccacgggatccctgtgtccgtcacagataacatgttctgcgcttcctgggagcccaccgccccctccgacatctgtacagccgagaccggtggcatcgcagctgtgtccttccctgggagagcttccccagagcccagatggcatcttatggggttagtttcctggagctacgacaaaacctgcagccatcgtctttctactgctttcactaaggtgcttccttttaaggactggatagagcggaacatgaagtag

SEQ ID NO: 13597 - RNA, 1503 nt, synthetic construct
  misc_feature 1..1503: note = source = /note="Description of Artificial Sequence: Synthetic coding sequence"
  source 1..1503: mol_type = other RNA
atgggcaccgctagatggttggccctgggatctctgtttgccctggctggactgttggaggggcgcttagtaggagaggaagaggcaggatttggggaatgcgataagtttttttacgcggggacaccgccagccggccttgctgccgacagccatgtcaaaatttgccagagagcagagggggctgagagatttgctaccctttactctacaagggacaggatccccgtctatagtgcatttagagcccctcgaccggccccgggcggtgctgaacaaaggtggctggtggaacctcaaatcgatgaccccaattctaatctggaagaagccatcaacgaggctgaggcaatcacgtcggtgaactccctcggaagtaagcaagctctgaacaccgattatctggacagcgactaccaaagaggccagttgtaccccttttctctttcatctgatgtgcaagtcgcaacattcaccctgacaaattctgccccaatgacgcaatcatttcaggaacgttggtacgtcaatctccactctctgatggatcgagcactgacaccccaatgcggctcaggcgaggatttatatatactgacagggaccgtcccttccgactatcgggtgaaagacaaggtggccgtgcccgaattcgtctggcttgctgcatgctgtgctgtacccgggggcggatgggccatgggatttgtaaaacacacacgggacagtgatataatcgaagatgttatggttaaggatctccagaaactcttgcctttcaaccctcaactcttccagaataattgtggcgagacagagcaagacaccgaaaagatgaaaaagattctagaggttgtcaatcaaattcaggatgaagaaagaatggttcaatcccagaaaagctcttcacccctgtcatccacacgctcaaagaggtctactctcttgccacccgaagctagcgagggaagcagcagttttcttggcaagctcatgggattcatcgcaacacctttcataaagctgtttcaactgatttactatcttgttgtggcaattcttaagaatattgtttattttctctggtgcgtgacaaaacaggtaatcaatggtattgaaagctgtctgtatcgtctgggaagcgccactatctcgtatttcatggcaatcggagaagaacttgtgtcaattccttggaaagttctgaaggtggtcgccaaggtcatccgggcccttctgagaatcctgtgttgtcttttgaaagctatatgcagggtattaagtatcccagtgcgtgttctggtagacgttgcaacttttcctgtgtatacgatgggagccattccaatcgtgtgtaaagatatcgccctgggactgggaggtacagtgtccctccttttcgacaccgcatttgggaccctgggaggcctgtttcaagtggtgttctctgtatgtaaaagaattgggtataaagttacctttgataattctggtgagctgtag

SEQ ID NO: 13598 - RNA, 300 nt, synthetic construct; identical to SEQ ID NO: 11959
  misc_feature 1..300: note = source = /note="Description of Artificial Sequence: Synthetic coding sequence"
  source 1..300: mol_type = other RNA

SEQ ID NO: 13599 - RNA, 390 nt, synthetic construct
  misc_feature 1..390: note = source = /note="Description of Artificial Sequence: Synthetic coding sequence"
  source 1..390: mol_type = other RNA
atgccaatggcatcaccccagacgcttgtcctatatctcctagtcctggccgtgacagaggcatggggccaggaagcggtgatccccggttgccacctccatccgttcaatgtaaccgtaagaagcgatagacagggcacctgtcaaggttcacatgtagcgcaggcctgtgttggacactgtgaatcctccgcgtttccatccagatactccgtgctcgttgcttctggataccggcacaatatcacttccgtgtcacaatgttgtactatttctggcttaaagaaggtaaaagtccagctgcagtgcgtggggagtagacgagaagagctggagatctttacagccagggcctgtcagtgcgacatgtgcagattgtcaagatactag

SEQ ID NO: 13600 - RNA, 1965 nt, synthetic construct
  misc_feature 1..1965: note = source = /note="Description of Artificial Sequence: Synthetic coding sequence"
  source 1..1965: mol_type = other RNA
atggcaaaattcggagttcaccgcatcttgctgctggccatttcattaaccaaatgtctggaatccactaaactgctggccgacctgaagaaatgcggcgacctcgagtgtgaggcgctgatcaatcgagtcagtgctatgagagattatagaggccctgattgtagatacctgaatttcactaaaggagaggagattagcgtgtacgtaaagttagccggagaacgtgaagatctgtgggcaggctcaaaagggaaagaattcggatacttccctagggacgcggtccagattgaagaagtatttattagtgaagagatccagatgagcactaaagaatctgatttcctgtgtctgttaggcgtgagttacacttttgacaatgaagatagcgaattaaacggagattatggagagaatatctacccatacgaggaggataaggacgaaaagagtagcatatatgaatcagatttccagatagagcccggcttttacgccacctacgaatctacgctgttcgaagaccaggtccctgctttagaggccccagaagacataggctccacatccgaatcaaaggactgggaggaggtggttgtagagtctatggagcaagatcgcattcccgaggtgcacgtacccccatctagtgcagtttctggcgtgaaagaatggttcggattaggcggagaacaagccgaggaaaaagcctttgagagtgtcatcgaaccagttcaggaatcaagctttaggtcacgtaagattgccgtcgaagacgaaaatgaccttgaagagttaaacaatggagagcctcagacagaacatcagcaggaatcagagtcggagatcgactcagtcccgaagacgcagagcgaacttgccagtgaaagcgagcacattcctaaaccacagtccaccggctggtttggaggcggcttcactagctacctcggatttggagatgaagataccggactagagctgatcgcagaagaatccaaccctcccctccaagacttccctaacagcatttcatcagataaggaagcaacggtcccctgcaccgagattcttaccgaaaagaaggatacaatcaccaacgactccctgtcactgaagccatcttggtttgatttcgggtttgcaatcctgggctttgcctacgccaaagaggataaaatcatgcttgatgaccgaaagaacgaagaggacggcggcgcagatgaacacgaacacccactgacatcagaattagaccccgagaaagagcaggaaatcgaaaccatcaagataatcgagactgaggatcagattgacaaaaaacccgtatccgagaagacagatgagagcgacaccattccttacctgaaaaagtttctttacaactttgacaatccttggaacttccaaaacatcccaaaggaaaccgaactccctttccctaaacaaattctggaccaaaacaacgtgatcgagaacgaggaaacaggcgaattctcaattgataattatcccacagataacacaaaggtcatgattttcaaaagctcttatagcctctccgatatggtgtccaacattgaactccctacaaggatccatgaggaagtctattttgaaccatcttccagcaaagactctgatgagaattctaagccatcggtagacacagaaggacctgccctagtagaaattgatcgatctgtggaaaacaccctgcttaacagtcaaatggtctccacagacaactcactgtcatcacagaattacattagccaaaaagaagacgcttcagaattccaaatcctcaagtacctcttccagatcgacgtttacgactttatgaatagtgccttttcccctatcgttatccttactgagcgcgtctccttaccttttaaaccttttgccatcatcctacccattcttctcaacattagagtggctacaaaatatgtttag

SEQ ID NO: 13601 - RNA, 1152 nt, synthetic construct
  misc_feature 1..1152: note = source = /note="Description of Artificial Sequence: Synthetic coding sequence"
  source 1..1152: mol_type = other RNA
atggctggcatccctggtctgctctttttgctgtttttccttttatgcgcagtcggtcaagtgagtccttatagcgccccctggaagcccacatggcccgcatatcggctgcccgtggttttaccacagtcaaccttgaacctggccaagcctgactttggagcagaggccaagctggaagtgtcatcttcgtgcggaccccaatgccataaaggaacacccctccctacttacgaggaggcaaaacagtacctgtcttacgaaacattgtatgccaacggctctagaactgaaacccaggtgggcatctatattctctcttcatctggtgatggtgcacagcacagagactctggaagttccgggaaaagtcgtagaaagagacaaatatacgggtatgattcccggttttccatcttcggtaaagactttttactcaattatcccttttctacctccgtaaagctttctactgggtgtaccgggaccctggtggctgagaaacacgtgctcaccgccgctcattgtatccatgacgggaagacctatgttaaaggcacgcagaagcttagagttggattcctgaaaccaaaattcaaagacggaggacgcggcgcaaatgactcaacttcggctatgcctgaacaaatgaaattccagtggatccgtgtgaagcgaacgcatgtccctaagggctggattaagggtaacgcaaatgatattggaatggattatgactatgccctgctcgaactgaagaaacctcacaaacgtaagttcatgaagatcggcgtctccccacctgcaaagcagcttccaggcggtaggattcactttagtggatatgataatgacagacctgggaatctcgtgtatcgcttctgtgatgtgaaggacgaaacttatgatctcttgtaccagcagtgcgatgctcaaccaggggcctccgggagtggagtgtatgtcagaatgtggaaaagacagcagcagaaatgggagcgcaaaatcattggaatcttctcaggccaccagtgggtcgacatgaacggaagtccacaggattttaacgtggctgtgcgaattacaccactgaaatatgctcaaatctgttattggatcaaaggcaactatctcgattgccgcgaaggttag

SEQ ID NO: 13602 - RNA, 1662 nt, synthetic construct
  misc_feature 1..1662: note = source = /note="Description of Artificial Sequence: Synthetic coding sequence"
  source 1..1662: mol_type = other RNA
atgaagtggtgttggggccctgtgctgttaatcgcgggggccaccgtgttaatggagggtttgcaggctgcacagagagcgtgtggccagagaggtcctgggcctccaaagcctcaagaaggtaatactgttcctggggaatggccctggcaagcttctgtgaggagacagggtgcacacatatgcagcggcagcctggtagctgacacttgggtgctaaccgcggcccattgtttcgagaaggctgcagccactgaactcaattcttggtccgtagtactgggaagcctccagagggaagggttatccccgggagccgaagaagttggggtggcagccctgcaattgccccgagcctataatcactatagccagggttcagacctcgccctgctgcagctagcacacccaaccacgcacacccctctttgcctacctcaacctgcacatcgatttccctttggcgcctcgtgttgggctaccgggtgggaccaggatacaagcgacgcgcccggtacacttagaaatctgagactcaggctgatttctagaccgacttgcaactgcatctacaatcaacttcaccaacggcatctgtcgaacccagcccggcctggaatgctgtgcggaggcccccagcccggagttcagggcccttgtcagggagactccggcggtccagtactttgcctcgagcctgacgggcactgggttcaagcaggaataatctcttttgcctccagttgcgcacaagaggacgctcccgtacttcttactaatactgcggcccactcatcgtggctacaggcacgagtccaaggtgctgcattcctagctcaatcacccgaaactccagagatgtctgatgaagactcctgcgttgcttgcggaagcctcaggaccgccggaccgcaggcaggggctccatcgccttggccatgggaggctagactgatgcaccaagggcagttggcatgcggaggtgccctggtatccgaagaagctgtactgactgctgcacattgtttcataggacgtcaggcccctgaggaatggtctgttggtttaggaacaagacccgaggagtggggcctgaaacaactgatattacacggcgcttatacacaccccgaaggcgggtatgatatggctttactgctgttagcccagccagtcactctgggagcttctctgagaccgctgtgtctcccctatccagaccaccacctgcccgatggcgagcgcggctgggttctaggtcgagctcgacctggtgcgggtattagttcactacaaactgtaccagtcacactgctgggcccaagggcatgtagtagactccatgcggcacctgggggcgacggaagtccgattctgcctggcatggtatgcacatctgcagtcggcgaactcccctcatgcgaaggactgtcaggagctccactggtgcacgaagtgaggggaacttggttcctagccggtctgcactccttcggcgacgcatgccagggaccagcccgtcccgccgtattcacagcattacctgcatacgaagattgggtctcgagcctggactggcaagtttacttcgcagaggaacccgaacccgaggccgaaccgggaagttgtcttgcaaacatttctcaaccaacttcatgttag

SEQ ID NO: 13603 - RNA, 936 nt, synthetic construct
  misc_feature 1..936: note = source = /note="Description of Artificial Sequence: Synthetic coding sequence"
  source 1..936: mol_type = other RNA
atgggaattatacaatccatactcgccaccagccgcgactgttattcctttaaaaagaagcctatccccaagaaacctaccatgttggcccttgcaaagatcctccttattagcacattattttactcgttgttgtctggatcgcacggcaaagagaatcaggacattaatacaacgcagaatattgcagaagtctttaaaaccatggaaaacaaacctatttcgctcgagagcgaggcaaatctaaactctgacaaggaaaatatcaccactagcaaccttaaagccagtcactcccctcctttgaacctccccaacaactcccatgggatcactgacttttcctctaacagcagcgctgaacattcactgggcagcctaaaacccacttccactatcagcacaagtcctccactaatccacagtttcgtgtctaaagtgccctggaacgctccgatcgccgacgaagacctgctacccatatccgcccatcctaacgcaaccccagccttaagcagcgaaaacttcacctggagtctggttaacgatacagtgaaaaccccagacaattcttcaattacagttagcatcctgagcagcgaacctacttccccaagtgtgacacccctcatcgtcgagccaagtggttggttgacaacaaactctgactctttcactggtttcacaccctaccaagaaaaaactacactacagcctacgctgaagtttactaataattctaagcttttcccgaatacgtccgatccgcagaaggtcctaaggttagacaacgcacccgagccctatgacgtctcttttggcaacagctcctactacaaccctacgctcaacgacagcgcaatgcccgagagcgaagagaacgcaagagatggcatccccatggacgatatcccccctctgagaacatctgtgtag

SEQ ID NO: 13604 - RNA, 3120 nt, synthetic construct
  misc_feature 1..3120: note = source = /note="Description of Artificial Sequence: Synthetic coding sequence"
  source 1..3120: mol_type = other RNA
atgcagagtagactgctcctgctgggtgctccagggggacacggcggtcctgctagccgccgcatgcggttgctcctcagacaggtggtacaaaggcgtcctggcggcgatcgccagcggccagaggtgaggctcctccatgcagggtccggcgccgacaccggagacacagttaacataggcgacgtgtcgtataaattaaaaatcccaaaaaaccccgaattagtaccacagaactacatttccgactcactcgcacagtccgttgttcaacatcttcgctggattatgcagaaagatcttctgggacaagacgtcttcttaataggacccccgggacctcttagacgcagtatcgctatgcagtatcttgaacttacaaaacgcgaggtggagtatatcgcactctccagggacactactgaaacagatttgaagcagaggcgggaaatccgtgcggggactgctttttatattgaccagtgtgcggtgcgtgccgccaccgagggcagaaccctaatattagagggacttgaaaaggcggaacggaatgtattgccagttttgaataatttgttggaaaaccgcgaaatgcaattggaagacggacggttccttatgtcagccgagcgttacgacaaactgttgcgggatcacacgaagaaagagctggacagttggaaaattgtgagagtgtccgagaattttagagtgatcgccctgggcctcccagttccccgttatagtggaaaccccctggacccacccctccgcagccgttttcaggcccgagacatttattatctccccttcaaagatcagctcaaactgttgtattctataggtgctaatgtttccgccgagaaagtttcccagttgctctccttcgcaacaaccctttgcagtcaggaatcttccacacttggcctccccgactttccactagactccctcgccgcagcagtgcagatcctggactcattccctatgatgcctattaagcatgctatccaatggctgtacccttattccattctcctcggtcacgaaggaaagatggccgtagagggtgtcttaaagagatttgaacttcaggacagtggaagctcactgctgcctaaagagatagttaaagtagaaaagatgatggagaaccatgtatcacaggcatccgtgactatccgcatcgctgacaaggaagtgactatcaaggtgcctgccggtactcgcctactgtctcagccctgtgcctctgatcgatttatccagactctgtcccacaaacagctacaggccgagatgatgcaatcccacatggtgaaggatatatgcttgataggtggaaaaggctgcggaaagaccgtgatcgccaaaaatttcgctgacaccctcggctataatatagaacccatcatgctctaccaggacatgactgcccgtgatctactgcagcagaggtataccttgcctaatggagataccgcttggagatcaagtcccctcgtcaatgctgcacttgagggtaaactggttctactcgacggcattcaccgagtcaacgccggcactctggctgtgctgcagcgcttaatccacgaccgagaactttccctttacgatggtagccgcctactgagggaggatagatacatgaggcttaaagaagaactacagctgtcggatgagcaattacaaaagagatctatctttccaatccatccctcattccgcatcatcgccctagcagaaccacccgtgattgggtctacagctcaccagtggctcggaccagaattcttaacaatgtttttttttcattatatgaaacccttggtcaaatcggaagaaattcaggtgatcaaagagaaggtgccaaatgtgccccaggaagcactggataagctgttatcttttacacataagctccgggagacccaggatcctaccgctcaatccctagccgcgtctctctctacacgacaacttctacgcatcagcaggaggctgtcccagtatccaaatgaaaatctacactctgctgtaacaaaggcatgtctttctagatttcttccctcactcgcacgctcagctctcgaaaaaaatttagcagacgccaccattgaaattaacacagacgacaacctcgaacctgagctgaaagactacaagtgtgaggttacctcagggacacttaggataggtgctgtgtctgcccctatttacaatgcccatgagaaaatgaaggtgcctgatgtgcttttttacgataatattcaacatgtgatcgtgatggaagatatgctaaaagactttctgctcggggaacatctcctgttggtcggaaaccagggcgtgggtaaaaataagatcgttgatcgcttcctccatctcttgaacagaccccgcgagtatattcaacttcatagagacaccactgtgcaaactctgaccctccagccttcggtgaaagacggacttatagtgtatgaggattcccccttggtgaaggccgttaaactcggacatattctggtggtggatgaggcagataaagcacccacaaatgtcacttgcattttgaaaacactggtggagaacggagagatgatcctcgccgatggtaggcgcattgtggcaaatagcgctaatgtgaatgggagagaaaatgtggtagtaattcatcccgatttcagaatgatagttctggctaatcggcccggcttcccctttctgggaaacgatttctttggaacattgggggatatcttttcttgccatgctgttgacaacccaaagcctcattcagaacttgaaatgctgcgccaatatggcccaaacgtacctgaaccgatactccagaagctagtggccgcatttggagagctgaggtccctagctgatcaaggaattattaactatccatactccacacgggaagtggtcaacatcgtcaaacacctacagaaattcccaactgaaggcctttcatcggtggtgaggaacgtattcgacttcgattcttataataatgacatgagagaaattctgataaataccctgcacaaatatggaatcccgatcggcgcaaaaccaacatctgtccagctagccaaagaatag

SEQ ID NO: 13605 - RNA, 801 nt, synthetic construct
  misc_feature 1..801: note = source = /note="Description of Artificial Sequence: Synthetic coding sequence"
  source 1..801: mol_type = other RNA
atgcgccttctatttctagccgtcctgcgtccccacaccggtaacgccgttacagctcagcgggtgcgagcccatctggaggcggctggacatgtgtgcgtgctcaaagatgcttttgacttcgaatctcgctccgaaatagccaaccttatacttgccgagaactgcgaggccgcactcgccttacacctgtacagagggggaagacttcttcaagggcatcggataccattcggggtcattttcggcgggacagacgttaacgaagatgccaatcaggctgagaagaacacagtgatgggaagggtactggaagaggctcggtttgctgttgcctttacagagtcaatgaaggagatggcccaggctcaatgggtggaccccgtcttcactcgcgaggttaaggccaaggtgaaacgggctgccggagtccgattgatcggtgaaatgccccaagaggaccttcatgctgtcgtgaaaaactgttttgctgtggtgaactcatcagtctctgaaggaatgagtgccgctatcctcgaggcaatggacctcgaagttcctgttctcgctcgtaacatccctggaaatgcagcagtggtgaaacacgaggtaacggggttattgttctccaaccctcaagagttcgtccatctagcgaaacggctcgtgtccgaccctgcactggagaaggagattgtagtgaacggcagagagtatgtgcgtatgtatcattcgtggcaggttgaacgtgacacctaccaacagttgatcaggaagttagagggaagcacagaagattag

SEQ ID NO: 13606 - RNA, 2478 nt, synthetic construct
  misc_feature 1..2478: note = source = /note="Description of Artificial Sequence: Synthetic coding sequence"
  source 1..2478: mol_type = other RNA
atgttttcagggttcaacgtgttcagggtcggcatcagcttcgtcatcatgtgcatcttttatatgcccacagtcaacagtctccccgaactcagccctcagaaatacttcagtaccttacagcctggaaaagcttctctggcatacttttgtcaagctgattctcctcgcacctccgtctttctggaagaactgaatgaagcagtccgccccctccaagattatggtatttcggtagcgaaagtaaactgcgttaaagaggaaatatccagatattgtggtaaggagaaggacttaatgaaagcttacctcttcaaggggaacattcttctgcgtgagttccctaccgatactctgttcgacgtaaacgccatcgtagctcacgtccttttcgcgctgttatttagtgaagtgaagtacattaccaacctggaggacttacagaatatcgagaacgcgcttaaaggcaaggctaacatcattttttcctacgtacgggccatcggtatcccagaacatcgagctgtgatggaagccgcattcgtgtatggtacgacctatcagttcgtcctaaccaccgaaatcgcactgcttgaaagcatcggctcagaagatgttgagtatgcccacctctactttttccattgtaagctcgtgctcgatctgacgcagcagtgccggaggaccttaatggaacagcccctgacaacccttaatatccacttatttatcaaaaccatgaaggccccattactaactgaagtggccgaagatcctcagcaggtctcaacagtgcacttgcagctgggtttgcccttagtctttattgtctcacaacaggctacctatgaagcagaccgcaggacagccgaatgggtcgcctggcggctgttaggtaaagccggagtcctcttattgcttcgggatagcttagaagtgaacataccccaagacgctaacgtagtttttaagagagctgaggagggtgtgcccgtggagttcctggtgttacatgatgtcgatttgattatcagccacgtagaaaacaacatgcacatcgaagaaatacaggaagacgaagacaacgatatggaagggcctgacatcgacgtgcaagacgacgaggtggcagagaccgtgttcagagaccggaagcgcaaactgcctttggagctcacagtagagttgaccgaggagacttttaatgccacggtcatggcttccgattcaatagtattgttctacgccggatggcaggctgtctctatggcttttcttcaatcttatatcgatgtggccgtgaaactaaaaggaactagtaccatgttactgacccgcatcaactgcgccgactggagtgacgtttgtacaaaacagaatgtcactgaatttccaatcatcaaaatgtacaaaaaaggagagaatccagtgtcctacgccggaatgctagggacagaggatcttctaaagtttatacagctcaatcgtatttcatatccggtgaatatcacctccattcaagaagccgaagagtatttgtccggcgagctatataaggatctgatcctgtactccagtgtgtccgtcttgggcctcttctctcctacaatgaagactgcgaaagaagacttttccgaagcagggaattacctcaaaggctacgtgatcaccgggatttattcagaggaagatgttctgttgctgagcaccaagtatgccgcctctcttcccgccctactcctggccagacatacagagggaaaaatcgaatccatcccattggcatctacccacgctcaagatatcgtccaaataatcaccgacgcactccttgaaatgttcccagaaatcaccgttgagaacttaccatcctactttagactgcagaagcctcttttgatcctgtttagcgacggtaccgtcaatccccagtacaagaaagcgatcttgaccctagtcaaacagaagtacttggattcattcaccccttgctggctgaacttgaaaaacactccggtgggccggggcatcctgcgtgcttacttcgatcctttaccaccactgcccttactcgtattagtcaatctgcattcaggtggccaagtattcgcatttccgtccgatcaggccattatcgaggagaatctcgtactctggctcaaaaagcttgaggccggactagaaaatcatattactattctccctgctcaagagtggaagccccctttgccagcctatgactttctgtcaatgatcgacgctgcaacgtctcaaagaggtacaagaaaggtcccaaagtgtatgaaagaaaccgatgtccaggaaaatgacaaagaacagcacgaagataaatccgccgtgcgaaaggagcctatcgaaacacttcgcatcaaacattggaacagatctaattggttcaaggaagcagagaaatcctttagacgtgataaagagctggggtgtagcaaggtaaactag

SEQ ID NO: 13607 - RNA, 672 nt, synthetic construct
  misc_feature 1..672: note = source = /note="Description of Artificial Sequence: Synthetic coding sequence"
  source 1..672: mol_type = other RNA
atgacatggagacaccacgtacgtctgttattcacagtctccctcgctcttcagattattaacctgggcaatagttatcagagagaaaagcacaacgggggaagagaagaagtcaccaaggttgccacccagaagcaccggcagtctccattaaattggacctctagccactttggcgaggtcactggctctgccgaaggttggggacctgaagaaccactaccctattcgtgggccttcggagagggcgcgagtgctaggccccggtgttgtagaaatggcggtacttgcgtgttaggcagcttctgcgtatgtccagctcactttacaggcagatactgcgaacatgaccagagacgctcagagtgtggtgcgctagagcatggcgcatggaccctgcgcgcctgccatctgtgcagatgtatcttcggagcccttcattgtctgccactgcaaaccccggatagatgcgaccccaaagactttctagcctcccatgctcatggccccagcgcaggcggcgctccttcccttttgctcttgttgccttgtgctctccttcacaggcttcttcgccccgacgctcctgctcatccacgttccctagtaccttcagtactccagcgagaaagacggccatgcggtcgcccaggccttggacatagactgtag

SEQ ID NO: 13608 - RNA, 1320 nt, synthetic construct
  misc_feature 1..1320: note = source = /note="Description of Artificial Sequence: Synthetic coding sequence"
  source 1..1320: mol_type = other RNA
atgccagctatcgcagtactggccgccgccgccgccgcctggtgctttttacaagtggaatctcggcatctcgacgctctagccggtggagccggccctaaccacgggaatttcctggataatgatcaatggctcagcactgtgtctcagtatgatcgagataagtactggaaccgatttagggacgatgactatttccgaaattggaaccccaacaaacctttcgaccaggctcttgatccatctaaggatccttgcctaaaagtaaagtgttctcctcataaggtatgcgttacgcaggattatcaaacggccctttgcgtatccagaaagcacttactaccccgtcagaagaaaggcaatgtcgctcaaaagcattgggttggcccatccaacctagtgaagtgtaaaccatgtccagtggcccaatcagctatggtgtgcggatccgacgggcactcatacacctctaagtgtaagctcgagtttcatgcttgttcaaccggcaaatccctggcaacgttatgcgacggcccatgcccatgtctcccagaaccggagcctcctaagcacaaagcggaacgctccgcatgtaccgacaaggaactgcgaaatctggcgtcacggctgaaagactggttcggagcgttgcatgaggacgccaacagagttattaaaccaacatcatctaacacggcacagggaagattcgacaccagtatcctgcccatttgtaaggactctctaggctggatgttcaacaagttagatatgaattacgatctactacttgatccatccgagattaatgctatttatctggacaagtatgagccatgtatcaaacctcttttcaacagctgcgattcttttaaggacggaaaactttcgaacaacgagtggtgctactgcttccagaaacctggtgggcttccctgtcagaatgagatgaacagaatccagaagctaagcaaaggaaaatcgctattgggcgctttcattcccaggtgtaatgaagagggttactacaaagcaacacagtgtcatggtagtaccgggcaatgttggtgtgtcgataagtatggcaatgaactggctgggagcagaaaacagggcgctgtcagctgtgaggaagagcaggaaacaagtggagacttcggaagtggaggctcggtggtgcttttggatgacctagaatatgaaagagagctggggccaaaagataaagagggtaagttgagggttcacacgagggctgtcactgaagatgatgaagatgaggacgacgataaagaggatgaggtaggttacatatggtag

SEQ ID NO: 13609 - RNA, 7872 nt, synthetic construct
  misc_feature 1..7872: note = source = /note="Description of Artificial Sequence: Synthetic coding sequence"
  source 1..7872: mol_type = other RNA
atgaaagtgaaaggtcggggtattacatgcttactcgtgagcttcgcagttatttgcctcgtggctacaccaggcggtaaagcctgtcctagacgatgtgcctgctatatgcccactgaggttcattgcacttttcgatacttaacttctatacccgactccattccaccaaacgtcgaacgtatcaatttggggtacaactcattggtccgtctgatggagaccgacttctcagggctaactaaactggagctccttatgctgcactccaatggaatccatacaattccagataaaaccttttcagatctacaagcactccaagttctcaaaatgagctataacaaagtgagaaaactacaaaaggacactttttacggcttgcgatctctgacgcgacttcatatggaccataacaacatcgagttcataaatcctgaagtcttctacgggctcaatttcctcaggttggtgcacctggagggcaaccagctcacaaaactgcaccccgacacctttgtatcactgagttacttgcaaatatttaaaatctcatttatcaaatttctgtaccttagcgataacttcttgacctctctaccacaggagatggtctcctacatgcccgacctcgattccttatacctgcatggaaacccctggacatgtgactgtcatctgaaatggctcagcgattggatacaagagaagcccgatgtcattaaatgcaagaaggacagaagtccctcctccgcacagcagtgccccctgtgcatgaaccccagaacctccaagggaaaaccactagccatggtgtcagccgccgcctttcagtgcgccaaacccactattgacagttccctgaaatctaagagcctgacaatcctggaagatagttcttcagctttcatttctccccaaggcttcatggcacctttcggatcgttaactctcaacatgaccgaccagtctgggaacgaggccaatatggtgtgttctatccaaaaaccttctcggacctctccaattgcattcacagaagagaacgactatatagtcctcaataccagtttttctaccttcctcgtttgcaatattgattacggacacatacagcccgtttggcagatactggcactctacagcgactccccattgatcctggagcgaagtcatcttttgtcagaaactccccaactgtattataagtacaaacaagtcgctccaaagccagaggatatctttacaaacatagaagcagacttaagggccgatcccagctggttgatgcaagatcaaatctccctccagctcaacagaactgccaccacatttagcactctccagatccagtactcttcagacgcccagatcactttaccaagagccgaaatgcgccctgtgaaacacaaatggactatgatctcgagggataataacacgaagcttgagcatacagtgctcgtgggcggaactgtaggactgaactgccctggccagggggaccccactcctcacgtggattggctgttggcggatggatctaaggttagagctccttacgtgtcggaggacggcagaatccttatagataaatcaggcaagctcgaactacagatggctgattcctttgatactggtgtgtaccactgcatttccagcaactacgatgacgcggacattctgacatacagaataaccgtagttgagcctctagtggaagcttaccaagaaaacgggattcaccacacggtcttcatcggagaaactcttgacctgccatgtcattcaactggtatccccgacgcctcaatcagctgggttattcccggaaacaacgtattatatcagtctagtagagataaaaaggtcctaaataacggaactctccgaatcctgcaagtaacacctaaagatcagggatattacagatgtgttgccgcaaaccctagcggagtggatttcttaatcttccaagtgagcgtgaagatgaaaggccagaggcctctcgaacatgatggcgaaacagaagggtcaggccttgatgaatccaatcccatcgcgcacctgaaagagcccccaggcgctcaactccgtacatcagccttaatggaagccgaggtgggcaagcacacctcttcaacttcgaaacgccataactaccgcgaactcacactgcaacgaagaggagatagcacccacaggcgcttccgcgagaatagaaggcacttcccaccctcagcacgtcgaatcgatccacagcactgggcagccctgcttgaaaaggctaagaagaatgccatgcccgataaaagagagaatactaccgttagcccccctccagtcgtaacacaactccccaatatccccggagaagaagatgacagttccggcatgttggccttacacgaggaatttatggtgcccgccactaaagcattgaatctacctgcccgcacagtaaccgctgacagcagaactatttccgattccccaatgactaacatcaattacggaactgaattttctccagttgtgaactctcaaattctcccccctgaagagcctacggattttaagttatccacagccattaaaacaaccgcaatgagcaaaaacataaatcctacaatgagcagtcaaattcagggcacgacaaatcaacacagttcaacagtctttccgctcctcctgggagccactgagtttcaagattctgatcaaatgggccgtggacgggaacacttccagagtcgccctcctatcaccgtccggaccatgataaaggatgtgaacgtaaagatgctgtcctcaactaccaataaactattactggagtccgttaataccaccaacagtcaccagaccagtgtgcgtgaagtttcagaaccgcgccataaccacttttattcccatactacccaaattctctctacctccacctttccctctgatccccatacggccgcccattcacagtttccaatacctcgcaatagcacagtcaatatcccactgttccgccggttcgggaggcaacgtaaaattggtggccgaggccgaattatttccccctatagaacccccgtcttgcgacgccaccgctattcaatttttcgatcaactaccagaggctcttcagagaaaagcaccaccgctttctccgcaaccgtgcttaacgttacatgcctgagctgcttaccccgtgaacgcctaaccaccgcaacagcagctctaagttttcccagcgctgcccccataacgttccctaaagccgacatagctagagtcccatctgaggaaagcacgacactggtccaaaatcccctgttactcctggaaaacaaacctagcgtggaaaagacaactccaactataaaatatttccgaacagaaatctcacaggtcaccccaaccggagccgtgatgacctatgcccctaccagcatccctatggaaaaaactcacaaggttaacgcatcctacccccgggtcagtagcacaaatgaggccaagagggacagtgttatcacatcttctttatcaggcgcaattaccaagccaccgatgacaatcatagccatcactcgattctcccgcagaaagatcccttggcagcagaacttcgtaaacaatcataacccaaaaggaagactgagaaatcagcacaaagtatccttgcaaaagtctaccgctgtcatgttaccaaagacctcccccgccttgcctcgcgacaaagtgtctcctttccattttaccactctgagcaccagcgtcatgcagattccctctaataccttgaccacagcccatcatacaacaacgaagacccataacccaggctcgcttcccaccaaaaaggaactccccttcccacctctgaacccgatgttgcccagcatcatcagtaaagactccagtaccaagagtatcatttcaacccaaacagctatccccgccactactccaaccttcccagcatcagttatcacctatgagacccaaaccgaacggtccagggcccagacaattcagcgcgaacaggaaccacagaaaaaaaatcgaacagaccctaatatcagtccggaccaaagctccggctttacaactccaacagctatgacccctccagtcttaacaaccgctgaaacatccgtgaagccctcagtgtctgcctttacccattcgccccccgagaatacgaccggaatatctagtacaatttcatttcactctcgcacattaaacctcaccgatgttatcgaagagctggcccaagcaagtacccagacactgaagagcactatcgctagcgaaaccactctgagttctaaaagtcatcagtccaccacaacccggaaggcaatcatccgccacagtaccatccctcccttcctgtccagtagcgctaccctcatgcccgtcccgatctcccctccgtttactcagcgcgccgtcactgacaatgtggccacccccattagcgggttaatgacaaataccgtggtcaagctccatgaaagctctagacataatgcgaagccccagcaattagtcgctgaagtcgcgacgtccccaaaagtgcacccaaacgccaagttcaccataggcacaactcatttcatctactctaatcttttgcactcaacacctatgccggccttgacaacagtgaagtcccagaattctaaactgacaccatccccatgggcggaaaaccagttctggcataaaccctattcagaaattgccgaaaagggcaagaaacccgaggtctcaatgctagccacaacaggtttatctgaggcgacaacattggtatccgattgggatggccagaagaataccaagaagtcagatttcgacaaaaagccagttcaggaggcaacaaccagcaagctcttaccattcgactccctttcccgttacatatttgagaaacctagaatcgtcggcggaaaagccgcttcttttactatccccgcaaattcagatgcatttcttccttgcgaggctgtaggtaatcctctgccaacaatccattggacgcgcgtgccttctgggctcgaccttagcaaaagaaagcagaacagccgagtgcaggtgctgccaaatgggaccctgagtatccagagggtagagatccaagaccggggccaatatctgtgttcagcctcgaacctattcggtactgaccacttacatgtaacgcttagcgtggtatcttatccaccaagaatcttagaaaggaggaccaaagagataactgtacactccggatccaccgtggagttgaaatgccgggcagagggaagacctagccctacagtgacgtggattctcgcaaatcagactgtggtgtccgaatcctctcagggctccagacaggctgttgtcacggtggacgggactctggtactgcataatctctcaatttacgatcggggattttataagtgcgtggcctcaaaccctggcgggcaggactctcttctcgtcaaaatacaagttattgctgcaccccccgtaatcttagagcaacgaaggcaagtaatcgtcggaacttggggggagtcacttaaactcccatgtaccgctaaaggcaccccacaaccttctgtctactgggtgttgagcgatggaactgaggtcaaacccctgcagttcaccaactccaagctcttcctgtttagcaatggaacgctctatattagaaatcttgcctcttctgataggggcacatatgaatgcatcgctactagttcaaccgggagcgagcgacgagtcgtgatgttgacgatggaagaaagggtaacatctcccagaattgaggctgccagccaaaaacgtactgaggtgaatttcggagacaagctacttctcaactgtagcgcaacaggcgagcctaaacctcaaataatgtggagactccccagcaaagccgtggtggatcaacagcacagagtaggaagttggattcacgtgtatccaaatggatccttgtttatcggcagtgtgacagaaaaagactccggagtctacttatgcgtggcacggaacaagatgggtgacgacctcattcttatgcacgttagcctccgactaaagcccgctaaaatcgaccataagcagtattttcggaagcaggttttacacggtaaggattttcaagtggactgtaaagctagcggaagccctgtaccagaaatcagttggtctctgccggacgggacgatgattaacaacgctatgcaggctgacgattcaggccatagaactcgcagatatactctgttcaacaatggtacactctattttaataaggtcggagtggctgaggaaggggactacacgtgctatgcccaaaataccctggggaaagacgagatgaaagtacatcttactgttattaccgctgcaccaagaattagacaaagcaataagacaaacaagaggatcaaggccggcgacactgcagtgctggattgtgaagtcactggagacccgaaaccgaagatcttttggctcctcccgagtaatgatatgatctcattttctattgatcggtatacctttcatgcaaatgggtccctcacaatcaacaaagtgaaactgctggactccggggaatatgtatgcgtggccagaaacccctcaggggacgacactaaaatgtataaacttgatgtggtgtccaaaccacccctgatcaacggactttacaccaatcggactgtcattaaagctactgccgtgcgccactccaaaaaacactttgattgcagagccgaaggaacaccctccccagaagtgatgtggattatgcccgacaacatctttctaaccgccccctattacgggtctaggatcaccgtccataaaaacggaaccttagagattaggaacgtgcgactgagcgactcagccgatttcatttgtgtggcgcggaatgaaggaggtgaatccgtcctagttgtgcagctggaagtgctcgaaatgctgcggagaccaacctttagaaaccccttcaatgaaaagatcgtcgcgcagttgggcaagtcgaccgcattaaattgttctgttgatggtaacccacccccggagattatttggatacttcctaacggtacaagattttccaatggcccacagtcataccaatatctgattgcaagtaacggctctttcatcatatcaaagactacacgggaagatgcaggaaaataccgttgcgcagctcgcaataaagttgggtacatcgaaaaattggttatcctcgagatcggccagaagcccgtcatcctcacttacgcccctggtacagttaaagggatttccggagagagcctgtcactgcactgtgtgtcagacggcatccccaaacccaacatcaagtggaccatgccgagtggttatgtagtcgatcggcctcagattaatggaaaatatatactgcacgacaacgggactttagttataaaggaggccacggcgtatgatcgcggaaattatatttgtaaagctcagaactccgttggccatactttaataaccgtcccggtcatgatcgtcgcctatcctccgcggatcacgaaccgccccccacgatctatagtaacccgaaccggcgccgctttccaactgcattgcgtggcgcttggcgttcccaaacctgaaattacgtgggagatgccagatcattcactgttgtcgactgcatccaaagaaagaacccacggttccgagcagctacatttacaaggcacattggtgatccaaaacccccagacgagtgactccggcatatataagtgcacagccaaaaacccactcggatctgactacgccgctacatacatacaggttatttag

SEQ ID NO: 13610 - RNA, 1995 nt, synthetic construct
  misc_feature 1..1995: note = source = /note="Description of Artificial Sequence: Synthetic coding sequence"
  source 1..1995: mol_type = other RNA
atgaaaacgggcttatttttcttatgtttgctagggaccgctgctgcaatccccaccaacgccaggttgctgtccgatcactctaaacctaccgccgaaactgtagctccagacaacaccgcgatccccagcctgcgggcagaggcagaagaaaacgaaaaagaaaccgcagtgagtacagaagatgactctcatcacaaggccgagaagtcctccgtgctgaagtcgaaggaggagtcacatgaacagtccgccgagcagggaaaatcatcatcacaagagcttggactcaaggatcaggaagacagcgatggccatttgtcggtcaacttggaatatgcacccacagagggaacattggatatcaaagaggatatgagtgaaccccaagagaaaaaactctcagagaacacagactttttagcgccaggcgtgtcatcatttaccgatagcaaccagcaggaatctattactaagcgcgaagaaaaccaggagcagccaagaaattatagccaccaccagttgaacagatcttccaagcacagtcagggtctgagagatcagggtaatcaggagcaggatccaaatatctcaaacggagaagaggaagaggaaaaagaaccaggtgaagtaggaacccacaacgacaatcaggagagaaagaccgaacttccacgggagcacgccaactctaagcaagaagaagataacacacagagcgacgacatcttggaagagagtgatcagcccacacaggtgagcaaaatgcaggaagacgaattcgaccaagggaatcaggaacaggaggataatagtaatgccgaaatggaggaagaaaatgctagtaatgtcaataagcatattcaggaaacagagtggcagtcccaggaagggaaaacaggacttgaagcaatcagcaaccataaggagaccgaagaaaagacagttagcgaagcgttgttgatggagcctacagatgacggcaatactacgccgcgcaaccacggtgtcgatgacgacggagatgatgacggggatgatggcggcacagacggacccaggcactcagcttcagatgactatttcattccctcacaagctttcctcgaagccgaacgggcccaatctattgcgtaccatctgaaaattgaggagcagagggagaaagtacatgagaatgagaatatcgggactacagagcccggcgagcatcaggaagccaaaaaggcagagaattcgagtaacgaggaagagactagttctgagggcaacatgagagtccatgctgttgactcttgcatgtcattccagtgtaaaaggggccacatctgtaaagcagaccaacagggaaaaccacactgtgtttgccaggaccctgtgacatgccctcctactaaaccactggaccaagtatgcggaactgacaaccaaacatatgcatccagctgtcatctgttcgcaaccaaatgcagactagagggtacaaagaagggccaccagctccaacttgattatttcggcgcttgcaaaagtatcccaacttgtaccgactttgaggttatccaatttccccttaggatgcgagactggctgaagaacatcctgatgcaattgtacgaggccaacagcgagcatgcagggtacctgaatgaaaaacaaaggaataaggtaaagaaaatatacctcgatgaaaagcgactactcgccggcgaccatcctatcgatctgctcctcagggactttaaaaaaaattatcatatgtacgtctatcccgttcactggcagttcagtgagctcgaccaacatcccatggaccgggtcttgacacattcagaacttgccccacttagagcttcgctagtacccatggagcactgcattacacgatttttcgaagagtgcgaccctaataaggacaaacacatcacattgaaagaatggggacactgttttggcataaaagaggaagatattgacgagaacctgctcttttag

SEQ ID NO: 13611 - RNA, 1254 nt, synthetic construct
  misc_feature 1..1254: note = source = /note="Description of Artificial Sequence: Synthetic coding sequence"
  source 1..1254: mol_type = other RNA
atgctggccctcttggtgcttgtgaccgtcgctctggcctcagcccaccacggcggggaacatttcgaaggggaaaaggttttcagggtgaatgttgaagacgagaaccacattaacattatacgtgaacttgcctctaccactcaaattgacttttggaagcccgacagcgtcactcaaatcaagcctcattccacagtagatttcagagtgaaagcggaagataccgtcacagtcgagaacgtcttaaaacagaatgaactccagtacaaagttctgatcagtaatttaaggaacgtggtggaggcccagttcgactcccgggtcagagctactggtcattcatacgaaaagtacaacaaatgggagaccatcgaagcttggacgcagcaggtggccactgagaaccccgcattaatctccagaagcgtgatcggcacgaccttcgaaggcagagcaatttaccttttgaaagttgggaaagccgggcaaaacaaacccgcaatttttatggactgtggttttcatgccagagaatggatatcgcccgcattttgccagtggtttgtgcgcgaagcagttagaacatacgggcgggagattcaagtgaccgagctgcttgacaaactggatttctacgttctcccagttcttaacattgatggttatatctatacttggaccaaaagcagattctggcgcaaaacacggtccacacacactggatcatcctgtatcggaactgatccaaaccggaattttgacgcaggctggtgcgaaattggcgcttctagaaacccgtgtgatgaaacatactgtgggccagctgctgagagtgagaaggaaaccaaagctctcgctgactttatacgaaataaactatcatcaattaaagcctacctgacgatacacagttactctcagatgatgatctacccatactcctacgcgtacaaactaggagaaaataatgccgaattgaatgccctggccaaggcgaccgttaaggaactagcgtccctgcatggcacgaagtacacatatggacccggcgcaactaccatatacccagcagcaggcggtagcgatgattgggcatatgaccaggggattaggtacagctttaccttcgaattgcgtgataccggcagatacggcttcttattgcccgaatcccaaatcagggcaacctgcgaagagacctttttagctatcaaatatgtcgccagttacgtgctagagcatctttactag

SEQ ID NO: 13612 - RNA, 588 nt, synthetic construct
  misc_feature 1..588: note = source = /note="Description of Artificial Sequence: Synthetic coding sequence"
  source 1..588: mol_type = other RNA
atggccgtatctcagggtgacggcaccctgtgtttcgttctcctgctctgttgctggcaggaaactgaattaagacctcgaacagtaattcctggtagtcccaccgagataccatttagctccaaacaagaggatatgagcgaactgttggacgaaatattagtacaggaaatcctggacctcaataaaacaacaccctccgaaatgccttccacagcatctacactgagcaccccgctgcatgctggcatagatgaaaactaccaggccggtggttccgaaaactatcatgaactactcgaaaatctgcagttctcacccggaattgaagtcaagatcagcaacgacgaggccaacgctaacgcaaatctacacggcgatcctagcgaaaattacaggggaccccaagtgtcgcccgggtctgagaaatcagtgtcttcaaaagaaaagaactctaagaatacacaatacgagaatctcagcattttggaccaaatactccagaacattgggagatcaagcggaaatatctttcataaggagcaacagaggacaagtgcacaacgtagaagccagggtagccagtag

SEQ ID NO: 13613 - RNA, 2334 nt, synthetic construct
  misc_feature 1..2334: note = source = /note="Description of Artificial Sequence: Synthetic coding sequence"
  source 1..2334: mol_type = other RNA
atgaatgcaaacaaagacgaacgacttaaagcaaggtcccaggacttccacttattcccagccttgatgatgctctccatgaccatgttgtttctgcctgttaccggtacgctgaagcaaaatatccccaggctaaagctgacctacaaagaccttttactctccaattcctgcatacccttcctaggttcttccgaggggcttgacttccagacactgctgcttgacgaagaaaggggacgcctgctgctgggcgcgaaagaccacatattcttattatccctagtggatctgaacaagaattttaaaaaaatctattggcccgccgccaaagaaagggtagagctttgtaaactcgccggaaaagacgctaatacagaatgcgcaaacttcatccgggttttacaaccctacaacaaaacccacatctatgtatgtggtactggagcctttcatcccatttgtggttacattgatctcggggtatataaagaagacatcatctttaaactggatacacacaatcttgaatccgggagacttaaatgtccgtttgatccccaacaaccttttgcatccgtgatgaccgacgagtacctgtattccggtacagcatctgactttctggggaaggatacagcatttacacgctcactgggacccactcacgaccaccactatatacgaaccgacatttcagaacattattggctgaacggcgccaagtttataggaaccttcttcattccagatacttacaatccggacgacgacaagatctactttttctttcgggaatccagccaagagggcagcaccagcgataaaactatcctgagcagggtcgggcgagtctgtaagaatgatgtaggaggacagagaagtctcattaataagtggactacatttctgaaagccagacttatctgttcaatccctggaagtgacggagcagacacgtatttcgacgaactacaggatatctatctcctacccacccgcgacgaaagaaaccctgtcgtttatggtgttttcacaaccaccagcagcatcttcaaaggctccgcagtgtgcgtttactcaatggccgacatccgggctgtctttaatgggccttatgcccataaggaatctgccgaccaccgttgggtgcagtatgacggtcgcatcccttaccccagaccaggaacctgcccttctaagacttacgatcccctgattaagtcgactcgagatttccccgatgatgtcatctctttcataaaacggcactcagttatgtataaatcggtatatcctgtggctggcggcccaacattcaaacggataaacgtggactatcgactgactcaaattgtggtggaccatgtgattgcggaggacggacagtacgacgttatgttcctggggaccgatatcggcactgtattaaaagtcgttagcatttctaaggagaaatggaatatggaggaagttgtgctggaagagcttcagattttcaaacactctagtataatcctgaacatggagctcagtctaaagcagcagcagctatatattggctctcgtgatggtttagttcagttaagcttgcatcgatgtgacacttatggcaaggcctgtgccgattgttgccttgcccgcgacccctactgcgcttgggatggtaatgcctgtagtagatacgctcccacatctaaacgacgcgcaaggagacaggacgtgaaatacggagatccgatcacccaatgctgggacattgaggattcaattagtcatgagactgctgacgagaaggtcatcttcggcattgagttcaattctacattccttgaatgtataccgaaaagccaacaagccaccatcaaatggtacatccagagaagtggagatgaacatagagaagaactcaaaccagatgaaaggataattaaaaccgaatacggattactgatcaggagcctgcagaaaaaagattctggtatgtattactgcaaagcccaagaacacacattcatccataccattgttaaactgactcttaacgtcatagaaaacgaacagatggagaacactcagagagccgaacacgaggaaggaaaagtgaaggacttacttgccgagtcacgcctgcggtacaaagattacatccagattctcagctcccccaactttagccttgaccagtactgtgagcagatgtggcaccgggaaaagaggcgccagagaaataaaggagggcccaagtggaaacacatgcaagaaatgaagaagaaacgcaatcgccgtcaccatcgtgatttagacgaactaccccgagcagtcgccacctag

SEQ ID NO: 13614 - RNA, 1332 nt, synthetic construct
  misc_feature 1..1332: note = source = /note="Description of Artificial Sequence: Synthetic coding sequence"
  source 1..1332: mol_type = other RNA
atgcagccatctgaaatggttatgaacccaaagcaggtctttctcagcgttcttatcttcggggtcgccggcctactgcttttcatgtacttacaggtctggatcgaagagcaacacacaggacgcgtggagaagagacgcgaacagaaagttacctctggatggggtccggttaagtacttgcgtcccgtccctagaataatgagtacagaaaagatccaggaacacatcactaaccagaatcctaaattccatatgcctgaagacgtccgggaaaaaaaagaaaatctgctgttgaattcagagagatccaccaggctactcacaaaaacttctcactcacagggtggcgaccaggcattgagcaaaagcacaggatcacctaccgagaaactgatcgaaaaaagacagggcgccaagactgtgtttaataagttttcaaatatgaattggccagttgacatacatcctctcaataagtccttagtcaaagacaataaatggaaaaaaaccgaggagacccaggaaaaacgaagatcatttcttcaggaattttgtaagaagtatgggggagtaagccatcatcagagtcatttgttccacaccgtttcacgcatatatgttgaagacaagcacaaaattttatactgtgaggtccctaaggcaggctgcagtaattggaagagaattcttatggtactcaatggtctggcatcttccgcgtacaacattagccataacgccgttcattacggaaaacacctgaagaaactcgatagctttgacttaaaaggcatttatacccgcttaaatacgtacacaaaagccgtcttcgtacgcgatcccatggaaagattagtttcagcattcagagacaagttcgaacatcctaattcatactatcatcccgtgttcggcaaggctataattaagaagtacagacccaacgcttgcgaagaagccctcatcaacggctctggagtgaagttcaaggaattcatacactacctattagattctcatcgtccggtcggcatggatatccactgggagaaggtaagtaaactgtgttacccctgtttgatcaattatgacttcgtcggcaaattcgagaccctggaggaagacgctaactattttttacagatgataggagcccccaaggagctgaaatttcctaactttaaagatcgacattcctctgatgagcgtaccaatgcccaagttgtacgacaatacctcaaggatctgacccgcaccgaacggcagctgatatatgacttttactacctcgactatttaatgtttaattatacaaccccattcctatag

SEQ ID NO: 13615 - RNA, 3228 nt, synthetic construct
  misc_feature 1..3228: note = source = /note="Description of Artificial Sequence: Synthetic coding sequence"
  source 1..3228: mol_type = other RNA
atgaggggcggaaagtgtaatatgcttagttccctgggctgtctcttactttgcggctcgatcaccctagcacttggcaacgcgcagaaactccctaaaggtaagcgcccaaacctgaaagtccatattaataccacctctgattcaattctgctcaagttcctacgacccagccctaacgttaaactagaaggacttctcctgggttacggatcgaatgtcagtcctaatcaatacttcccacttccagcagaaggcaaatttaccgaagccatcgtcgacgcggaacccaagtacttgatcgtggttaggccggcccctcccccttcgcagaagaagtcctgcagcggcaaaacccgctctcgtaaacccctgcaattagtcgtcggcacactgactcccagctctgttttcctctcatggggattcctgattaacccccatcatgactggacattaccttcccattgcccaaacgaccgattctacacgattagataccgcgaaaaagataaagagaagaagtggatattccagatttgccctgccacagagacgattgtcgaaaacttgaaacccaataccgtgtacgagttcggagttaaagataacgtcgaaggcggcatctggtccaaaatcttcaatcacaagacagtcgttggcagtaaaaaagtgaatggaaaaatccagagcacctatgaccaggaccacacagtccctgcctatgtcccccgcaagttaattccgatcaccattattaagcaggtcatccagaatgtgacccacaaagatagcgcaaaaagtccagagaaggctcccctgggaggcgtcatcctggtccatctaatcatccccggcttgaacgaaaccacggttaaactgcctgcctctcttatgttcgagatctcagatgcattgaaaacccagctggctaagaatgaaactctcgcactacccgcagaatccaaaacccccgaggtcgaaaaaattagcgctaggccgaccaccgtgaccccagaaaccgtgcctagatccaccaaacccaccacaagtagcgcgcttgatgtgtccgaaaccacacttgcttcatcagagaagccatggatcgtgcctacagccaaaattagtgaggactcaaaagtcctacagccacagactgcaacttacgacgttttctcttctccaaccacctccgatgaacccgagatttccgatagctacaccgcgacaagtgacagaatcctcgacagtataccccctaaaacttctcgcactttagagcagccacgcgccaccctggcaccatctgagacaccctttgtgcctcaaaaactcgaaatctttaccagtcctgagatgcagcccaccacccccgccccccaacagacaaccagcattccatccactccaaaacgacgaccacgacccaagccgccccgaaccaagcctgagagaacaaccagcgcaggcacgattacaccaaaaatctcgaaatcacctgaaccaacgtggaccacccctgcgcccggcaaaacccagtttatcagcttgaaaccaaagattccactgagccccgaagtcactcataccaaaccagcccctaaacagaccccaagagcacctcctaaacccaaaaccagccccagacctagaataccgcagactcaacccgtaccaaaggtcccacagagagtcacagccaagcctaaaacttctcccagccccgaggtgagctatacgaccccagcacctaaggacgtactattgcctcataagccgtaccctgaagtcagtcagtcagaacccgccccccttgaaacacggggcattcccttcatccctatgatcagcccatcacccagccaagaggaactgcaaacaaccttagaagaaaccgaccaatctacccaggagcccttcacaactaaaatcccccggacaaccgagcttgcgaagacgactcaggcgccacaccgcttttatacaacagttaggcccagaacctccgataagccccacatcaggcccggtgttaaacaggcccctcgaccctctggagcggaccgcaacgtgagcgtggattctacccatccaacaaagaaacccggaactcgtagaccaccactgccccccagaccaacccacccacgcaggaagcccctgccaccaaataacgttactgggaagcctggaagcgccggtatcatcagcagcggaccgattacaacccctccattacgatcaactcctcgccctactggtacccctctggaaagaattgagactgacataaagcaacccactgtccccgcatcaggagaggaactagaaaatataaccgatttttcttcgagccctacacgcgaaacagatcccttgggtaagcctcgttttaaggggccccacgtgaggtatatacagaaacccgacaactccccgtgctccattactgacagcgtgaagaggtttcccaaggaagaggcaaccgagggaaacgccacttccccgccccagaaccctccaactaatctgaccgttgtgactgtcgaaggatgcccgagtttcgtgattttagactgggagaagccactgaatgataccgtaacagaatacgaagtaatctcgcgtgaaaatggatcttttagtggaaaaaataaaagcatacagatgaccaaccaaacgttctcaaccgttgaaaatctgaagcccaacacaagttacgaatttcaagtcaagcctaaaaatcccctgggtgaagggcccgtcagtaatactgtcgctttctcaaccgagtccgccgaccctcgcgtgtctgagccagtttccgccgggagagatgcaatctggaccgaaagaccatttaactctgacagttattctgagtgcaagggaaagcagtatgtaaagcgcacttggtataaaaaattcgtaggagtccaactgtgtaactccttgcgatataaaatttatttgtccgattcactcaccggcaaattctacaacataggagaccagcgggggcacggcgaggaccattgccagttcgtcgactcttttttagacggtagaaccggtcagcagcttaccagtgatcagctgccaatcaaagagggatattttagagctgtgaggcaggagcccgttcaattcggcgaaatcgggggccatactcaaatcaattatgtgcaatggtatgaatgcggcactacaattccagggaaatggtag

SEQ ID NO: 13616 - RNA, 483 nt, synthetic construct
  misc_feature 1..483: note = source = /note="Description of Artificial Sequence: Synthetic coding sequence"
  source 1..483: mol_type = other RNA
atgctcccctttctatttttctccactcttttctcaagtatcttcactgaagcgcaaaagcagtattgggtgtgcaacagctctgatgccagtatttcctatacatattgtgacaaaatgcagtaccccatttcaataaacgtgaatccctgtattgagctgaaaaggtcaaaagggctactccatatattctacatcccacgtagagacctgaaacaactatactttaacctgtacatcaccgttaatacaatgaatctgccaaaacgtaaggaggtgatctgtcgcggctctgatgatgactacagtttctgtagagcactcaaaggagagactgttaatacaacaatctctttcagcttcaagggaattaaattcagtaagggtaaatataagtgcgtcgttgaagccatatccggatctcccgaagagatgcttttctgccttgagtttgtcattttacaccaacccaactccaactag

SEQ ID NO: 13617 - RNA, 780 nt, synthetic construct
  misc_feature 1..780: note = source = /note="Description of Artificial Sequence: Synthetic coding sequence"
  source 1..780: mol_type = other RNA
atggctgcactgatgagaagtaaggattctagctgttgtcttctgctgttagcggccgtactcatggtcgaatcatcccaaattggatctagtagggcaaaactgaactctattaagagctccttaggaggggagactccaggacaggcagcgaaccggtcagccggtatgtaccaaggcttggcctttggaggtagcaagaaaggcaaaaacctggggcaggcctacccctgcagttccgataaagaatgtgaagtgggcagatactgtcacagtccccatcagggttcttccgcgtgcatggtctgtagacggaaaaagaaacggtgtcaccgcgacggtatgtgctgcccttccacgaggtgtaataatggcatttgtattccagtcactgagagcattcttacaccgcacatcccggcacttgatgggaccaggcatagagataggaatcacggtcactactcaaaccatgatctgggctggcagaacttgggacggccccacaccaaaatgagccacatcaaagggcacgaaggcgacccgtgtttaaggtctagtgactgcatcgaaggattttgctgcgccagacatttctggacaaaaatctgtaaaccagtcctgcaccagggtgaagtatgtacgaaacagcgaaaaaaaggatcccacggacttgagatatttcagagatgcgattgtgccaaaggtttgtcgtgcaaagtgtggaaggacgcaacatattcttccaaggcaagattacacgtgtgccagaagatctag

SEQ ID NO: 13618 - RNA, 3030 nt, synthetic construct
  misc_feature 1..3030: note = source = /note="Description of Artificial Sequence: Synthetic coding sequence"
  source 1..3030: mol_type = other RNA
atgggccagttatgctggctccctctgttggctccgctgcttcttctaagacctccaggcgttcagtcggctggcccaattagagctttcgtggtcccccactcgcatatggatgtaggctgggtgtatactgttcaagagtcaatgagagcatatgcagcgaacgtttacacatctgtcgtggaggagttagcaagagggcaacagagacgcttcattgccgtggaacaagaatttttccgtctgtggtgggatggggtagcaagcgaccaacagaagtatcaggtgaggcaattgttggaagaaggacgactcgaattcgtaatcggggggcaagtgatgcatgacgaagctgttacccacctagacgaccaaattttgcaacttaccgagggtcatggcttcctctacgagacatttggcatccgtccacagttcagttggcatgtcgacccctttggcgcatcagcaaccacaccaactttattcgctctggctggctttaatgcccacctgggttctcggattgactacgacttgaaagctgcaatgcaggaagctcggggcctccaattcgtctggagaggcagtccaagcctctcagaacgtcaggagatttttacccacatcatggatcaatacagttattgcacaccttcacacataccgttctccaaccgctcgggattctactggaatggtgtcgctgtctttccaaaacccccacaggatggggtctatcctaatatgtctgaaccagttacgccagcaaatatcaatctctatgccgaagcactggtggctaacgtgaagcaaagggccgcgtggttccggacgccccacgtcctttggccctggggttgcgataaacaatttttcaatgctagtgttcagttcgcgaacatggaccctctccttgaccacatcaactcccatgccgctgagctgggggtgtctgtccaatatgcaacactgggagactactttcgggccctacatgctctcaacgtcacatggcgcgtcagagaccatcatgacttcttaccttactcgaccgaaccttttcaggcttggactggattttacacgtccagaagttcccttaaaggcctcgctagacgagctagtgccttgctgtatgcgggtgaaagtatgtttacacggtatctatggccagcaccacgcggacatctagatcccacttgggcccttcaacaactacagcagctgcgttgggctgtctctgaagtccagcaccacgatgcaattacaggaaccgaatcccctaaagtccgcgatatgtacgcaactcacctggcttctggcatgcttgggatgaggaagctgatggcatctatcgtactcgacgagctgcaacctcaagcaccgatggcagcgtcttcagatgctggtcctgctggacattttgcctctgtttacaatccactcgcctggaccgtgaccaccatagttactctcaccgtgggatttcccggcgttagggtcacagacgaagctggccatcccgttcccagccaaattcaaaatagtactgaaaccccctctgcatacgatctgctgattctgaccacaatccctggactgtcataccggcactacaatataaggccaaccgcgggggcccaagagggaacccaggaacccgctgccaccgtcgcctctacattgcagtttggccggagattacgccggagaacatcacacgccggtagatacctggtgcccgtagcaaatgactgttatattgtcttactggatcaggacactaacttaatgcacagtatttgggagaggcagtcaaatcggacggttagagtcactcaagaattccttgaatatcatgtcaatggcgacgttaagcagggaccaatctctgataattacctgttcaccccagggaaagcagccgtgcctgcctgggaagcggtggagatggagattgtggcagggcagcttgtgacagaaataagacaatatttttataggaacatgacagctcagaattacacttacgctatcagatcaaggctaactcacgtcccccagggccacgatggcgagctgctatgccataggattgaacaggaataccaggcagggccactcgagctgaatagggaggcagttctcaggacctcaaccaaccttaattcccaacaggtgatatacagcgataataacggttaccagatgcaacgaagaccttacgtttcatatgtgaacaattccattgctaggaactactaccctatggtgcagtctgctttcatggaagacggtaagtcccgattggtattactaagtgaacgcgcccacgggatttccagccaggggaacggccaagtggaggttatgctgcaccggagactgtggaataacttcgactgggacctcgggtacaacctcaccctcaacgatacttcggtcgtccatcccgttctctggttgttactgggaagctggtccctgaccactgcactgcggcaaagatctgccctcgccctgcagcatcgcccggttgtcctgttcggagacctagcaggtactgctccaaaactgcccggtccacagcagcaagaagccgttacacttccgccgaatctgcacctgcagatactttcgatcccaggatggcgctacagcagcaatcacacagagcactcacagaatcttagaaaagggcatcgtggcgaagcccaggctgacctgagaagagtacttctgcgactgtaccacctctacgaggtcggggaagatccggtcctgagtcaacctgttacagtgaaccttgaagcggtcctgcaggccctcgggagcgtcgtggccgtggaagagcgtagcttaacaggtacatgggatttatctatgttgcatcgatggagttggaggacaggccccggcaggcaccgcggggacactacatcccccagcagaccgcccggaggccctataatcacagtccaccccaaggagatacgaactttctttatacatttccaacagcagtag

SEQ ID NO: 13619 - RNA, 1443 nt, synthetic construct
  misc_feature 1..1443: note = source = /note="Description of Artificial Sequence: Synthetic coding sequence"
  source 1..1443: mol_type = other RNA
atgttatttcggaacaggtttctgctgctcctggcattggctgcacttttggctttcgtttccctaagccttcaatttttccacctaatccccgtcagcacacccaagaacggtatgagtagtaaaagcagaaagcgcatcatgcctgaccctgtcacggaacctcccgtaacagatcctgtctatgaagccttgctgtactgcaacatcccctctgtggcagagagatcaatggagggccacgcaccgcatcattttaaattggtatccgtccacgtctttattagacacggtgatcgctatcccctgtacgttattccaaaaactaagcgtccagagatcgattgcacactcgttgccaacagaaagccctaccatcctaagctagaagccttcatatcccacatgtccaaaggaagcggcgcctcatttgaaagtcccctgaactcactccccctgtatccaaatcaccccctttgtgaaatgggagaactaacacagaccggcgtcgtgcagcacttgcagaacggacagttactgcgggatatttatcttaaaaaacacaaactgctccccaacgattggtctgcagatcaattataccttgagacaactggcaaatcaaggaccctgcagagcggcttagcactactctacggcttccttccagactttgattggaaaaaaatttacttccgacaccagccctcagcactattctgctccgggtcatgctattgccccgtccgcaaccagtatctagagaaggagcagcggcgacaatacctcctgagattaaaaaactcacagctcgagaagacctacggcgagatggctaaaatcgttgatgtgcccactaagcagcttagggccgcgaacccaattgattccatgctttgccacttttgccataacgttagttttccctgtacaaggaatggatgcgtggatatggagcacttcaaagttatcaagacacaccagattgaagatgaacgcgaaaggcgggaaaaaaagttgtactttggctattccctgctcggcgcccatccaatcttaaatcagaccattggacgaatgcaacgggctacagaggggcgaaaagaggagttattcgcactttactccgcacacgacgttaccttatccccagtgctatccgctctgggcctctcagaggctagatttcccagattcgctgctcgtttaatctttgagttatggcaagatagggaaaaaccatccgaacattcagttagaatcttatacaacggcgtagatgtgacctttcacacaagcttttgccaggaccaccacaagcgaagtcccaaacccatgtgtcccctcgaaaatctagtgcgcttcgtgaaaagagacatgttcgtggccttaggcggatcaggaactaactattatgacgcttgccaccgcgaagggttctag

SEQ ID NO: 13620 - RNA, 1341 nt, synthetic construct
  misc_feature 1..1341: note = source = /note="Description of Artificial Sequence: Synthetic coding sequence"
  source 1..1341: mol_type = other RNA
atgcttcatcccgaaacgtcccctggaagagggcacctccttgccgttctcctcgccttgctcggaacagcttgggcagaagtgtggccgccacagctgcaggaacaggctcctatggcgggagcactaaatagaaaagaatcatttctccttctctcccttcacaacagactgcggtcttgggtccaaccacccgccgctgacatgcggagactggattggtcggattccctcgctcagctggcccaagctcgtgctgcgctttgtgggactcccacaccgtcacttgcctctggcctgtggaggaccttacaggttggatggaacatgcaactgttacccgccggactggtttcttttgttgaggtcgtgtcactctggttcgccgaaggacagcggtacagccatgctgctggcgagtgcgcaagaaacgcaacttgcactcactacacccagctggtttgggcgacatcttcccaattgggatgcggaaggcatttatgctcagccgggcaagccgctatagaagcattcgtctgtgcgtattctccacgcggaaattgggaggtgaatggaaagactattgtgccctataaaaagggggcatggtgtagtctgtgcactgcctccgtgagtggctgtttcaaggcctgggatcacgctggaggcttgtgtgaggtccccagaaatccttgtcggatgagctgtcagaaccacggtcggttgaacatatctacatgccactgccattgtcctcctggctataccggtagatactgtcaagtaagatgctctctgcagtgtgtccacggaaggttcagagaagaagaatgcagttgtgtgtgcgacatcggctacggaggggcgcagtgtgccaccaaggtgcattttccattccacacatgtgacctcaggatcgacggggactgcttcatggtgtcctctgaagccgacacttactatcgcgcgagaatgaaatgtcagcgaaaaggcggcgtcctggctcaaataaagtcacagaaggttcaggatattcttgcattctatctgggcagactggaaactacaaatgaagtcatagacagcgatttcgaaacacgcaatttttggatcggactcacctacaaaacagccaaggactcattcagatgggccacaggggagcatcaagcatttacttcttttgccttcggtcagcccgataatcacggattcggcaattgtgtggaactccaagccagcgcagctttcaattggaacgaccaaaggtgcaagacccgcaatcgctacatttgtcagtttgcccaggaacatatttcacgttggggcccaggttcttag

SEQ ID NO: 13621 - RNA, 2313 nt, synthetic construct
  misc_feature 1..2313: note = source = /note="Description of Artificial Sequence: Synthetic coding sequence"
  source 1..2313: mol_type = other RNA
atggtggagtcggctggtagagccggacagaaaagacctggttttctcgagggcggcctactcctgcttctgttattggtgaccgcagcgctagtggccctgggcgtcctctacgcagacagacgcggaaagcaactcccccgactggctagtagactatgcttcctgcaagaagagcgaacatttgtcaagaggaagccccgcgggattccagaagctcaggaagtttcggaagtctgtacgaccccagggtgtgtgatcgctgcagctagaattctgcaaaatatggatcccacaaccgaaccctgcgacgatttctatcaattcgcttgtggagggtggctgagacgacatgttattccagagacgaactctcgttacagcattttcgacgtactcagagacgagttagaagtaatcctgaaagccgtgctggaaaattctactgctaaagataggcctgctgtggagaaagcccgcaccctttacagatcctgtatgaatcaaagtgtcatcgagaagcgagggagccagccactactagatatcctcgaagtcgtgggaggttggcccgttgcaatggacagatggaatgaaaccgtaggtcttgaatgggagctggaaagacagctggcattgatgaattctcaatttaacagacgcgtccttatcgatctcttcatctggaacgatgaccagaattccagcaggcacattatttatatcgaccaacctacactcggcatgccttcccgggagtattatttcaacggtgggtccaacagaaaagtcagggaagcatatctgcaatttatggtctctgtagcaacacttttaagggaagatgcgaatttgccacgcgattcatgtcttgtccaagaggacatggtgcaggtgctggaacttgaaacccagctcgctaaggcgacagtgccacaggaagaaaggcacgacgtgattgctttatatcacaggatggggctggaagaactgcaatctcaattcgggctgaagggattcaattggacattatttatacagactgttctttcttctgtcaaaatcaagctactgccagatgaagaggttgtagtgtacggtatcccttacctgcagaatctagagaatattattgacacttattctgcacgcaccattcagaactaccttgtttggagacttgtccttgatcgcataggctcactaagtcaaaggtttaaggacactagggtgaattaccgcaaagccctttttggcaccatggtggaggaagttcggtggagggaatgtgtcggctatgtcaatagcaatatggaaaatgccgtgggctccttgtatgtcagagaggccttcccaggggatagtaagtctatggtacgggaactgatcgataaagtgcgcaccgtgttcgttgagacattagacgagcttggctggatggatgaagaatcaaagaaaaaagcccaggaaaaggcgatgtccataagagagcagatcggccacccagattatattcttgaagaaatgaaccgcagattggacgaggaatactccaaccttaacttttccgaggacttgtattttgaaaacagcctgcagaatcttaaagttggagcacagagaagcctgcgaaagttaagggagaaggtagatccgaatctctggataatcggggccgctgttgttaatgctttctattcccccaacagaaatcagattgttttccctgctggcatactgcagcctcccttctttagcaaggagcaaccacaggccctgaactttggtggcattggaatggtgattggccacgagataacacacggatttgatgataatggcagaaactttgataaaaacggcaacatgatggactggtggagcaattttagcactcaacacttccgtgagcagagcgagtgtatgatctatcagtatggaaactatagttgggacctggctgatgaacagaacgttaacgggttcaacacattgggcgagaatatagcagacaacggcggcgttagacaggcctacaaagcttatctaaagtggatggccgaaggaggaaaagaccagcaacttccaggtttagacctgactcacgaacagttattttttattaactatgctcaagtatggtgcgggtcctacagaccagaatttgccatccagtctataaaaacagatgtgcactcccctctgaaataccgagtgctgggctctctacagaacctggccgccttcgccgacactttccattgcgctagaggcacacccatgcacccaaaggaacgatgccgcgtttggtag

SEQ ID NO: 13622 - RNA, 1317 nt, synthetic construct
  misc_feature 1..1317: note = source = /note="Description of Artificial Sequence: Synthetic coding sequence"
  source 1..1317: mol_type = other RNA
atgagcaagcgtgataaagccggaaaagacactgctaggggtaagggtaaggacatctcaaagtacggttcagtacaaaagagctttgcggatcggggccttcctaaacctccaaaggaaaagctcttacaagtggaaaaattgagaaaagagtctggaaaaggatcctttctccaacctactgcaaaacccagggccctggctcagcagcaggcagttattcggggatttacgtactacaaagccggcaaacaagaagttactgaagccgtggcggataatacacttcaaggaacttcttggttggagcaactgcctcccaaggtggaagggcgttccaacagcgcagaacctaactcagccgaacaggatgaagctgaaccacgatcctcagagcgtgttgatctggcatcgggcacacctaccagtattccagctacaactacaacagcaaccaccacaccaaccccaactacctctctgttgccaactgagcccccttctggtcctgaggtgagcagccagggcagagaagcttcatgtgagggaaccctgagagccgtggaccctcctgtccgccatcatagttacggaagacatgaaggagcttggatgaaggatccagccgctcgcgatgacagaatttacgtcaccaactattattacggaaactcactggtcgaattccggaacttagagaatttcaagcaggggcggtggtccaacatgtataagctgccttataattggattggcactggacacgtggtttatcagggtgccttttactataatagagccttcactaaaaacattataaaatacgatcttcgccagagatttgtcgcgtcgtgggcgctcttgccagacgtagtgtatgaggacacgaccccatggaaatggagaggacattctgatattgactttgctgtggacgaatcggggctctgggtgatttatccagctgttgacgatagggacgaggctcagcctgaagtcatagtactgagtcgtctcgaccccggcgacttgtcagtgcacagggaaactacgtggaagactcgactgcgccggaatagctacggaaattgcttcctcgtgtgtggaatactgtacgcagtggacacgtataatcaacaggagggccaagtcgcatatgcctttgacacgcacacgggaactgacgcgcgccctcagcttccctttctaaatgagcacgcctacacaacacagatagattataaccccaaggagcgagtgctatacgcctgggacaatggacatcaactgacatataccctacattttgtggtctag

SEQ ID NO: 13623 - RNA, 3570 nt, synthetic construct
  misc_feature 1..3570: note = source = /note="Description of Artificial Sequence: Synthetic coding sequence"
  source 1..3570: mol_type = other RNA
atgccaggtcttctcaactggataaccggagccgccctgcccctaactgcctcggacgtaacttcatgcgtatcaggttacgccctcggcctgaccgcatcattaacttatggcaatctggaagcccaaccattccaaggactcttcgtttatcctctagacgagtgtactaccgtgataggtttcgaggctgtcattgctgaccgcgtcgttactgtccaaatcaaagataaagctaagctggaatccggacactttgacgcctcacacgtgaggtccccgactgttaccggcaacattttgcaggatggagtctcaatagcccctcattcctgtacacccggcaaagtcaccctcgacgaggatctagaacgtatcctgtttgtggccaatttgggcaccatagcccccatggaaaacgtaaccatctttattagcacttcttctgagcttcctacactgccttctggagccgtgagagtgctgctcccagccgtgtgcgcccccactgtaccacagttctgtaccaagagtactggaacctctaaccagcaagcacaaggcaaggacagacattgttttggcgcatgggccccgggctcttggaataaactttgtcttgctaccttgttaaatactgaagtttcaaacccaatggagtacgaatttaacttccagctagagatccgggggccttgcttattggccggtgtcgaatctcctactcatgaaattcgggctgacgcagctcccagcgcccgatccgctaagtctatcattataacattagcgaacaaacacaccttcgatcgaccggtagaaatcttgatccaccccagcgaaccccacatgcctcacgtactgatcgagaaaggcgacatgacattgggcgagtttgatcaacacctaaagggacggactgactttatcaagggaatgaagaaaaagtccagggctgaaagaaaaaccgaaatcatcaggaagagactacacaaggatatcccccaccactcagtgataatgcttaacttttgtccggatctccagtcagtgcagccatgcctacggaaagcacacggtgaattcatctttttaatcgacaggtcctctagtatgtcaggcatttccatgcatagggttaaggacgcaatgctcgttgctctgaagtctttgatgccagcgtgtcttttcaatataatcgggttcgggtcaacctttaagtcattgttcccctcgtctcaaacttactccgaggactctctggccatggcgtgtgacgatatccagcgaatgaaggccgatatgggaggcacaaacattctctcccccctgaagtgggtaattagacagcccgttcataggggccatcctaggctgttattcgtgattactgatggtgccgtaaacaacaccggtaaagtcctcgagctcgtgagaaaccacgccttcagtaccagatgttactctttcggaatcggtcccaacgtttgtcaccgtctcgtgaaaggattggccagcgtgtctgagggctcagccgaactgttgatggagggggagagactgcagcccaagatggtgaaaagtttaaagaaagccatggccccggtccttagcgacgttacagttgaatggatttttcccgagacaacagaggttctggtgtcaccggtgagtgcttcttctttattccctggcgaacgtctagtgggctacggcattgtgtgtgacgcatctttacacatcagcaatccaaggtccgacaagcggcgcagatactcaatgcttcacagtcaggagagcggcagctcggttttttaccacagccaggatgatgggcccgggctcgagggaggggactgtgctaaaaactccggggcgccatttattcttggacaggccaaaaatgcacggcttgcatctggcgactcaacgactaaacacgatttaaacttatcccagcggagaagggcctatagtacgaaccagatcaccaatcacaagccgttaccacgcgccacaatggcctctgacccaatgcccgccgccaagagatacccgctcagaaaggctagacttcaggacctcactaaccagacaagcttggacgtccagcgttggcagatagacttacagcccctcctcaactctgggcaggatctgaatcaaggccctaaacttcgaggtcctggagcacggcgcccatcccttctgccacaaggatgtcagccgtttttgccatggggccaggaaacccaggcctggtctcccgttcgtgagcgcactagtgactcaagatcccctggggatctggagccttcccaccatccatccgctttcgagactgaaacaagttctgactgggacccacccgccgaatcccaggaacgagcttcacctagccggcctgcaacaccagcaccagtcctcggcaaagcacttgtaaagggtttgcatgattcgcagaggctccaatgggaggtttccttcgagctaggtaccccaggcccagagaggggaggagcccaggatgctgatttatggtccgaaactttccatcatttggcagcacgagccatcattagagacttcgaacagttggccgaacgggagggtgagattgagcaggggagtaatcgtaggtatcaagttagtgcacttcacacgagtaaggcttgcaacataatatctaagtacacagccttcgtcccagtggatgtgagtaaaagcaggtatcttcccacagtggtcgaataccccaattccgctgcccttcgcatgttaggctctagggccctcgctcaacaatggcggggtacttccagcggattcggccgtccacaaaccatgttgggggaggactccgctcccggaaatggaccccagcgaagcttggccacaaataccctgtcttcaatgaaagcttctgaaaacctgttcgggtcctggcttaacctgaataaatctcgcttactgacccgggccgcaaaagggttcctgagcaaaccgctgatcaaggccgtagaaagcaccagtggaaatcaatcctttgactacatcccccttgtttcactgcagctagcaagtggcgcttttttattgaacgaagctttctgtgaggctactcacattcccatggaaaaactgaaatggacatccccattcacgtgccaccgtgtctctctgacaactcgcccgtccgaaagtaagacaccttctcctcagctctgcacctcatcaccacccagacacccctcttgtgattcattctctctggaacctctggcgaagggaaaacttggcttggaacctcgtgctgtggttgagcacaccggaaaattgtgggctaccgtggttggcctagcctggttagagcactcctcggcttcatactttactgagtgggaactggttgccgctaaagcaaattcatggctggagcagcaggaggtgccagaaggaagaacccagggcacattaaaggcggccgctaggcagctgtttgttttactccgacactgggatgaaaatcttgaattcaatatgttgtgttacaatccgaactacgtgtag

SEQ ID NO: 13624 - RNA, 1344 nt, synthetic construct
  misc_feature 1..1344: note = source = /note="Description of Artificial Sequence: Synthetic coding sequence"
  source 1..1344: mol_type = other RNA
atgcctcacgttttaatcgaaaaaggagacatgacactgggcgagttcgatcagcacctaaagggcagaacggattttattaagggtatgaaaaaaaagagtcgtgcggaacgtaaaactgaaatcatacggaaaagattgcataaggatatccctcatcattcagttataatgctaaacttctgtcctgacctccaatccgtgcagccctgtctgcgaaaggcacacggcgaattcattttcctgatagaccgatcgagttctatgagcggcatttccatgcatcgggtgaaagacgctatgttggtggccttaaaaagtctgatgcctgcatgtttattcaatattatagggtttggcagtacattcaagagcctgtttccaagtagccagacttattcagaagactcgctggcaatggcatgtgacgacattcagagaatgaaagcggatatgggaggtactaacatcttgtccccactcaaatgggttataagacagccggtccatcgaggtcatcccagattattgttcgtgattactgacggcgccgtgaacaatacgggcaaggtcctggagctcgttcggaaccacgcttttagtacccgatgttactccttcgggattggcccaaatgtttgccaccgcctggtcaagggacttgcctctgtgtccgaaggtagcgccgaactgctgatggagggggagaggctgcagcccaaaatggttaaaagtttgaaaaaggcaatggcccccgttctgtctgacgtaacagtggagtggatcttccccgagacgaccgaagtgctggtatccccagtttctgcttcctcactcttccccggtgaacgactcgtaggttacggtattgtgtgcgacgcttccctccatataagtaacccgcggtccgataaacgacgacgctattcaatgcttcacagccaggagtcaggctcatcagtgttctaccatagccaggatgatggacctggactagaaggaggcgattgtgccaagaatagtggagctccatttattctgggacaggctaaaaacgctaggctggcttcaggcgatagcacaacaaaacacgacttgaatctctcacagagaagaagagcctactctaccaatcagattaccaatcacaaacccctgccaagagccaccatggcttccgatccaatgcccgcagccaagagatatcccctcagaaaagcgcgcctgcaagatctaactaaccagacatctctagacgtgcagcggtggcaaatcgaccttcaggcttttatctgcctcactagcgaagataccttccaaattagaactccaacaggccagtag

SEQ ID NO: 13625 - RNA, 726 nt, synthetic construct
  misc_feature 1..726: note = source = /note="Description of Artificial Sequence: Synthetic coding sequence"
  source 1..726: mol_type = other RNA
atgtggaccgtgcggactgaaggagggcacttccctctgcacagcccaactttctcctggaggaacgtcgcattcttacttctactcagtttggcactcgaatggacttctgccatgttaacgaagaaaatcaagcacaaacctgggctgtgtcccaaggaacgcttaacctgtaccacagaactgccagactcctgtaatacggactttgattgcaaagaatatcagaaatgttgctttttcgcctgccagaaaaaatgtatggaccccttccaagaaccttgtatgctcccagtgagacatggcaattgcaatcatgaagcccagcgctggcacttcgacttcaaaaactatagatgcacaccttttaaatatcgcgggtgcgaaggaaatgccaacaactttctgaatgaagacgcttgccgaaccgcctgcatgcttattgtcaaagacgggcagtgtcccctcttccccttcaccgagcgcaaagaatgtccccctagctgccactctgatatcgactgccctcagaccgacaaatgctgtgagagtagatgtggattcgtgtgcgccagagcctggacagtcaaaaaaggattttgcccgcgcaaacccctgctctgtaccaaaattgacaagccgaaatgtttacaggacgaagaatgcccgctcgttgagaaatgttgctcccactgcggtctgaagtgcatggaccctcgacgatag

SEQ ID NO: 13626 - RNA, 1074 nt, synthetic construct
  misc_feature 1..1074: note = source = /note="Description of Artificial Sequence: Synthetic coding sequence"
  source 1..1074: mol_type = other RNA
atgagacctccccctgccctggctctggcgggtttatgcctactggccctgcccgcagctgctgcctcctatttcggactgacaggacgcgaggtattgacccccttccctggtctcggtactgccgctgcaccagcccagggcggagcgcatctgaaacagtgtgacctccttaaactcagtcggcgtcagaaacaactctgtaggagggagccaggactggccgaaaccctgcgggatgcagctcacctcggcctacttgagtgccaattccagttcagacatgaacggtggaactgcagtctagaagggaggatgggactcctaaaaagaggattcaaggagacagcttttctgtatgccgtatcatcagctgcgctaacccacacccttgctcgggcttgcagcgctggaaggatggaacgctgcacatgcgatgactcaccaggcctagagagcagacaggcgtggcaatggggggtgtgcggggataacctgaagtattccacaaaatttctgagcaatttcctgggttcaaagcggggtaacaaagacttacgcgcccgcgccgacgcccataatacacatgtggggattaaggccgttaagtcaggactgaggacgacatgcaaatgccacggcgtgtcaggcagctgtgcggtgcgcacctgttggaagcagctttcgccattcagggaaacaggacaggtcctcaagttacgttacgactcggccgtcaaagtctcaagcgctaccaatgaggccttaggcagacttgaactctgggccccagctcgacagggctcgttaacgaaaggcttggcccctcgcagtggcgacctagtgtacatggaggactcacccagcttctgtagaccaagtaaatactcaccaggcactgcgggtcgggtctgttctagagaagccagttgttcttctctgtgttgtggacgtgggtatgatacacaaagtcggctggtcgctttttcatgtcactgccaagtgcagtggtgctgttatgtggaatgtcaacaatgtgtacaagaggaattggtgtacacatgcaagcattag

SEQ ID NO: 13627 - RNA, 810 nt, synthetic construct
  misc_feature 1..810: note = source = /note="Description of Artificial Sequence: Synthetic coding sequence"
  source 1..810: mol_type = other RNA
atggttaggtgccttggtcccgccttactgctcctgcttctcctcgggagcgcttcgagtgtgggaggcaatagatgtgttgacgctgctgaagcctgtaccgccgacgcacgctgtcagaggttacgaagtgagtatgtcgcccaatgcctgggtagagctgctcagggtggatgtcccagagcgagatgcagaagagccctgagacgtttttttgcaagaggtcctccagccctgactcacgccctgttattctgcccctgcgccggtccggcgtgcgcagagagaagacgtcagacgttcgtcccatcctgtgcattttccggccccggccctgctccaccaagctgtcttgaaccactcaatttttgtgaacgatcgcgggtgtgccggcctcggttgctggcctttcaggttagttgcaccccggcgcctagtgccccggatggatgcctgcttgaccagggagccagatgtctccgagcatacgctggcctggtgggaacagctgttactcccaattatgtggataatgtaagcgccagggtggccccttggtgcgattgcggcgcaagcggaaaccggagagaagattgtgaagcctttcgagggctgtttaccaggaacaggtgtctcgacggagctattcaggccttcgcctccggatggcctccagtgttgctcgatcagcttaatccccaaggcgacccagaacactctttgctgcaggtaagttctacaggacgcgccctggaaagacgttctctgctctctatcctaccagttctggccctccctgccttattatag

SEQ ID NO: 13628 - RNA, 1728 nt, synthetic construct
  misc_feature 1..1728: note = source = /note="Description of Artificial Sequence: Synthetic coding sequence"
  source 1..1728: mol_type = other RNA
atgtctggtaattgggtccatcctggacaaatcctcatttgggcaatctgggtacttgccgcacctacaaaagggccctcagcggagggcccccaaagaaatacaagactaggttggattcaggggaaacaggttaccgttcttggatcacctgtacccgttaatgtgtttttaggcgtgcccttcgctgcccctcctctgggaagtctccgctttactaacccacagcccgcctcaccctgggacaatttacgcgaggcaacaagttacccgaatctgtgtctccaaaattcagaatggttactcctcgatcaacatatgttaaaggtacattaccccaagtttggtgtgtcagaagattgtctttaccttaacatttatgcacctgctcatgcagacactgggtctaaacttccagttttagtctggttccctggaggtgccttcaagaccgggtctgcctccatatttgatgggtcagcccttgccgcttatgaggatgtgctcgtcgttgtggtccagtaccgattagggatctttggtttctttacaacttgggaccagcacgctccaggcaattgggcttttaaagaccaagtcgccgccttgtcatgggtgcagaaaaatatcgagttcttcggaggggacccctcctcagttaccatttttggcgagagcgcgggagctatcagcgtgtctagtctaattttgtccccaatggcaaagggcctattccacaaggcaatcatggaatccggcgtagccatcatcccatacctcgaggcacatgattatgaaaaatccgaagacctgcaggttgtggcacatttttgcggaaataacgcatctgactctgaagcactgctgcgttgcttacgtactaagccctcaaaagagctgctcacactgtctcagaaaaccaagagttttacacgtgtcgtagatggagccttcttcccaaacgaacccctcgatctgctttcacagaaggcctttaaagcaatccccagtattataggagtcaacaatcacgaatgcggcttcttgttgccgatgaaagaagctcccgaaatcctttccggaagtaataaaagccttgccctccatctgattcagaacattcttcacataccaccacagtacctgcaccttgtagctaacgaatacttccacgacaaacactctcttaccgaaatcagggattcactcctcgacctgttaggcgacgtgttttttgtcgtgccagctctgattaccgctagatatcatcgagatgccggagctcccgtgtatttctatgagttcagacatcgaccacaatgtttcgaagacaccaagcccgcattcgtgaaagccgaccacgccgatgaagtaaggtttgtcttcggcggcgctttcctgaaaggtgatattgtaatgttcgagggggctactgaagaggaaaaattgctgtctaggaaaatgatgaaatactgggcgacttttgccagaactggtaacccgaacggaaacgacctgtccctctggcctgcctacaacctcactgaacagtatctgcagcttgacctgaacatgtccctgggacaaaggctgaaagaaccacgggttgatttctggacctctactatccccctaatattatctgcatccgacatgcttcactcacctctgtcttccctcacttttctaagtcttcttcagccctttttttttttttgtgctccctag

SEQ ID NO: 13629 - RNA, 1026 nt, synthetic construct
  misc_feature 1..1026: note = source = /note="Description of Artificial Sequence: Synthetic coding sequence"
  source 1..1026: mol_type = other RNA
atggggacacttccttggttgttagctttcttcattctagggctacaggcttgggacactccaaccatagtcagtcggaaggagtggggcgctcgacctcttgcatgtagagcgctgctgacacttccagtcgcctacattattacagaccagcttccaggaatgcagtgccaacagcagtcagtttgtagtcagatgttgagagggttacagtcacattccgtgtatactattggctggtgcgatgtggcatataacttcctagtcggtgacgatggcagggtgtatgagggggtaggttggaatatccagggacttcatacacagggctataataacatttctctggggatcgccttttttgggaacaaaatcggtagctccccctcacccgccgccctgtccgcagccgagggactgatatcttacgcaattcaaaagggtcatctaagcccccgttatatccagccactcctgttgaaagaagagacatgcctcgatccacagcatccagttatgccacgaaaagtttgtccaaacatcattaaaaggtctgcatgggaagccagagaaacccactgtccaaaaatgaatctgccggctaagtacgtgataattatccatacggctggaactagctgcacggtgtcaaccgattgtcaaacagtcgtgcgtaatattcagtcatttcatatggatactcggaacttctgtgacataggctaccacttcctagtgggacaggatggaggcgtgtatgaaggagtcgggtggcacatccagggatctcatacctacggttttaatgacatcgctttaggtatcgccttcattgggtattttgtggagaagcctcccaatgccgctgcactcgaagctgctcaagacctaattcaatgtgccgtcgttgaaggatacttgacccctaattacctcctgatgggccatagcgatgtcgtcaatattctatctcctggccaagccctttacaatataatttctacatggccacattttaagcattag

SEQ ID NO: 13630 - RNA, 897 nt, synthetic construct
  misc_feature 1..897: note = source = /note="Description of Artificial Sequence: Synthetic coding sequence"
  source 1..897: mol_type = other RNA
atgggtattgtgtgcgctcagtgttcctttatcctgctccttagtatcattcgagcccgccctccgccatttctgttctgtcctctgagtagccagcggaccgagagtccctacaagcctgtgcaccttggactaggaccaaccgacaaggtagctgctatagcgatggctcgcattatcgaccttgtgccttgggatgatggatctactcatgtatacgcttctcccgcaatcctcctgcccatggaacgacagaggaaccagctcgccggagtcaagcaacaactgtatcatccagcacttcccacactgaggcacatggatagagatacagtcaaagcatgtctgccagacgaacactgccagagtactacctactgtcgaaaagatgaattcgataacgcccacttcactctgctgggagtccccaacaaaccactccagtgcctggatattacggcaacaggacagaagttacggaatcgctaccacgaaggaaagctggcacccatcgcaccgggcattaaccgcgtagattggccctgcttcacccgggctatcgaggactggagccacttcgttagttctgctggtgaattcaagctgccgtgtctgcgaaaaagggcagagggacttagtggctacgccgtccgttatctgaagccagacgtcactcaaacttggcgccaggaagctttatgcggagcatgggctggacggccttgttcgccagactctcccagaccttatccatgttgtccaccgcaatactgtctcagccagaatcctagcctagatcgttacggccagaaacctctcccctttgacagcttgaacacctttcggtccttcggttcctcctattcacgtgtcaattacctgactccttggcactag

SEQ ID NO: 13631 - RNA, 5799 nt, synthetic construct
  misc_feature 1..5799: note = source = /note="Description of Artificial Sequence: Synthetic coding sequence"
  source 1..5799: mol_type = other RNA
atggctccaggagccttgcgtgggggctgcgaacagcgcgctcctggtgggggtgccagaacagcggcactcggcccgtggccatggccttccccagggccagctcctagccccggagccgcccctccccgctctagaaagatgtctggggccctcttatggcccttacttccattgcttttgctgctcctgagcgcccgcgacggtgtcagggctgcccaaccacaagcacccggctacttgatcgccgcaccctctgttttcagggccggagttgaagaagtgatctcagtcacgattttcaattcacccagggaagtcaccgttcaagctcagctggtggcccagggagagcccgtcgtgcaatcacagggcgccattcttgataaaggtaccatcaagcttaaggttcccactggactgcgtggacaggcactgctcaaggtgtggggtagaggttggcaagccgaggagggccccctttttcataaccaaacatccgtgaccgtggacgggagaggtgcctcggtctttattcaaacagacaagccagtctataggccacagcacagagtgctcatctccatttttaccgtgtcccctaacctccgaccggtcaatgagaaactcgaagcctacatactggatcccagaggaagtcggatgattgaatggcgacacctaaaacccttttgctgtggcattaccaacatgagcttccccttatctgaccagccagtactgggcgagtggtttatcttcgttgaaatgcaaggccatgcttataacaaaagcttcgaagtacagaaatacgttctacctaagtttgagttactgatcgatccaccacgatatatccaggacctcgatgcctgcgaaacaggcaccgtgcgcgccagatacacatttggcaagccagttgcaggggctcttatgataaacatgacagtaaacggggtcggctattacagtcacgaagtcggcaggccggtcctgcgtaccacaaagatactaggctctagggattttgatatttgtgtgagagacatgatcccagccgatgtgccagaacatttcagaggccgggtctccatctgggcgatggtcacctctgttgatggctcacagcaggtagcattcgacgactcaaccccagtgcagcgccaattggtcgacatcagatactctaaggataccaggaagcaattcaaacccggcctcgcctacgttggaaaagtcgagttgagctaccccgatgggtcccctgccgaaggcgtaaccgttcagatcaaagcagaactcaccccaaaggacaacatctatacctccgaagttgtgtctcaaagaggcttagtgggcttcgaaatcccaagtatccctactagcgcccagcacgtgtggttagagacaaaagttatggcgctcaatggtaagcctgtgggcgcccaatacctgccatcatatctgtctttgggatcatggtacagccctagccagtgttatcttcagctacagccaccttcccaccctctgcaggtaggtgaggaggcctacttcagcgttaagtctacttgcccatgtaatttcaccctctactatgaggttgctgctcgaggtaatattgtactatctggccaacagcccgcccatactacacaacaaaggtcaaagcgcgccgcacccgcactagagaagccaatcagactgactcacctgagcgaaacagagcctcctccagcaccagaggccgaggttgatgtgtgtgtgacatccctgcacttggccgtgaccccttccatggtgccactgggtaggctgctcgtgttttacgtccgcgaaaatggggagggagttgccgacagtctgcagtttgctgtggagactttctttgagaaccaagtgagtgtgacctactctgccaacgaaacccagcccggggaggtggtcgatctccgaattagggcagctagagggagctgcgtgtgcgtggccgctgtcgataaaagtgtctatctgctcagatccggatttagactgacaccagctcaggtctttcaagaactagaagattatgacgtttccgactcctttggcgttagtcgcgaggatggtcctttctggtgggccggattaaccgctcagaggcgaagacgctctagcgttttcccgtggccctggggtataactaaagatagtggatttgcctttactgagaccggcctggttgtaatgaccgatcgcgtatccctgaatcatagacaggacggtggtttatacaccgacgaagctgtcccagccttccagcctcataccggtagtctggttgcagtggcacccagcagacacccgcccagaaccgaaaaaaggaaacgtactttcttcccggagacttggatctggcattgtcttaacatttccgacccttcgggcgaggggacattatccgttaaagttcctgatagcatcaccagctgggtgggagaagcagtggcactttcaacctcacaaggactgggaatcgcggagccgtctcttcttaagacatttaaaccattttttgtggattttatgctacccgcattgatcatccgcggagaacaagttaaaatcccactttctgtctacaactacatgggcacctgtgccgaggtttatatgaagttgagtgttccaaagggcatccagttcgtcggtcacccagggaaaaggcacgttaccaagaagatgtgtgtggccccaggagaggcagaaccgatctgggtcgtcttatctttctcggatctcggtctaaataatatcaccgccaaggcgctcgcttatggagataccaattgctgccgagacggtcgttcctccaagcacccagaagagaatcacgccgacagacgtgtgccgattggagtggatcacgtacgacggtcagtaatggtagaggctgagggggtgcccagggcttacacctacagcgcctttttttgtccctcagaacgtgtgcacatcagcacccccaataagtacgagttccagtatgtgcagagaccccttcggttgacgcggttcgacgtcgcagtaagagcccacaatgatgctagggtcgccctgagctctgggcctcaggacacggcgggaatgatcgaaatagtactaggcgggcaccaaaatactcgctcatggatttctacctcaaaaatgggcgaacctgtcgcctcagcgcacaccgcgaaaattttaagttgggatgaattccgaactttctggatctcttggcgaggagggctgatccaggtcggacacggaccagaaccaagcaatgagtctgtgattgttgcatggacactgccacggcctcctgaagtccagtttattgggttttccaccggatggggaagcatgggagaatttagaatttggagaaaaatggaggtagacgaatcttactccgaagctttcaccctcggagtgccacacggggcgataccaggatccgaacgggccaccgcttccattatcggagacgtcatgggtcccacactgaatcatttgaataacttgctgcgactgccttttgggtgtggtgaacaaaatatgatacactttgccccaaacgttttcgtacttaagtatctccaaaaaactcagcaattgagcccagaagtggaacgcgagacgactgactacttggttcaaggatatcagaggcagttaacttataaaaggcaagacggctcctactccgcattcggcgagagggatgcttccggcagcatgtggctgacagcattcgtcctcaagtcatttgctcaggctagatcttttattttcgtggaccctagagaactggcggccgcaaagtcttggattattcagcagcaacaagcagatggttctttcctggcagtaggacgagttctgaacaaagatattcagggtggcatacacggtaccgtcccactgaccgcatatgtcgtcgtagcactgctcgaaactgggactgcgtcagaagaagagcgcgggtcaactgacaaagccagacattttttagaatctgctgccccgctggcaatggacccttattcttgcgccttgaccacatatgccctaaccctcctaagaagcccagcagcccccgaggcactgcgcaaacttcgatcgctcgccattatgcgggacggagtgacacattggtctctctcaaacagctgggacgtggacaaaggcacatttctaagcttcagtgaccgcgtgtctcagagtgtggtctccgcagaagtggaaatgacagcctacgccttgttgacatacacactgctgggagatgtcgcagcagctctgcccgtcgttaagtggctttcccaacaacggaatgcattaggcgggttttcttccactcaggatacatgcgtggccctccaggcgctcgctgagtatgccatactgagctacgctggcggtattaacttgacagtctcactagcctcaaccaatttggattatcaggaaacattcgagcttcataggactaatcagaaagtgctacaaaccgccgccattccaagtttacctactggactattcgttagtgccaaaggagatggttgttgcctaatgcagattgatgtcacttacaatgtgccagatcccgtggccaaaccagccttccagctcctggtgtctttgcaggaaccagaagcgcaggggagacctcctcctatgccggcctccgccgccgaaggatctagaggagattggccccccgctgatgacgacgaccccgcagccgaccagcatcatcaagagtataaggtaatgctggaagtttgcacacgctggctccacgctggcagctcaaacatggccgtcctggaagtccccttgctgagtggtttccgagctgacatcgagtcactagaacagttactgttggataaacacatgggcatgaagaggtacgaggttgccggccgaagggtcctgttttactttgatgaaataccaagccggtgcctgacctgtgtgaggttcagggcactcagagaatgcgtagtggggagaacgagcgcactgcccgtctcagtgtacgattactacgaacccgcgttcgaggccacacgcttttacaacgtttccacccattcaccacttgcacgtgaactttgcgcaggtcctgcatgcaacgaagtagagcgagcgcccgctcgcgggcccggttggttccccggcgaatccggacctgctgttgcacccgaggaaggagccgcaatagctcgctgcggctgcgaccatgactgcggcgcacaaggaaaccctgtgtgtgggagcgatggagttgtttatgcctccgcctgtaggctacgggaagccgcgtgccggcaagcagccccactggagcctgccccgccctcctgttgtgccctggagcagaggcttcccgcaagttccagcagtacatacggtgatgacctcgcatcggtagcacctggcccgctgcagcaggatgtaaagctgaatggagccgggttagaagttgaagactctgatccagagcccgaaggtgaagcagaggacagggttaccgcgggtccacgcccccctgtttcttccggtaacctcgagtctagcacgcagtctgccagtcccttccatcgatggggacagacccctgcacctcaacgccatagtggccgcgtcgtcggcgctcatcgtcctggactattaagccccgtcttcgtttattcacccgcttttcaatccgggggggaggaaggactttggatgtctaacacatgcaccctgcgatag

SEQ ID NO: 13632 - RNA, 1209 nt, synthetic construct
  misc_feature 1..1209: note = source = /note="Description of Artificial Sequence: Synthetic coding sequence"
  source 1..1209: mol_type = other RNA
atggtgtgcgctcgggccgctcttggccccggagcattatgggcagcagcttggggtgtcctgctcttgacagctccagcgggggctcagcgggggagaaaaaaagtggtgcacgtgctggaaggcgagtccgggtctgttgtagtgcagacagcccctggccaggtcgtctcacataggggagggaccatcgtactgccttgtcgatatcactacgaagcggctgcacatgggcacgacggggtgagattgaaatggaccaaggtggttgaccccctggcatttacggacgtgttcgtcgccctaggaccccagcaccgcgcatttggcagttacagggggcgggccgagcttcagggagatggaccaggcgacgcctccctcgtgcttcgaaatgtgactctgcaggattatggccgctatgaatgcgaggtgaccaatgagctcgaagacgacgcagggatggttaagttggacctcgaaggcgtcgtattcccttaccaccctagaggagggcgatataagttgacattcgctgaggcacagagagcatgtgcagaacaggatgggatactggcaagcgcagagcagctccatgctgcgtggagggatgggcttgactggtgcaacgcaggctggttaagagatggctccgtgcagtatcctgttaatcgtcccagagagccctgtggaggtctgggaggtactggaagcgctggtgggggaggtgacgctaacggcggcttacgcaactatggctatagacataacgcggaggaacgctatgatgcattctgctttacttcaaacctgcccgggagggtgtttttcttgaagcctctgcgaccagttccttttagtggggccgctcgcgcttgcgctgctcgcggtgccgctgtagccaaagtgggccagctttttgccgcatggaagctacaattactggaccgctgcacagcaggatggctcgcggacggtagtgctcggtatccgatagtgaatcctcgcgccagatgcggtggcagacgccccggcgtccgaagtctcggattccctgatgccacacgtcggctttttggggtgtattgttatagggcccctggtgcacctgatcctgcccctggagggtggggatggggctgggctggtggtggcggatgggctggtggagcgcgtgacccagccgcgtggacccctctgcacgtgtag

SEQ ID NO: 13633 - RNA, 1740 nt, synthetic construct
  misc_feature 1..1740: note = source = /note="Description of Artificial Sequence: Synthetic coding sequence"
  source 1..1740: mol_type = other RNA
atgtcagcattaagaccgcttcttcttcttttgcttccactctgtccgggtcccggccccggtccaggcagcgaagctaaagtgacacgctcgtgcgccgagacaagacaggtgctcggagcccggggatattctttgaacttgataccaccagccctgatatcgggcgagcacctgcgggtctgcccccaagagtatacctgttgttcctctgagactgaacaaagacttatacgagagacggaggcaacttttcgcggccttgttgaggattctggaagtttccttgtacacacactagcagcacggcataggaaattcgacgaattttttctcgagatgctgtcggttgcccaacacagtcttacacagctatttagtcattcatacggccgtctttacgcacagcacgccctaatattcaacgggttatttagcaggctccgagacttctacggcgagtcaggcgagggtctggacgacacactggcagacttctgggcccagctgttggagcgcgtttttcccctacttcacccacaatactcattcccaccggactatcttctttgcctaagccgcctggcatccagtacagatggttcactgcagccctttggcgacagcccaaggcggttacgattgcagattacccggacgctggtcgctgcccgagcctttgtacagggactggaaaccggccggaacgtcgttagcgaagctctgaaggttcccgtgagtgagggatgtagtcaggcccttatgcgcttaattggttgtccgctgtgcaggggagttccttcacttatgccatgccaaggcttttgtcttaatgtcgtacggggatgcttgagctccagaggtctcgagcctgattggggtaactacctggacggtctgcttatccttgctgacaaactccaaggtccgttttctttcgaactgacggccgagtcgataggcgttaaaatttccgagggcctcatgtacctgcaagaaaactccgctaaggtctcagcccaggtgttccaggaatgcggtcctccagaccccgtgccagccagaaatcgcagggccccccctccaagagaagaagctggacgactctggtccatggtgaccgaggaagaaagacctacaacggccgcaggcacaaatctccatcgtcttgtgtgggaactcagagagcgcctggccagaatgcgcgggttttgggcacgccttagcttaaccgtgtgcggcgatagccgcatggcagcagacgcatccttggaagccgctccctgctggacaggggcgggccggggccgatatctgcctcccgtcgtaggaggatcccctgcagaacaagtaaacaatcctgaattgaaggtggacgcatcagggccagacgtacctactaggcgaagaagactccagttacgcgccgcgaccgctcgtatgaaaacagccgcactcggacacgatctggacggacaggacgccgacgaggacgcttccggctccggagggggacagcagtacgccgacgactggatggccggtgcagttgctccacctgctcgcccacctcgtcccccctacccacctcgacgcgacggcagcggaggcaaaggcgggggaggatctgctagatacaaccaaggccggtcccgatcaggcggagcttccattggcttccacacgcagaccattctgatattatcactttccgctctggctctgctgggtccaaggtag

SEQ ID NO: 13634 - RNA, 498 nt, synthetic construct
  misc_feature 1..498: note = source = /note="Description of Artificial Sequence: Synthetic coding sequence"
  source 1..498: mol_type = other RNA
atggccctcctggcactgctgctggtggtggctttgcctcgcgtctggactgatgcaaatttgaccgcccgtcagcgggaccctgaagacagccaacggacggacgaaggggacaatcgcgtgtggtgccatgtttgtgagcgggaaaatacgtttgagtgccaaaacccccgtagatgtaaatggacagaaccttactgtgtgatcgctgctgtgaaaatttttccgagattttttatggttgctaaacagtgctctgctgggtgtgctgctatggaacgccctaagcctgaagaaaagagattcctcctcgaagagcccatgccttttttttacttgaagtgctgcaagatcaggtactgcaacctggagggcccccctattaattcatccgtgttcaaagagtatgccgggagtatgggagagtcatgcggtggattatggcttgctattttgctgcttctcgccagcattgcagccggcctatcactcagttag

SEQ ID NO: 13635 - RNA, 933 nt, synthetic construct
  misc_feature 1..933: note = source = /note="Description of Artificial Sequence: Synthetic coding sequence"
  source 1..933: mol_type = other RNA
atgaatggcctgtccctgagtgagctgtgttgtctgttttgttgtccaccctgccccggccggatcgccgctaaacttgcttttctgcctcccgaggcgacctactcactggtgccagaacccgaacccgggcccggtggtgctggagccgcgcctctcggtacattgagagccagctcaggagcacccggacgatggaagctgcacttaacagagcgcgccgacttccaatactcccaacgagagctggacacaatagaggtgtttccaaccaaaagcgcaagaggcaatcgggtgtcatgtatgtatgttcgctgtgtacccggcgcaagatatacggttctcttctctcacggcaacgcagtagacctcggccagatgtcgtcgttttacatcggacttggatcccggcttcattgcaacatcttttcctatgattacagcggttacggagcgtcttccggcagaccaagcgagcggaatttgtacgcagacattgatgccgcgtggcaggcactgagaacccggtacggaatatctcctgattctataatactttacggtcagtcgataggtactgtcccaaccgtcgacctggcttcccgatacgagtgtgctgcagtcgtgcttcattctcccctaacaagcggcatgcgcgtggcatttccagacaccaagaagacatactgcttcgatgccttccccaatatcgaaaaagtgagcaagatcacaagccccgtgctgattatccatggcaccgaggacgaagtgattgatttttctcacggccttgccctgtacgagcgctgtccaaaagcagtagaaccactctgggtggagggagccggccataatgatatcgaattgtactcacagtacctggaaagattgaggcgcttcatttcccaagaactcccctcccagcgcgcatag

SEQ ID NO: 13636 - RNA, 1905 nt, synthetic construct
  misc_feature 1..1905: note = source = /note="Description of Artificial Sequence: Synthetic coding sequence"
  source 1..1905: mol_type = other RNA
atggctcagggcgtgctgtggatccttctgggtctgttgctttggtccgatccgggcaccgcgtccctgcctttgttaatggactccgttattcaggccttggccgaattagaacagaaggttcccgccgctaaaaccagacacaccgcatccgcttggttgatgtccgccccgaactctggaccccataatcgtttgtatcacttcctcctgggtgcctggagccttaatgccacagagttagatccttgccccctatcccctgaactgcttggcctcacaaaagaggtggctagacacgatgtacgtgagggcaaggagtatggagtcgtgctggcacctgacggctctaccgtggccgttgaacctttattggcaggacttgaggccggcctgcagggccgacgagtcatcaacctccccctggacagcatggcggcaccttgggagactggagatacattccccgacgtagttgcaattgcccctgatgtgagagccacaagttccccggggctaagggatggatcaccggatgtcaccactgccgacataggcgctaacacacccgatgcaaccaaaggctgcccagatgttcaagcatcactccccgacgctaaagcgaaatcccccccaaccatggtggacagcttgctggctgtgactcttgccgggaatctcggcctgacgtttctgaggggctcccaaactcagagccaccccgacctaggaactgaagggtgttgggaccagctctccgcccctcggactttcaccttgttagaccccaaagcttctcttttaaccatggcgttcctcaacggcgcgttagacggtgtgattttgggcgactacctcagccgaacccccgaacccaggccctccctctctcatctcctgagccagtactacggagctggagtggctcgagatcccgggtttagaagtaattttagaagacagaacggcgccgccttgacaagcgcatccattctggcccagcaggtctggggtaccctagtgctacttcaaagactggaaccggtgcatctacagcttcaatgcatgtcgcaggaacaactagctcaagtggcagcaaatgctaccaaagagtttacagaggcgtttctcggatgtcctgctatacaccctcgctgccgttggggcgctgccccatacagagggagacccaaacttctgcagcttccgttaggatttctctacgtccatcacacgtatgtccccgcccccccttgtactgacttcacacggtgtgccgccaatatgagatcaatgcagagataccatcaggatacacagggttggggagacatcggttacagtttcgtggtaggatcagacggatatgtatacgaaggcagagggtggcactgggtgggggcacacacactcggacacaatagtagagggtttggagtggccatagtgggtaattatactgcagccctgcctacagaagctgctctgagaacagtacgtgacaccttgccttcctgcgccgttagagccggcttgctcagaccagattacgccctgctcgggcaccgccagttggtgcgcaccgactgcccaggcgatgcactcttcgatttactgcgtacctggccacatttcacagctgtttctctcaggtccctccattacaccgcccgccgaccaagtgtttatacgtcaagtacccggccccttccacctgcctgtaacagttgtgccagaaccgcctccgcgagaccacccacgagccgccgacatgtgtacagcgggaacctgggccctgccttcgccggtcactctgcaggaaacatacccgacccagttacttcagcctacgccgccagcgcccagccccaaacacagcctgcctgtccattcccatcgagttag

SEQ ID NO: 13637 - RNA, 777 nt, synthetic construct
  misc_feature 1..777: note = source = /note="Description of Artificial Sequence: Synthetic coding sequence"
  source 1..777: mol_type = other RNA
atgttggtgctttacggccactccacgcaggacctgcctgagacgaacgcgcgcgtggttggaggcaccgaagccggacgcaattcctggccgtcccagatttccctccaatacagaagtggaggatcacgatatcatacctgtggcggaacattgattcgacagaactgggtaatgacagctgcccattgcgttgattatcagaaaacatttcgcgtcgttgctggcgatcacaacctaagccaaaatgacggtacagaacagtatgttagcgttcagaagattgtggtacacccttactggaattccgacaacgtcgccgctggctatgacatagctctcctccggctcgctcagtccgttaccctgaacagttacgtccagctcggagtgctgccacaagaaggcgctatacttgcaaacaactctccatgctatatcaccgggtggggtaagaccaagaccaacggtcaactggcacagactctccaacaggcctatcttcccagcgtcgactatgctatttgttctagctcgagttattgggggtcgactgtcaaaaatactatggtatgtgcagggggtgatggcgtaagaagtggatgtcaaggtgattctggggggccgctacattgcttagtgaacggcaaatatagtgtgcacggtgttactagcttcgtgtcttctaggggctgtaacgtttcaagaaaaccaacagtgttcacgcaagtatccgcatatattagctggattaataacgtaatagcttctaattag

SEQ ID NO: 13638 - RNA, 993 nt, synthetic construct
  misc_feature 1..993: note = source = /note="Description of Artificial Sequence: Synthetic coding sequence"
  source 1..993: mol_type = other RNA
atggccgccaggcgttcccagcgcaggagaggcagacgcggcgagccgggcactgccctgctagtccccttagcgcttggccttggtcttgctctcgcgtgtttgggcctcctgctggcagtggtaagcctcgggtcacgtgccagcttgtcagctcaggaacctgcccaagaggaactggtggctgaagaggaccaagacccatcagagcttaaccctcagactgaggagtctcaggaccctgcgccctttttgaatagacttgtcagacccaggagaagtgcacccaaaggacggaaaactcgcgctcggagagcaatagccgcccattacgaagtccacccacgacctggtcaggatggtgctcaagcaggagtcgatggcaccgtgagcggttgggaagaagcacgaattaactcaagcagccctctacggtacaataggcagatcggtgaatttattgtgaccagagcaggactgtattacctttactgccagtcttcagacgctctagaggcctgggaaaacggcgagcgaagtaggaaaagaagagccgtcctgacccagaagcagaagaagcagcatagtgttcttcaccttgtccccattaacgctacgagtaaagacgatagtgacgtgaccgaagtgatgtggcagccagcattgcgacgtgggagaggattacaagcacaggggtacggagtccggatacaggacgctggcgtatacctgctctactcacaggtcttatttcaagacgtaacattcacaatgggccaggtagtgtcgagggagggacagggccggcaagagaccctgtttcggtgcataagatcaatgccctcccacccagaccgcgcctataattcttgttattctgccggggtgttccatcttcaccagggcgatattttaagcgtcatcatcccacgagcgcgggccaaactgaatcttagccctcacggaacttttctaggctttgttaaactgtag

SEQ ID NO: 13639 - RNA, 2253 nt, synthetic construct
  misc_feature 1..2253: note = source = /note="Description of Artificial Sequence: Synthetic coding sequence"
  source 1..2253: mol_type = other RNA
atggcaaagccccgcctgttggtattatatttcgcactaatcgtggtacccgcttgggtgtcaagcatcgttctcaccggaacctctgaaccccccgatgcacagaccgtagcccctgccgaagatgaaacgctccaaaacgaggcagataaccaagaaaatgtgttaagccagctcctcggtgattatgacaaggttaaggccatgagcgaaggtagtgattgccaatgtaaatgcgtggtacgaccactaggtcgcgacgcttgtcagaggatcaatgccggtgcgagccggaaggaagacttttacacagtggaaaccatcacctcaggctcgagttgcaaatgtgcgtgtgtggcaccgccatccgccctgaacccgtgtgagggcgactttcgtctgcaaaagctgagggaagccgatagccaggatcttaaactgagcacgattattgatatgctagaaggggctttctacggactagacttgttaaaattgcactcagtgacaaccaagttggtaggcagagtcgataagctggaagaggaagtgtccaaaaacctgacgaaagaaaatgaacagattaaagaagatatggaggagatcagaactgaaatgaataaaagaggcaaggaaaattgcagcgagaacatcctggattcaatgccagatattcgtagcgcactccagcgagacgccgccgcagcctatgcacatcctgaatacgaagaaagatttttgcaagaggagacagtgtcacaacaaattaactctatagagctactccagacacgccctcttgcgctgccggaagttgtgaagtcccagaggccattgcagaggcaggtgcacctgagaggcagacccgctagccagcccacagttataagaggtattacatactacaaagccaaagtgtcagaggaagagaacgatattgaagaacaacaggacgaattctttagcggagacaacggagttgatcttctgattgaagatcagttgctcaggcataacgggctgatgacctccgtgacgcgacgacctgccgcaactcgtcaaggacattccacagctgtcacttccgatctgaacgctagaactgcgccttggtcttccgccctgccacagccatccactagcgacccttcaattgcaaatcacgcttctgtgggcccaaccctgcaaactacctcagtctcgccagatccaacccgcgagagcgttcttcagccatccccccaagtgccagccaccactgtggcccacaccgcgacccaacaacccgctgcaccagctccccccgccgtgtcgcctcgggaggccctgatggaagccatgcataccgtccctgtaccgcccacaactgttcgaaccgattccctgggcaaggacgctcctgcaggctggggcactacccctgcaagccctaccttgagccctgaagaggaagacgatattcgcaatgtgattggaagatgtaaggacaccctatctacgattaccgggccgaccacacaaaatacatatggccggaatgaaggagcctggatgaaagaccccctggctaaggatgagcgaatatacgtcactaactactattatgggaacacactcgtcgaattccgaaatctggaaaattttaagcagggaagatggagcaattcttataaattaccgtacagctggattgggacaggccatgtggtatataacggcgcattctactacaatcgcgcgtttacacgcaacatcatcaagtacgatctgaaacaacgctatgtagcagcttgggccatgctccatgatgtcgcctacgaggaggctacaccatggcggtggcagggccattctgatgtcgattttgcggtagacgaaaacgggctgtggctgatctacccagccctggacgatgagggtttttctcaagaggtgatcgtgctgtctaaattgaacgctgcagacctgtcaacccagaaggagacaacttggcgcactggacttaggcgaaatttttacggcaattgctttgttatctgcggagtgctttatgcagtggattcatacaatcaacgaaatgccaatatcagttatgcttttgatacacacacaaacacccagatcgtcccacgattattattcgagaacgaatatagctataccacccagatcgactataatccgaaagatagactactctatgcttgggataacggccaccaggttacctaccatgtcatttttgcatattag

SEQ ID NO: 13640 - RNA, 678 nt, synthetic construct
  misc_feature 1..678: note = source = /note="Description of Artificial Sequence: Synthetic coding sequence"
  source 1..678: mol_type = other RNA
atgaaattaggatgcgtgttaatggcatgggctctctacttgtccctcggagtgttgtgggttgctcagatgctgcttgcggcagggtgtcacgcagaactgttcccagcaccgattctcagggccgtgccatcagcagaaccacaagccgggtccccaatgacgttatcttgccaaactaaactgcctctgcaacgctcagcagcaagactcctgttttctttttacaaggatggacgcattgtgcagtctagaggcttgtcatctgaattccagatcccaacagcctccgaggaccattccggaagttactggtgcgaggccgccaccgaagacaatcaggtgtggaaacagagtccccagctagagatccgagtgcaaggtgcaagctcaagcgccgctccacctacactgaatcctgccccacagaagagtgcagcccctggcaccgctcccgaagaggccccgggccccctgccgcccccgcctactccttcatccgaagatcctggattctcttctccactcgggatgcccgatcctcacctgtaccaccaaatgggactcctactgaaacatatgcaggatgtgagagtgctgttagggcacctgttaatggaactcagagagttaagtgggcatagaaagcctggaactacaaaagctaccgcagagtag

SEQ ID NO: 13641 - RNA, 891 nt, synthetic construct
  misc_feature 1..891: note = source = /note="Description of Artificial Sequence: Synthetic coding sequence"
  source 1..891: mol_type = other RNA
atgtcccgccaggaacccaagatgtttgtactcctgtatgtaacatccttcgcaatctgcgcgagtgggcagccacgggggaaccaacttaaaggagagaactactcacctcggtacatttgttccatacccggactacctggaccaccaggtccaccaggcgcaaatggatcacccggaccacatggacgtataggcctgcctgggcgcgacggtagagacggtcggaagggcgagaaaggagagaaaggcaccgcaggactgcgtggaaaaactggccctctgggactggctggtgagaaaggggaccagggcgaaacaggaaaaaagggacccattggacctgaaggtgaaaaaggcgaggtgggacccattggacccccgggaccaaagggcgaccgcggtgaacaaggggatcctggactgcccggcgtgtgtagatgcggctccatcgttctgaaatccgccttttccgtaggcatcaccacgtcgtacccagaggaaagactccccataatcttcaataaagtgttattcaatgagggagaacattacaatcctgcgaccggcaaattcatttgtgcattccccggtatctattatttttcatatgatatcaccctcgcaaataaacaccttgccatcggattagttcataatggtcaatataggataaagacatttgacgcaaacactgggaaccatgacgtcgccagcggctcaacagtgatctacttacagccggaagacgaggtgtggctcgagatattttttactgatcaaaatggattgttcagcgacccaggttgggctgacagtcttttttctggcttcctcttgtatgttgatacagattatttggactcgatcagcgaggacgacgaactgtag

SEQ ID NO: 13642 - RNA, 1275 nt, synthetic construct
  misc_feature 1..1275: note = source = /note="Description of Artificial Sequence: Synthetic coding sequence"
  source 1..1275: mol_type = other RNA
atgggcagcttggtattaacactttgtgcactcttctgccttgctgcatacctggtgtctggaagccccattatgaaccttgaacaatctccactcgaagaggatatgagccttttcggcgatgtttttagcgaacaagacggtgttgattttaatacccttctgcagtcaatgaaggatgaatttctgaaaactctcaatctgtccgatattcccacccaggacagcgctaaggtcgaccctcccgaatacatgctcgaattgtataataagttcgcaacagataggacctcaatgccctctgccaacatcatacgttccttcaaaaacgaagatcttttttcgcagcctgtttcctttaacgggctcagaaagtacccactcctatttaatgtctcaatcccacatcacgaagaagtgattatggctgagcttagactgtatacgttagtgcagcgcgaccgcatgatttacgatggtgtagatcggaaaataaccatttttgaggtgctggaatcaaaaggagataacgagggcgagaggaatatgctagtgttagtcagtggtgaaatttatgggaccaactcagaatgggaaacatttgatgtaaccgacgccattcggcggtggcagaagtctggctcttccacacaccaattggaggtacatattgagtctaaacacgatgaggccgaagacgcatcatccggtcgcctcgaaatagatacctctgcccaaaataaacacaaccccctgcttatagtgttttctgacgaccaatctagcgataaggagcggaaagaagagctgaacgagatgatttcacatgaacagctgcctgaattggataatctgggcctagactcatttagcagtggacccggagaagaagctcttctccagatgagaagtaacattatctacgatagtacagctagaattagacgcaatgccaaggggaactactgcaaaagaacacccctctatattgacttcaaggagattggctgggactcatggattatcgctccccctgggtatgaagcctacgaatgccgcggagtgtgtaattaccctcttgctgagcacttaacgcccaccaaacatgccatcatacaagcccttgttcacttaaaaaactcacagaaagcttccaaagcctgctgtgtaccaactaagcttgagcctatcagcattctctaccttgataagggagtggtgacttacaaatttaaatacgaaggcatggcggtatcagaatgtggctgtagatag

SEQ ID NO: 13643 - RNA, 381 nt, synthetic construct
  misc_feature 1..381: note = source = /note="Description of Artificial Sequence: Synthetic coding sequence"
  source 1..381: mol_type = other RNA
atgcacctgagccagctgttggcctgcgcactgctccttacactgctaagtctgagacccagcgaagcaaagcccggagccccacccaaagtgccccggacacccccagccgaggaattagctgaaccacaagcagcaggcggaggtcagaaaaaaggggataaggccccgggaggaggtggagccaacctaaaaggagatcgcagcaggctgttaagggacctgcgggtggacacaaaatcacgggcagcctgggcaaggttactgcaagagcatcctaacgcccggaaatataaaggcgcgaataaaaagggacttagtaaagggtgcttcggactaaagctagacagaatagggtctatgtcaggattgggatgttag

SEQ ID NO: 13644 - RNA, 423 nt, synthetic construct
  misc_feature 1..423: note = source = /note="Description of Artificial Sequence: Synthetic coding sequence"
  source 1..423: mol_type = other RNA
atgcgctctccccggatgcgcgtgtgcgccaaatccgtgttgttgagccactggctctttctggcctatgtgttaatggtctgctgcaaactcatgtcagcatcatctcagcacttgcgcgggcatgcgggacatcatcagattaagcagggtacatgcgaagtggtcgccgtgcatagatgttgcaacaagaaccgaattgaagaaagaagccagaccgtcaaatgcagctgttttccgggacaagtcgccggcaccacccgggcgcagcccagttgtgtggaagcttctattgtgatacagaagtggtggtgccatatgaacccctgccttgagggggaagattgtaaagttctgcccgactactcagggtggtcttgctctagcggtaataaagttaaaacaaccaaggttactagatag

SEQ ID NO: 13645 - RNA, 1332 nt, synthetic construct
  misc_feature 1..1332: note = source = /note="Description of Artificial Sequence: Synthetic coding sequence"
  source 1..1332: mol_type = other RNA
atgttgatgttgtttgtgttcggcgtcctcctacatgaggtgtctctgtccggacagaacgaagcaccaccaaacacccactcaatacccggcgaaccactgtacaactatgcaagcatacgactacccgaggaacacatacctttctttctgcacaacaatagacacattgcaaccgtctgtcgcaaagactctttatgcccttataagaagcacttagagaagctgaagtattgctgggggtacgaaaagagctgcaagcctgagtttcggtttggctaccctgtttgttcttatgtagacatgggatggacagacacactcgagagcgctgaggatattttttggaaacaggccgacttcgggtacgccagagaacggctcgaagagatgcatgtgctatgtcagcctaaagaaaccagtgactcatctctggtatgctcacgatacttgcaatattgccgcgcaacaaacctgtacctggaccttcggaatattaaacgtaaccatgaccgatttaaagaggacttttttcaaagcggtgagattggcggtcactgcaagctggacatccgcactctaacttctgaaggccaaagaaagtcccctttacagtcttggtttgccgaactgcaaagctacactcagctcaacttccgcccaattgaggacgccaagtgtgatatcgtcattgagaaaccaacctacttcatgaagctggacgccggtgtcaatatgtaccatcatttctgcgatttcatcaatttgtatataacccagcacgttaacaattctttttcaaccgacgtctatatcgttatgtgggacacagacggaaagatacgagtgaccatcctcgcaaggtctacggagtacaggaagatactgaaccagaacgaactagtgaatgctttaaagacagtctcgacttttgaagtgcagatagtagattacaagtatcgagagctggggttcctggatcagcttcgtatcactcacaacacagacattttcatcgggatgcatggcgctgggctgacacacctgttgttccttccagactgggctgcagtctttgagctctacaattgcgaagacgaaaggtgttatcttgatcttgctagactcagaggggtgcactatatcacttggcggcggcaaaacaaggttttcccccaagacaaaggccatcatccaactttaggcgagcatccaaaattcacgaattatagttttgacgttgaggaattcatgtacctcgtgttacaggcagccgatcatgtacttcagcatcccaaatggcccttcaagaaaaagcacgacgagttatag

SEQ ID NO: 13646 - RNA, 336 nt, synthetic construct
  misc_feature 1..336: note = source = /note="Description of Artificial Sequence: Synthetic coding sequence"
  source 1..336: mol_type = other RNA
atggggccttcttcttgcctgctgcttattctgatcccactcctacagctaatcaatcctggcagtactcagtgttccttggactcagtaatggacaagaaaattaaagatgtgttgaacagcctggagtactctcccagtccaatttccaaaaagttgtcctgcgcctccgtcaaatcccagggacgcccttcatcatgccccgccggaatggctgtcacaggatgtgcctgcggttatgggtgtgggtcatgggacgtccagctcgaaaccacatgtcactgtcagtgtagtgtagtggattggactaccgcgcgttgctgccacctaacctag

SEQ ID NO: 13647 - RNA, 1965 nt, synthetic construct
  misc_feature 1..1965: note = source = /note="Description of Artificial Sequence: Synthetic coding sequence"
  source 1..1965: mol_type = other RNA
atggcccctaagaaactgagctgtttgagatctcttttacttcctctctctcttaccctactactcccccaggccgataccagatcttttgtcgtagaccgcggtcatgaccgctttctgttagacggggcccctttcagatacgtctccggttcacttcactacttcagagtccctcgcgtgctctgggccgaccggttactcaagatgcgctggtctggtctcaacgcaattcagttctatgtgccctggaactatcacgagccacagccgggtgtttacaactttaatggatctagagatctcatagcttttctgaatgaggcagcacttgcaaacctactcgttatactccggcctggaccttacatttgtgcggagtgggaaatgggcggactgcctagctggctattgaggaaaccagaaatccatcttagaacatcagacccagatttcctggccgcagtggactcatggttcaaggtgttactcccaaaaatttacccctggctctatcacaacggaggaaacatcatcagcattcaagtggagaatgagtacggatcataccgcgcctgcgatttttcttatatgaggcacctggccggactgtttagagcactgcttggcgagaaaattctgttattcaccaccgatggccctgaaggcctgaagtgcggcagcttaaggggactgtataccacagtcgatttcggccccgctgacaacatgacaaagatcttcaccctgctccgtaaatatgagccccatggccctctcgtaaattctgaatactatacgggctggcttgactattggggacagaaccactcaacccgatccgtttctgccgtcacgaagggtcttgaaaatatgttgaaactgggagccagtgtgaacatgtacatgttccacggcgggaccaactttggctactggaatggggccgataagaaagggcgatttttaccgataacgactagttacgactatgatgctcccatatctgaagctggagatccaactcccaaactgttcgctttaagagatgttatctcgaaattccaggaagtgcctctgggtcctctacctccgccaagccccaaaatgatgttaggtcccgttactctacatttggtgggccatctattagcatttttggacctgttgtgcccccgcggccctattcactccatattgccaatgaccttcgaggcagtgaaacaggaccatggcttcatgctgtataggacttacatgactcacacaatctttgaaccaacccctttctgggtgcctaataacggcgtacacgatagggcttatgtgatggtagacggagtatttcagggagtggtggagagaaatatgagggataaactgttcctgacgggaaagctcggcagtaaattagatatcctagtagagaatatgggccgtctttctttcggctccaacagtagtgatttcaaaggacttctgaaacctcccatcctggggcaaaccatcctgactcaatggatgatgttccctctgaagatcgataatttggtgaagtggtggttcccgctgcagttgcctaaatggccctatccccaagcaccctctggccctactttctatagtaagacctttcctatactcggtagcgtgggcgatacattcttgtaccttcccggatggactaagggacaagtttggatcaatggctttaatctgggtaggtactggacaaaacaaggccctcagcaaactctgtatgtcccccgctttctgttgttcccccgcggcgctttaaacaagataactctgctggaacttgaagatgttcccttacagccccaagtacagttcttagacaaacccatcctcaactctacttccactttacatagaacccatattaactccctttctgctgacacactgagcgcgtctgaaccaatggagctctcgggtcactag

SEQ ID NO: 13648 - RNA, 2502 nt, synthetic construct
  misc_feature 1..2502: note = source = /note="Description of Artificial Sequence: Synthetic coding sequence"
  source 1..2502: mol_type = other RNA
atgaatatggagattggacacccccacgaaggcaaggatgatttaggcgataagagggtgataatgggaaccaagtttcccatggagttgggcattcgcgtaggtttgggcaaagaagatagcaggtgcggtgaatctccggtggtcagcaacaagtgtgagggacgcatggcacccccagagaccaaattcccactgtctaaagggctggagatgggactcgaacggcagaacatttctcgcaccgtgatgcagcggggttccctcggcgtggatagcgtgtcagcaagccagggaaccaagcccagcctgttgcctggtagaatgggtctggaaaacgaatcactgctggccgggtacacacacgaacgaataatacagccacctcttggccgcgtgtgcggaagctcccaggctgctgggagtcgtcgcgctcccctggcaagtggtcctgaaggagttgaagaattagttggcaaacccgcttttgttatggagcctaggcaagaaatggagaaggagagcacctgcgttttgatgaaacccaacacagaaataaaacttcctgtggaggtggacatcgggctgacccaagcggagggtccggacgaaacgaaaaatactgagccccagatgggactggtgattgaaccacctcaatgccaattcgctcaacagcatgaacagaggaaagaggcaggaaacatcgaatccggggtagagccacctgacaggatccgcccgatctatagcggcaaattcttcgaccgcaccccgtgttggccgtctgccggcaaagtcattcccgtaggttatagagtggctacctgcttgaccgagaagctaccaagattgataactcctcccgaagcaaaaaagtacttcaatttccgatatccccctgcaggggtcgaacgcgtgttttacggcagagctaacgacccgcaaattgctccctacttgactcatgggattcgttccaaaatttccgtcctggctaatactctcattaatccccagccaattaccaccttccagcaaaagataaaggataagaaggaaagtatctatctctccaaccgccgtgcaccactcggcaagtctcacgaccaggctcccggactccctaaaggcatggatacgaccaacaccaccttcggaaccgccgtgattaaagaatattctgccaaagatgtagtaaacccaccaaagtcgtatgaagaagtgttcaaagaaggcaatgaaggtcacgatctttacgtggtgtcgcataatgactattatgcaggagaagcaaagaatcgcaaatataatccctcatcattccaccggtgcagcgtttatggagttcctacccctcatttcaacgacggccgagcaatggccaaaagcctatactggctgcacgagctgcaaatgaagcggggcgccaagttcgtatcaaaaagggccgatgacttcaaagagaagtttcaacacaaattgggcagggtgctggaccctatagctgaaaccatgaatgtccctcctgactgtacctttggagcgtgcctccgccctgaagaatacggggtaggagatctgatacataacagactccctgacgaatatcttcgcggcaaggaccgccaacgagcactgattgcagctgtgagacatcatttaaaaaaggtgaactatcagaagtttgacacactcctggcagcatttcggcattacgataagaagggagatggaatgattgacaaagacgagctgcaagaggcctgcgaccaagctaacctgtcccttgatgacaagctcctggaccagctttttgattattgcgacgtggacaacgatggatttatcaactacctggaatttgcaaactttctgaactggaaggataaaatgctgctcaaagaatacgaagaacgcgttattataaaaggaaggaagcccgactgcgtgaatccaacagaagctaatgtcgaagagccagagcagactctactcataaagcccgaggacatcgtacttaaggaggctggaagcacagagaaaacactgagaacactcctccgccctagtgataaggtgagtaactactacaaaacaactagctcagagatcaacgctatcgttggggctataccatcaacgtgctatccaatttgcggcgtcccaacgatcagaagcgacatcccagctccaagaatacgaagaataagcgacagaaccaattatggagaggaagggtccgcctacagccttctgtatccaactatctttgccaggaaaggtgtgtttgaacgggatttctttaagaccaggtcaaaagaggagattgctgagatactgtgcaatatcggcgtgaagttatccgatgaagagttcgaaaacgtctggaacctcgcatccaagaaacatcatagaggagaagtctgtgtagagaatatccgcaacgtgctcgacgaactaagacatgccgatcggattaaatgtaagactttaatgtag

SEQ ID NO: 13649 - RNA, 2004 nt, synthetic construct
  misc_feature 1..2004: note = source = /note="Description of Artificial Sequence: Synthetic coding sequence"
  source 1..2004: mol_type = other RNA
atgggttcatctcgccttgccgcactgttgctgccacttctccttatcgtcattgatctgtctgacagtgcagggattggttttcgacacctccctcattggaacactcggtgtcccctagcctcgcacactgacgatagcttcacaggctccagcgcatacatcccatgtcggacatggtgggcattgttcagtacgaaaccatggtgcgtccgggtatggcattgttcgaggtgtctatgtcagcacttactctccggcggatccggcctgcagcgtggtctgttccatctacttgtccaaaagagtaaaaagtcaagcacgtttaagttctatcgaaggcacaaaatgcccgctccagcacagaggaagctattgcctagacgacatctttctgagaaatcgcatcatatatcaattccctcccctgacatttcacataaggggctccggtctaaaagaacccagccaagcgacccagaaacctgggaatccctcccccgcctcgattcgcagcggcacggcggtcctgaattctccttcgacctcctcccagaggcgcgggcaatcagagtaaccataagtagcgggcctgaagtgagtgttagattatgtcaccagtgggccctggaatgcgaagagttgagttccccttatgacgttcagaagattgtgtctgggggccatactgtggaactgccatacgaatttttactgccttgtctgtgtattgaggcttcttatctgcaagaagacacagtgaggcgcaagaaatgtccttttcaatcctggcctgaagcttatggtagtgacttttggaaatccgttcacttcacggactacagtcagcatactcaaatggtaatggctctcacactgcgctgcccattaaagctggaggctgccctgtgccagcggcacgactggcataccttgtgcaaagatctccccaatgctaccgctcgagagtccgatggctggtatgtattagagaaagtggatcttcaccctcaattgtgctttaagttcagttttggcaattcctctcacgttgaatgcccccatcagaccggcagtctcactagttggaacgtttcaatggatacccaagcacagcagttgattcttcatttctcctccaggatgcatgccacgtttagcgctgcttggtctctacctggcttaggacaagacacacttgtgcctccggtgtacacagtttcacaggccaggggctcctcccctgtgagtttggatcttattatcccattcctgcgtcctggctgttgcgtgctagtctggagaagtgacgttcagttcgcttggaagcacctcctgtgccccgatgtctcgtatcgccatctgggactgctgatactagcacttttggccctgctcacccttctaggcgtggtactcgccctgacgtgcagacgccctcaatccggaccaggccccgccagacctgtccttcttttacatgctgccgattctgaggcccagagaaggctcgtcggggccctggccgaactgctccgagctgctttgggcgggggacgagacgtgattgttgacttgtgggagggtagacatgtcgcccgggtcggtccactcccctggctttgggccgccagaacgcgagtggcccgtgagcagggtacagtgctgcttctctggtccggcgccgacttacgtcccgtatcaggccccgatccaagggccgcgcctttacttgcattactccacgctgcccccaggcctcttctactgcttgcttatttcagccggttgtgcgctaagggcgatatcccccctccgctgcgggctctcccccgataccgactcctgcgagatctccctcgcctgctgagagccctggacgcgcgccctttcgctgaagctacctcgtggggcagattaggcgctaggcagagaagacagagtcgccttgaattgtgcagtcgacttgaacgcgaagccgctcggttagcagatcttgggtag

SEQ ID NO: 13650 - RNA, 609 nt, synthetic construct
  misc_feature 1..609: note = source = /note="Description of Artificial Sequence: Synthetic coding sequence"
  source 1..609: mol_type = other RNA
atggaactgtggggagcttacctgctactgtgtttattctcactactgacgcaggtgacgacagaacctcctacccagaagccaaagaagattgtgaacgcaaaaaaagacgtcgttaacacaaaaatgttcgaggagctgaaatcgcgcttagatacattagcccaggaggttgcattactgaaggaacaacaggctttacagaccgtgtgtttgaagggtactaaagttcacatgaaatgctttcttgcattcacacaaactaaaaccttccatgaagccagtgaggactgcattagtcgagggggcacgcttgggacccctcagactgggagcgaaaacgatgcactctacgagtaccttagacagtcagtgggcaacgaagcagaaatatggctgggactaaatgacatggccgccgaaggaacatgggttgacatgacaggtgccagaatcgcatataagaactgggaaactgagattaccgcccagcccgacggcggcaaaactgaaaactgcgccgtactgagtggcgctgctaatggaaagtggtttgataagagatgccgggatcaacttccttacatttgtcagtttgggatcgtgtag

SEQ ID NO: 13651 - RNA, 1839 nt, synthetic construct
  misc_feature 1..1839: note = source = /note="Description of Artificial Sequence: Synthetic coding sequence"
  source 1..1839: mol_type = other RNA
atgcttgagggcttgggctccccagctagtccacgtgccgctgcctctgcctctgtagccggctcttccggccccgctgcttgctcaccaccatcttcaagtgcaccacgctccccagaatcgcccgccccaaggcgtggaggagtgcgcgcctctgtgcctcagaaacttgcggaaatgctgtccagccagtatggactcattgttttcgtcgctggactgctccttcttctcgcgtgggcagtgcacgccgccggtgtatctaaatcggatctactgtgctttctgaccgctctgatgttacttcaactgctgtggatgctgtggtatgtcggtaggtcaagtgcacatagaagactgtttcgactgaaagacacccatgcaggcgcaggctggttacgcggctcaattacattgtttgcggtaatcactgtgatcctcggctgcctcaaaattgggtacttcattggattctccgagtgtctgtcagcaacagaaggcgtgtttccggtcactcatagtgttcacacgcttctccaggtgtacttcctttgggggcacgccaaggacatcatccaatcctttaaaacgttagaaaggtttggcgtaattcattctgtatttaccaacctcctcctttgggctaatggagtcttgaatgaaagcaaacatcaacttaatgaacacaaagagagacttatcactctgggatttggaaacatcactacagttcttgatgatcacacaccacaatgtaactgcacaccccccactttgtgtaccgcaataagccacggaatttactatttatacccgtttaacattgagtaccagattctagctagcacaatgttgtatgtgctgtggaaaaacatcggccgcaaagtagactcccaccagcaccagaagatgcaattcaagagtgatggagtgatggtgggtgctgtcctgggccttactgtgctcgctgccaccatcgccgtggtggtcgtgtacctaattcatataggtaggtcaaaaaccaagagtgagtctgctttaattatgttttatttatacgcaataacactactaatgctgatgggagctgccggactagctggtatcaggatatatcgaatcgacgagaagagtctggatgagtcaaaaaatcctgcaagaaaattggacagtgacctgcttgtcggaaccgcttccggctcatggttaatttcatggggatccattctcgccattctctgtgcagagggccaccccaggtatacttggtacaacctaccttattccatccttgctatagttgagaagtacattcagaacctgtttatcttcgaaagtatccatcgcgaacccgaaaagttgagcgaggatatccagaccttacgagtggtgaccgtctgcaatggcaacacaatgccccttgccagctcctgcccaaaaagcggtggagtcgcccgcgatgtggcaccccagggaaaagacatgcccccagccgccaacgggaacgtttgtatgagagagtcccacgacaaggaggaagagaagcaagaagagtcaagttggggaggctctccatcacctgtgcgactaccccgctttcttcaaggtaatgcaaaaagaaaggtgctgagaaacatcgccgccttcctgttcctatgcaacatatccctgtggattcctcccgcgttcgggtgtcgccccgagtatgacaacggcctagaagaaatcgtgttcggtttcgaaccgtggataatagtggtgaatctcgccatgcccttctccatcttctaccgcatgcacgctgctgctagccttttcgaagtgtattgtaagatctag

SEQ ID NO: 13652 - RNA, 786 nt, synthetic construct
  misc_feature 1..786: note = source = /note="Description of Artificial Sequence: Synthetic coding sequence"
  source 1..786: mol_type = other RNA
atggagcttctccaggttaccatcctgttcctcctaccttctatttgctcctcaaacagcacgggagtcctcgaagccgcaaacaattccctggtggtcactaccactaagccaagcattactacaccaaatacagaatcactccagaagaatgtcgtaacccccaccaccggtactacacccaagggcaccattacaaatgaactgttaaagatgagcctcatgagcactgccaccttcttgacttccaaagatgagggtctcaaggcaacgacaactgacgtgagaaagaacgattccatcatcagcaacgtaacggtgaccagcgtcactcttccgaatgccgtctcaactcttcagtccagcaagcctaaaacagaaacacagtcaagcataaagactactgaaattccaggaagtgtgctccagccagatgcgtctcctagtaaaaccggtacactgacatcaatccctgttactatccccgaaaacacctctcagagtcaggttattggaaccgaagggggcaaaaatgccagcaccagcgcgactagccgatcgtactccagcattatactgcccgtggttatagcactaattgttatcaccctgtctgtgttcgtgctggtgggattgtataggatgtgttggaaagctgaccccggaactcccgagaatggaaatgatcagcctcagtctgacaaagaatctgtgaagctcctgaccgtaaaaactataagtcatgaatctggggaacactcagcccaaggcaaaaccaagaattag

SEQ ID NO: 13653 - RNA, 6408 nt, synthetic construct
  misc_feature 1..6408: note = source = /note="Description of Artificial Sequence: Synthetic coding sequence"
  source 1..6408: mol_type = other RNA
atgcctgccctgggaccagcactcctgcaagcactgtgggccggctgggtcttgacactccaaccactgccccctaccgctttcaccccaaacggaacctacctgcagcaccttgcacgcgaccccacatcaggcactctttacctgggcgcgaccaacttcctctttcaactctctcctggactgcaactggaggccacagtgagcaccggacccgtacttgatagccgtgactgtctgcccccagtgatgccggacgagtgccctcaagctcagccaacaaacaacccaaatcagcttcttcttgtatctccaggcgccctcgtcgtgtgcggctccgtccaccaaggggtatgtgaacagcggcgactgggacagctggaacagcttctcctgagacccgagaggccaggtgacacacagtatgtggctgccaatgaccccgccgtttcaacagtcgggttggtcgcacagggccttgctggcgagccattactatttgtgggtaggggctacacatcacggggagtgggcggcggtatccctccaattactacccgtgccctctggccacccgatcctcaggctgccttttcctatgaagagaccgcgaaacttgcggtggggagacttagtgaatactcccatcattttgtgtcagcatttgcgcggggtgcctcggcgtactttttattccttcgaagggatctgcaggcacaaagtagagctttcagagcttacgtgagtcgcgtatgtcttagggaccagcactactattcttacgttgagcttcccttggcatgtgaaggcggaagatacggattgatccaggccgctgctgtggcaactagtcgcgaagtcgcccacggtgaggtgctttttgccgcttttagctctgccgccccgccaaccgttggccgcccacccagtgccgctgctggagcgtcgggcgcaagtgccctatgtgccttcccactggatgaggtggacagattagcaaatcgcactcgggacgcatgctacacccgcgaaggccgcgcagaggatggaacggaagtcgcttacatcgagtatgatgtcaactctgattgtgcacaacttcccgtagatacattagatgcctacccatgtgggagcgatcacaccccttcaccaatggcctccagagttccactggaagcaacaccaatactcgaatggcccggaatccagcttaccgccgttgcagtaaccatggaggatggccacacaatcgcttttctcggagattcgcagggacaattacacagagtgtacctgggaccagggtcagatggacacccttattcgacacaatcaattcagcagggctcggctgtgtctagggacctaacttttgacggaacatttgaacacttatacgttatgacacaatcaactctgctcaaagtacctgtagccagctgtgctcagcatctggactgcgcctcatgcctggctcacagggacccatattgcggctggtgtgttttactgggcaggtgttcccggcggtcagagtgcagccgaggccagggacccgaacagtggctatggtccttccaaccagaattgggctgtttacaggtggcagctatgagccccgcaaacatctcgcgggaagagacaagagaagttttcctttcagttcctgatcttccccccttgtggcctggtgaatcttattcttgccacttcggggagcaccagtctcccgctttgttgaccggttccggtgttatgtgtcccagtcccgacccttctgaggccccggtactcccccgcggcgccgattatgtgtccgttagtgttgagctaagatttggggctgttgttatagcaaagactagtctgtccttctatgactgtgttgctgtaaccgaacttcgaccatcagcccagtgccaagcctgcgtgtcttccagatggggttgcaattggtgtgtgtggcagcacctgtgcactcacaaagcgtcatgtgacgccggccccatggtcgcaagtcaccagagtcccctcgtgagcccagacccgccagctaggggtggcccttccccctctccccccacagctcctaaggccctcgcaactcccgcaccagacactctgccagtcgaaccgggcgcaccgagcaccgcaaccgcatctgacatctctcctggggcttctccttcacttctatctccatggggcccatgggctggatcagggagcatttcttctccaggtagcactggtagtcctctgcacgaagaaccgtctccgcccagcccgcagaacggaccaggaaccgcagttcccgcacctacagatttcaggccttctgccacccccgaggatctcttagccagcccactctccccgtccgaagtggccgccgtccctccagctgatcccgggcccgaggccttacaccctaccgtcccattagacctgccccctgccacggtgccagccactacttttcccggggcaatggggtctgtgaaacctgctctcgactggcttaccagggaaggaggcgaactgcccgaagccgacgaatggaccggcggcgatgctccagctttctcaaccagtaccctgctcagcggcgacggcgactctgcggaattagagggcccgcccgcccccctgattctcccaagttcacttgactatcagtacgacacaccggggctgtgggagctggaagaagctacacttggagccagctcctgtccttgcgttgaatctgtacagggatctacactgatgccagttcatgttgagagggaaatccggcttttgggtagaaatctgcaccttttccaagacggtcctggagataacgaatgcgtgatggaattggagggactggaagtggtagtcgaagcccgcgtcgagtgtgaacctccacccgatactcaatgtcacgtgacatgccagcagcatcaacttagttatgaagccctacagcctgaactccgggtgggattgttcttacggagagctggccgtctgcgagtggactctgctgaaggactgcacgttgtgctttacgattgcagcgtgggtcacggagattgttcacgctgtcaaaccgcgatgccccagtacggctgtgtctggtgcgagggtgaaagaccaagatgtgtcaccagggaagcatgtggcgaagcagaagccgtggctacacaatgccccgcgcccctgattcattccgtcgagccccttacaggcccggtagatggagggaccagagtgacgataagaggatcaaatctgggacagcatgttcaggacgtgttaggtatggtcactgtggccggcgtgccgtgtgcagtcgatgcccaagaatatgaggttagttcgagcctggtgtgcatcacaggggccagtggtgaggaggtggccggagcaaccgccgttgaagtgcccggtaggggaaggggcgtgtccgagcacgatttcgcttaccaagacccaaaagtacactcgatcttccctgctagaggaccacgcgcgggtggcactagactcaccctgaacggatccaaattattaacggggcgcctagaggacataagggtggtggtgggagaccagccatgtcatctgctacccgagcagcagtccgagcaattgagatgtgaaacgtccccacggccaacaccagcaaccttacctgtggccgtatggtttggcgccacagaacgaaggctccagcgaggccaattcaaatatacactggacccaaatattacctctgcagggccaacaaaaagcttcctcagcggcgggcgggagatatgcgtgagaggacagaacttagatgttgtgcagacccctcgcattcgcgtgactgtagtctctagaatgcttcagcccagccaggggctgggcaggcgcaggcgagttgtgccagaaaccgcctgttccctcggcccatcctgttcctcacagcagtttgaggaaccgtgccatgtcaatagtagccaactcattacctgccgcacacccgctctcccaggcctccctgaagatccatgggtccgagtcgaattcatccttgacaacctagtctttgacttcgccaccttaaacccaactcccttctcctacgaagctgaccccacactccagccactgaatcctgaagatccaaccatgcccttccggcacaaacctggctccgtattttctgtggaaggtgagaacttggatctggccatgagcaaggaagaagtagtagctatgattggtgacggcccttgtgtcgtgaaaactctcaccaggcaccatctatactgcgaaccacccgtggaacagcccctccctagacaccacgcactacgcgaggcacccgactctttacctgagtttaccgtgcaaatgggaaatcttcgattttcgttagggcatgtacaatatgatggcgaatctccaggcgcattccccgtggcagcacaggttggcctgggggtagggacttctctcctggcactgggcgtaatcatcatcgtgctgatgtaccgccgtaaaagcaagcaggctctgagagactataaaaaagtacagattcaactggaaaatctagaatcatccgtgagagatcgatgcaagaaggagtttacagacctaatgacagaaatgacagacttgacttctgacttgctaggttccggcatcccttttctggactacaaggtgtacgcggaacgaatcttttttcctggccaccgtgaatctcctctgcacagggaccttggagtaccagagtcgcgccgaccaactgtagagcagggcctaggccaactgtcaaatcttctgaattctaaactattcctcaccaagttcatacacactctcgaatcccagcgcactttctcagctcgcgatagggcttatgtggccagcctcctcaccgtcgccctgcatggaaaactggagtactttacagacatcctaagaacactgctcagcgacctggtggcgcaatacgtcgcgaaaaacccaaaattaatgctcagaagaaccgagaccgtcgtcgaaaagttacttactaattggatgtcaatttgcttatatacttttgtcagagattctgtaggcgaacctttgtacatgctcttccgcggcatcaagcaccaggtggataagggacccgtcgactcagtgactggcaaagctaaatacacactcaacgataatagattacttagggaagatgtcgaataccgccccctgacccttaacgctcttctggctgttggtccaggcgcaggggaggcccagggtgtgcctgttaaagtactcgattgtgacactatctctcaggctaaggagaaaatgttagatcagctctacaaaggcgtccctcttacccaacgtccggacccacggacccttgatgtagaatggcgcagtggagtcgcgggacatctgattctgagtgacgaagacgttacgtctgaagttcagggcttgtggcggcgactcaacaccctccagcattacaaagtccctgatggtgcaaccgttgcccttgtcccctgcttaaccaaacatgtgctgagagagaaccaggattatgtgccaggcgagcgtacccctatgttagaggacgtagatgagggcggtattaggccttggcatcttgttaagccctcagatgagcccgagccacctaggcctcgccgagggtccctgcgggggggagaaagagaaagagccaaagcaataccagaaatttacctgactagactgctgtctatgaagggaaccctccagaagtttgtcgacgatttattccaggttattctgtcaacatcccgtcccgtccccttggccgtcaaatacttttttgaccttcttgacgaacaggcccagcagcacggtatctccgatcaggacaccattcacatttggaagactaattccttaccattaagattttggattaatatcatcaaaaatccccagtttgtgttcgacgtccagacctccgataatatggacgcagtgctgctggtgatcgcacaaaccttcatggatgcctgtacccttgccgatcataagctgggccgggattcccccattaacaaactgctgtacgcaagagacatccctcgctataagcggatggtcgaaagatactacgctgacatccgccaaaccgtcccagctagcgatcaagaaatgaatagtgtcttggctgaactttcctggaactactccggtgaccttggcgctagagttgccctccacgaactgtacaagtacataaacaaatactacgatcaaatcatcactgccctggaagaagatggtaccgctcagaagatgcagttgggttatcgccttcaacagattgccgctgctgtggagaacaaagtcaccgacctatag

SEQ ID NO: 13654 - RNA, 297 nt, synthetic construct; identical to SEQ ID NO: 12015
  misc_feature 1..297: note = source = /note="Description of Artificial Sequence: Synthetic coding sequence"
  source 1..297: mol_type = other RNA

SEQ ID NO: 13655 - RNA, 1443 nt, synthetic construct
  misc_feature 1..1443: note = source = /note="Description of Artificial Sequence: Synthetic coding sequence"
  source 1..1443: mol_type = other RNA
atgaaacgaagcgtagcagtgtggctgctagttggattatcgctaggggtcccacagttcggtaaaggagatatctgtgatccgaatccctgtgagaacggcggaatttgtttgccagggttggccgatggaagttttagttgcgagtgtcccgacggtttcactgaccctaactgttccagcgtggttgaagtggcaagtgatgaggaggaaccgacgagtgccgggccctgcacacctaatccatgccataacggtgggacttgtgaaatctctgaagcttacagaggagataccttcatcggttacgtctgcaaatgtcccaggggatttaacggcatacactgccagcacaacatcaatgaatgcgaggtggaaccatgcaagaatggagggatatgtacagatctggtggcgaactattcctgcgaatgcccaggagaattcatggggagaaattgtcagtacaagtgtagcggacctctgggaattgaaggcggtataatttccaatcaacaaataacggccagctcaacacatagggctctttttggattacagaaatggtatccctattacgcgcgtcttaacaagaaaggattgatcaacgcctggacagccgcagagaacgatcgatggccctggatacaaattaatctccaacggaaaatgcgcgtcaccggtgtcataacacaaggagctaagagaataggatctcccgagtatatcaaaagttataaaatcgcttattctaacgatggaaaaacgtgggccatgtacaaagtcaaaggcactaacgaggatatggtattccgaggcaatatcgacaataacacaccctacgcgaactctttcacacccccaatcaaggcccaatacgtgcgtctctaccctcaggtgtgccgccggcattgtaccttgcgtatggaactgctcgggtgcgagctgtctggttgctcagagccccttggcatgaagtccgggcacattcaggactatcaaattactgcttcttcgatattccggacactcaatatggacatgtttacttgggaacccagaaaggccagactggacaagcaaggcaaggtcaacgcctggacttctggacataatgaccagtcccaatggctgcaggttgacctccttgtgccgactaaagttacaggaattatcacacagggcgcgaaagatttcggacatgtgcaattcgtgggaagctataaactggcctattctaatgacggcgaacactggactgtgtaccaagacgagaaacagagaaaagacaaagtttttcagggcaactttgacaatgacacgcaccggaagaacgttatcgatcctcctatatatgctagacatatccgaatacttccttggtcatggtatggcaggatcacgcttagatccgaattgttaggttgtacagaggaggagtag

SEQ ID NO: 13656 - RNA, 1323 nt, synthetic construct
  misc_feature 1..1323: note = source = /note="Description of Artificial Sequence: Synthetic coding sequence"
  source 1..1323: mol_type = other RNA
atggctgtcaaactgggaactttactgctggcactggccttagggcttgctcaaccagcgtctgctcggcgcaaactattagtgttcctgcttgacgggttcagaagcgactacatatctgacgaagccctggaatcattacctgggtttaaggaaatcgtcagccgaggcgtcaaggtagactacctgacacctgatttccctagtttatcctatcctaattactatacactgatgactggtagacactgtgaagtgcaccaaatgatcgggaactatatgtgggatcccaccacaaataaatccttcgatatcggcgtgaacaaggatagtctgatgccattatggtggaatggtagtgaacctctgtgggtgacgctaaccaaggctaaaagaaaagtgtacatgtattattggccaggatgtgaagtggagattttaggcgtgcgtcccacatattgtcttgagtataagaacgttcccaccgatatcaattttgcaaatgcagtgtccgatgcactggattccttcaaatccggtcgggccgacctggcggcaatctatcatgaacggattgacgtcgaaggccatcactatggccccgcttctccccagcgaaaagatgccttgaaagcagtggacacagtattgaaatacatgaccaaatggatccaggaaagaggcctccaggaccgactgaatgtcataatcttttctgaccacggcatgactgacattttctggatggataaagtaattgaactgaacaagtatatttctctgaacgacctacagcaggtgaaggatagaggtcctgtggtttccctatggcctgcccctgggaaacattccgagatctataataagctgtctacagttgagcatatgaccgtgtacgaaaaagaggcgattccatcacggttctactacaagaagggtaagtttgtgtcgccattaacactcgtggcggacgaggggtggtttattacggagaatagggaaatgttaccattctggatgaattctactgggagacgcgaagggtggcagaggggatggcacgggtacgacaacgaactaatggacatgcgcggtattttcctcgcgttcggaccagatttcaagtctaactttcgagccgcaccgattcgttcggtggatgtctacaacgtgatgtgcaatgtggtcggtattacaccccttcctaataacggttcatggtcccgcgttatgtgtatgcttaaaggtcgcgcctccacagcccccccggtctggccttcacattgcgccctcgctttgatcctactctttctcctcgcctag

SEQ ID NO: 13657 - RNA, 351 nt, synthetic construct
  misc_feature 1..351: note = source = /note="Description of Artificial Sequence: Synthetic coding sequence"
  source 1..351: mol_type = other RNA
atggaatcttctagagtgagacttctccccctgctgggcgctgccctgttacttatgttacctctgctaggtacgcgggcacaggaagatgccgagctgcaaccacgcgccctggatatttattctgcggtcgatgacgccagtcacgagaaagaactcattgaggctttgcaagaggttctgaagaaactaaagtctaaacgggttcctatttacgaaaaaaagtacggacaagtgccaatgtgcgacgccggcgagcaatgtgccgtgcgaaagggcgcaagaatcggaaaattatgtgactgcccccgcggaacctcctgcaattcatttctcctaaaatgtttatag

SEQ ID NO: 13658 - RNA, 1365 nt, synthetic construct
  misc_feature 1..1365: note = source = /note="Description of Artificial Sequence: Synthetic coding sequence"
  source 1..1365: mol_type = other RNA
atggctcgacctaacaagttcctgctctggttctgttgtttcgcctggctgtgtttcccaattagtctcggctcccaggcttctgggggcgaagcccagattgcagcttccgccgaattagaatccggcgctatgccttggtctctgcttcagcacatcgatgaacgagaccgagcagggcttcttcccgcactgtttaaagttctctccgtgggtcgcggtggtagtcctcgacttcagcccgactccagggcactgcattatatgaaaaagttatacaagacctatgcaaccaaagagggcataccaaaaagcaatagatcccatctctacaacaccgtccgattatttacaccttgtaccagacacaaacaagcaccaggcgaccaagtcacaggcattctgcccagcgtggagttgctatttaacctagataggatcacaaccgtcgagcatctcctcaaatcagtcctgctgtacaacatcaacaattccgtatcgtttagcagcgcagtgaagtgcgtgtgtaacttaatgatcaaggagccaaaatcttcatcaaggactcttgggagggcaccttactctttcacttttaattcccaattcgaatttgggaaaaagcacaagtggattcagatcgacgttaccagcttgcttcagcctctcgtggcttctaacaaaagatctatccatatgagcattaattttacttgtatgaaagaccagctagaacacccaagcgcccagaacggcctgttcaatatgacacttgtgagcccaagcctgatcctctatctcaatgacacttccgcacaagcctatcacagttggtactccctccactacaaaaggcgtccttcccagggtcccgaccaagagagatcgctaagcgcctatcccgtaggagaggaagctgcggaggacggtagaagctcgcaccatagacaccggcgcgggcaagaaacagtctcctcagagctcaagaaacccctaggccctgcgagttttaatctctcagagtatttcagacaatttctacttcctcagaatgaatgtgaacttcacgatttcagattaagtttttcccaacttaagtgggacaattggatcgtggctccacacaggtataaccctcgatattgtaaaggagattgtcctagggctgtgggccaccgttacggttccccagtccacacaatggtccagaatatcatatacgaaaaattggactcgtcagtgccccgcccgtcctgcgttcccgctaagtactctccgctctccgtattgaccattgagcccgacgggagcatcgcttataaagaatacgaagacatgatagctacaaaatgtacatgccgatag

SEQ ID NO: 13659 - RNA, 234 nt, synthetic construct; identical to SEQ ID NO: 12020
  misc_feature 1..234: note = source = /note="Description of Artificial Sequence: Synthetic coding sequence"
  source 1..234: mol_type = other RNA

SEQ ID NO: 13660 - RNA, 912 nt, synthetic construct
  misc_feature 1..912: note = source = /note="Description of Artificial Sequence: Synthetic coding sequence"
  source 1..912: mol_type = other RNA
atgagtgaaccacagccagatctcgagccaccccaacacggcctgtatatgctttttttgctcgtgctggtgttcttcctaatgggcctagtgggattcatgatctgccacgtgttgaaaaagaaaggataccgctgtagaacatccagaggaagtgagcccgatgacgcccagctgcaaccccctgaggacgatgatatgaacgaagacactgttgagcgaatcgttaggtgtatcatacagaacgaagccaacgcagaagctctgaaagagatgctaggagattcagagggtgaaggcactgtgcaattgtcaagcgtggacgctacttcctctctgcaggacggcgcaccttcacaccaccataccgtacaccttggaagtgctgccccatgtctgcattgttcacggagcaagaggccccccctggtgcgccaaggtagatcaaaggaaggaaaatctcggccccgtacaggcgagacaacagtctttagcgttggacggttccgcgttacccatattgagaagagatacgggctgcatgaacatcgcgatggttcacctactgaccggagttggggaagcggaggcggtcaggaccccggtgggggccagggtagtggaggaggacaaccaaaggccgggatgcccgccatggaacgactgccacccgaaagacctcagccccaggtactggctagtccgcccgtgcagaacgggggcctccgcgatagtagccttactcctcgggccctggaaggaaatccccgcgcttctgccgaaccaacccttagagcgggcggtaggggaccctctcctggcctccccactcaagaagccaatggacagcctagcaaaccagatactagcgatcaccaagtgtccctcccgcaaggagccggctcaatgtag

SEQ ID NO: 13661 - RNA, 795 nt, synthetic construct
  misc_feature 1..795: note = source = /note="Description of Artificial Sequence: Synthetic coding sequence"
  source 1..795: mol_type = other RNA
atgcggacactgtggatggcactctgcgcactttctcgactatggccaggcgcccaagcgggatgtgccgaagccgggaggtgctgtcccggacgagaccctgcttgctttgctaggggatggcggcttgacagagtgtatgggacatgtttctgcgatcaggcctgcaggtttaccggcgactgctgtttcgactatgatagagcatgtcctgcaagaccatgctttgttggggaatggtccccttggtccgggtgtgctgatcagtgcaaaccgacaacacgcgtgcggcgaaggagtgttcagcaggaaccacagaatggtggagccccatgccctcctttagaagagcgcgctggatgtctcgaatattctacgccacagggacaggactgcggccatacctatgttccagccttcatcactacctccgcttttaataaagagcggactagacaagctacttcaccccattggagcacacacaccgaggacgccggctactgcatggaatttaaaaccgaaagtcttaccccacattgtgccctggagaattggccgctgacgagatggatgcaatatctgagagaaggctacacagtctgcgtagattgtcagcctcccgctatgaattctgtatctttgcgatgctcgggggatgggctcgactcagacggcaatcagacactacactggcaagcaattggaaatcctcgatgtcaagggacatggaagaaggtgagacgggtcgatcaatgctcctgtccagccgtacactcttttatctttatctag

SEQ ID NO: 13662 - RNA, 312 nt, synthetic construct
  misc_feature 1..312: note = source = /note="Description of Artificial Sequence: Synthetic coding sequence"
  source 1..312: mol_type = other RNA
atgagacaaaggctactaccatcagttacttcactcctgctggtagcactcctcttccctggatcttcacaagcacggcacgtgaaccacagcgcaacagaagctcttggcgaacttcgagagagagcaccaggccagggtacaaatggctttcaattgctgcgacacgctgtcaagcgcgacctactgcccccacgaaccccaccatatcaagttcatatctcccatcgggaagctcgggggccatccttccgaatttgtgtagacttccttggacctcgatgggcaagaggctgttccactggtaactag

SEQ ID NO: 13663 - RNA, 3867 nt, synthetic construct
  misc_feature 1..3867: note = source = /note="Description of Artificial Sequence: Synthetic coding sequence"
  source 1..3867: mol_type = other RNA
atggcgtcagtggcttgggccgttctaaaagtcttactgcttcttcctacccaaacatggtcgcctgtgggagcagggaatccccccgactgtgacgcaccgttggctagtgcattaccacgctcttctttctcctcaagcagcgaattatcgtctagtcacggacctggattcagccggctcaaccgccgagatggggccggaggatggacacccctagtgagtaataagtatcagtggctacagattgatctcggcgagcggatggaggtcacagccgttgcaactcagggtggctacggatcatctgactgggtcacgagctacctacttatgttcagtgacgggggcaggaattggaagcaatatagaagagaagaatccatatggggtttcccagggaataccaacgccgacagcgttgtgcattacaggctgcaacccccatttgaagccaggttcttgcgattcttgccactagcctggaacccacggggccgtatcggcatgcgaattgaggtatatggatgtgcatataagagcgaagtggtgtactttgacgggcagtcagctctgctgtaccgactagacaagaagcctttaaagccaatccgagacgttatcagtctaaagtttaaagcaatgcagagcaacggcatcttacttcacagggagggccaacacggaaaccacatcaccttagagttgattaaaggcaaactggtgtttttcctaaactctggtaatgcaaaactgccatctaccatcgccccagtgactctaaccctgggctccctcctcgacgatcagcattggcatagcgtgctcattgagcttctggatacccaagtgaacttcacagttgacaagcacactcatcattttcaggccaagggggactcctcttacctggacctcaacttcgaaatcagttttgggggcattccaacacctggcagatcgagagctttccgccgcaagagtttccacgggtgcttagagaatctttactacaatggggtagatgtgaccgaactagcgaaaaaacataagcctcagatcttgatgatgggaaacgtcagtttctcctgccctcagcctcagacagttcctgtaaccttcctttcttcccgctcctatctcgcactaccaggtaattcaggcgaagataaggtctcggtgactttccagttccgcacttggaatcgggctggtcatctcctatttggtgaactcagacgtggtagcggttctttcgttttatttttaaaggatggcaaacttaagctaagcctgtttcaacctggccagtcacctagaaatgtaacagcgggggcgggcctgaacgacggacagtggcactccgttagcttcagcgccaaatggtcacatatgaacgtggtcgtcgacgacgacacagccgtacagcctctggttgctgtcctgattgactcgggtgatacctattacttcggagggtgcctagacaactcgagcgggtcaggctgcaaatctccactgggaggatttcagggctgcctcagattaatcacaataggcgataaagcagtcgaccccatcctggttcaacagggggccctgggctctttccgggacttacagatagatagctgcggcatcacagatagatgtcttccaagctattgcgagcacggcggcgaatgtagtcaatcatgggacaccttctcctgcgactgtctgggcacagggtacaccggagaaacatgccatagctctctgtacgagcaatcatgcgaggctcacaagcacagaggaaatccctccggtctgtattacatcgacgcagatggctccggtcctctcggcccattcctggtttactgcaatatgacagctgacgctgcctggactgtggtgcaacatggaggtcccgacgctgtcacactccgaggagcaccttcaggtcatccccggagtgcggtctctttcgcttacgccgcgggcgcagggcagcttagaagcgccgtgaacctggccgagcggtgtgaacagcgactagccctgagatgtggaaccgctagaaggcccgattcgagagatggaacaccactgagctggtgggtaggcaggacaaacgaaactcacacctcttggggcggtagcctgccggatgctcagaaatgtacttgcggactggagggtaattgtatagacagccaatattactgcaattgtgacgccggtagaaacgaatggacctcggacacaatcgtattgagccagaaagaacatcttccagtgacacaaatagttatgactgacgcagggcgtcctcattcggaagccgcctacacattagggccactgctctgcagaggcgaccaaagtttctggaactcagcttctttcaacacggagacaagttatcttcacttccctgcctttcacggagagctgaccgccgacgtttgcttctttttcaagaccacagtttcatctggagtgttcatggagaacctgggaattacagactttattaggatcgagttacgggccccaactgaggtaaccttttcctttgacgtgggaaacggaccctgcgaagtgaccgtacagtccccgacacccttcaacgacaaccagtggcatcatgtacgggccgaacgcaatgttaagggagcttcattacaggtggaccagctgccacaaaagatgcagcctgccccagccgacggtcatgttcgccttcagcttaattcccagttgttcatcgggggtactgcaacaaggcagcgaggctttctgggttgtatcaggtccctgcagttaaacggtgtcgctctggatctggaggaacgcgccaccgtcacacctggcgttgagccaggttgcgctggtcactgctcaacctacggacacttgtgcaggaatggagggaggtgtcgcgaaaagagaaggggtgtaacttgcgactgtgcatttagtgcgtacgacggcccattttgcagcaatgaaatttccgcctactttgccaccggcagcagcatgacataccatttccaggagcactacacactatccgagaactcctcgtccctggtctccagcctgcaccgtgatgtcacccttacaagagaaatgatcactttgagcttcagaacaacccgtacaccatccctccttctttacgtgtcctctttttacgaggaatacctgtcagtgattttggccaataacggctcgttacagattcgatataagctggatcgccaccaaaacccagacgcctttacattcgacttcaagaacatggcagatggtcagctccatcaagtgaaaatcaatagggaagaggccgttgttatggtggaggttaatcagagtactaaaaaacaagtgattttatcatctgggactgaattcaacgcggtgaaatccctgatactcggcaaagtgctagaggccgccggcgccgatcctgacactaggcgtgcagctactagcggattcacgggttgcctcagtgccgtccggttcgggagagccgcgccactgaaagctgcccttagaccctccggcccttctagagtcacagtacgcggacatgttgcacctatggcacggtgtgcggccggggctgcctccgggtcaccagctagagaactggcacccagacttgccggcggtgcagggcggtcaggccccgcggatgaaggcgagccattagtgaatgctgatagaagagacagtgccgtcatagggggagtaatcgcggtggtcatctttatcctgctgtgcatcactgcaatcgccatacgaatttaccagcagcggaaactgaggaaagagaacgagtccaaggtgtcaaagaaggaagagtgttag

SEQ ID NO: 13664 - RNA, 369 nt, synthetic construct
  misc_feature 1..369: note = source = /note="Description of Artificial Sequence: Synthetic coding sequence"
  source 1..369: mol_type = other RNA
atggtcccgggccctccagaatctgtggtgagattttttttatggttttgtttcctcttgcctcccacacgtaaagcatcctgcgaccccagagacttaaaaagctgcaataggccatgtgtgtggtccaggctgctcaagccgaactcaagcctgtcaaatctagagacggcttactttcctcagatcctccgttttcttcggccatggtacttttcccgcagccacctgaattatcaccagaaggccccagcaagatgggagtggttgtactctatttaccgtaaaggtacaaaagcccaaagacgtaatgttttaaggtctccttgcgcacctccccagccttcctggccctgttccgtgatatag

SEQ ID NO: 13665 - RNA, 1887 nt, synthetic construct
  misc_feature 1..1887: note = source = /note="Description of Artificial Sequence: Synthetic coding sequence"
  source 1..1887: mol_type = other RNA
atggccccttccgcagaccctgggatgtcgcgcatgctgccattcctactcctcctatggttcctcccaatcactgagggcagtcagcgagctgagcccatgtttacggcagtgacgaatagtgttttgccacctgattatgattccaatcccacacagcttaattatggagtggcagtgacagatgtggaccacgatggagatttcgaaatcgtcgttgccggctacaacggcccgaatctggtactgaagtacgaccgagcacagaaaagattagttaacatcgccgtggacgaaaggagttccccttattatgctctgagggatcgccagggaaatgccatcggcgtgaccgcatgtgacatcgacggcgatggccgcgaggaaatttacttcctaaacacgaataatgctttctcaggagtcgccacttacacagataagctattcaaattccggaataacagatgggaagacatccttagtgatgaagtcaatgtagcgagaggggtagctagtctctttgcaggaaggagcgttgcttgcgttgatcgcaagggaagtggacgctattctatctacatagccaactacgcgtacggaaacgtaggacccgatgccctaatcgaaatggaccctgaagcatcagacctgtccagagggatacttgccctgcgcgatgttgcagctgaagccggggtgtcaaagtacaccggaggccgcggcgtgtcagtgggaccaattctctccagtagtgcctccgatatcttctgtgacaacgagaatggccctaacttccttttccacaaccgcggagacggtacttttgtggatgctgccgcctcagcaggcgtggacgatccgcatcagcacggaagaggcgtggccctagccgacttcaatcgcgatgggaaggtagacattgtttacggcaactggaacggcccgcatagactttatctgcagatgagtacacacggaaaggtcaggttcagggatatcgctagccctaagttttccatgccaagcccagtgagaaccgtgatcacagcagattttgataatgatcaagagttagagattttttttaataatattgcctaccgctcttcatctgcaaatagactgtttcgagtgattaggcgggaacatggcgatcctctgattgaagagctgaatcctggagacgccctcgaacctgaagggcgggggaccggcggtgtggtgacagattttgacggcgacggcatgctcgatttaatccttagccacggcgaatcaatggcacagccccttagtgtttttcgcgggaaccagggattcaataacaactggctaagagttgtccccagaacccgattcggcgcgttcgccagaggcgccaaagtggttctctatactaaaaagagtggagcgcatttaagaattatcgatggaggctcaggatatctgtgcgaaatggaaccagtggcacattttgggcttggcaaggacgaggcctcttcagtagaagtgacctggcctgacggaaaaatggtaagcaggaacgtggcctccggcgagatgaacagtgtgctggaaatactgtacccccgcgatgaagacaccctgcaagacccagcccccctcgagacacctatgaacgcttcaagctcccattcctgcgctctggagacttcaccgtacgtgtccacccccatggaagcaactggcgctggtcccacaagatctgccgtgggcgcgactagtcccacccgtatggcacagccagcctggggcctctccgctagtcatagagctcccgctccccctcctcctcccctcctgctcccactgcccctcctcttgccactattagaattacctctcctgcaccggtcaagttag

SEQ ID NO: 13666 - RNA, 1008 nt, synthetic construct
  misc_feature 1..1008: note = source = /note="Description of Artificial Sequence: Synthetic coding sequence"
  source 1..1008: mol_type = other RNA
atgcaaggacaggggcgccgccgaggtacatgcaaagatatcttctgctctaaaatggccagctacttgtacggcgttttattcgcggtgggactctgtgcaccaatttattgtgtttcaccagccaatgccccctccgcctaccctcgcccttccagcaccaaatcaacccccgcatcacaagtctattctttaaacacagacttcgctttcaggctctatcggaggctcgtcttggagacccccagtcagaacatcttcttttctcctgccaggatcaactctcacgtgaaaaaaaaaacccagggtaaagtcgtggatataatccaaggcttggatcttctgactgctatggtccttgtgaatcatatcttcttcaaagcgaaatgggaaaaacctttccaccctgaatacactcgtaagaatttccctttcctagtgggcgagcaagttacagtgcacgtgccaatgatgcatcaaaaggagcagtttgcttttggtgtggatactgaactcaactgctttgtgttacagatggactataaaggagacgccgtcgcattttttgtgttaccatctaagggtaaaatgcgacaactggaacaggccctctccgcgagaacactgcgaaaatggtcccatagtttgcagaaaagatggatagaagtttttattccccggtttagcatctctgcatcctacaacttagagaccatactgccaaaaatggggattcagaatgtgtttgacaaaaacgctgattttagcggcattgcgaaaagggactcattacaggtttccaaagccacacacaaagccgtgttagatgtcagtgaagaagggacagaagcgacagccgcgacaaccacaaagtttatcgtgcgcagtaaagacggtccaagctatttcacagtcagtttcaatagaacttttttaatgatgattaccaacaaagctactgacggcatcctttttttgggcaaagtcgagaatccaacgaaatcatag

SEQ ID NO: 13667 - RNA, 768 nt, synthetic construct
  misc_feature 1..768: note = source = /note="Description of Artificial Sequence: Synthetic coding sequence"
  source 1..768: mol_type = other RNA
atggttctcttgttggtcatactcatacccgttcttgtctccagtgcaggaactagcgcccattatgagatgctgggtacttgccgaatggtgtgcgatccgtacggtggaaccaaagctccttctactgccgccacacccgatcgggggctgatgcaaagcctgcccacctttattcaggggcccaaaggagaagccggccgccccggaaaagctggcccccgcggcccacccggcgagcccggaccgcccggccccatgggaccgccaggcgagaaaggcgagccaggacggcagggactgcctgggccgcccggtgcccctggcctcaacgctgctggcgcaatctccgccgccacgtactcgactgtccccaaaatcgctttttatgcaggcctaaagcgtcaacacgagggctacgaagttcttaaatttgacgatgtagtcaccaacctgggaaatcattatgacccaaccactgggaaatttacgtgctcaattccaggcatttacttttttacttatcatgttctgatgcggggaggagatggaacctccatgtgggctgatctttgtaagaacaaccaagtgcgtgcctcagctattgctcaggacgccgaccagaactatgactatgcatctaactctgtggtccttcacctggaaccaggcgatgaggtgtacattaagcttgacggaggcaaggcccatggagggaataacaataagtacagcacgttttcaggattcatcatctacgccgactag

SEQ ID NO: 13668 - RNA, 1617 nt, synthetic construct
  misc_feature 1..1617: note = source = /note="Description of Artificial Sequence: Synthetic coding sequence"
  source 1..1617: mol_type = other RNA
atgtctttctctgcgaccatattattctctcctcccagcggctcagaagcaaggtgctgctgctgcgcttgcaaatccgagaccaatggcgggaatactggctcacaggggggaaatcctcctccatcaaccccaataacggttacaggtcacggtctcgcagtgcaatcctctgagcagttacttcatgtgatctatcaacgagtagataaggcagtgggcttagccgaagccgctctgggactcgctagggccaataacgaactcttaaagcgtctgcaggaggaagttggcgatttgcggcaaggcaaggtatcaatccccgacgaggatggtgagtccagagcccatagtagccctcctgaggaacctggccctttgaaagagagtcccggagaagccttcaaagcattaagcgcagtggaagaagaatgtgattccgtcggctccggcgtccaggttgtgatcgaagaactccgccagctcggtgccgcttctgtaggcccaggacctcttggctttcccgccacccagcgagatatgcgactgcccggctgcactctcgctgctagcgaagcagcccccctcctcaatcctcttgtggacgattacgtggccagcgagggtgccgtccagcgtgtgctagtgccagcttacgcgaaacagttaagccctgccacacagctagccattcagagagccacccccgagaccggacctgaaaacggaaccaagctacctcctcccaggcctgaggacatgcttaacgcagccgccgctttagacagtgccctcgaagagtctggtccgggaagtacaggagaactacgacacagcctagggttaaccgtctctccatgtagaacaaggggaagcgggcaaaaaaattccagacgcaaacgagacctcgtcttaagcaagctggttcataatgtgcataatcatattaccaatgacaaaagattcaatggcagcgagagcattaagagctcatggaatattagtgtagtgaaattcctcctcgagaaactgaaacaagagctggtcacttccccgcacaattatacagataaggaactaaaaggtgcttgtgtcgcatatttcctgacaaaaagacgtgaatacagaaacagcctaaatccattcaaagggctgaaagaaaaagaggagaaaaagctgaggtctagacgttaccggctgtttgcaaatcgatccagcattatgcgtcattttggcccagaagaccagcggttatggaatgatgtgactgaagaactcatgagcgatgaagaagattccttgaatgagcccggagtgtgggtagcccgtccgccccgtttccgagcccagcgcctcaccgagctgtgctaccacctggacgcgaatagtaaacacggaactaaggcaaatcgcgtgtatggccccccttctgatcgccttccatcagctgaagctcagttgctgccccctgagctgtacaatcccaatttccaggaggaggaagacgaaggcggagacgagaatgcccccgggagcccttctttcgaccagccccataagacatgttgcccggatttaaatagttttatcgagattaaagtggaaaaggatgagtag

SEQ ID NO: 13669 - RNA, 2853 nt, synthetic construct
  misc_feature 1..2853: note = source = /note="Description of Artificial Sequence: Synthetic coding sequence"
  source 1..2853: mol_type = other RNA
atgctgctccttggaatactgactctagcgttcgctggacggacggctggaggatccgagcccgagcgtgaagttgttgtcccaattcggctcgatccggatattaacggcagacgctactactggagaggtccagaagattctggggaccaagggctaatctttcagataaccgctttccaggaggacttctacctccacctcaccccagacgcacagtttcttgctcctgcttttagcaccgaacatttgggggtaccactgcaaggattgacgggtggcagttccgatttgagaaggtgtttttattctggtgacgtgaacgcagagcctgactcattcgccgccgtctccctttgcggtggtctcagaggggcctttgggtaccgcggtgctgagtatgttatcagccctctgccaaatgcctcggcccccgccgcccagcgcaactcccagggtgcccatctcctacagcgacgaggtgttccaggcgggccatcaggcgatccaactagccgctgtggcgtcgcatccgggtggaaccccgcaattttaagagccctagatccatacaaaccccggcgcgccggcttcggagagagtaggagccgcaggcgttcgggacgagccaaaaggtttgtgtctatcccccgctacgtagaaacactggtggtagcggacgaatccatggtaaagtttcacggcgcagacctcgaacactaccttttaaccttactggccactgcagccagactgtaccgccacccgtcaatcctcaaccccattaatatcgtggtcgtcaaagtgctcctgttaagggaccgggactctggaccaaaggtaactggcaatgcagcactgactctgcgaaacttctgtgcctggcagaaaaaactgaacaaagtgagtgacaagcaccctgagtactgggacacagcgatcctgtttacgagacaagacttgtgtggagccacaacatgcgacactcttggcatggcagacgtcggaaccatgtgcgatccaaaacgctcttgttcagtaattgaagatgatggactccccagtgcgttcacaaccgctcatgaacttggtcacgtgttcaacatgccccacgataacgttaaagtttgcgaggaggtgtttggaaaactccgtgctaaccatatgatgtctcctactctcattcagattgatcgtgccaatccttggtcagcatgcagtgcagcaatcattactgattttctcgatagcgggcacggagattgtctgcttgaccaacctagcaagccgatatccctccctgaagatctgcccggagccagctataccttgtcccagcagtgcgagttagctttcggagttggatcaaaaccttgcccttacatgcaatactgtacaaaactgtggtgcacgggaaaggcaaaaggccaaatggtttgtcagaccagacatttcccctgggccgatggtactagttgtggcgaagggaagttatgcttgaagggtgcttgtgtcgaacggcataaccttaataaacaccgcgtggacggatcttgggctaaatgggatccctacggcccgtgtagcagaacttgcggggggggcgtgcaattggccagaagacaatgcaccaatccaactcccgcaaatgggggcaagtattgtgagggtgtacgtgttaaatatcgaagttgtaatctggagccctgccctagctctgcatcagggaaaagtttccgcgaagaacaatgcgaagcctttaatggatataaccactcaactaaccgacttactctggcagtggcatgggtacctaaatactcaggagtcagcccgcgggacaaatgcaaactgatctgtagagcaaatgggacaggctatttttacgttctggctccgaaagtcgtggatggaaccctgtgttcccccgactctactagtgtgtgcgttcaggggaagtgcatcaaggccggctgcgacggtaatctcggctctaaaaaaagattcgataaatgcggcgtctgcggaggggataacaagtcatgtaaaaaggtgaccgggctgttcaccaaaccaatgcatgggtataactttgttgtggctatccctgcgggagcgtcgtcaattgatatcagacagaggggatacaagggactcattggcgatgacaactatttggctctgaaaaatagccaagggaagtacctgctgaacggccactttgtcgtttccgccgttgaaagagacttagtagttaagggatcattgctgcggtattctggtacaggcaccgctgtcgaatctcttcaggcttcaagacctatcttagaacctctcactgttgaagtcctctcagtgggcaaaatgacccctccacgcgtgcgatattcattctaccttccgaaagagccccgtgaggataaatcttcccacccaaaagacccgagaggtcccagcgtcttacataactccgtgttatcattatccaatcaagtagagcagccagacgacaggccccctgcccgttgggtggccgggagctggggaccctgtagcgcctcatgtggctccggtctccagaaacgagcagtggactgtaggggaagtgcaggccaacgcaccgtccctgcttgcgacgccgcgcatcgtcccgttgaaacacaagcttgtggtgaaccttgtcctacttgggaattatcagcatggtcaccctgtagtaaatcttgtggacggggctttcagcggagatccctcaagtgcgtcggacacggaggcagactcctcgccagagaccaatgcaatctacaccgtaagcctcaggaactcgacttttgtgtgctacgcccttgttag

SEQ ID NO: 13670 - RNA, 1521 nt, synthetic construct
  misc_feature 1..1521: note = source = /note="Description of Artificial Sequence: Synthetic coding sequence"
  source 1..1521: mol_type = other RNA
atgacaagcaagcctcatagcgactggatcccatactcagtcctggacgatgaggggcgcaatctccgtcagcaaaaattggatagacagagagcactcttagaacagaaacaaaaaaaaaagcgccaagaacccctgatggtgcaggctaatgccgacggaaggcctcgttcacgaagggcaaggcagagcgaagaacaagcacctctggtggagtcatatttaagcagctcagggagcacgtcataccaagtgcaggaagccgacagtctcgcatcagtccagcttggtgcaaccagacctactgcaccagcttctgcgaaacgtactaaggcagccgccaccgccggtggacaaggaggggctgcaaggaaagaaaagaaaggcaagcacaagggcacaagtggtcctgcagccctggcggaggataagtctgaggcccagggaccagtgcagattctcacagtcggacagtctgatcatgcccaggatgcaggcgaaacagctgcgggcgggggagagagaccatctggtcaggatttacgcgctactatgcagcggaagggaatttcttctagcatgagttttgatgaagacgaggaagatgaagaggagaattccagttccagcagtcagttaaactctaacacaaggccatcatcagccacatctcgcaagagtgtcagagaagccgccagtgcgcctagccctaccgcccctgagcagcctgtcgatgtggaagtgcaggacctcgaggagttcgcacttagacccgcccctcaaggaattactatcaaatgcaggatcactagagataaaaagggaatggatcggggcatgtatcccacatattttctgcacttggacagggaagatggaaaaaaagtattcttgctggccggtaggaagaggaaaaaatcaaagacaagcaattacttgatcagcgttgatcccaccgatttgtctagaggcggtgatagttatattgggaaactcaggtcaaaccttatgggcacaaagtttacagtctacgataatggagtgaacccgcagaaggctagctcctccaccctagaatccggcacacttaggcaagaactggctgccgtctgttacgaaactaatgtattagggttcaaaggtccaaggaagatgtccgtcattgtcccgggtatgaatatggtacatgagcgcgtgagcatccgtccacgtaacgaacatgagacgttattagccaggtggcagaacaaaaacacagagtccattatagaactgcaaaataaaactcccgtttggaacgacgacacacagtcgtatgtgctaaattttcacggtagagtgacgcaggcatccgttaaaaattttcagatcatccatgggaacgatcctgattatatcgtgatgcaatttggccgggttgcagaggacgtctttactatggattataactatcccttgtgcgcactgcaagctttcgccattgcccttagctcttttgactctaagctggcatgtgaatag

SEQ ID NO: 13671 - RNA, 594 nt, synthetic construct
  misc_feature 1..594: note = source = /note="Description of Artificial Sequence: Synthetic coding sequence"
  source 1..594: mol_type = other RNA
atggctaagaatgggctcgtgatctgcatcctcgttattacattactgttagaccaaactacctctcacacatcacggctaaaagctagaaaacacagcaagcgtcgggtaagggacaaagatggtgacctgaaaacgcagattgaaaagttatggaccgaggtgaatgcgctgaaagagatccaagctctccagacagtatgcctccggggcacaaaggtacacaagaaatgctacctagccagtgaagggctaaaacacttccacgaagctaatgaagactgtatcagcaaaggtgggatcctggtgatcccccgcaattctgacgagattaacgccttacaagattacggtaagagatcactccccggcgtcaacgacttttggctaggcattaatgacatggtaaccgagggcaagttcgtggatgtcaacgggattgctataagtttcctgaattgggatcgggcccagcctaatggcggaaagagagaaaattgcgtgctcttctcccaaagtgcacagggtaaatggtctgacgaagcttgtcgaagttctaaacgttacatctgcgagttcacgattcctcagtag

SEQ ID NO: 13672 - RNA, 2424 nt, synthetic construct
  misc_feature 1..2424: note = source = /note="Description of Artificial Sequence: Synthetic coding sequence"
  source 1..2424: mol_type = other RNA
aaaaaaaagcggaaaatctccctgctacctaaaccacctaaacacgacgccccacttacaattgaattcccaaacctcgacaagacatcagccgagtggctcaaagtgaatggactgaaagcaaaaaaactgagtttataccaagttctcgcacccaatgcgttcagccctgtggaagaatttgtgcccattttgcagaaaaccgtcagttctaccattcacgagaaggcaatgatccagtttgagtggcatgatggcaccgttaaaaacatacatgttgatccacctttcctatataaataccagcagcagctgtcacgggcaatgaggatgtacgagagaagaattgagtggctgtcccttgcttcaagaaggatctgggggaccgtgtgtgagaagagagtcgtggtcctgctggacatctccgcaacaaattctatgtatatcatccatatccagcatagtctaagactcctcctagaagaacagctgtcaaataaggattgcttcaaccttattgcttttggaagcacaatcgaatcatggcgccccgagatggtccctgtgagccacaataatctacagtccgcctggagatgggctctgaatctccgatgtcgaggcagtaggaatgttttgtccgcattgagaaaggctgtcgaagtagacttcaaagataaagacaagcatcagagccaaggaatttatctgttcaccggtggaatcccagaccaggatatgcccaccctcagcgcttatatggcagaagcctgtgggggatgtgatctccagctcaacgtctgcctgttttatgtgggggaaccgaagatggacaccaccccacccgcccgctacgcttcacacacagatactgcagccgcgtataaggaagtaacacgtgctgcgggaggtcggttccattggttcggtgacacgggcatttacgaatctgacgacatcaatagcattatgagcgagatggagaaggctctcaattatagccagaagtgtgctttcttgatggcttcgcttaagaaccacagtggcaaagtcctcgggtcctcagccctgcccaaggagaaacctaaaacgctgcaactgcgatctcagccaaagaagctctgccccccacgccccacagtccccctgggagcccgaatgtctattaaagatgacccggatagagagaaaagcccacccttgaagtccctaaagtggcgacctttatccagccgagtcggcatatctcccgcagccgcacagcctactaaggaaggcatgatggaactgcgccgaaaaactaaatccagagaagctgaaacgagtcttctgttgttttatacagagaaaggtaacgatgttggtagtgtgtacaagaaatacccacagggaagggggctaaggcgcacatccagctcaatagatctcccacgcaaggataccgtttgttcttcgcaggagtgggtcgctaaatatgggttaaagaagctcaaactagaaatatccaggtgtatgggaccaaattgtacccatcagaaatccgggcagaggtccgctagcgctaaacactgtagtatttttccttcagtggaaatccatggtgtggtgaggcatatccagtggactcctcgcgagatggaagtgtatatcaggcaccttgaaaaggtcttgcgccgttatgtacaacgtttgcagtggttattaagcggtagtaggaggctctttggaactgtcttagagtccaaggtgtgtatcctcctcgatacctcgggtagtatgggcccctatctgcagcaagtaaaaactgaattggtgctgctgatctgggaacagctgagaaagtgttgtgattcgttcaacctcctatctttcgctgagtccttccaaagttggcaggacacacttgtcgagacaacggatgccgcctgtcatgaggctatgcaatgggtgactcacctccaagcacagggctcgacgtccatcttgcaagccctgctgaaagccttctcttttcatgatctagaagggctctatttgttaacagatggtaaacccgacacatcatgctcgctggtgttgaacgaggtccaaaaattaagggagaaacgagacgtcaaagtgcataccataagtctcaattgtagtgatagggctgctgtcgagtttctgcgcaagctggcgtcatttactggaggacggtatcattgtcccgttggcgaagacacactaagcaagattcattctttattgacaaaaggtttcatcaatgagaaagaccccacactgcctccctttgagggcgatgatttacgaatcctggcccaggagataactaaggcacggagtttcttatggcaagcccagagctttcgatcccagttgcagaaaaagaatgatgcagaacccaaagtcactttatcatag

SEQ ID NO: 13673 - RNA, 639 nt, synthetic construct
  misc_feature 1..639: note = source = /note="Description of Artificial Sequence: Synthetic coding sequence"
  source 1..639: mol_type = other RNA
atggtgagtcggatggtttctaccatgctgagtggattactcttctggctggcttcagggtggacccccgcctttgcttacagtccccggactccagaccgcgtctcagaagccgatatccagcgtttactacacggagttatggagcaactgggcattgctagacctagggttgagtatcccgcccaccaggccatgaatctggttggcccgcagagcattgaaggcggagcccacgaaggcctgcagcatcttggaccatttggaaacattcctaatatagtggccgaacttacaggtgataatattcccaaggatttcagcgaagatcaggggtatcctgaccctccaaacccgtgtcctgtgggcaagactgcagacgacggctgcttagagaatacacccgataccgcagaattttctcgcgagttccagcttcaccagcacctattcgaccccgaacatgattaccctggcctcggcaagtggaataagaaactactctatgaaaaaatgaagggaggcgaaagaagaaaaagaagaagcgtgaatccttacctccagggccagcgtctcgataatgtggttgccaagaagtccgtgccccatttctcagatgaagacaaagatcccgagtag

SEQ ID NO: 13674 - RNA, 1524 nt, synthetic construct
  misc_feature 1..1524: note = source = /note="Description of Artificial Sequence: Synthetic coding sequence"
  source 1..1524: mol_type = other RNA
atgtgtaccaagacaattcctgtcctgtggggttgctttctcctgtggaacctctacgtctcctcctcccagactatctatcctggcatcaaagctagaattacccagagagcacttgattacggagtccaggctggtatgaaaatgattgaacagatgctgaaagaaaaaaaactgccagacctttccggtagcgagtccttagaatttctaaaggtcgattacgtaaattacaattttagcaacataaagatatcggctttcagtttcccaaatacttccctggcttttgttcctggcgtgggaattaaggccttaactaatcacggaacagctaatattagtactgattggggttttgaaagtccactgtttcaagacaccggtggcgcagacctcttcctgagcggagtatactttactggcattatcatccttacacgaaacgattttggacacccgacactgaagcttcaggattgctatgcccagctctctcacgcacatgtcagcttttcaggcgaactctctgtgttatacaattccttcgctgagccaatggagaagccgattcttaaaaacttgaatgaaatgctatgccccataatcgcctccgaagtcaaggccctgaacgctaatctgtctacactcgaggtactgacaaaaattgataattatacactgctcgactacagcctgattagcagcccagagataaccgagaattatttggaccttaacctgaaaggcgtcttttatccgctggaaaacctcactgatccccccttttcccccgtgccctttgtgctcccagaacggtcgaattctatgctctatatcggtattgcggaatacttcttcaaatctgcaagcttcgcacattttactgctggagtttttaatgtgaccctgagtactgaagagatttcaaaccattttgtccagaacagccaaggcctaggaaacgtcttatctcgtatcgccgagatatacatactatcacagcctttcatggttcgcatcatggctacagaaccacctatcataaacctccagccaggcaacttcacactagacattccagcctccattatgatgctcactcagccaaaaaactctaccgtcgagactatcgtcagcatggattttgtcgcatctacaagtgttggcctcgtaatcctaggacagagattggtatgctccctctccctgaatcgctttcgccttgcactcccggagtcaaataggagcaacatcgaggttctgcgatttgagaatattttgtcaagtatcctacatttcggcgtgttacctctcgcaaatgccaaactgcagcaaggttttcccctctctaatccccataagttcctgttcgtgaattctgacatagaagtgcttgagggctttctgctaattagcaccgacttgaagtacgaaacaagctccaaacagcagccctcttttcatgtttgggaaggactcaacctgatctcccggcaatggcgagggaagagtgctccatag

SEQ ID NO: 13675 - RNA, 474 nt, synthetic construct
  misc_feature 1..474: note = source = /note="Description of Artificial Sequence: Synthetic coding sequence"
  source 1..474: mol_type = other RNA
atgcatccctggctggggtctgcccttggctttcctaagtgtagggggatacacctgtgcgcatgcggtaacggttggacacctggtgaaacactttctcagaataagacggaaataacaaagaataaggtcacatgttggagaccccatggctgtgagcctaacacgggcctcggctatcaaggatcccacacttctaagtataccctgctgccttggaacctgctcaagacaaagccactgccccccagccacggcaaggaaggcggcaaagaggctaaagtacctagtggtgataactctggacgcggagaggtccccagagcacaggaagggcaggccgcatgtggaagagctgcctctggcgattctcaagaaggtatgcggagaggatatgaggagcgggccacggcacagcgtccagcagtgagatctgccgaaaccactgcccacggaacatggatttacccttag

SEQ ID NO: 13676 - RNA, 213 nt, synthetic construct; identical to SEQ ID NO: 12037
  misc_feature 1..213: note = source = /note="Description of Artificial Sequence: Synthetic coding sequence"
  source 1..213: mol_type = other RNA

SEQ ID NO: 13677 - RNA, 645 nt, synthetic construct
  misc_feature 1..645: note = source = /note="Description of Artificial Sequence: Synthetic coding sequence"
  source 1..645: mol_type = other RNA
atggccctgctgctatgtcttgtttgtttgactgctgcactcgctcacggatgtctacattgccactcaaatttcagtaaaaagttttcattttatcgccatcacgtgaattttaagagctggtgggtcggcgacatccctgtatcaggcgctctgctgactgattggtccgacgacaccatgaaggaactccacctcgctatcccagcgaagattacccgagagaagctggaccaggtggctactgcagtgtatcaaatgatggaccagctttatcagggaaaaatgtacttccccgggtactttcccaatgaactcagaaatattttccgcgagcaagtccatttaatccagaatgccatcatcgagagcaggatcgattgccaacaccgttgcgggatatttcaatatgagacaataagctgtaataactgcaccgactcccatgtggcttgctttggatacaattgcgaaagctccgcgcaatggaaatctgccgtgcagggtctacttaattatattaataactggcataagcaggacaccagcatgagccttgtcagtcccgccctgcgctgccttgagcccccacacctcgctaacttgactttagaggatgcggcagaatgtttgaaacagcactag

SEQ ID NO: 13678 - RNA, 459 nt, synthetic construct
  misc_feature 1..459: note = source = /note="Description of Artificial Sequence: Synthetic coding sequence"
  source 1..459: mol_type = other RNA
atgagcccacacctgaccgctctcttggggctcgttttgtgcctggcgcagaccatccacacccaggaaggcgcactgccccggccttcaatatcagcagaacccggcaccgttatttcccccggttcccacgttactttcatgtgcaggggccctgtgggcgtgcaaacctttcgcctagagcgagaagatagagcgaagtacaaggatagctataacgtgttccggcttggaccttcagaatctgaggcccgcttccacattgattccgtcagcgagggcaacgctggactgtacagatgtctgtattacaaacccccaggatggtcagaacactcagattttctggaactgctcgtcaaagaaagctccggaggaccagattctcccgacactgagccaggctcatctgctgggactgtaccgggcacagaggctagtggattcgatgcgccctag

SEQ ID NO: 13679 - RNA, 900 nt, synthetic construct
  misc_feature 1..900: note = source = /note="Description of Artificial Sequence: Synthetic coding sequence"
  source 1..900: mol_type = other RNA
atggcaccatggtcccacccatcagcccagcttcaaccagtagggggcgatgctgtctctccagctcttatggtgctactgtgtctcggcctttcactcggaccaaggacccacgtccaggcaggcaatctgagcaaagcaactctgtgggccgaaccaggatcagtgattagtaggggcaacagcgtcactatccgttgccagggtacactcgaggctcaggagtatagactagtgaaggaaggaagccccgaaccttgggacactcagaatcccctagagcccaaaaacaaggcgcgcttctccatcccgtcaatgactgaacaccacgcaggcaggtatagatgctactattattcaccagcaggttggtccgagccttcggatccattagaattggttgtcaccggcttttataataaacccaccttgagtgccctccccagcccagttgtgaccagtggagaaaatgtgaccctgcagtgcggtagtcgccttcgattcgaccgcttcatccttaccgaggagggagaccataagttgagctggacactcgactcacagttaacaccttcaggtcaatttcaagcacttttccccgttggcccagtaacaccctctcatagatggatgttgaggtgctacggctccaggcgacacattctgcaagtgtggagcgaaccctcagacctcctggaaattcctgtttctggcgcagccgacaacctgtcaccgagccaaaacaagtcagacagcggcacagcttcacatttacaggattacgccgtagagaatcttattcggatgggcatggcaggattaattcttgtagttctcggaattctcatcttccaagattggcactcccagcgaagcccacaggctgctgccggacgctag

SEQ ID NO: 13680 - RNA, 618 nt, synthetic construct
  misc_feature 1..618: note = source = /note="Description of Artificial Sequence: Synthetic coding sequence"
  source 1..618: mol_type = other RNA
atgaaggtgctgctgctaacaggtctcggagctcttttttttgcctattactgggacgacaattttgatcccggaggactagactatcttgtgctgaatcacatcggcggggcccctgcaggcacccgagcaaggtcaccacaagcaactcgatggcttatgcaggtgaacttcgtgtcttacgtgcagttgacttcaagggcactgcctagtttgactgactcaaagggctcgctcgtcgtcgtatcttcccttctaggtcgagtccccacctcatttagcaccccatactctgccgccaaattcgctctcgatggcttcttcggctccctaaggagagagcttgatgtacaggacgtgaacgtcgcgataaccatgtgcgtgctcgggttacgggatagggccagcgcagctgaagccgttcgaggagtgacaagggtaaaggcggcgccaggacctaaggccgcactggccgtcattagaggaggtgcgaccagggcagcaggcgtgttctacccgtggagatttcggctcctgtgtttacttagaaggtggctcccccggccgagagcatggttcatcagacaggaattgaatgtgactgccgccgccgcttag

SEQ ID NO: 13681 - RNA, 795 nt, synthetic construct
  misc_feature 1..795: note = source = /note="Description of Artificial Sequence: Synthetic coding sequence"
  source 1..795: mol_type = other RNA
atgctgcgctgcggcggccggggcctattgcttggacttgctgtggctgccgctgctgtaatggccgctcgtcttatggggtggtgggggccacgcgcaggctttagattattcattcccgaggagcttagtagatatcgcggcgggcctggagatcctggactgtacctggcattactcggtagagtgtacgatgtgagttctgggagacgacattatgaacctggcagtcattattccggattcgccggtcgagacgccagcagagcatttgtgaccggtgattgttcagaggcaggcttggtagatgacgtgtcagacctctcagcggcagaaatgttaacccttcacaattggctgtccttctacgaaaaaaactacgtctgtgtcgggcgggtcacaggaaggttttatggagaggatgggctacccacacccgcactcacacaggttgaggctgccataactcgaggcctggaagcaaacaagttacaattacaagagaagcagacatttcctccatgtaatgcggagtggagcagcgcaaggggatccagattgtggtgctcccagaaatccggaggggtgtcgagggattggatcggggtacctaggaagctttacaagccaggagcaaaagagccccgctgcgtatgcgtacgtactacaggacctccttctggtcaaatgcctgacaatccaccacacagaaaccgaggggatcttgaccatcccaatctggccgagtatacaggctgcccacctctagccatcacatgttcattcccactttag

SEQ ID NO: 13682 - RNA, 468 nt, synthetic construct
  misc_feature 1..468: note = source = /note="Description of Artificial Sequence: Synthetic coding sequence"
  source 1..468: mol_type = other RNA
atgtctaaacgattactgctgctgctgctgctgtccatgggagggacatgggccagcaaagaaccactccgccctcgctgtcgtccaatcaacgcaaccctcgctgtagaaaaggagggatgccccgtgtgtattaccgtgaacacaacaatttgtgccggttactgtcctacaatgacaagagttcttcagggggtactccccgccctgccccaggttgtctgtaattatagggacgtgcggtttgaatctatacgtctcccaggatgtcctagaggggtgaatcccgttgtgagttatgccgttgccctcagctgccaatgtgccctctgccgccgttctaccactgactgtggcggaccaaaagatcatcctctgacatgcgacgatcccagattccaagactcctcctcttcaaaggccccgccaccatctctgccttcaccctcacgccttccaggtccttag

SEQ ID NO: 13683 - RNA, 498 nt, synthetic construct
  misc_feature 1..498: note = source = /note="Description of Artificial Sequence: Synthetic coding sequence"
  source 1..498: mol_type = other RNA
atggaaatgttccagggactgctattactgctgctgctctccatgggaggaacatgggcgtcaaaggaacctctccgacctcgctgccggccgatcaatgcaacacttgccgtcgagaaagagggttgcccggtctgcatcaccgtcaacactacaatctgcgccggctactgtccgaccatgacacgggtcctgcaaggtgtcctgcccgcccttccacaggtcgtgtgcaactaccgcgacgtgcgattcgaatctatcaggcttccgggatgcccaagaggcgttaatccagttgtgtcctacgccgtggctctttcttgtcagtgtgccctgtgccggagaagcacaaccgattgcggaggccccaaggaccaccctctgacctgcgatgatccacgattccaggactctagctcttctaaagccccgccaccaagcctgccatccccatcaaggctgccaggaccatccgatactcccatcttaccacaatag

SEQ ID NO: 13684 - RNA, 990 nt, synthetic construct
  misc_feature 1..990: note = source = /note="Description of Artificial Sequence: Synthetic coding sequence"
  source 1..990: mol_type = other RNA
atgctgcctcttctgctcggactgttaggacctgctgcttgctgggctttgggcccaacccccggccctggatcatcagaactgagatcagctttcagcgctgccagaacaacacccctggagggtacttctgaaatggctgttacgtttgacaaggtatatgtaaacatcggcggggacttcgacgttgccacgggccagtttcgctgtagagtgcccggtgcatactttttttcttttactgctgggaaagccccacataagagtctgtcagtaatgttggtgaggaaccgcgatgaagtgcaggccctcgcatttgatgaacagagaaggccgggtgcccgccgagccgcgtcccagtccgcaatgctccaacttgattatggtgatactgtttggctgaggctgcatggcgcccctcagtatgcgttaggagcacccggcgcaacgttcagtgggtacctcgtctatgcagatgcagacgccgatgcccccgcgcgcggacctcctgcgccgccagagccacggagtgctttctccgcagcccgtacaagatcgctcgttggatccgacgcagggccaggccccagacatcagcctctcgctttcgacacagagtttgtgaacattggaggagattttgacgctgcggcaggagtgttcaggtgtcgactcccaggcgcttatttcttcagctttacacttgggaaattacctcgtaaaaccctgtccgtgaaacttatgaaaaatcgggatgaggtccaagccatgatctatgacgacggagcaagtcggcgtcgagaaatgcagagccagtctgtgatgctcgccctaagacgaggagacgcggtctggctgctgtcccatgaccatgacggatacggagcgtactcgaatcatggcaagtatattactttttctggcttcctcgtttaccccgacctggcccctgccgctccacccggccttggcgcttcagaacttctgtag

SEQ ID NO: 13685 - RNA, 873 nt, synthetic construct
  misc_feature 1..873: note = source = /note="Description of Artificial Sequence: Synthetic coding sequence"
  source 1..873: mol_type = other RNA
atgcgtaggccagccgccgtgcccctcctactcctgttatgttttggatcacaacgcgctaaagcggcaaccgcttgtgggcgcccccggatgctcaacaggatggtaggcggccaagatacccaggaaggtgagtggccatggcaagtaagcattcaaaggaatggctcacacttctgtggaggcagtctcattgccgagcagtgggtcctgacagctgcacactgcttccggaatacatcagaaacctctctttatcaggtgttgcttggcgctcgtcaactagttcagccgggcccccatgcgatgtatgccagagttagacaggtggaaagcaatccactgtaccagggtaccgcttcatcagcagacgtggcccttgtcgagttagaggctcccgttccattcacaaattacatcctgcccgtgtgtctacctgatccttccgtgattttcgaaaccggtatgaattgttgggtgacaggatggggtagcccctctgaagaagacttgctgccagaaccccggatcttacagaagctggctgtgcccataattgacacccccaagtgcaaccttctgtactctaaggataccgagtttggctatcagcctaagacgattaaaaacgatatgctttgtgcaggttttgaggagggaaaaaaggatgcttgcaaaggtgactcgggaggaccattagtgtgcttagttggacaaagttggctccaggcaggagtgataagttggggagagggctgcgccaggcagaacagaccgggagtctacattcgcgtaacagcccatcacaactggatccatcgcatcatcccgaagctccagttccaaccagccagattagggggacaaaaatag

SEQ ID NO: 13686 - RNA, 792 nt, synthetic construct
  misc_feature 1..792: note = source = /note="Description of Artificial Sequence: Synthetic coding sequence"
  source 1..792: mol_type = other RNA
atggcattcttatggcttctgtcctgttgggctctgctgggtacaacattcggctgcggagtgcctgccatccatccagtactctccggcttgtcccgtatcgtgaacggagaagacgctgtgccaggatcttggccatggcaggttagcctccaggacaaaacagggtttcacttctgcggcgggtcactaatcagcgaggattgggtggtgacagcagcacattgcggagttagaactagcgatgtggtcgtcgccggcgagttcgaccagggttccgatgaagaaaatatacaggtgttaaaaattgcaaaggtctttaagaatcccaaattctccatattaactgttaacaatgacattaccttattgaagttagccacgcccgcaagattttctcaaacagtttctgccgtgtgcctcccaagcgcagacgatgactttcctgcaggcacactgtgcgccactaccggatgggggaaaacaaaatacaatgccaataagacacccgacaagttacagcaagccgctctgcctttgttgagtaacgccgagtgcaagaaatcatggggcagacgaataacagatgtgatgatctgcgccggcgcatctggtgtgtcttcttgtatgggcgattcaggtggtccactggtgtgtcagaaagacggcgcttggacacttgttggcatcgtgtcatggggcagtagaacatgcagtaccactactccagctgtgtacgcccgggtcgccaaattgattccatgggtgcaaaaaatattggcagctaattag

SEQ ID NO: 13687 - RNA, 228 nt, synthetic construct; identical to SEQ ID NO: 12048
  misc_feature 1..228: note = source = /note="Description of Artificial Sequence: Synthetic coding sequence"
  source 1..228: mol_type = other RNA

SEQ ID NO: 13688 - RNA, 762 nt, synthetic construct
  misc_feature 1..762: note = source = /note="Description of Artificial Sequence: Synthetic coding sequence"
  source 1..762: mol_type = other RNA
atggccagatcgttgttgctgcctttgcaaatactgttgctgtcccttgccctagaaacagctggagaagaggcacaaggggataagattattgatggggcgccctgtgctcgaggctctcacccctggcaggttgcactcctcagcggaaaccagcttcattgtggcggcgtgctggtcaacgagagatgggtgcttactgccgctcactgtaagatgaatgagtatactgtccatctcggttccgatactctgggggacagaagagcgcaacgcatcaaggcttccaagagtttcaggcatcccggatacagtacccagactcacgtcaacgatttaatgctcgtcaaacttaactcgcaggcccgactgagttctatggtgaaaaaagtccgactccctagccgctgcgaacctcccggtaccacctgcactgtctccgggtggggtacaactacatccccggacgttacttttccgtctgacctgatgtgtgtagatgtcaagctaataagtcctcaggactgcactaaagtgtacaaggacctcttggaaaactcaatgctttgtgctggaattcccgattcaaaaaaaaacgcctgcaatggggacagtggcggccccttggtctgtcggggaactcttcagggtctggtcagttgggggacttttccatgcgggcagcccaacgatcctggcgtctacacccaagtgtgtaagttcactaaatggattaatgatacaatgaagaaacatcggtag

SEQ ID NO: 13689 - RNA, 480 nt, synthetic construct
  misc_feature 1..480: note = source = /note="Description of Artificial Sequence: Synthetic coding sequence"
  source 1..480: mol_type = other RNA
atgaaggcttgggggacagtcgtggtgacgctggctacactaatggtggttacagttgatgccaaaatttacgaaagatgtgagctggccgcgcgattagagagagctgggctcaatgggtataagggatacggcgttggagattggttgtgcatggcccactatgaatcggggttcgacactgcctttgtggaccacaacccagacggaagcagtgaatatgggattttccagctgaattccgcctggtggtgcgataatggaataacacctacaaagaacctgtgccatatggattgccacgacttgctaaaccgccacattctcgacgatatccgctgcgctaaacagattgttagtagtcagaacggcctctctgcctggaccagttggcgactccactgtagcggtcacgatttgtccgaatggcttaagggttgtgacatgcacgttaagatcgacccaaagattcacccatag

SEQ ID NO: 13690 - RNA, 501 nt, synthetic construct
  misc_feature 1..501: note = source = /note="Description of Artificial Sequence: Synthetic coding sequence"
  source 1..501: mol_type = other RNA
atggcccagaccaacagcttctttatgttgatatcaagcttgatgttcctaagcctctcccaaggccaagagtctcaaacagagctgccaaacccacgaattagctgtccagagggcacaaatgcctacagatcgtattgttactattttaatgaggatcctgagacttgggtggacgccgacctgtactgtcagaacatgaatagcggaaatttagtctcagtacttactcaagccgagggcgcattcgtcgcctcccttattaaagaatctagcaccgatgattctaatgtgtggatcggcttacacgatcctaagaagaatagaagatggcattggagcagcgggtctctggtctcctataagagctgggatacaggctcaccatcaagtgctaacgcaggatactgcgcctccctaactagttgcagcggttttaaaaagtggaaagacgagtcctgtgagaaaaagtttagctttgtctgtaaatttaagaattag

SEQ ID NO: 13691 - RNA, 528 nt, synthetic construct
  misc_feature 1..528: note = source = /note="Description of Artificial Sequence: Synthetic coding sequence"
  source 1..528: mol_type = other RNA
atgcttcctccgatggcgctaccaagtgtgtcgtggatgttactctcctgtcttatgctattgtcccaagtgcaaggcgaggaacctcagcgagaactgccctcagctcgcatccgctgtccaaaaggtagcaaagcttatggatctcattgttatgcactcttcttgagccctaaatcctggactgacgccgatctcgcatgccagaagcggccatccgggaacttggtcagcgtgttgagtggtgccgaagggtcattcgtatcctcactggtaaagagtataggtaacagctactcatacgtctggatcggcctgcacgatccaacccagggcacagaaccaaacggcgaagggtgggagtggtcctcctccgatgtcatgaactattttgcctgggaaaggaacccatctacgattagctctcccggtcactgcgcgtctctctcaaggtccaccgctttcctcaggtggaaggattataactgtaacgtccgcttgccatacgtatgtaaatttaccgactag

SEQ ID NO: 13692 - RNA, 1686 nt, synthetic construct
  misc_feature 1..1686: note = source = /note="Description of Artificial Sequence: Synthetic coding sequence"
  source 1..1686: mol_type = other RNA
atgggggcaaggactccactaccatccttttgggtgagcttttttgcagaaacagggattcttttcccaggtggaacgccatggcccatgggctcccaacacagcaagcaacatagaaaacctggtccactgaaaaggggccatcggagagaccgtaggacaacccggcgcaaatactggaaggagggacgtgaaattgcccgcgtactggacgacgaagggcggaatttgagacagcagaaactagatcggcagagggcccttttggagcagaagcagaagaagaagagacaagagccgttgatggtgcaggctaatgcagacgggcggcctcgaagtcgaagagctaggcagtcagaagaacaggcacctctggtggagagttacttgtcctctagtgggagcacgtcttatcaggtacaggaagccgacagtttagccagcgtccagctcggtgctactcgtcctacagctcccgcctcggccaaacggaccaaagctgccgcaacagcaggaggccagggcggcgccgcacggaaagaaaagaaagggaaacataaaggaacctcaggcccagccgccctcgcagaagacaaaagtgaagcccagggccccgtccaaatcctgactgtcggacaatccgaccatgcgcaggacgcaggtgagaccgccgcaggtggtggcgaacgaccttctggccaggatctgagagcaacaatgcagcgaaaagggatcagttccagcatgtcctttgatgaggatgaggaggatgaagaagagaatagctctagttctagtcaactgaattcgaatacccgcccaagctccgcaacatcccgaaaatctgtcagggaggccgcttctgcaccttctccaaccgccccagaacagcccgtggacgttgaggttcaagacctggaggagttcgcgttaaggcctgctccacaggggatcacaattaaatgcagaattacaagggataaaaaaggaatggaccgcggcatgtaccctacgtatttcctccacttggaccgcgaagacggaaaaaaagtatttctcctggccggcagaaaacgtaaaaaaagcaagacctctaactacctgatatctgttgaccctaccgacctgtcaagaggcggagattcttacatcggcaaactacgatccaaccttatgggcactaagttcaccgtctatgataacggtgtgaacccccaaaaagcctcttcatcgactttagagagcggaacgctgagacaggaattggcagctgtctgttatgaaactaatgtactcggcttcaaaggcccacggaaaatgagcgtgatcgtccccggcatgaatatggtccacgagcgggtatctatcaggcctcgcaatgagcacgagacgctcttggcacgttggcaaaacaagaacactgagagtattatagaacttcaaaataagacaccagtatggaacgacgatacacagtcttacgtgctgaatttccatggcagagtgactcaagcatccgttaagaacttccagattattcacggtaatgatcccgactacattgtgatgcaatttggccgcgttgcggaagatgtgtttactatggattacaactaccctttatgcgctttacaagcgtttgctattgcattaagctccttcgattctaagctggcttgcgagtag

SEQ ID NO: 13693 - RNA, 1272 nt, synthetic construct
  misc_feature 1..1272: note = source = /note="Description of Artificial Sequence: Synthetic coding sequence"
  source 1..1272: mol_type = other RNA
atgatgtatcgcccggatgtcgttagggcacgaaaacgggtatgttgggagccctgggtgattggactggttattttcatttctttgattgttctggccgtttgcattgggcttactgtgcattacgtgaggtataatcagaaaaagacatataactactacagtactttatcatttactacagacaagctgtatgccgaatttggcagagaggcaagtaataattttacagagatgagccaacgattggaatcaatggtcaagaacgcattctacaagtcgccactcagagaagaatttgtgaagtcacaggtcatcaaattctctcaacaaaaacacggagtcctggcacacatgctgctgatctgcaggtttcactccaccgaggaccccgaaaccgttgataagatcgtccagctagtcttgcatgagaaacttcaggacgcggtagggccccccaaggtcgacccacactctgtaaaaataaaaaagattaataagactgaaactgactcatacctgaatcactgctgtggtacacgccggtcaaaaactctaggtcagtcactaagaattgtcggggggacggaggtagaggaaggagaatggccctggcaggcatcattgcagtgggacggaagtcacagatgcggcgcaacactaataaacgcaacttggcttgtgtcagcagcgcactgttttaccacctacaagaaccctgcacgttggactgcttcattcggagtaacaattaaaccaagtaagatgaagagaggcctgcgccggatcattgtccatgagaagtataaacacccatcccatgactatgatatctcactagccgaactctcctccccagtgccgtacaccaatgccgtgcaccgtgtgtgtcttccagacgctagctacgagtttcagcccggagacgttatgtttgtgactgggttcggcgctcttaagaacgatgggtattctcagaatcacctccgacaggcacaggtcacactgatcgacgctaccacctgtaatgagcctcaggcctataacgacgctattacaccaagaatgctttgcgctggctcgctcgagggaaagactgatgcctgccagggggatagtggtggcccgctagtcagcagcgacgcccgggacatttggtatctggccggtattgtgagctggggagatgagtgcgctaaaccaaataaaccaggcgtatatacacgagtgaccgccctccgcgattggattacaagtaagaccggcatctag

SEQ ID NO: 13694 - RNA, 282 nt, synthetic construct; identical to SEQ ID NO: 12055
  misc_feature 1..282: note = source = /note="Description of Artificial Sequence: Synthetic coding sequence"
  source 1..282: mol_type = other RNA

SEQ ID NO: 13695 - RNA, 1530 nt, synthetic construct
  misc_feature 1..1530: note = source = /note="Description of Artificial Sequence: Synthetic coding sequence"
  source 1..1530: mol_type = other RNA
atggatttcctcctcgcccttgttcttgtttcatctctgtatcttcaagctgccgccgaatttgatgggaggtggcctcgccagatcgttagcagcatcggcttgtgtaggtatggcggtcggatcgattgctgttggggctgggcccgtcagagttggggtcagtgccaacccgtttgtcagcctagatgtaaacacggggaatgtattgggccaaacaaatgcaaatgccatccaggttacgccggtaaaacctgcaatcaagacctcaacgaatgtggactcaaaccaaggccttgtaaacaccgatgcatgaacacgtatggatcttataaatgctactgtctgaatggttatatgttaatgcccgacggcagttgtagcagcgcactcacttgttcaatggccaattgtcagtacggctgcgacgtagtaaaagggcagatacgatgtcaatgtccatcaccaggcctgcaattggcgcctgacggaagaacctgtgtcgatgtggatgagtgcgctacaggtagagctagctgccctagattccggcagtgtgtcaacacattcggtagttacatctgcaaatgtcacaagggatttgacctgatgtacattggagggaaataccaatgtcacgatatagacgaatgctcactcggccagtaccaatgctcatcttttgctaggtgttataacattcgcggctcatataagtgcaaatgtaaggaaggataccaaggcgatggcttaacctgtgtgtatattcctaaagtaatgatcgagccatccggcccaatccatgtgcccaagggaaacggcactattcttaaaggggatacagggaacaataattggataccagacgtgggctcaacttggtggccccccaagaccccttacattcctcctatcatcactaatcgccccacttcgaaacccaccactcgccccactccaaagcctacacctattcctacacccccacccccacctccgctgcccaccgaattgcgcaccccacttccccccacaacgccagaacggccaactactggactgaccacaattgcacccgctgcatcaaccccccccggcggcatcacagtagataacagagtgcaaaccgatccccaaaaaccccgaggagacgtgttcagtgtgttggtccacagctgcaacttcgatcacggactatgcgggtggattagagagaaggataacgatttacactgggagccaattagagacccggccggcggacaatatttgactgtatctgctgcaaaagcccctggaggcaaagccgctcggctagtattgccattgggccgtctcatgcacagcggggacctgtgtctctcattccggcacaaggtcacaggcctccatagtggaaccctccaggtgtttgtgaggaaacacggagcacatggagccgccttgtggggacgtaatggcgggcacggatggcgtcagactcagatcacattgcgaggtgccgacataaaaagcgaatcccaacgatag

SEQ ID NO: 13696 - RNA, 381 nt, synthetic construct
  misc_feature 1..381: note = source = /note="Description of Artificial Sequence: Synthetic coding sequence"
  source 1..381: mol_type = other RNA
atggataagagcttactgctcgaattgccaatactcttgtgttgttttagggccttgtccggtagcctgtcaatgcgcaacgatgccgtgaatgaaattgtagctgtgaaaaataatttcccagtgattgagatagtgcagtgtaggatgtgtcacttacaattccctggcgaaaagtgtagtaggggacgaggaatctgtaccgccaccacagaggaggcatgtatggttggcaggatgttcaagagagacgggaacccttggttgacctttatgggatgcctaaaaaattgtgccgatgtaaaaggaatccggtggtcagtatatctcgtcaatttcaggtgctgtcgctctcatgacctctgcaacgaagacctgtag

SEQ ID NO: 13697 - RNA, 537 nt, synthetic construct
  misc_feature 1..537: note = source = /note="Description of Artificial Sequence: Synthetic coding sequence"
  source 1..537: mol_type = other RNA
atggagctgctgcaggtgaccattttgttcctactgccttctatctgttcctccaacagcaccggagtgctcgaggccgccaataactcactcgttgtgaccacaactaaacccagtatcactacgcctaatacagagtccctccagaaaaatgttgttacccccaccaccggaaccacacctaaaggtaccataacgaacgagctgctgaagatgtcccttatgtctactgccacctttctcacgtccaaagacgagggcttaaaggccaccaccaccgatgtgcgcaaaaacgatagcattataagcaatgttaccgtaaccagcgtgaccttaccaaatgccgtatcaaccttgcaaagctccaagcctaaaactgagactcagtcttccatcaagacaactgagatccctggaacccctgaaaacggcaatgatcagccacagtccgataaagaaagcgtgaagctactgaccgttaagacaatctctcacgaaagcggcgaacatagcgcacaaggtaagactaaaaattag

SEQ ID NO: 13698 - RNA, 2544 nt, synthetic construct
  misc_feature 1..2544: note = source = /note="Description of Artificial Sequence: Synthetic coding sequence"
  source 1..2544: mol_type = other RNA
atgttcaagtgttggagcgttgtcctggtgttgggttttatctttctcgagtcagagggaagaccgaccaaggagggtggttacgggctgaagagttaccaacctttgatgaggctgagacacaaacaggagaagaaccaagagagctcccgcgtaaaaggcttcatgatccaagacggcccatttgggagttgcgaaaacaaatattgcggactaggaaggcactgtgtcacctcaagagagactgggcaggccgagtgcgcatgcatggacctgtgcaaacgccattacaagccagtttgcggttccgatggcgaattctacgagaaccattgtgaagtgcacagggcggcatgcttaaagaaacagaagattaccattgtgcataacgaagactgcttttttaagggagataaatgcaagactaccgagtacagcaaaatgaagaacatgttattagatctccagaaccagaaatatattatgcaggagaacgaaaaccccaatggcgacgacatttctaggaagaaactcttagtggaccagatgttcaaatactttgacgctgattcaaacggcttagtggacattaacgagctgacacaggtgattaaacaggaagaactgggcaaagacctattcgattgtaccctctacgtactacttaaatacgacgattttaatgctgataaacacctcgcgctcgaggagttttaccgagctttccaagtcattcagcttagtctcccggaggatcagaagctgagcattacagctgcgactgtggggcaaagcgccgttctgtcttgcgccattcagggaacgctgcgcccacccattatctggaaacgcaacaacattatcctgaataacctcgatctcgaagacataaacgactttggtgacgatggaagtctttatataactaaggtcaccacaactcatgttggaaactacacatgttacgctgacggctatgaacaggtttaccagacacacattttccaagttaacgtccctcccgttatacgggtatacccagagtcgcaggccagagaaccaggcgtgactgcatcccttagatgtcacgcagagggtattccaaagccgcaactgggctggcttaagaatggaatcgatatcacgcccaaactcagtaagcagttaaccctccaagcaaacggctcagaggttcacatctcaaatgtgagatatgaggacaccggagcttatacgtgtatcgccaaaaatgaagcgggtgttgatgaggacatctcaagcttattcgtcgaagacagtgccagaaaaaccctcgccaatatcctgtggcgcgaagagggactggggattgggaatatgttctatgtgttctacgaagacggcatcaaagttattcaaccgattgagtgtgaattccaaagacatataaaaccatcagaaaaacttttgggttttcaagatgaggtgtgtcctaaagctgaaggcgatgaggtccagagatgcgtgtgggcctcggccgtgaacgttaaggataaattcatctacgttgcgcagccaacattggaccgagtcttgatcgtggacgtacagagccaaaaagttgttcaggccgtctccaccgacccagtacctgttaagctacactatgacaagtctcacgaccaagtgtgggtgctcagctggggaactttagaaaagaccagtcctacactgcaggttattaccctcgcgtctggcaacgtcccccatcatacaattcacactcaacccgtaggaaagcagttcgaccgggtagacgatttcttcatccctacaaccaccctgatcattactcatatgcgattcggattcatacttcacaaggacgaagccgccctccaaaagatcgacctcgagaccatgagctatatcaagacaattaatctcaaagattacaaatgcgttccccagtccctggcttacacacaccttggcggatattacttcatcggatgcaaaccagatagtaccggagccgtgagcccccaggttatggttgacggcgtaacggactcagtgattggttttaactctgacgtaacaggaacgccttacgtttcaccggatggtcactacttggtctctatcaacgatgtgaaaggacttgtacgagtgcagtacataactatccgtggggaaattcaagaggcattcgatatttatacaaacctgcacatctcggatctggccttccagccgtcgtttactgaagcacaccaatacaacatatatgggtcctcctccacccagaccgacgtacttttcgtggagctgtcttctggcaaggtaaagatgatcaaaagtctcaaagaaccacttaaagccgaggaatggccgtggaacagaaagaatagacagattcaggattccggactgtttggccagtatcttatgacaccctctaaggactctctctttatcctggacggaagacttaataaattaaattgcgagattaccgaagtggagaagggtaatacagtaatctgggtgggcgacgcgtag

SEQ ID NO: 13699 - RNA, 273 nt, synthetic construct; identical to SEQ ID NO: 12060
  misc_feature 1..273: note = source = /note="Description of Artificial Sequence: Synthetic coding sequence"
  source 1..273: mol_type = other RNA

SEQ ID NO: 13700 - RNA, 1044 nt, synthetic construct
  misc_feature 1..1044: note = source = /note="Description of Artificial Sequence: Synthetic coding sequence"
  source 1..1044: mol_type = other RNA
atgagcagctggtctagacagagacccaaatcccctggaggtattcaaccacatgtgagtcggaccctattcctgctcctgctgcttgctgccagtgcctggggtgttactctctcacctaaggattgccaagtcttccgctcagatcacggaagctctatttcatgccagccacctgcagaaatccccggatacttaccagccgacaccgttcatctcgccgtagagtttttcaacttgacacacttaccagcgaatctcctgcagggtgctagtaagttacaggaactccacctctctagcaatggactcgagtctctatcgcccgagttcctgcggccagtgccacaattgcgggtattagatctaacaagaaacgcattgacaggtctcccccccggtttgtttcaggcaagtgcgacactcgatactcttgttttgaaggaaaaccagctggaggtgctggaggtgagttggctgcacggactgaaagcactgggacacctggatttgtccggaaatagattaagaaagctcccacccggcctcctagctaatttcacattgctgagaaccctcgatctcggagaaaatcagttagaaacgctcccacctgacctgctgagaggaccactgcaattggagcgtctacacctcgagggcaataagttgcaggtgctaggaaaagacctgttacttcctcagccggatctccgttatctgtttctcaacggtaataagttagcacgggttgccgcaggtgcttttcagggtctcagacaactagacatgctggacctgtcaaacaactccttagcttctgttcctgaaggattatgggcctcccttgggcagcccaattgggatatgcgcgacggcttcgatattagcggaaacccttggatctgtgaccagaacttgagcgacttatatagatggctgcaggcacagaaagacaagatgttctcacaaaatgacacgaggtgcgcgggaccggaggccgttaaggggcagacactactcgctgtagccaagtctcagtag

SEQ ID NO: 13701 - RNA, 1407 nt, synthetic construct
  misc_feature 1..1407: note = source = /note="Description of Artificial Sequence: Synthetic coding sequence"
  source 1..1407: mol_type = other RNA
atgccaccctggggcgcagcattagcgcttatcctggctgttttggccctcctgggattattagggcctcgcttacgcggaccctggggaagagctgtaggagaaagaaccttgcccggagcacaggacagagatgatggcgaagaagcggacggcggtggacctgctgaccagttcagcgatgggcgcgaaccattacctgggggctgctctctggtgtgcaaaccttcagcactcgcacagtgcctgctgcgcgcactgaggagatcagaggccttggaagctgggcctcggtcttggtttagcggaccccacttacagacactgtgtcatttcgtccttcccgttgcccccggcccagaactcgcccgggaatatctccagcttgcggacgacgggctggtggccctggactgggttgtaggaccctgtgtaagaggtcgaagaatcacctcagcaggtggtcttcccgcagtcttattagtgatccctaacgcatggggtcgcctcacccgaaatgtactgggtctgtgccttctggctttggagagaggttattaccctgtgatattccaccgcagaggacaccatggctgcccgctcgtaagtccccggctccagccttttggagacccatccgatctaaaggaggctgtcacatacatcaggttccggcatcctgcagcaccattgtttgctgtgtctgagggctctggatccgctctgctgctgtcttacctaggcgagtgtggctcaagttcctatgtcacaggggccgcctgtatttctccagttttgcgctgtagagagtggtttgaagctggtctcccctggccttacgaaagagggtttctcctccaccagaaaattgcactgagcagatacgccacagcattagaagatactgtggatacttcccgtctatttcgttcacgctcccttcgcgaatttgaggaagccctcttctgccatacaaagtctttcccaatttcttgggacacttattgggaccgaaacgatccactgagagatgtagacgaagccgccgtgccagtgttgtgtatctgcagcgcagacgaccccgtgtgtggacctccagaccacaccctgaccactgagctctttcattcaaatccctatttctttctgctactttctcgacacgggggccattgtggttttcttcggcaggagcctcttccggcgtggtctcatgaggtcattctggagagttttcgagctttaactgaattttttcgcacagaggaacgcatcaaaggcctttcaagacaccgggccagctttctgggcggcaggagaagaggcggagcactccaaagaagagaagtaagcagcagctccaaccttgaggagattttcaattggaagcgttcttatacccgctag

SEQ ID NO: 13702 - RNA, 423 nt, synthetic construct
  misc_feature 1..423: note = source = /note="Description of Artificial Sequence: Synthetic coding sequence"
  source 1..423: mol_type = other RNA
atgttttttacgatttcaagaaagaacatgtctcagaaactgagcctgttattgctagttttcggactcatctggggtctgatgctgctacattatactttccagcaacctagacatcaatcatccgtgaaactgcgggagcaaattctggatctctcaaaaagatacgtgaaggcacttgcggaggagaataagaataccgtggacgtggaaaatggagcatctatggcaggatacgccgatctaaagagaaccattgctgtgctgttggatgatatcttacagcgtctggtgaagctcgagaacaaggtcgactacattgttgtgaacggctcagcagcgaatactactaatggaacatctgggaatctcgtacccgttaccaccaacaagagaacgaacgtgtccggctcaatcagatag

SEQ ID NO: 13703 - RNA, 993 nt, synthetic construct
  misc_feature 1..993: note = source = /note="Description of Artificial Sequence: Synthetic coding sequence"
  source 1..993: mol_type = other RNA
cgcggcgctctggtgggggccccacgtagcgctcgtgccagttgcctaagaggccggagaccagggcggaggcagccatgcgggaggtgccccgatcctccacggtccggtccagggcaagcagggagagcaagatgcgcccgggacgtggcagcacagaccgccttagcgcctcgggctctggcccttggggccggcgccgcgggcccaggttggcgcggggccgtacccagacgcccagctgcaagggtaagtagagccgctcagcgtcaggaacaagagttagtcagattgcaccgggagcaggagtgtgagctgcaacccgaacctgcccccccaagaccgagcggacctgccacagctgaggatccaggacggagaccagtgctaccccagcgtccccctgaagagcgacccccacagcctcccggctcgaccggggttatcgccgaaaccggacaggcaggacccccagccggggcaggagtgtctggatacccgaagtctccccccgtggcgtccccaggagcgcctgttccctctctggtgagtttctcagccggcctcacgcaaaagcccttcccctcagacggaggtgtcgtgctgtttaacaaggtgctggtaaatgatggcgacgtgtacaacccttctaccggcgtctttacggccccttatgacggtcgttacttgattactgcgactttaacccctgagagagatgcatatgttgaagccgttctgagtgtgtccaatgcaagcgtggctcagctccacacagctgggtacaggcgtgaatttctggagtatcaccggccccccggcgccctgcatacctgtgggggccccggcgctttccatctaatcgtacatcttaaagctggcgatgccgttaacgtggtcgtcaccggcggtaaactagctcatacagatttcgacgaaatgtatagcaccttctcaggcgtcttcctttatcctttcttgtcccacctgtag

SEQ ID NO: 13704 - RNA, 585 nt, synthetic construct
  misc_feature 1..585: note = source = /note="Description of Artificial Sequence: Synthetic coding sequence"
  source 1..585: mol_type = other RNA
atgtccgccctgtggctccttctaggattgctcgccttaatggatcttagcgagtcaagcaattggggatgctatggaaatatccagtccctcgacacccccggcgcatcgtgtggaattggtcgacggcacgggctgaattactgcggggttcgcgcatccgagcggttagccgagatcgacatgccctacctattgaagtaccagccgatgatgcagacaatcggacagaaatactgcatggatcccgccgttatagccggagtgctaagccggaagtcacccggagataagatcctggttaatatgggcgacagaacttctatggtgcaagatccaggcagtcaagctcccaccagttggatttcagaatctcaggtctcacagacaacggaggtgttgacaacccgaatcaaggagatacagcgcagattccccacttggactcctgatcagtacttaagaggcggactgtgtgcctactccggcggcgcaggctacgttcggtctagccaggatctctcctgcgacttttgcaatgacgttctcgcacgcgcaaaataccttaaaaggcatggcttttag

SEQ ID NO: 13705 - RNA, 273 nt, synthetic construct; identical to SEQ ID NO: 12066
  misc_feature 1..273: note = source = /note="Description of Artificial Sequence: Synthetic coding sequence"
  source 1..273: mol_type = other RNA

SEQ ID NO: 13706 - RNA, 1914 nt, synthetic construct
  misc_feature 1..1914: note = source = /note="Description of Artificial Sequence: Synthetic coding sequence"
  source 1..1914: mol_type = other RNA
atgtcaagaatgcttccattcctcctgctgctctggtttctccccatcaccgaaggctctcagcgcgctgaacctatgtttacagcggtgacaaacagcgttctaccacccgattacgacagtaatccaacacagctgaattacggcgtcgcagtgaccgatgtcgatcatgacggagatttcgaaattgtcgttgccggctataacggccccaacttagttctgaaatatgatagagcccagaaaaggttggtgaatatcgcagttgacgagcggtcctctccttactacgccctgagggacagacaaggtaatgccatcggagttacagcctgtgacattgatggagatggaagggaggaaatttactttttaaatactaataacgctttctcaggggtggctacatacacagataaactcttcaaatttcgcaataaccggtgggaagatatcttgtccgatgaagttaacgtcgcccgtggtgtagcctcactctttgctggtcggtctgtggcatgtgtagatagaaagggttcaggtcgttatagtatctatatcgccaactacgcttacggtaacgtcggtcccgacgcactcattgaaatggacccagaagcatccgacttgtcccgtgggatcttggcccttcgagacgtggctgcagaggctggggtgtcaaagtacactggaggtcgcggggtgagtgttgggcccatattgagctcctctgcaagcgacatattctgtgataacgaaaacggccctaactttctctttcataatagaggcgatgggacattcgtcgacgctgccgccagcgctggtgttgacgatccacaccaacatggacgaggggttgccttggcagactttaatcgggacggaaaagtggacattgtgtacggtaattggaatggaccacatcggctctaccttcagatgagtactcatggcaaggtgcgatttcgagacatagcttcccccaagttcagtatgcctagtccggtacgtactgtcattacagccgacttcgacaatgatcaggagctcgaaatcttctttaataatattgcttacaggtcttcaagcgccaatagattatttagggtgattcgtcgcgaacatggtgaccctttaatcgaggaactgaacccgggcgatgctcttgaaccagagggtcggggcaccggaggagtggtgacggatttcgatggcgatggaatgctcgatctgatcttaagtcacggcgaatcaatggcccagcccctctcagtgtttagggggaaccaaggatttaacaataactggctcagagtagtgccaagaacacgatttggcgcatttgcccgtggagcaaaggtagtattgtacacaaagaaatcgggagcacacctacgcatcatcgacggaggaagtggctatctctgcgagatggaacctgtcgctcacttcggcctggggaaagacgaagccagctcggtcgaagtgacctggccagatgggaagatggtctcaagaaatgtggcaagtggagaaatgaatagcgtgctcgagatcctctacccccgtgacgaagatactctgcaagaccccgcccctcttgaatgtggccaaggattcagtcagcaggaaaacggacattgtatggacactaacgaatgtatccaattcccctttgtctgcccaagagataagccagtttgtgtcaacacctatgggtcttaccgatgccgcaccaataagaaatgttcgcgtggctatgaaccaaacgaagacggaacagcatgcgtggctcaggttgcctttctcggaggttactccagcgctgcatctaggatatctgaacccctcagccgtgccagttatctttctcttggcttaggcctgtgcttacagctgtacgccctgtag

SEQ ID NO: 13707 - RNA, 600 nt, synthetic construct
  misc_feature 1..600: note = source = /note="Description of Artificial Sequence: Synthetic coding sequence"
  source 1..600: mol_type = other RNA
atggccctcaacggcgcagaagtggatgatttttcatgggagccacctacagaggctgaaacaaaggtactgcaggcccgcagagaacgacaggatcggatttcccgcctcatgggcgattatttgctcaggggatatcgaatgctgggtgaaacctgtgcggactgcggcacaatactcctgcaggacaaacagagaaaaatttattgcgtcgcctgccaagaacttgactctgacgtggacaaagataatcctgccctcaatgcccaagctgccctttcccaggcccgagaacatcagctggcaagcgccagcgaactgccactcggcagtcgacccgccccacagccccccgtccctaggcccgagcattgtgaaggagcagcggctggcctgaaagcagctcaaggacccccagctcccgccgtgccacccaatacggatgtcatggcttgtactcaaactgccctattgcaaaagttgacatgggcgtctgccgaactcggaagctctacctctctcgaaacctccatacagctttgtggcctgataagggcctgcgccgaagccttgcgctccctccagcagctgcaacactag

SEQ ID NO: 13708 - RNA, 813 nt, synthetic construct
  misc_feature 1..813: note = source = /note="Description of Artificial Sequence: Synthetic coding sequence"
  source 1..813: mol_type = other RNA
atgaaactgggatgtgtactcatggcatgggccctgtacctgagtctcggagttttatgggtggcgcagatgctgctcgccgctagttttgagaccctccagtgtgagggaccggtgtgtaccgaggaaagctcctgtcacacggaagatgatttaaccgacgcccgagaggctggcttccaagttaaggcgtacacttttagtgaacccttccacctgattgtaagctacgaactcttccccgcacctatccttagagccgtgccctctgcggaaccacaagctggaagccccatgaccctctcatgccagaccaagttaccactgcagagaagtgccgcacgcctccttttcagcttctacaaagatggccgtattgtccagtctagaggattgagctctgagtttcagataccaacagcttcggaggaccattcaggctcatattggtgtgaggccgctactgaagacaaccaagtttggaaacagtcaccacagctcgagataagagtccagggggcctcaagctccgcggcccctccaaccctgaatcccgcaccacagaaatcagcagctccggggacagccccagaggaagctcccggcccacttccacccccacctaccccgtcatccgaagaccctggattctcctcccccctcggcatgccagatccacacttataccatcaaatgggtttgttattaaagcacatgcaagacgtccgtgtgctgctcgggcacctcctcatggaattgagggagcttagtggccacaggaagcctggaaccaccaaagctactgctgagtag

SEQ ID NO: 13709 - RNA, 2421 nt, synthetic construct
  misc_feature 1..2421: note = source = /note="Description of Artificial Sequence: Synthetic coding sequence"
  source 1..2421: mol_type = other RNA
atgaggcttagtcccgcgccactcaagttatccagaactcccgcactgctggcactggccctcccgctagccgccgcgctcgccttttctgacgaaacacttgataaagttcctaaatccgaggggtactgctcgagaatcctgcgagcccagggtactagacgcgaaggatacactgaattctcgttgcgggtggaaggtgatccagacttttacaagcccggcacctcatatcgtgtaactctttctgccgctcctccatcatatttccggggttttacgctgattgccctcagagaaaacagagagggggataaggaagaggatcatgcaggcacattccagataattgacgaagaagaaactcaattcatgagcaactgtcccgttgcggttaccgagagtacccccaggcgtcgaaccagaattcaggttttttggatcgctcccccagcagggactggatgcgttattttaaaggctagcattgtacagaaacggattatttattttcaggacgaggggtccttgactaaaaagttgtgtgagcaagacagtacatttgatggcgtgacagacaagccaattttggactgctgttgcggaacggccaagtatcgactaactttttatgggaactggtctgagaaaacccaccccaaagattatccccgcagagccaaccattggtccgccatcattggcggttcccactctaagaactatgtgctctgggagtatggcggatatgcaagtgaaggagtgaaacaggtcgccgaattggggagcccagttaaaatggaagaagaaatccggcaacaaagcgacgaagttctcaccgtgatcaaggccaaggctcagtggccggcatggcaaccactaaacgttagggcagcaccgagcgctgagttctccgtagacagaactagacacctcatgagcttcctcacgatgatgggtcccagcccagactggaatgtcggactctctgcagaagacctatgcacgaaagagtgcggttgggtccaaaaagtggtacaagaccttataccctgggatgcaggcacagacagcggcgtgacttacgaaagccctaacaaaccaaccatcccacaggaaaaaatcagacccctgacttctttagaccatccgcaaagccccttctatgacccggagggtggatccatcacacaagtggcccgcgtggtgattgaacggattgctcgaaagggcgaacaatgcaacattgtgcctgataacgttgatgatatcgtagcagatttagcacctgaggaaaaggatgaggatgacacacccgagacttgtatctactccaactggagcccatggtccgcatgttcaagtagtacctgtgataagggcaaaaggatgagacaaaggatgttaaaggcccagctagacctctcagtcccatgcccagacacacaagacttccagccatgtatgggtcctggatgttccgatgaggatggctctacctgcacaatgagtgagtggatcacctggtctccctgcagcatctcctgtggcatgggaatgcgctcaagggaaagatatgtgaaacagttccccgaggatggatccgtgtgcacattacccaccgaagagactgaaaagtgcactgttaacgaggagtgctcgccaagctcttgcttaatgactgaatggggagaatgggacgaatgtagcgcaacttgcggtatggggatgaagaaaagacatagaatgataaagatgaacccagctgatggtagcatgtgcaaagctgaaacaagtcaggcagagaagtgtatgatgccagaatgccacacaattccctgcctcctaagcccttggtcagaatggtcggattgctcagtcacctgtggcaagggaatgcgcacacgccagagaatgttgaaatccctggctgaactgggggactgtaacgaggatctggaacaggtagaaaagtgcatgctacccgagtgtcccattgattgtgagttaaccgagtggtctcaatggtctgagtgcaataaatcatgcgggaaaggtcacgtgattaggactagaatgattcaaatggagccacagttcggaggagcaccttgcccagagacagtgcagaggaaaaagtgcaggatccgaaaatgtttaaggaacccaagtatccagaagctgcgatggcgcgaggcaagagagagccgcagatccgaacaactgaaagaggaaagtgaaggggagcaattcccagggtgcagaatgaggccttggacggcatggtctgaatgtactaagctgtgtggaggaggaatccaggaacggtacatgactgtgaagaagcgatttaaatccagccagttcaccagttgcaaagacaaaaaagaaattcgtgcatgtaatgttcacccgtgctag

SEQ ID NO: 13710 - RNA, 4242 nt, synthetic construct
  misc_feature 1..4242: note = source = /note="Description of Artificial Sequence: Synthetic coding sequence"
  source 1..4242: mol_type = other RNA
atgcgccacggggtcgcctgggcccttctggtggccgccgcattgggcttgggggcgagaggggttcgaggagctgtcgcactagccgacttctatccttttggggctgagagaggcgacgcagtgacacccaaacaagacgacggcggcagcggtctccggccactatctgtacccttcccattctttggagcggagcacagtggactgtatgtgaataacaatgggattattagttttctcaaggaagttagtcagtttacccctgtagcgtttcctatcgctaaagacagatgtgtagtggccgccttctgggcggatgtggacaaccgaagggcgggcgacgtctactacagggaagcgacagatcctgcaatgctgcgcagagccacggaggatgtacggcactactttccagaattactagattttaatgccacatgggtattcgttgctacttggtatcgcgtcaccttctttggcgggtcatcatcatcacccgtgaacacatttcaaacagtgcttattacagatgggaaactgagcttcacaatttttaactacgaatcaatcgtgtggactacaggtactcatgctagctccgggggaaacgcaactggcctgggggggatcgcagcccaagctggttttaatgcaggggacggccagcgatacttctctatccctggtagtcggaccgctgacatggccgaggtggaaaccacaaccaacgtgggggtgcctggcaggtgggcatttcgtatcgatgacgcacaggtgcgagtggggggatgcgggcatactacctcagtctgcctggctttacgtccttgcttaaacggagggaagtgtatagatgactgtgttaccggaaacccctcttatacgtgcagctgcttaagcggtttcactggacgtagatgtcacttggacgtgaacgagtgcgcctcccagccatgccaaaacggtggcacgtgtacccacgggatcaattcctttcgttgtcagtgcccggcaggatttggaggaccaacgtgcgagaccgcccaaagtccatgtgatactaaggaatgccagcacggaggtcagtgccaggtggaaaacggaagcgctgtatgcgtctgccaggccggatacacaggagcagcctgcgagatggatgtagatgactgttctcccgatccttgccttaacggtggttcgtgtgtggaccttgtagggaattatacatgtttgtgcgccgagcctttcaaagggctgagatgtgagacaggagatcaccccgtgcctgatgcgtgccttagcgctccctgccataatgggggtacgtgtgtggatgccgaccaggggtacgtttgcgaatgtcccgaaggtttcatgggtttggactgcagagagagggtgcctgatgattgtgaatgtcggaatggaggccgctgcctgggagcgaatactaccctgtgccaatgtcccctgggctttttcgggttactgtgtgagttcgaaatcacagccatgccatgcaacatgaacacccaatgcccagacgggggatactgcatggaacacggggggagttatttgtgcgtatgccataccgatcataatgccagtcattccctcccttctccttgcgacagcgacccctgcttcaacggcggaagttgcgatgcacacgacgactcatatacctgcgagtgccctagaggattccacggaaagcattgcgaaaaagctcgcccccacctgtgttcttctggtccatgcagaaacggcggaacatgcaaagaagccgggggagaatatcattgctcttgtccttaccgctttactggaaggcattgcgaaataggtaagccagacagttgtgccagcggtccctgtcataacggcggtacctgcttccactatatcggcaagtataaatgcgattgccctccagggttctctggccggcactgcgaaatcgcgccatcaccgtgtttcagatccccttgtgtgaatggaggcacttgtgaagaccgagatactgattttttctgccactgtcaagccggatatatggggcgaagatgccaggctgaagttgattgcggaccaccagaggaggtaaagcatgcaacgctacgttttaacggtacccgactgggagcagtggcgctgtatgcctgtgatcgaggttactcccttagtgcaccctcaaggatcagggtttgccagccacacggcgtgtggtcagaacccccccaatgcttagaaatcgacgaatgtagaagccaaccatgccttcatggcggcagctgtcaggatagagtggccggctatttgtgcctatgttctaccggttacgaaggagcccactgcgagctcgaacgagacgaatgtagagcccatccctgtagaaatggcggatcatgtcgcaatctaccaggagcttatgtgtgccgctgccctgctgggtttgtcggggttcattgcgagaccgaggttgacgcgtgtgactcgagcccttgccaacatgggggacgttgtgaaagtggtgggggtgcctacctgtgtgtgtgccccgaaagcttttttggctaccactgtgagaccgtatcggacccatgtttctctagtccttgcggcggtcgcggttactgtctggcctctaacggatcccattcttgtacatgtaaagtgggttacactggggaagactgtgctaaagaactcttcccaccaacagcattaaagatggaacgggtcgaggaatctggggtctctatttcttggaacccacctaatgggccagcagctcggcagatgctcgatggctatgctgtgacttacgtttccagcgatggatcctaccgccgaaccgacttcgtagaccgcacacgttcctcacatcagctgcaggccttggcagccggacgcgcctataatataagtgttttctccgtaaaaagaaattccaataacaagaatgacatcagtagacccgccgttctgctcgcccgtacccggccacggcccgtagaagggttcgaggtcacaaacgtgacggcttccactatttcagtgcaatgggcactgcatagaattcggcatgcgactgttagtggtgtgagagtgagtattaggcatcccgaggcccttagggaccaagcaacagatgtggacagatctgtggacaggttcacctttcgcgccctcctccccggcaaaagatatacgattcaactgaccacacttagcggccttcgcggtgaagagcatcctaccgagtcactagccacagcccccacccatgtgtggacaaggccccttccccctgcgaacttaacagccgcacgggtgaccgcgacctccgctcatgtggtctgggacgctcccacaccaggaagcttattagaagcctatgttatcaatgtcactaccagccagtcaactaaatctcgttacgtcccaaacggaaaactggcatcctatacagttagagacctcctgccgggccgacggtaccaactctctgttatcgccgtacagagcacagaactgggccctcagcactcggaacccgcacatctttacattattacttccccaagagatggagccgatagaagatggcatcaaggcggtcaccatcccagagtgctcaagaatcgccccccccctgcacgtctgcccgaactgagattgcttaatgatcactccgcccccgagacccccacacagccaccaaggttttccgaactagtagacgggcgcggaagagtctccgctagatttggaggctctcctagcaaggcagctaccgtcaggtcccaaccaaccgcatccgcccaactcgagaacatggaagaggccccaaaacgcgtgagtttggctctgcagctaccagagcacgggtcaaaggacatagggaatgtgcccggcaattgtagcgaaaatccttgtcagaatggaggaacatgcgtccccggagccgacgcccattcatgtgactgtggaccaggatttaaaggacgcaggtgcgaacttgcatgcattaaagtatccagaccctgcacacgactgttcagcgagaccaaggctttcccagtgtgggaagggggagtctgtcaccatgtatataaaagagtttacagagtccaccaggacatctgcttcaaggaatcctgcgagtcaacgagcctgaaaaaaacacctaacagaaagcagagtaaaagccagacccttgaaaaatcctag

SEQ ID NO: 13711 - RNA, 1008 nt, synthetic construct
  misc_feature 1..1008: note = source = /note="Description of Artificial Sequence: Synthetic coding sequence"
  source 1..1008: mol_type = other RNA
atgtttttagcaactctgagctttttactaccatttgcacaccccttcggaaccgtctcatgtgaatatatgctgggaagccctctaagtagcctagcccaagtcaatttgtccccattttctcatcctaaggtccatatggatccaaactattgtcatccctccacctcactacacctatgctcgctggcttggtcctttaccagactgctacatcctcccctctccccaggaatctcacaggtagtgaaagatcacgtcaccaagccaacagctatggcccaagggcgcgtcgcccacctgatcgagtggaaagggtggagtaaaccgtcagactcacccgctgctctagagtctgcctttagtagttattcagatttgtcagaaggagagcaggaggcccgcttcgcagctggagtggccgagcagttcgcaattgccgaggcaaaattacgggcctggtcaagcgtagacggagaggatagcactgacgactcctatgatgaagacttcgcaggtgggatggacacagacatggctgggcagttaccactcggcccacacctacaagacctatttactggacaccggttttctcgacccgtgcgccaggggagtgtagagcccgagtcagactgttcccagaccgtctccccagatacactttgctcttccctctgtagtcttgaagatggactgttaggctcccctgccaggctcgcatcacaacttttgggtgacgaactgcttcttgccaaactaccacccagccgggaatctgcttttcgcagccttggtcctttggaagcccaggacagtttgtacaactcccctttgacggaatcttgcctgagccccgctgaggaagaaccagcaccatgcaaagattgtcagccattgtgcccaccgttaacagggagttgggaaagacaaagacaagcgagtgacttggcgagcagcggagtggtgtccctcgatgaagatgaagcagaaccagaagagcagtag

SEQ ID NO: 13712 - RNA, 828 nt, synthetic construct
  misc_feature 1..828: note = source = /note="Description of Artificial Sequence: Synthetic coding sequence"
  source 1..828: mol_type = other RNA
atgcagcctcctggcccacgtgatccacttattcggctctgctttttccgagaagaggggacaaatgtcgtccagaaaatctgtttcagcacacaaatcattaggcacttcgaatcaaaactaagcgacactattgaagtatatcaggagaggatccagtggctaaccgaaaattccaagaaggcctttggcctgataaaaggcgcccgggtgtccatcttgatcgatgtcagtgcaatcagcagcggccctcagaaggaggagttccagaaggatttaatgtctctgattgatgaacagctgtcccataaagagaagttgttcgtgctgtctttcggcacaaatgccggatccctttggcccgatcccatggaagtctcagcctcaacattacaggagttgaagctctgggtgaagacactccaacccgatggtggctctaatctgctgcaggctctgaaaaagatctttacactaaaaggactggactctctcgtggccataatgaggagttgccccgaccaaccatctgaaattttaagcgactatattcagcagtcaacaatggggagggaccttatcatacactttataacttatcgatgtgacgatcagatgccacccgccgtgcttaaaaatttggccgaagcagtacgcggctactatcattgttatagccccaagatggagcattacacttcgagagacatggatgaactcctggccgaaatacagaaggcccagtcactgctatctcatgttcaagcactccagcactcaagcccttgcgaggcactcacctgtaccatggaagaaccccggaattag

SEQ ID NO: 13713 - RNA, 438 nt, synthetic construct
  misc_feature 1..438: note = source = /note="Description of Artificial Sequence: Synthetic coding sequence"
  source 1..438: mol_type = other RNA
atgcttaccagacttgtcctcagtgctcatttaagctccacaaccagcccgccatggactcacgctgccatttcttgggagcttgataatgtgcttatgccctctccacgcatctggccccaggtaacaccgaccggacggagcgcttcagtaagatccgaaggcaatacgtcctctctttggaatttctcagccggtcaggacgttcatgcaatagtaacccgtacatgcgagtccgtgctttcgagtgccgtttatacccatggttgcggctgtgtgcggtccgctaccaatataacgtgtcagtcctccggacagcaacgccaggctgcaagacaggaagaagaaaactctatttgtaaggcacacgactcaagagaaggacgtcttggctatccactcagcgcccaccagccgggtagcggcggccccaattag

SEQ ID NO: 13714 - RNA, 777 nt, synthetic construct
  misc_feature 1..777: note = source = /note="Description of Artificial Sequence: Synthetic coding sequence"
  source 1..777: mol_type = other RNA
atgaccccaccgaaactacgcgccagtctctctccttccctccttctgcttttatctggatgtctgcttgcggctgcaagaagggagaaaggcgccgcatctaatgtagccgaacccgtaccagggcccactggtggaagttctggtagattcctttctcccgaacagcacgcctgctcctggcagctgctgttgcccgcgcccgaggccgcggccggatctgaactcgccttacgctgccagtcccccgatggagcccggcaccaatgtgcctatcgcgggcaccccgaaagatgtgcagcatacgccgcacgtcgagcacacttctggaagcaggttctgggcggactcagaaaaaaaaggagaccatgccacgaccccgctcccctccaagctcgcttgtgcgcaggaaagaagggacacggagccgagctgcgactggtcccccgagctagcccccccgccaggcctaccgtcgcgggcttcgccggagagtcgaaaccacgggcaagaaacagagggagaaccagagaacgcgcttccggtcctgccgctgggactccaccgccacagagcgcaccccctaaggaaaacccttcagaaagaaagacaaacgaaggcaagcgcaaagcggcacttgtgccaaacgaagaacgccccatgggaacaggccctgacccagacggactggacggaaacgcagaacttaccgagacctattgtgcagaaaagtggcactccctgtgtaactttttcgtgaatttttggaatggttag

SEQ ID NO: 13715 - RNA, 393 nt, synthetic construct
  misc_feature 1..393: note = source = /note="Description of Artificial Sequence: Synthetic coding sequence"
  source 1..393: mol_type = other RNA
atggctagacgccactgtttttcatactggctcctagtatgctggctcgtcgttacagtggccgagggccaggaagaagtctttactccacccggagattcacagaataatgccgacgccaccgactgtcagattttcacattgactccacctcccgcccccagatcccccgttacacgcgcccagccaatcactaaaacaccacgttgcccctttcatttcttcccgcgtagacctcggattcacttcaggttcccgaatagacccttcgtaccctctaggtgcaaccataggtttcctttccagcccttttactggccgcaccgctacctgacgtaccgttatttcccaagacgaagactgcaacgcgggtctagctctgaagaatcctag

SEQ ID NO: 13716 - RNA, 600 nt, synthetic construct
  misc_feature 1..600: note = source = /note="Description of Artificial Sequence: Synthetic coding sequence"
  source 1..600: mol_type = other RNA
atgtaccccgccaccgcagttccacaaatcaatatcaccatactgaagggagaaaaaggggacagaggcgaccgtggacttcaaggcaagtatggcaaaacaggcagcgcaggtgcccgcggtcacaccggccccaagggacagaagggaagcatgggcgccccaggagaacgatgcaagagtcactacgccgccttcagcgtgggccggaagaaaccaatgcacagcaatcactattaccagacagtcattttcgataccgaattcgttaatctttatgatcatttcaatatgtttacagggaaattttactgttatgtccccggactgtactttttttcacttaatgtacacacatggaatcagaaagagacttacttgcatatcatgaaaaacgaggaagaggtagtgatcttgtttgcccaggtaggggatcgatcgatcatgcaaagccagagccttatgctagaattgagagagcaagaccaagtatgggtccggctgtacaagggggagagggagaatgcaatctttagcgaagagcttgacacctacattacattttcagggtacctggtaaagcacgctactgagccgtag

SEQ ID NO: 13717 - RNA, 702 nt, synthetic construct
  misc_feature 1..702: note = source = /note="Description of Artificial Sequence: Synthetic coding sequence"
  source 1..702: mol_type = other RNA
atggcattgaaaaacaagttctcatgcttgtggattctaggattatgtctggtagctacaacgtcttctaaaattcctagcattacagaccctcattttattgacaattgtattgaagcgcacaatgagtggagaggaaaggtgaaccctcctgctgcggacatgaagtacatgatttgggacaagggactagctaagatggccaaagcctgggctaaccagtgtaagttcgaacataatgactgccttgataaaagctataaatgttatgcagcatttgagtatgtaggcgaaaatatatggcttggcggcattaagtccttcactccaaggcacgccattacagcctggtataacgagacccagttttacgactttgattccctgtcctgttccagagtttgtggccattacacccaactggtttgggctaactccttctatgtgggctgtgccgtggcaatgtgtccgaacctgggcggagcttccactgccatcttcgtctgtaactacggccccgccggtaattttgctaatatgccaccgtatgtgcggggtgagtcgtgttccttgtgttctaaagaagagaaatgtgtgaaaaatctctgcaaaaatcctttccttaaacctaccggacgagcccctcaacagaccgcgtttaacccttttagcctcggatttctacttcttagaatattttag

SEQ ID NO: 13718 - RNA, 669 nt, synthetic construct
  misc_feature 1..669: note = source = /note="Description of Artificial Sequence: Synthetic coding sequence"
  source 1..669: mol_type = other RNA
atggccctccacatccatgaagcatgtatcttgctccttgtgattcccggattggtgacctcagcagctataagccacgaagattatccagcagatgagggcgatcagatttcatccaatgacaatctcattttcgacgactatcgcggcaaaggctgcgtcgacgattccggcttcgtttataaactcggcgaacgcttctttcccggacactccaactgtccatgcgtgtgtgccctcgatggaccagtgtgtgaccagcccgaatgtccaaagattcacccgaaatgtaccaaggtggaacacaacggctgctgccccgagtgtaaggaagtgaaaaacttttgtgagtaccatggcaaaaattataaaattcttgaggaatttaagccctcgccatgcgaatggtgtcgctgcgagcctagtaatgaagtacattgtgtggttgctgactgtgccgttcccgagtgcgttaatccggtgtatgaacctgaacagtgctgtccagtttgcaagaatggcccaaattgcttcgcgggtactaccataatacctgcagggatcgaggttaaggtcgatgaatgcaacatttgccattgtcacaatggagattggtggaaaccagcgcaatgcagcaagagagaatgccagggaaaacagacagtatag

SEQ ID NO: 13719 - RNA, 957 nt, synthetic construct
  misc_feature 1..957: note = source = /note="Description of Artificial Sequence: Synthetic coding sequence"
  source 1..957: mol_type = other RNA
atgctcccgctgactatgaccgtcttgattctccttttgctgcccacgggacaagcagccccaaaggacggcgtcacacgacctgatagcgaagtacagcaccagttattacccaaccccttccagcctggtcaggaacaactggggttattgcaatcatacttaaaagggcttggtaggacagaagtgcaactcgaacacctgagccgtgaacaggtccttctatatctcttcgcactgcacgactacgatcagtctggccaactggatgggctggagctcctgagtatgctgacagctgctctcgcccctggagcggccaactcacccactactaatccagtaatactgatagttgataaagtgttggagacacaagatctgaacggtgacgggttgatgacccccgcagagctcataaatttcccaggtgtcgcattacgccacgttgaaccaggcgaaccactcgccccttcacctcaggaacctcaagccgtgggtcgacagagcctgctggccaaaagtcccttacgccaggagacacaagaagcgcccggtccccgggaagaggcaaaagggcaggtggaagcccgcagggagtccctggaccccgtccaggaaccgggaggtcaggcagaggctgacggggatgtgccggggcccagaggggaggccgagggccaggctgaggcgaaaggcgatgctcctggcccacgcggggaggcaggagggcaggccgaagctgagggggatgctcctggcccccgaggagaagccggaggtcaggccgaagccgagggggatgcacctggccctaggggagaagccggcggacaagcagaagcacgagaaaatggagaagaagctaaggaactgccaggagagacattggagtccaaaaacacccagaacgactttgaagttcacattgtacaagtagaaaacgacgagatttag

SEQ ID NO: 13720 - RNA, 393 nt, synthetic construct
  misc_feature 1..393: note = source = /note="Description of Artificial Sequence: Synthetic coding sequence"
  source 1..393: mol_type = other RNA
atgttggcacccctatttctctgttgccttcgtaatcttttccggaaactgatttcatttcaacctcctcaactgggaaggactaacatgcactatagcaagctgccaagaactgccatcgaaaccgagttcaagcaaaatgttggaccgccaccaaaagacttgaccgcagaggtgtacttcccttccataaagtccagaagtcatctgcctgcagtgttctacaaccagtatttcaaacatcccaaatgcgtcggagagtatggtcctaagaatggcgcggagaggcaaatcgaggagagaaaggtgctgcccacaacaatgatgttttcaatgctggccgattgtgtgttgaagtccactcccatcccaattttaggagtcgctatgtag

SEQ ID NO: 13721 - RNA, 4362 nt, synthetic construct
  misc_feature 1..4362: note = source = /note="Description of Artificial Sequence: Synthetic coding sequence"
  source 1..4362: mol_type = other RNA
atgatgcttccccagaactcctggcacatcgactttgggagatgttgttgccatcaaaatttatttagtgcagtggtcacttgtatattgcttctgaactcatgctttcttatcagtagctttaacggaactgacctcgagttgagactggtgaacggggatgggccttgttccggcaccgttgaggtgaaattccaggggcagtggggcaccgtgtgtgatgatggttggaacaccacagcatctactgtagtgtgcaagcagctaggatgtcctttctctttcgcgatgtttcgatttggccaggccgttactcggcacggtaagatctggctcgacgatgtgagttgctatgggaacgaatccgccctgtgggagtgtcagcaccgcgagtggggtagtcacaactgttaccacggagaagacgttggcgtgaattgttatggagaggcgaacttgggacttaggctggttgatggcaataatagctgcagcgggagagtagaggtaaagtttcaggagcggtggggcacgatttgcgatgacggttggaatttaaacaccgcagcggtagtgtgcaggcagcttgggtgcccttcctcctttatctccagcggggtggtaaatagccctgctgtccttagaccgatatggttagacgacattctgtgtcagggaaatgagctggcattatggaactgcagacacagaggttggggcaatcacgattgctctcataatgaagatgttacattgacatgctatgattcatccgatctagagctcagacttgtggggggcaccaacagatgcatgggacgagtggaactcaaaatccaagggagatggggaacggtgtgccatcataagtggaacaatgccgcagcggacgtggtttgtaagcagctgggatgtggtactgcgctgcatttcgccgggctaccccaccttcagagcggcagcgatgtggtttggttggacggtgtgtcttgttccggtaatgaatccttcctgtgggattgccgccattccggcaccgtcaatttcgattgtctccatcaaaacgacgtgtcagtcatctgctccgacggcgccgacctagagctcagactagcagatggttcaaataattgttccggtcgagttgaggtacggatccacgagcagtggtggactatttgtgatcagaactggaaaaatgagcaggctttagtggtatgcaagcagttgggatgtccattcagtgtgtttggaagtagaagagctaagccctccaacgaagcaagggatatttggatcaatagtatcagctgtaccggtaatgaaagcgcgctctgggactgtacctacgacggcaaagcaaagcggacctgtttccgcagatcagacgccggagtgatatgtagcgacaaagccgacctggatctcaggctggtaggcgcgcattcaccttgttatgggcggcttgaggtgaaatatcagggcgagtggggcactgtgtgccatgataggtggtccacaagaaatgccgcggtggtttgcaagcagctcggatgtggaaagcctctgcatgtgtttggcatgacctatttcaaagaagcctctggcccaatctggcttgatgacgtgtcttgtatcggaaatgaaagcaatatctgggactgcgaacatagcggctggggaaaacataattgtgtgcaccgcgaagacgtgatagtaacatgctcaggcgatgcaacctggggactcagactggtggggggcagtaaccgttgcagcgggagactcgaagtgtacttccagggtcgatggggaactgtctgtgatgacggctggaacagtaaagcagccgccgtagtatgcagccagcttgactgcccgagcagcatcattggaatgggattgggcaacgcctctacagggtatgggaaaatttggctggatgacgtgtcttgtgatggtgacgagtcagatctgtggtcctgcaggaacagcggatgggggaacaacgattgctcacactcggaggatgtgggcgtgatatgcagtgatgccagtgatatggagctgcgacttgtgggtggaagtagccgatgcgctgggaaggtcgaagtgaatgtgcagggtgcggttggtatattatgcgcgaatggctgggggatgaatatcgctgaggtagtgtgtaggcaattggaatgtggctccgccataagggtctctcgcgaaccacacttcaccgagagaacactacatattctaatgagcaatagcggctgtaccgggggagaggcatcgctctgggattgtattagatgggaatggaaacagactgcttgtcacctgaatatggaggcatccctgatttgctctgcacaccggcaacctcggctggtcggcgccgacatgccttgtagtggtagagttgaggtgaagcatgcagatacctggcgctcagtctgcgattctgacttctcattacacgctgccaacgttctgtgcagagagcttaactgtggcgatgcaatctcccttagcgtgggtgaccattttggaaaaggtaacggtctgacctgggctgagaaatttcagtgcgaaggttcagagacacacctcgccctgtgcccaatcgtccagcatccagaggacacatgtattcatagtcgagaggttggagtggtttgcagtaggtacactgatgtgaggctagtaaatggtaaatcccaatgcgatggacaagtagagatcaacgtactgggacactggggaagcctgtgtgacacccattgggatcccgaggatgcacgggttttgtgcagacaactgagctgtgggacagcgctgtcgaccacgggaggtaaatacattggtgaacgatctgtgcgggtttggggacaccggttccactgcttgggtaacgagtctttgctagataactgccagatgacggttcttggagcgcctccatgtatccacggcaacactgtttctgtgatttgtacgggcagcctaacacagcctctctttccctgtctggcaaacgtatcagacccttatctctcggcagtccctgaaggctcagcgttgatttgtcttgaggataaaagactccgcctcgtcgatggcgatagtcggtgtgccggccgggttgaaatttatcatgatgggttctgggggacaatctgtgatgacggctgggatctgtccgatgcccatgtagtatgccagaagctgggttgtggagtcgcatttaatgccacagtcagtgcccactttggagaagggagcggccctatttggttagatgatttgaattgtacgggaatggaaagtcatctgtggcagtgtcctagtagaggctggggacagcatgattgccgacataaggaggatgcaggcgttatttgtagcgagttcacagccttacggctgtacagcgagactgagaccgaatcatgtgctgggcgtttagaagtcttttacaatggcacatgggggtccgtgggaagacggaatattacaactgccatagccgggatcgtgtgtagacaattagggtgcggagagaatggagtggtctctctggcaccgctgtccaagaccgggtccggcttcatgtgggtcgatgacattcagtgcccaaaaacacacatttcaatatggcagtgtctctcagcgccgtgggaacgccgcatttcatctcctgccgaagagacgtggattacttgtgaagacagaattagagtgcgggggggggatacagagtgctcaggcagggtcgagatctggcacgctggctcatgggggactgtctgtgacgattcatgggatctggctgaggctgaggtggtgtgccaacagctaggatgtggctccgccctagccgcccttagggacgcctctttcggtcagggaactggtactatctggctcgatgatatgcgctgtaagggtaacgagtcatttttatgggattgccacgccaaaccctggggccagtctgattgtggacataaggaagatgcaggcgtgcgatgcagcgggcaatcgttaaagtctttaaatgcaagcagcggacatctggctcttattttgtctagcatttttggactgctgctgctggtcctctttattctcttcctgacatggtgtagagtgcagaagcagaagcacctgcccctacgggtgagcacacgaagacggggctccttagaggagaaccttttccacgagatggagacctgcttgaagagagaagacccccacggaactaggacatcggacgatacgcccaatcatggctgtgaagacgcttctgacacgtcactgctgggagtgctgcctgcaagtgaagcgacaaagtag

SEQ ID NO: 13722 - RNA, 759 nt, synthetic construct
  misc_feature 1..759: note = source = /note="Description of Artificial Sequence: Synthetic coding sequence"
  source 1..759: mol_type = other RNA
atgctgcctccccctcgccccgccgctgcactcgctcttcccgttctgcttctgctgttagtggtcttgactccaccgcccacgggtgccagaccatcaccaggcccagattacttaaggcgaggttggatgcgcctcttagccgagggagaagggtgtgctccatgtcgtccagaggaatgcgccgctccgcgcggatgcctggctggccgggttagagatgcttgtggatgttgctgggagtgtgcgaacctcgaaggacagctttgtgatcttgacccgtcagcccacttctatggtcattgcggagaacagctcgaatgcagattggataccggaggagacctgtcacgcggcgaagttcccgagcctctgtgcgcttgccgatcccaatcccccctatgtgggtctgacggtcacacttactcccagatctgccgactgcaggaggctgccagagcccgcccggacgctaatttgactgttgcacacccaggaccttgtgaatcaggacctcagatagtgtcccacccttacgacacctggagaggcccccgcctccaaacactaggcacggaagatacgctgaccaccttggtgggagccggtggaatggctcgagcagtggcctgtggagaagcccctggtgagcatctagctctgcaggttctgtgccttagcggaaaacgtcgacacttgtggcaggtcggatcaactggttcatctgaaggcgtgcccagcggaggatccttctggtag

SEQ ID NO: 13723 - RNA, 1323 nt, synthetic construct
  misc_feature 1..1323: note = source = /note="Description of Artificial Sequence: Synthetic coding sequence"
  source 1..1323: mol_type = other RNA
atgaaacttgcactcctcctaccttgggcttgctgctgtctttgtgggtctgcattagctacaggattcctctatcccttttctgccgccgccctgcagcagcatggctatcccgaaccgggcgccgggagccccggctctggctatgcaagcagacgtcactggtgccaccacaccgtaaccagaacggtgagttgtcaggtccaaaacggctccgaaacagtagtccaacgcgtgtatcagagctgccgatggcccggaccgtgtgctaacttggtgtcttacagaacccttatccgacccacttaccgagtgtcttaccgcaccgtaacagttcttgaatggcgttgctgccccggattcacagggtctaattgtgatgaggaatgtatgaactgcaccaggctgtctgacatgtcagagcgactaacgaccttggaggctaaggtgctcttactcgaagcagccgaacgtccctctagcccagataatgacttaccggcaccagaatcgactccccctacttggaacgaggacttccttccagacgccatcccactggcacaccctgtcccacgccagaggagaccaacaggcccagctggacctccggggcagacaggtcctcccggacccgccgggccgcctggatcaaagggcgatcgcggtcagactggagagaaaggacccgccgggccccctggactgctgggaccccctggaccccgcgggctcccaggagagatgggtcggcctggtcccccaggaccgccgggacccgccgggaatcccggacctagtcctaattcaccacaaggggccctctacagcctgcaaccccctacagacaaagataacggtgacagtagactcgcatccgccatcgttgacaccgtacttgctggcgtaccaggaccaagaggacctccaggaccacccggcccccccggcccacgcggtccaccgggcccacccggcacacctggttcgcagggtttagctggtgaaagaggaactgtggggccctccggcgagcctggtgtcaaaggcgaggaaggggagaaagcagctactgctgaaggggagggggttcaacagctgcgcgaagcactcaaaatcttagccgaaagggtgcttatcctcgaacacatgattggaatccacgaccctttggctagccccgagggctccggtcaagacgcggctttacgggcaaacctaaaaatgaaacgcgggggggcgcagccagacggggtcctcgccgctttgctcggcccagatcccggccagaaaagcgttgaccaggcttctagtagaaagtag

SEQ ID NO: 13724 - RNA, 1341 nt, synthetic construct
  misc_feature 1..1341: note = source = /note="Description of Artificial Sequence: Synthetic coding sequence"
  source 1..1341: mol_type = other RNA
atgcttcatcctgaaacatctcctggacgcgggcacctactggcagtcttattggccctcctgggcacagcatgggctgaggtgtggccacctcaattgcaggaacaagccccgatggctggggcattaaatagaaaagagtcctttttgctcttgtcactccataacagattgagatcgtgggtccagcccccagctgctgatatgagaaggttggattggtcagattctctcgcacaactcgcccaggcccgagctgccctgtgcggaattcctacaccttccctcgcatcgggcctgtggagaactcttcaggtagggtggaatatgcagctgctaccagcgggcttagctagttttgtcgaagtcgtgtctctctggttcgctgaagggcaacgatactctcacgcagctggagagtgcgccagaaatgccacatgcactcattatacgcagctcgtgtgggccacatcatcccaactcgggtgtggacgccacttgtgcagcgcaggacaagctgctattgaagccttcgtctgtgcctactctcctcggggcaactgggaagtgaacggtaaaacgatcgtgccttataagaagggggcatggtgctcactgtgcactgcttccgtttccggctgttttaaagcctgggatcacgccggcggactttgtgaagttcctcgtaatccatgcaggatgtcttgccagaaccacggccgattgaatatctccacttgccactgccactgtccccctggatatacgggccgctactgccaggtgaggtgctccctccaatgcgtgcacggcagatttcgggaagaagaatgctcttgtgtctgtgatattggatacggcggagctcaatgcgccactaaggttcactttcctttccatacctgtgacttaaggattgacggggactgcttcatggtttcttcagaagccgatacatattatagagcccgaatgaaatgccagagaaaaggaggggtattagcacagattaaaagccagaaggtgcaggatatcctggccttctacttaggcagattggagactacaaatgaagtgattgatagcgatttcgaaaccagaaatttctggatcggccttacatataaaacagccaaggacagcttcagatgggcgaccggcgaacaccaggccttcacgagcttcgcatttggtcagccagacaatcatgggtttggaaattgtgtggagctacaagcaagcgccgcgtttaattggaacaatcagaggtgtaagacccgaaatcgctacatatgtcagtttgctcaggaacatatctcaagatggggaccaggaagctag

SEQ ID NO: 13725 - RNA, 219 nt, synthetic construct; identical to SEQ ID NO: 12086
  misc_feature 1..219: note = source = /note="Description of Artificial Sequence: Synthetic coding sequence"
  source 1..219: mol_type = other RNA

SEQ ID NO: 13726 - RNA, 2349 nt, synthetic construct
  misc_feature 1..2349: note = source = /note="Description of Artificial Sequence: Synthetic coding sequence"
  source 1..2349: mol_type = other RNA
ctttggctactcctgtgggctgccgcctggaggttgggtgctagcgcatgcccagcgttgtgcacatgcactgggaccacggtcgattgccacggtactggtttacaggctatccccaaaaatatcccaaggaacaccgagagacttgaattaaatggaaacaatatcaccaggatccataaaaatgattttgctggcttgaagcagttgagggtgctgcaacttatggaaaatcagattggcgccgtcgagaggggagcttttgatgacatgaaagagctcgagagattgcgattgaaccgaaatcaacttcacatgctcccagaattactattccagaataaccaagccttgagccgcctagatctttctgaaaacgccattcaggcgattcctcgcaaggcctttcgtggcgctacagatttaaagaaccttcagcttgataaaaaccaaatctcctgtattgaagaaggtgcgttcagggccctacgagggttggaggtactcacccttaataacaacaatatcacgactatcccggtttctagcttcaatcacatgcccaagctgcgcacgtttcgccttcatagcaaccacttgttctgcgattgccatctggcttggttgtcacagtggttgaggcaacgccctacaattgggttgttcactcaatgcagcggcccagcttcacttcgaggtctaaatgtggcagaagtgcagaaatcggaattcagttgtagtggacagggcgaagcaggaagagtgccaacatgcacgctgagctctggctcatgccccgctatgtgtacttgttccaacggaatcgttgattgcagaggaaaaggcttgaccgccattcccgcaaatcttcccgagacaatgacagagatcaggcttgaactcaacggcataaaatctatccctcccggagcattcagtccctacaggaaacttcgaaggatttgccccctgagtttctgctcgccttgtcgtgatctctccaacaaccaaatcgcagaaattgcacccgacgccttccagggcttacgctctttgaattccctggttttgtatggcaataagatcaccgatcttccccgcggagtcttcggcggcctatacacactgcaactccttctgctcaacgcaaataagattaactgcattcgaccagatgcttttcaagacctgcagaatctttctttactgtcactgtatgataacaaaattcaatcccttgctaagggcacatttaccagcttacgcgcaattcaaaccctgcacctcgcacagaatccattcatttgtgactgcaatctcaagtggttggctgacttcctgcgtacgaatcctattgaaactagtggtgctcgctgcgcctcccctcggcgactcgccaataaaagaataggccagattaagagtaaaaagttccgctgctcagcaaaagaacagtactttattccgggaaccgaagactaccagctgaatagcgagtgcaatagtgatgtcgtatgcccgcataagtgtcggtgcgaagccaatgtggtggagtgctcttctttaaagctcaccaagattccagaacgcataccccagtccacagccgagctcagactcaataacaacgaaatctccattttggaggccaccggaatgtttaagaaattgacgcacctgaagaaaatcaatttgtctaacaacaaagtatcggagattgaagatggagcattcgaaggagccgcttcagtcagcgaattacacctcaccgccaaccaactggagtcgattagaagcggaatgtttcgcggtctggatggcctcagaactttaatgcttagaaataaccgaatctcatgtattcacaacgatagctttaccggtctgagaaacgtgaggttattatcactctatgacaatcagataacaactgttagccccggcgcattcgatacgctgcaatccctctctaccctcaacttgctggccaatccattcaattgcaattgccaattagcatggctcggcggatggttaagaaaacggaagattgtaacagggaacccgaggtgtcagaatccggactttctcaggcaaatccccctgcaggacgtcgcttttccagactttagatgtgaggagggccaggaagagggtggttgcttacctaggccacaatgtccacaggaatgtgcatgtctggacaccgttgtgcgctgctctaacaagcatcttagggcccttccaaaaggcataccaaagaacgtaactgagttgtatttagacggcaatcagttcactctggtccccggccagctttcaactttcaaatacctacaactggtgtag

SEQ ID NO: 13727 - RNA, 411 nt, synthetic construct
  misc_feature 1..411: note = source = /note="Description of Artificial Sequence: Synthetic coding sequence"
  source 1..411: mol_type = other RNA
atgagcaatgtcccacacaaaagctctttgcctgaaggcataagaccaggaaccgtccttaggattagaggtctcgtgccgcctaatgcatcccgattccatgtgaacctgctgtgtggcgaagagcaagggagtgacgccgccctgcacttcaatccccgcctcgacacctctgaagttgtttttaattctaaagaacagggatcatggggccgagaggagcgcggccctggagtaccgttccagcgaggacagccttttgaagtcttgattatcgcttcggacgatggtttcaaggccgttgtgggagatgctcagtatcaccacttcagacacaggttacccttagctcgagtgaggctggtagaagtcggcggcgacgtacaattggattcggtccggatcttttag

SEQ ID NO: 13728 - RNA, 1926 nt, synthetic construct
  misc_feature 1..1926: note = source = /note="Description of Artificial Sequence: Synthetic coding sequence"
  source 1..1926: mol_type = other RNA
atgcctcctcctctgccactcctgctgttaactgtgctggtcgtagccgctgctcgtcccggctgcgaattcgaacgcaaccctgcagcaacatgtgtggacttacaactacggacgtgttccgacgctgcttacaatcatacaacttttcctaatctgcttcagcataggtcctgggaggtagttgaagctagctctgagtatatccttttgtctgtattgcatcaacttttggaaggccagtgcaaccctgatctacgactgctcggatgtgcagtactggctcctcggtgtgagggtggctgggtgcgtaggccttgtagacatatctgcgaggggctcagggaggtttgccagcctgcctttgacgcaattgacatggcttggccgtatttcctggactgtcatcgctactttactcgtgaagatgaaggttgttacgatcctttagaaaaactgcgcgggggtcttgaagcggacgaagcactgcccagtggactgcctcctacatttatacgattttctcaccatagttacgcacagatggtccgtgtcctgcgcagaacagcctcaaggtgcgcccatgtggcccgaacctattccatcgggagatcctttgatggacgcgaactgttagtgatcgaattttcatcccggcctggacaacatgaactgatggaaccagaagttaaattgatcggtaatatccatgggaacgaagtcgccgggcgggagatgctgatatatctggcacagtatttatgctccgaatacctgctcggcaaccccagaatccagcgtctgctcaataccacaagaatccacctattacccagcatgaatccagacgggtacgaagttgcagcggcagagggggccggatataatggttggacaagcggtcgacagaacgcccagaacctggacctgaacagaaactttcccgatctgacatctgagtattatcgactggcagagacccgtggagccagaagtgaccatatcccaattcctcaacattactggtggggcaaagtggcccctgagaccaaagcaatcatgaaatggatgcagaccataccttttgtcctaagcgctagcctccacggcggtgatctagtagtgagctatccattcgatttctctaagcatccccaagaagagaaaatgttcagccccaccccagacgaaaagatgttcaagctgctgtcccgagcttacgctgatgtgcatccgatgatgatggatcgatctgaaaatagatgtggaggcaacttcctcaagcgcggcagtatcataaacggagcggattggtattcattcactggcggaatgtccgatttcaactacctccatactaattgtttcgagataacagtcgagctgggctgcgtgaaattcccccccgaagaggcactctatatcctttggcagcacaacaaagagtcactgctgaatttcgttgagacagtgcatagaggcatcaaaggagttgtgactgacaagtttggaaaacctgtgaagaacgcccgtatctcagttaaaggaatcaggcacgacataacaacagcacctgatggcgattattggcggttgttgccaccaggcatacatatcgtgatcgcgcaagctccgggctatgccaaagtcataaaaaaggtcattatcccagcaaggatgaagagagctggtcgcgtcgattttattctccaaccactgggcatggggcctaaaaattttattcatggactgcgaagaaccggcccccacgacccacttgggggagcatcatctctgggtgaagcgaccgagcctgatcccctacgagcccgtcgacaaccgagcgcggatggctcaaagccctggtggtggtcatacttcacttctttatccacccacagacctcgttggctgttgaaatactag

SEQ ID NO: 13729 - RNA, 1305 nt, synthetic construct
  misc_feature 1..1305: note = source = /note="Description of Artificial Sequence: Synthetic coding sequence"
  source 1..1305: mol_type = other RNA
atggcgtcactcgggcttttgctgctgttgctgcttactgccctgccacctttatggtcgtcatccctacccggactggataccgctgaatcgaaagcaaccatcgcagacttgattctgagcgctctggagcgcgccacagtctttctggaacagcgactgcctgaaatcaacctcgacggaatggtaggagtacgcgtgctggaagagcagctgaaatctgtgcgcgagaagtgggctcaagaaccactacttcaacccctatctctgcgcgttggtatgttgggagagaaactagaggccgccattcaacgcagcctccattacctgaagctatccgatcccaagtacctccgcgaattccagctcactcttcaacctggattctggaaattaccccacgcctggattcataccgacgcttcgttagtgtaccccactttcggccctcaggactcattttccgaagagcgctcggacgtttgcctggtgcagttactcggaaccggcacggactcaagtgaaccctgcgggttgtccgatctctgtcgtagtctgatgactaagcccggctgttccggctattgtctctctcaccagttacttttcttcctttgggctagaatgaggggatgcacccagggccctctccagcagtcccaagactatatcaacttattctgcgccaatatgatggacttgaacaggagagccgaggctattggctacgcataccccacccgggatatttttatggagaataatgtaacaggccaccccgtgttttacttgcctctgtgcgactccttcctcccccctaaagcagcacctgttacagaactgtataccgatggtcctgttatgttctgcggaatgggcggcttctccgacttttataagctgaggtggttagaagcaatcctctcctggcagaaacaacaggaggggtgttttggggaaccagacgcagaagacgaagagctctctaaagccatacagtatcagcaacatttttccagaagagttaagcgaagggaaaagcagtttcctgactccaggtcagtcgcccaagccggagtgcagtggcggaacttgggatctctccagcccttaccacctggtttcaagcaattcagctgtttaatcttgccctcaagctgggactaccggtccgtgccaccctacctagcaaacttttatatttttctagttgaaaccgggttccatcacgttgcgcacgccggactcgaattactgatttcacgcgaccctcccacctctggaagccagtctgtcggactttag

SEQ ID NO: 13730 - RNA, 555 nt, synthetic construct
  misc_feature 1..555: note = source = /note="Description of Artificial Sequence: Synthetic coding sequence"
  source 1..555: mol_type = other RNA
atgatgtcattcttgttgggcgcgatcctgactcttctttgggcccccactgctcaagcggaggtcctcctacagccagattttaatgcagagaaattctccgggttatggtacgtggtgagcatggcttctgattgtagggtgttcctgggtaaaaaagatcacctgtccatgtcaacacgggctattagaccgactgaagaaggtggcctgcatgtgcatatggagtttccaggggccgatggttgcaatcaagtggacgcggagtatttaaaggtgggcagcgaaggccattttcgtgtacccgcactaggctacctagacgtaaggattgtagataccgactacagtagcttcgccgtcctgtacatctataaagagctggagggcgccctcagcacaatggtccagctgtactcacgcacccaggacgtttcccctcaggccctgaaatccttccaggacttttaccctaccttggggctaccaaaagatatgatggtcatgctgccacagagcgacgcctgtaatccagaatcaaaggaagccccttag

SEQ ID NO: 13731 - RNA, 219 nt, synthetic construct; identical to SEQ ID NO: 12092
  misc_feature 1..219: note = source = /note="Description of Artificial Sequence: Synthetic coding sequence"
  source 1..219: mol_type = other RNA

SEQ ID NO: 13732 - RNA, 2247 nt, synthetic construct
  misc_feature 1..2247: note = source = /note="Description of Artificial Sequence: Synthetic coding sequence"
  source 1..2247: mol_type = other RNA
atgggccgcgccggagccgccgccgttatccccgggctcgccttgctctgggcagtcggccttggatcagctgcccctcctccccggctgagactgagttttcaggagctccaggcgtggcatgggctgcaaaccttctctttggagcggacctgttgctatcaagctttacttgttgatgaagaacgcgggcgcctgttcgttggagcggaaaatcacgttgcctccctgaaccttgataatatatccaaaagggcaaagaaactcgcttggcccgctccagtagagtggcgagaggagtgcaactgggctggaaaggatattgggactgaatgtatgaacttcgtgaagctgctccacgcatacaataggacccacctgcttgcctgtggcacgggggcttttcacccaacatgcgcttttgtggaagtggggcatagagctgaggaaccagtgctgcgactagatccagggagaattgaggacggaaaaggaaaatcaccgtacgaccctagacatagagccgcctccgttctggtcggagaggaactgtatagtggggtagctgccgaccttatgggacgagatttcactatatttaggagtttggggcagaggccaagcttacgcactgagccccatgacagccgctggctgaacgaacctaaatttgtaaaagtgttttggatccctgaaagtgagaaccccgacgacgataagatttatttttttttcagagaaacagccgtggaggcggctcccgcactcgggcgactatcagtgtcccgcgtcggtcaaatatgcagaaacgatgtcggcgggcagaggtctctagtcaataagtggacaacattcttgaaagctcgcttagtttgttccgttccaggggtggagggcgacacacattttgatcaactgcaggacgtgtttctgttaagcagccgagaccacaggactcccttgttgtacgcagtgttttccacttccagctcaatcttccaaggatccgcagtctgcgtgtattccatgaacgacgttagaagagccttcctgggccctttcgcacataaggaaggtcccatgcaccaatgggtgtcttaccagggccgggtcccgtacccacggcccggaatgtgcccatcaaagacatttggaacctttagttcaaccaaagattttcccgacgacgtcattcagtttgcccggaatcaccccctaatgtataattctgtgctgccaacaggtggacgacccctgtttctccaagtgggagccaattacaccttcactcaaatcgctgcagatagggtggccgctgcggacgggcactacgatgtgctatttataggcacagatgtgggaacagtccttaaagttatttccgtacccaagggatctcggccttctgcagaagggttgctgttagaagagctccatgttttcgaagatagcgcggcggtaacctcgatgcagatatcctcaaaacgacatcaactgtatgtcgcaagtaggtcagctgtagctcagatcgccctgcatcgctgcgcagctcacggacgggtgtgcacggagtgctgtcttgcacgagacccctactgtgcttgggacggcgtggcatgcaccagatttcagccctctgccaagaggcgcttcagaagacaggacgttcggaatggcgatccatcgactctttgctctggcgacagttcacgccccgccctgttagaacacaaggtgttcggcgttgagggatcgtcagctttcttggaatgcgaacccagatctctgcaggcaagagttgagtggacatttcaacgcgctggcgtcactgcccacacacaggtactggctgaggaacggacggaacgcaccgccaggggcctcctgttacgaagactgcgccggagagactctggagtgtacctttgcgccgccgtggagcagggcttcacacaaccccttaggcgcctcagcctgcacgtgcttagcgccacccaagccgagagattggcccgggctgaagaggccgcccccgctgcccctcctggtcccaagctgtggtatagggattttcttcaactagtcgagcctggcgggggaggttctgcaaacagcttgagaatgtgccgaccccaaccagccttgcagtctttacccttggagtcccgcagaaaggggaggaatagacggacccacgctcctgaaccaagagccgaaagggggccaagatcagctacacattggtag

SEQ ID NO: 13733 - RNA, 369 nt, synthetic construct
  misc_feature 1..369: note = source = /note="Description of Artificial Sequence: Synthetic coding sequence"
  source 1..369: mol_type = other RNA
atggtcttactgtgcctgttcttggccagtttggcagcaacacctagagctggtgtaacgggagcctggccaacaagcggtcttagtatcctcgcacagttgcaaccttcctgcgagcttcgatggacacaactctctcggtcttcctggcgcgatctggtgatgacaacatccctgtggtccctggcttactttcagcacttttcacaagaaaccactacacaggaacagctagatgaaatggaagaaattccccgcgaaagccagtgtggccgccaagatttccacgcacttagttgtccaaccgcttccccacgagatcgagttctgttatgttgtcctggctggagggcaatggttccttcatag

SEQ ID NO: 13734 - RNA, 570 nt, synthetic construct
  misc_feature 1..570: note = source = /note="Description of Artificial Sequence: Synthetic coding sequence"
  source 1..570: mol_type = other RNA
atgttgctgggacaactttccactttactgtgtttactatccggagctctaccgacaggcagtggccgaccggaaccccagtcgccacggccccaaagctgggccgccgctaatcagacctgggcactcggacctggcgccctcccaccactggtaccggcctccgcccttgggagctggaaggctttcctgggcctgcaaaaagctagacaactgggaatgggcagactccagagagggcaggatgaagtcgcggccgtgacactacccctcaacccgcaagaggtgattcagggaatgtgcaaggccgtccccttcgtccaggtcttttcccgcccaggttgttcagccatacggttgcgaaatcatctgtgcttcgggcattgtagttccctctacattccaggatccgatcctaccccattggtgttatgcaatagttgcatgccggctcggaagcggtgggcccccgttgtgctgtggtgtctcacaggttcttccgcgagtagacgaagagttaagatttccaccatgcttattgagggatgtcattgtagtcccaaagcttag

SEQ ID NO: 13735 - RNA, 2505 nt, synthetic construct
  misc_feature 1..2505: note = source = /note="Description of Artificial Sequence: Synthetic coding sequence"
  source 1..2505: mol_type = other RNA
atgaagcacacactggccctgctggcacctctcctgggtctgggacttggtctcgcactgtcacagcttgccgccggcgcaaccgattgcaaatttctcgggcccgccgagcatttaacttttaccccagctgctcgcgctagatggctggctccacgagtgcgcgcccccggattgctcgatagcttgtatgggacagtcaggcggtttctatcggttgttcaacttaacccattcccctcagagcttgttaaagctttgctgaatgaactcgcctccgttaaggtcaatgaggttgtgagatacgaggccggttatgtcgtgtgtgccgtgatagcgggcctatatctcctcctcgtgccaactgctggactctgcttctgctgctgtcgctgtcatcgccgttgtggtgggagggtcaagacggagcacaaagccctggcctgcgagcgtgccgcacttatggtttttctcttgctcacgacgctgcttctactgattggtgtggtctgtgcatttgtgactaaccaaaggacgcacgaacagatgggtccgtccatcgaagctatgcctgaaacgttgttaagtctctggggtctggtcagcgacgttccacaagaattgcaggctgtagcacagcagtttagtctacctcaagagcaagtgtcagaagaactggatggcgtcggagtctctattggcagtgccatacacacacaattgcgatcaagcgtctaccctcttcttgctgccgtgggctctctaggccaggttctccaggtttctgtacaccatctccaaaccttgaatgcaacagtggtcgaactccaggccggacagcaggatctcgagcccgcgattagggagcatagggatcgattactggagctgctgcaggaggcacgatgtcaaggagactgcgcaggagccctgagctgggcaaggaccctggagctgggtgcagatttctcccaggtccccagtgtcgatcacgtgctccatcagctgaagggcgtaccagaggctaatttctccagcatggtacaagaggagaatagtacctttaatgccctaccagcccttgcggcaatgcagacaagtagtgttgttcaggaactcaaaaaggcagttgcacagcagcctgaaggcgtgcggactctcgccgaaggcttccccggcctcgaagcagcttcacgctgggctcaagcattgcaggaagtggaggaaagtagtcggccatacctccaagaagtacagaggtacgaaacttacaggtggatcgtgggatgtgttttgtgctccgtcgtattgtttgttgtcctatgcaatctcctgggtctaaatctggggatctggggcctcagcgctcgcgatgatccatctcacccagaggccaaaggtgaagccggggctcgatttttgatggcaggggtcggattatcattccttttcgccgcaccattaatactgttagtcttcgctacgttcctggttggaggcaatgtgcaaaccctcgtgtgtcagtcctgggaaaatggtgagcttttcgaatttgcagatacaccaggaaacctgcccccctctatgaatctgagccaactgttgggcctgcggaagaacatctccatccaccaggcatatcagcaatgcaaggaaggtgctgcactttggactgtgctacagctgaatgattcatatgatttggaggagcatcttgacattaaccagtataccaacaagctcagacaggagcttcaatcattgaaagtagacacccagtctttggatctgttgtccagcgcagctagacgggacttagaagcattgcaatccagcggtctgcagcggatccattatccagactttctcgtgcagattcagcggcccgtggtcaagacttctatggaacaactcgcccaggaactccagggcctagcccaggctcaggataactcagtgctcggtcagcggcttcaagaggaggcccagggactgagaaatttgcaccaagaaaaggtcgtacctcagcagagtctggtcgccaagttgaacttatctgtgagagcattagagtccagtgcccctaatttgcagctcgaaacctcagacgtcttagccaacgttacctacctgaagggcgagctgccagcttgggctgcccgaatccttcgtaatgtgtccgagtgctttctggctcgggaaatgggttatttctctcagtatgtcgcctgggtgcgggaagaagtgacacaacggattgcgacttgccaacctctgagtggggctctcgacaatagtagagttatactatgtgacatgatggcggacccgtggaacgccttttggttttgcctggcttggtgtactttcttcttgattccctctatcatctttgctgtgaaaacctcaaaatactttagacctatcagaaagcgcctgagttccacatccagtgaagaaacgcagttgttccatatccctcgagtcacctctctcaaactatag

SEQ ID NO: 13736 - RNA, 2505 nt, synthetic construct
  misc_feature 1..2505: note = source = /note="Description of Artificial Sequence: Synthetic coding sequence"
  source 1..2505: mol_type = other RNA
atgaaacatacgctggccctgctagcacccttgctgggcctgggactaggtctcgctttgtcacaactcgccgcaggcgccacagactgtaaatttctcggtcctgctgagcatctcacatttaccccagccgcccgtgccagatggctggcccctcgcgtcagagcgcccgggcttctggactccctctatggaaccgtccgtcgttttctaagcgttgttcaactgaatccatttccttcggagttggtgaaagccctgctgaacgaactggcctctgtgaaagttaatgaggtcgtcagatacgaggcaggctacgtggtgtgcgccgtcattgccggattatacttattgttagtaccgactgccgggctctgtttttgctgctgcaggtgccatagaaggtgtggtgggcgagttaagaccgagcacaaagcccttgcttgcgagcgcgcagccctgatggtgtttctgctgctgacaaccctcctgcttctcattggcgtggtatgcgctttcgttacaaatcagagaacacatgagcagatgggccctagtatagaagctatgccagagactcttctttccctctggggactggtcagcgatgtgcctcaggaactccaggccgtggcccagcagttctcattaccccaggaacaggtatccgaagagctcgatggggtcggggtgagcatcggttcagcaattcacacacaactcaggtcctccgtctatcctttactcgccgcagtcgggtccctaggacaggtcctgcaggtgagcgtccaccacctccagaccctgaatgctaccgtcgttgagttgcaggccggccagcaggatcttgagccagcaatccgtgaacacagagatcgcctgctagagttgttacaggaggctcgttgtcagggagactgtgctggtgcgctgtcctgggcacggacgttggagttaggggccgactttagccaggtaccaagtgttgaccacgtcctccatcagctgaaaggcgttcctgaagccaatttctcatccatggtccaagaagagaacagcacattcaacgccctacctgctctagcagctatgcagacaagttctgtggtacaggagctcaaaaaggccgtcgcccaacagccagagggtgtgcgaacactggcggaaggattccccggactggaggctgcatctcgctgggcccaggcgctacaggaggtggaagaatcctctagaccttacttgcaggaggtccaacgctatgaaacctatcgttggatagtcgggtgcgttctgtgcagtgttgtactcttcgtggtgctatgcaatttgctgggtttgaatttgggaatctggggactctcggctcgcgacgacccatcacaccctgaggctaaaggcgaggcgggggcgagatttctgatggcaggtgtcggcttgtcgttcctgttcgcagccccactgatattgctggtgttcgcaacatttctggttggtggcaatgttcaaacccttgtctgtcagtcttgggaaaatggcgagttattcgagttcgctgacactccaggaaatcttccaccgagcatgaatctgtctcagcttctcggccttcgcaagaatattagtatccatcaggcctaccaacaatgtaaggaaggcgccgccttatggaccgtcctgcagctcaacgattcctacgatctggaggagcatctcgatatcaaccaatataccaacaaacttagacaggagcttcaatctctgaaggttgatacccagtctctggacctgctttcctctgcggcgaggagggatctcgaagctttgcagtcctcaggattacaaagaatccattatcctgactttctggtacagatccagagaccagtagttaagaccagtatggagcaattagcgcaagagctgcagggtctcgctcaggctcaggacaattcagtcttgggacagaggcttcaagaagaagctcaaggtctgcgtaacctccatcaggaaaaagtagtaccacaacaatccctagtagccaaacttaacctatcagtacgggctctggaaagctcagcacctaatctgcaactggaaacctccgatgtcctggccaatgtgacatatctgaaaggagaactcccagcatgggcggctaggatcctgcgcaacgtttctgagtgctttcttgcacgcgaaatgggatatttcagtcaatacgtagcctgggtccgcgaagaagtcacccagagaattgctacctgccagcctctgtccggtgctctagacaatagcagagttatcctttgcgatatgatggctgatccgtggaatgctttctggttctgcctggcctggtgtactttttttttaatcccatccatcatattcgcagttaaaacgagcaaatacttccgcccaattagaaaacgtctctccagcacctctagcgaggaaacccaattgtttcatataccaagggtcacaagcttaaaactctag

SEQ ID NO: 13737 - RNA, 216 nt, synthetic construct; identical to SEQ ID NO: 12098
  misc_feature 1..216: note = source = /note="Description of Artificial Sequence: Synthetic coding sequence"
  source 1..216: mol_type = other RNA

SEQ ID NO: 13738 - RNA, 1377 nt, synthetic construct
  misc_feature 1..1377: note = source = /note="Description of Artificial Sequence: Synthetic coding sequence"
  source 1..1377: mol_type = other RNA
atggaggcaacgggaacagacgaggtggacaaactgaaaactaagtttattagcgcatggaacaatatgaaatactcgtgggtgctcaaaacaaaaacttattttagcagaaattctcccgtacttttgttgggaaagtgttaccacttcaagtatgaggacgaagataagactctgccggcagaatctggatgcaccatcgaagatcacgtcattgcaggtaacgttgaagagtttcgcaaggactttataagccgaatctggctgacatacagagaggagtttccccagatcgagggctctgctctgacaacggattgcgggtggggatgtacattgcgaactggccagatgctgttagctcaaggtcttatcctccatttcttgggtcgtgcttggacttggccagacgccttgaacattgagaatagcgatagcgagtcatggacatcacacacagtcaaaaagtttactgcctcatttgaagcctctcttagtggcgaacgtgaatttaaaacccctaccatatccctgaaggagacaattggaaaatattctgacgaccacgagatgagaaatgaggtctaccaccgcaagataatatcatggttcggagatagtccattagctttgttcggactgcaccaactcattgagtatggtaaaaaaagcggtaagaaagcgggagactggtatggacccgctgtggtagctcatatactcagaaaggcagtggaagaggcacgtcaccccgacctgcagggaattactatctacgttgctcaggattgtacagtgtataatagtgatgttatcgataaacagagtgcaagcatgacaagtgacaacgccgacgataaagccgttatcatactcgtcccggtgcgccttgggggagagaggacaaacaccgattacctggaatttgtaaaagggattctgagcttagaatactgtgtgggaatcatcggcggcaaacctaaacagtcatattattttgccggcttccaagacgatagccttatttacatggacccccattattgccaatcctttgtggacgtctcaatcaaagactttcccctggagactttccactgtccctcccctaagaaaatgagctttcggaaaatggatccgtcctgcacaattggcttctactgtcggaacgtgcaagattttaaacgcgcatctgaagagatcaccaaaatgctcaagttctcatctaaggagaaataccccctcttcacatttgtaaatgggcatagccgagactacgatttcacctcgactactactaacgaagaggacctgttcagcgaggacgaaaagaaacaactcaaacggtttagcacagaggagttcgtgttattatag

SEQ ID NO: 13739 - RNA, 342 nt, synthetic construct
  misc_feature 1..342: note = source = /note="Description of Artificial Sequence: Synthetic coding sequence"
  source 1..342: mol_type = other RNA
atgcgtcaacgactcctccctagtgttacatctctgctactggtggcgttgctgtttccaggatcttcacaggcgagacacgtcaatcattctgcgactgaagctttgggagagctgcgggagagggcacctggccagggaaccaacggcttccagctgctgaggcacgccgtgaagcgcgatctgctgccaccacgaacaccgccttatcaggaacccgcatccgatctgaaagtagtagactgtcgccggtctgaaggattctgccaagagtactgcaactacatggaaactcaggtcggttattgctccaagaaaaaagatgcatgttgtctacactag

SEQ ID NO: 13740 - RNA, 258 nt, synthetic construct; identical to SEQ ID NO: 12101
  misc_feature 1..258: note = source = /note="Description of Artificial Sequence: Synthetic coding sequence"
  source 1..258: mol_type = other RNA

SEQ ID NO: 13741 - RNA, 264 nt, synthetic construct; identical to SEQ ID NO: 12102
  misc_feature 1..264: note = source = /note="Description of Artificial Sequence: Synthetic coding sequence"
  source 1..264: mol_type = other RNA

SEQ ID NO: 13742 - RNA, 945 nt, synthetic construct
  misc_feature 1..945: note = source = /note="Description of Artificial Sequence: Synthetic coding sequence"
  source 1..945: mol_type = other RNA
atgtcctccgaagccgagacacagcaacctccagccgccccacctgccgcccctgccttgtcagcagccgataccaagccgggtacaacaggcgctcaaggggctgtggccagggcacacataggaggagcagggggagacaagaaggtaatcgctacaaaggtcctgggcacagttaagtggtttaacgtgcgtaatggttacggcttcataaatagaaatgatacaaaagaggacgttttcgttcaccaaacagcaattaaaaagaataatccgagaaaataccttagatcagtgggtgatggcgagacagtagagttcgacgtggttgaaggcgagaagggcgccgaagctgccaacgtgacaggaccgggaggcgtccccgtgcaaggatctaaatatgcagccgaccggaatcattacagacgctacccaaggagacgaggaccaccaagaaactatcagcaaaactaccaaaactcagagtccggcgagaaaaacgagggtagtgagtctgctccagaacggccaaataacgccgggccccaagccaaagtgccaaccctcctccatgcggagtatgggcgacgccctcagtactcgaacccacccgtgcagggagaggtcatggaaggagccgataaccaaggtgctggcgaacagggtaggccagtcaggcaatgtataggtgacatcgatcatgactctgcaggggcattgcttgcccgacaaccaagagaagatggaaatgaagaagacaaagagaatcagggtgacgaaacacagggccagcaaccaccccaacggaggtacaggcgaaatttcaattatcgcagacgcaggccagaaaatccaaagccgcaagacggaaaggagaccaaggcagctgatccacccgccgagaattccagtgcccccgaagcagaacaaggcggagccgagtag

SEQ ID NO: 13743 - RNA, 636 nt, synthetic construct
  misc_feature 1..636: note = source = /note="Description of Artificial Sequence: Synthetic coding sequence"
  source 1..636: mol_type = other RNA
atggtattcctcaagtttttttgcatgtcttttttctgtcacttgtgtcagggctatttcgacggacccctctatccagaaatgagtaacgggacattacatcactattttgtgcctgacggcgactacgaagagaatgatgatccggagaaatgtcagcttctttttcgtgtttctgaccatcggcgctgttctcagggcgagggcagtcaagtggggagtcttttgagtctgactttgcgagaggagtttactgttttgggtcgccaggtagaggatgctggaagggtgttggaaggaataagcaaatcaattagctacgacctcgacggggaggagtcctacggaaagtacttaaggagagagagtcatcagattggtgatgcttactctaactctgataaaagccttactgaactggagtcgaagtttaaacaggggcaggaacaggattcacgccaggaaagcagactgaacgaagattttctgggaatgctagtccatacacggtcattacttaaggagaccctagacatcagcgttggcctgcgggataagtatgagcttctggccctcactattaggtcccacggcactaggttggggaggctgaaaaatgactatctgaaagtgtag

SEQ ID NO: 13744 - RNA, 1566 nt, synthetic construct
  misc_feature 1..1566: note = source = /note="Description of Artificial Sequence: Synthetic coding sequence"
  source 1..1566: mol_type = other RNA
atgttgtgcgcactgctcctccttccctccttactcggcgctacccgcgcaagcccaacatccggaccccaagagtgtgcaaaaggttctacagtttggtgtcaggatctacaaaccgccgctcgctgcggtgccgtcggatactgccagggagcggtatggaataaacctaccgcaaagtcacttccatgcgatgtgtgtcaggacattgcagccgctgctggtaacggtttaaaccccgacgcaactgaaagcgacatcctggcattggtaatgaagacatgtgaatggctgccctcccaggaaagcagcgctggctgcaaatggatggttgacgcccactctagcgctatcctctccatgctcagaggcgcaccagattcagcccctgcccaagtttgcacagcactgtccctctgcgaacccctccagagacatctcgccaccctacgccccctgtcaaaagaagacacgttcgaagccgtagccccttttatggccaacggaccattgaccttccatcctcggcaagctccagagggcgccctgtgccaagactgtgtgcggcaggtgagcagattgcaggaagcagtccgatctaatctgaccctggccgacctcaatatccaggaacagtgcgaatccctaggacccggtctcgcagtcctctgtaaaaattacttattccagttctttgtacccgctgaccaggctctaagactactgcctccgcaggaattatgtaggaaagggggtttctgcgaggaactcggagctccggctcggctcacacaagttgtagctatggacggggttccgtcactggaactaggccttccgcgaaaacagtcagagatgcagatgaaagccggagtgacttgtgaagtgtgtatgaatgtggtacaaaagctcgatcactggctcatgtctaatagttctgaactcatgattacacacgctctggaacgagtgtgctccgtaatgccagcttccataaccaaagagtgtataatcctggtagatacttatagcccatccctggttcaactcgttgcaaagatcacacccgagaaggtctgcaaattcatcagattatgcggcaacaggaggagggctagggcagtgcacgatgcctatgcaattgtgccatcaccagagtgggacgccgagaatcagggctccttctgcaatgggtgtaaaagactgctgaccgtctcctcgcacaatttggaatcgaagtctacaaaaagagatatactcgttgccttcaagggaggttgcagcattctacccctcccatacatgatccagtgcaaacactttgtgacacagtatgagcccgtacttatagaatcccttaaggatatgatggaccccgtcgcggtgtgtaaaaaagtgggcgcctgtcacgggccaagaacacctctcctcggtaccgaccagtgcgcactcggcccatcattctggtgccgctctcaggaagccgccaaactctgtaacgccgtccagcactgccaaaaacatgtttggaaggaaatgcaccttcatgccggggaacacgcttag

SEQ ID NO: 13745 - RNA, 2127 nt, synthetic construct
  misc_feature 1..2127: note = source = /note="Description of Artificial Sequence: Synthetic coding sequence"
  source 1..2127: mol_type = other RNA
atggctgctgctgcagtcgccgctgccgccgcagcagcagccgctgcctcgcttcaagtacttgaaatggagtcaatggagacagccgccgcgggctctgcgggactggcagctgaagtgagaggaagtggaacagttgatttcgggccaggtccaggcatctccgccatggaggctagcggtggcgaccccggacctgaagctgaagattttgaatgctcatctcactgtagcgaactgtcatggagacaaaatgaacagagacggcagggcctgttctgcgatattacactgtgctttggcggtgcaggaggtcgagagttccgcgctcatagatccgttctcgcagccgcaaccgaatacttcactccgctcctcagcggacagttcagtgagtctagatcaggcagggtggaaatgagaaaatggagctctgagcctggccccgagcccgacacagtcgaagccgtcattgaatatatgtatacagggcgcattagggtcagcacaggttctgttcatgaggtgcttgagttagccgatcggtttctcctcatccgtttgaaagagttttgtggcgagttcctgaaaaaaaaactgcatctgtctaactgcgtagccatacatagcctcgcacacatgtataccctgtctcagcttgcattgaaggccgccgacatgatccgacgcaacttccacaaggtaatccaagacgaggagttttacacactcccatttcatctaatccgtgactggttatccgatttggagattaccgttgatagtgaggaagtcctatttgaaacagtgctaaagtgggtgcagagaaacgcagaggagagggaacggtatttcgaggaactctttaagctgctccgcttgtcccaaatgaagcccacctacctgacccgacatgttaagccagaaagactagtggctaataacgaggtatgcgtgaagctggtggcagacgcagttgagcgtcacgccttaagagctgaaaacatccagagcggcacctgccagcaccccacttcacatgtctcactgctccctcgatacggacagaatatggacgtgattatggtaattggtggtgtttccgagggcggggattatctctccgaatgcgtaggttattttgtagacgaagataggtgggtgaatctgccacacatccataatcacctggacggacatgccgtagctgtgaccgagagctatgtctacgtggcagggtcaatggaacctggctttgcgaaaacagtcgaaagatataacccaaacctaaatacctgggaacatgtgtgttcactgatgactcggaaacattcctttgggctcacagaagtcaaaggaaaactgtactctattggcggccacggtaatttctctcctggctttaaggacgtgactgtatataatcctgaacttgacaaatggcacaacttggaaagcgcacctaaaatccttcgcgatgtgaaagctctagcaatcgaagacaggttcgtctatattgcagctaggaccccagtcgatagggataccgaggatggactgaaagcagtcattacttgttatgatacagaaactcgccaatggcaggacgtggaatcactgcccctcatcgacaactactgtttttttcagatgtcagttgtcaactctaacttttatcaaacagcatcatgttgcccgaagtcctattgcctagagaatgaagaggccgtgcgtaaaattgcttcgcaagtgtccgacgagatattggagagcctccctccagaagtgttaagtatagagggggcagcgatttgctactacaaagatgatgtattcattataggtggttggaagaactctgacgatatcgacaaacagtataggaaggaagcttataggtactgcgcagagcggaaaagatggatgctcctccctcccatgccccagccgcgctgcagagccacagcctgccacgtgagaattccatatcgttacctgcacggaacccagcgttatccaatgcctcaaaacttgatgtggcagaaagaccggattcgacagatgcaagaaattcaccggcatgctttaaacatgagacgtgtgccctcatctcaaatcgaatgttag

SEQ ID NO: 13746 - RNA, 1578 nt, synthetic construct
  misc_feature 1..1578: note = source = /note="Description of Artificial Sequence: Synthetic coding sequence"
  source 1..1578: mol_type = other RNA
atgagtggaaactgggttcacccggggcagatcctcatctgggccatttgggtactggcagccccaacaaagggcccttcagctgaaggaccccaacgtaatacgaggctggggtggattcaaggcaagcaggtaaccgtcctgggcagtcctgtacctgtcaatgtttttctaggggtcccgtttgcagccccccccctgggatccttgcgcttcaccaacccacagccggcctctccttgggacaatctccgagaagctacctcatatccaaatctatgtttacagaattccgagtggctgctcctggaccaacacatgctgaaagttcactatcctaaattcggagtctcggaggactgcctgtatcttaatatctatgcaccagcgcacgctgatacggggtccaagctgcccgttctcgtctggttccctggcggagccttcaaaacaggatcagcatcaattttcgatggctccgccctcgcagcttacgaagatgtgctcgttgtcgtggttcaatacagacttggtattttcgggttttttaccacctgggatcagcacgcacccggcaattgggcttttaaagaccaggttgcggcattaagttgggtgcaaaagaacatagaatttttcggtggcgaccctagttctgtgactatttttggggaatccgccggagctatttctgtctcctcactaatcttatcccccatggcgaagggattgttccataaagctatcatggagagtggcgtggccataattccttatttagaagctcacgattacgaaaaatccgaagatctgcaagtggtggcccacttttgcggtaataatgctagtgattccgaagctttactgaggtgcctgaggaccaagccatctaaagagctgttgacactttcccaaaagacaaagtcctttacacgggtcgttgatggagcattcttccccaacgaaccactcgacctgctaagccaaaaagcgtttaaagcaatacctagcatcatcggtgtgaacaatcatgagtgcggattcttgctacccatgaaagaagctccagagatcttgagtggctctaacaaatcccttgctctgcatctgattcaaaacatactgcacataccccctcagtatctccacctggttgccaacgaatatttccacgataaacatagtctgaccgagatcagagactcattgctggacttactaggcgacgtgttctttgttgtgccagccctcataaccgccagatatcacagagaaggagcgaccgaggaggagaagttgctgtcccggaaaatgatgaaatattgggctacttttgcgaggaccggcaacccaaacggtaacgatttaagtctttggccagcctataaccttaccgaacagtacttacagctcgacctcaatatgtcattaggtcagaggcttaaggaaccacgcgtggatttttggacttcgaccattcccttgatcttgagtgcaagtgatatgctacactccccacttagttctctcaccttcctctctcttctgcaacctttcttcttcttctgcgctccatag

SEQ ID NO: 13747 - RNA, 900 nt, synthetic construct
  misc_feature 1..900: note = source = /note="Description of Artificial Sequence: Synthetic coding sequence"
  source 1..900: mol_type = other RNA
atggttaggtgcctgggccccgctctccttttactgcttctccttggatcagcctcttccgtcggaggcaacagatgcgtggatgcggccgaggcttgtaccgccgacgcccgctgtcaaagactcagatcagagtacgtcgcccagtgtctgggccgtgcagcccaggggggatgccctagagctcgttgcagacgagccttgagacgattctttgccagaggcccgccagctctgacccatgccctgttgttttgtccctgcgctggcccagcctgtgccgaaagacgccggcagacctttgtcccttcatgtgccttttcaggaccagggccggctccaccttcctgccttgaacccctgaatttctgcgaacgatcgagggtatgtagatgtgctcgcgcagctgctggaccctggcgagggtggggcaggggacttagtcctgctcaccgcccccccgccgcacaagcgagtcctccagggctttccggactggtccatccgtcagctcaacgcccaagacgccttccggcaggacccgggagaccccttcctgcacgactgcgtgggccacgaggcgtacccgcaggaaccgccgtcacacccaactatgtggataatgtgtctgcgagggtcgccccctggtgcgattgcggtgcgtcaggcaaccggagagaagattgcgaagccttccgcggcttatttaccaggaacagatgtttagatggcgcaatacaagctttcgcttcgggatggcccccagtgttactcgatcagctaaaccctcagggggaccccgaacactcacttctgcaggtgtctagcaccggccgcgcccttgagaggcggagccttctttccatccttcctgtacttgcacttcctgcccttctttag

SEQ ID NO: 13748 - RNA, 270 nt, synthetic construct; identical to SEQ ID NO: 12109
  misc_feature 1..270: note = source = /note="Description of Artificial Sequence: Synthetic coding sequence"
  source 1..270: mol_type = other RNA

SEQ ID NO: 13749 - RNA, 663 nt, synthetic construct
  misc_feature 1..663: note = source = /note="Description of Artificial Sequence: Synthetic coding sequence"
  source 1..663: mol_type = other RNA
atggcatctgaacggctgcctaaccgaccggcttgtctcctggtagcatccggcgccgccgaaggcgttagcgcacaatctttcctacactgcttcaccatggccagcacagcctttaaccttcaggttgctacccctggcgggaaagctatggagttcgtggatgtcacagaatccaacgctagatgggtgcaggattttcgactcaaggcctacgccagtccggctaaacttgaatcaattgacggagcccgataccacgcattgctcattccctcttgtcctggtgccctaaccgatttagcatcttctggctcactcgcacgtatattgcagcatttccattcggagtcaaaaccgatttgcgcagttggccatggagtcgctgccttgtgttgtgcgaccaatgaggataggtcatgggtgttcgactcctactctttaactggcccttctgtgtgtgagctcgtgcgggcccccggttttgcccgactccccctggttgtggaggacttcgtgaaggatagcggtgcctgttttagcgccagtgaacccgacgcagtgcatgtggttctagatcggcatttggtgaccggtcagaatgcctcctccaccgtgccagccgttcaaaacctcctttttctctgtggaagtagaaaatag

SEQ ID NO: 13750 - RNA, 1158 nt, synthetic construct
  misc_feature 1..1158: note = source = /note="Description of Artificial Sequence: Synthetic coding sequence"
  source 1..1158: mol_type = other RNA
atgtgggggttccgcttactgagatcccctcctctcctactactgttgcctcagttaggaattggcaatgcatcctcctgcagccaggcgcgtacaatgaatccaggcggaagtggaggagctcggtgttcgctttccgctgaagtacggcgcagacagtgcctgcagctatcgaccgtgcccggcgcagacccacagcgatcaaatgaactgctcctgctagctgctgctggcgaagggctagaaaggcaagatcttcctggtgatcctgcaaaggaagagccccaacctcctcctcagcatcatgtgctctatttccccggggatgtccagaattaccacgaaatcatgacacgccacccagaaaactaccagtgggaaaactggtccttagaaaatgtcgcaaccatcctcgctcatcggttcccaaattcctatatatgggtcatcaagtgctcccgaatgcatctacacaaattctcctgttatgataactttgtgaagtccaacatgtttggagcacctgaacacaacactgattttggcgctttcaagcacctctacatgctgctcgttaacgcattcaacctttcccaaaactctctgagcaaaaagagcctcaacgtgtggaataaagattcgatagcatccaactgtcgcagttcaccttctcacaccaccaacggctgtcagggagaaaaagtgagaacatgcgaaaaatctgacgaatcagccatgtcattttaccccccaagtctaaatgatgcttcattcaccctcatcggattcagtaagggttgtgtcgtcctgaaccagctcctgttcgagttaaaagaagctaagaaagacaagaacatagacgccttcatcaaatctatccgtaccatgtactggctggacggtggtcattcaggtggtagcaatacatgggtgacataccccgaggtactgaaggagttcgcccaaaccggcatcatcgtccacactcatgtcactccctaccaggtaagagaccctatgcgatcttggattgggaaagaacataagaagttcgtgcaaattttgggcgatctcggcatgcaggtaacatctcagatccactttaccaaagaggctccaagtatagagaaccattttcgcgtccatgaagtattctag

SEQ ID NO: 13751 - RNA, 936 nt, synthetic construct
  misc_feature 1..936: note = source = /note="Description of Artificial Sequence: Synthetic coding sequence"
  source 1..936: mol_type = other RNA
atgcgaggcgccgctcgcgccgcttggggcagagcaggacaaccttggcccaggcccccagctccaggaccccccccgccacctctgcccctcctgctgctgctgcttgccggtttgctggggggagccggtgcacagtactctagcgatcgttgtagttggaagggaagtggcctgactcacgaggcccacaggaaggaagttgagcaggtatacttgcgttgcgccgcaggcgctgttgagtggatgtatcccaccggagcgttgattgtgaacctgcgaccgaatactttttcccctgctagacacctgaccgtgtgcattagaagcttcaccgacagcagcggagcaaatatttaccttgaaaagactggcgaacttagactgctggtccccgatggtgatgggcgcccaggccgagtgcaatgttttgggctggagcaaggtggtttgttcgtggaggccacaccgcaacaagatattggtcgcagaaccaccgggtttcagtacgaactggttagaagacatagagcctctgatttacacgagctctccgctccatgcagaccctgctcagatacagaagttttacttgccgtttgcactagcgacttcgctgtccggggctcaattcagcaagtcacccacgaaccagaacgacaggattccgcaattcacctcagagtgtctagactataccgccaaaaatctcgcgtgtttgaaccagtccccgaaggcgacgggcactggcaaggccgtgtgaggacactgctagagtgtggggtcaggcccggccatggagattttctttttaccgggcatatgcattttggggaagctagacttggctgcgcccctcgcttcaaggattttcagcgcatgtatagagatgcccaggagagaggattgaacccgtgtgaagttggaacagattag

SEQ ID NO: 13752 - RNA, 1221 nt, synthetic construct
  misc_feature 1..1221: note = source = /note="Description of Artificial Sequence: Synthetic coding sequence"
  source 1..1221: mol_type = other RNA
atgggacctagcacaccactcctgatcttattcctcctgagttggtctggaccattgcagggccagcaacatcatctggtggagtacatggagaggaggctcgcggcactagaggaaaggcttgctcaatgtcaggatcaatccagtagacatgcagccgagttaagagattttaagaacaagatgcttccacttcttgaggtcgctgagaaagaaagggaggccctacgaaccgaggcggataccataagtgggcgggtggaccgactggagcgagaggtggattaccttgagacacagaatcctgccctgccttgcgttgagttcgatgagaaagtgacaggaggtccagggacaaagggaaaagggcgccgaaacgaaaaatatgacatggtaactgattgcggttacactatctcccaagtccgctcaatgaagatcctgaaacgattcggggggcccgccggactatggaccaaagatccgctgggacagacggagaagatatatgttttagatggcacacaaaacgataccgcttttgttttccccagactccgcgacttcaccctggcgatggctgcacggaaagcttccagggtccgggtcccctttccgtgggtgggtacaggacaacttgtgtacgggggatttctgtatttcgctaggcggccaccaggaagaccaggaggcgggggagagatggaaaatactctgcaacttataaagttccacttggccaatcggacagtggtggactcatcggtatttcccgcagagggcctgatcccaccatacggcctgaccgccgatacatacatagatctggcagccgatgaagaaggattatgggctgtatacgcaactagagaagacgacagacatctatgtctcgcgaaactggacccacagacactggatactgagcagcagtgggacactccatgtccgagagaaaatgctgaggctgcattcgtgatatgtggcacgttatacgttgtgtataatactcgccctgccagtcgcgctagaattcagtgctcatttgacgccagcggaaccctcacccctgaacgcgctgccctgccatacttcccaaggagatatggcgctcacgcctcactccgatataatcctcgcgagcgccaactctatgcctgggatgacggctatcagatcgtatataaactcgaaatgcgcaagaaagaggaagaggtttag

SEQ ID NO: 13753 - RNA, 900 nt, synthetic construct
  misc_feature 1..900: note = source = /note="Description of Artificial Sequence: Synthetic coding sequence"
  source 1..900: mol_type = other RNA
atgggaggcccacgagctctgctggcagctctttgggctctggaggcagcgggcacggcagccctcaggataggcgccttcaacattcagtccttcggggacagcaaagttagcgaccctgcgtgtggcagcatcatcgcaaagatcttggcaggatatgatctagctctagtgcaggaagtgagagaccctgacctcagcgctgtttccgcccttatggaacaaattaattcagttagtgaacatgagtactcgttcgtcagcagccagcctttaggacgtgatcaatataaggagatgtatttatttgtgtacaggaaagacgccgtcagtgtggttgatacgtacctgtaccccgatcccgaagatgtattttcccgagagccattcgtggtaaagttttcagcccctggaactggagagagagctccacctctgccgtcacgtcgcgccctaacacccccaccccttcctgccgctgctcagaaccttgtgcttatacctctgcacgccgcgccacaccaggcggtagccgaaatcgacgcactgtatgacgtgtacttagatgtaatagacaaatggggaaccgatgatatgctctttctcggagactttaatgccgattgctcttacgtgcgtgctcaagattgggctgccatacgtctgcgaagttcggaagtgtttaagtggctgatccctgatagcgcggacactacagttgggaactctgattgcgcctatgatagaattgtggcctgcggagcaaggctgagacggagcctgaagcctcagtccgccacagtccacgacttccaagaggagttcggcctcgatcaaacccaggccctggcaatctctgaccacttccccgtagaagtgaccctgaaatttcacagatag

SEQ ID NO: 13754 - RNA, 1617 nt, synthetic construct
  misc_feature 1..1617: note = source = /note="Description of Artificial Sequence: Synthetic coding sequence"
  source 1..1617: mol_type = other RNA
atgggctgtctatggggccttgcactcccgctcttttttttctgctgggaggttggcgtgagcggtagtagtgccgggccatcaacccgtagagctgatacagccatgacaactgatgacacagaagtgccagccatgactcttgccccagggcacgcagcactcgagacccaaaccctgtcagccgagacaagttcccgagcctccacgcctgctggccctatacctgaagccgagactcgaggagcaaagcgcatttcgcctgccagagaaactaggtcattcactaaaacctcgccaaacttcatggtgctcatcgctacatcagtagagacaagtgccgcttctggttcccccgaaggggcaggcatgacgaccgttcaaactattaccgggtctgacccaagggaagccattttcgatactctgtgcaccgacgattccagcgaggaagctaagaccttaacaatggacatactcactcttgcccatacttctactgaggctaagggcctgtcttctgaaagctcagccagctccgactcacctcatcccgtaataacgcccagcagagcttctgaatcctcagcttcatcagatggtccacatccggttataactccaagtagagcctctgaatcttcagccagctctgacgggccacatcctgtcattacacccagttggagccctggctccgatgttaccctcctcgctgaagctctcgttaccgttaccaacattgaagtgattaattgcagcataactgagatcgaaactacaacttcttcaataccaggcgcatctgacaccgacttgatccccaccgagggagttaaggctagttcgactagtgatcctccagccttgcccgacagcacagaagctaagccccatattacagaagtgactgcttccgccgagactctcagtaccgccgggactacagaatcagccgctccagacgccaccgtgggaacacccctcccaacaaactccgctaccgaaagagaggttacagctcctggagccaccaccctttctggagcactagtaacagtctctagaaatcctcttgaggagaccagtgccttaagtgtcgaaaccccaagttacgttaaagtgtccggggccgcaccagtgtcaattgaagcaggatcagccgtcggtaagacaacatcattcgccgggtccagtgcctcctcttactcaccctccgaagcagccctgaaaaactttacaccttccgaaacacctacaatggacatcgctacgaaaggtccctttccaacatcacgggatcccctaccttctgtaccccccacgacaacgaactcttctcggggtaccaattcaactctggccaagattactacttccgccaagacaaccatgaaaccccccaccgctacccccaccaccgccagaacacgccctaccactgatgtgtctgccggagaaaatggaggatttctgctgctccgcttgtccgtcgcatcgcccgaagacctaaccgatccaagggtggcagaacgtttaatgcagcaattacaccgagaacttcacgcacacgcccctcactttcaagtgagcttgcttcgtgtacgccgcggttag

SEQ ID NO: 13755 - RNA, 975 nt, synthetic construct
  misc_feature 1..975: note = source = /note="Description of Artificial Sequence: Synthetic coding sequence"
  source 1..975: mol_type = other RNA
atgtctagcgaggccgagactcaacagccacccgccgctccacccgccgctcccgcactgtccgctgcagacacaaagccagggacgaccggatccggagctggttctggggggccaggaggattaacctcagccgcaccagctggaggcgacaagaaagtgatcgccacaaaagtgctcggaactgtgaagtggttcaacgtacggaacgggtatgggtttataaaccggaacgatacaaaagaagacgtgttcgtgcaccaaactgcaatcaagaaaaataacccaaggaaatacctccgatcagtgggtgacggagaaacagttgagttcgatgtcgtggaaggcgaaaagggggcagaagcagccaatgttaccgggcctggtggagtgccagttcagggcagtaaatatgcggctgatcggaaccactacagacggtatcctcgacgcagagggccgccacggaactatcagcagaattaccagaactcagaaagcggagagaaaaacgaggggagcgaatcagccccagaaggacaagcccagcaacgcagaccctacagacggcggcgctttccaccttattatatgcggagaccttatggacggagaccacaatattcgaatcctcctgtccagggcgaggtgatggaaggcgcggataatcagggtgctggtgaacaaggaagacctgtgagacaaaatatgtatagaggctatagaccacgttttcgcagaggccctcccaggcagcgccagcccagggaggatgggaatgaggaagacaaagaaaatcagggggatgaaactcaaggccagcagccaccccagagacgctatcgccgcaatttcaactacagacggagacgcccagagaatcccaaaccccaggatggcaaagaaacaaaagcggccgatcccccagcagagaactctagtgcgccagaggcagagcaaggaggagctgaatag

SEQ ID NO: 13756 - RNA, 210 nt, synthetic construct; identical to SEQ ID NO: 12117
  misc_feature 1..210: note = source = /note="Description of Artificial Sequence: Synthetic coding sequence"
  source 1..210: mol_type = other RNA

SEQ ID NO: 13757 - RNA, 342 nt, synthetic construct
  misc_feature 1..342: note = source = /note="Description of Artificial Sequence: Synthetic coding sequence"
  source 1..342: mol_type = other RNA
atgaagttgctaacaacaatatgtagactgaaacttgagaagatgtactctaagacaaacactagctcaacgatctttgaaaaggcacggcatggaaccgaaaaaattagcacagctagaagcgagggacaccatattaccttttcgcggtggaaatcctgtactgcaattggaggccgctgtaaaaaccaatgcgatgattctgaattccgcattagctattgcgcccggcctacaactcattgctgtgtaacggagtgtgatccaaccgaccctaacaactggatccccaaagacagtgtaggaacacaggaatggtatcccaaagattcaaggcactag

SEQ ID NO: 13758 - RNA, 3030 nt, synthetic construct
  misc_feature 1..3030: note = source = /note="Description of Artificial Sequence: Synthetic coding sequence"
  source 1..3030: mol_type = other RNA
atggatctgattaggggagtgttactgagactgctgcttctagcaagttccctgggtccaggggctgtctctcttagagctgcgattcgtaaaccgggtaaagttggacccccactcgacataaaacttggtgctctgaactgtaccgcctttagcattcagtggaaaatgcccagacacccaggctcccccatcctcggatacactgtgttttatagcgaagtcggcgctgacaaatccttacaggagcaactccacagcgttcccttaagtcgcgacatccccacgacggaggaggtgatcggggatctcaaaccaggaaccgaatatagagtatcaatcgccgcatactcccaggcaggcaagggtcggctgtcttctccacgtcatgtgaccactctatcccaggattcctgtcttccacctgcagccccacagcaaccacatgtcattgtggtgtctgacagcgaagttgcactgtcctggaagccaggggcatctgaaggatccgcacccattcagtattattcagtggagttcatccgtcctgatttcgacaaaaaatggacttcaatacacgaacgcatccaaatggatagtatggtgattaaagggctggatccagataccaattaccagttcgcagtccgagcaatgaattctcatggcccttccccacggagctggcccagtgatataatccgaacgctttgtccagaagaggctggcagtggaaggtacggacctagatatatcaccgacatgggagcaggggaagacgacgaaggatttgaagatgacctcgatttagacatttcattcgaagaagtgaaaccactacccgccacgaaagggggaaataaaaagtttttggtggagtccaagaagatgagtataagcaacccaaaaaccataagccggcttattcctccgacctccgcatctttacctgtaactaccgtggcccctcaaccaatccccatccaacgtaagggcaaaaatggcgtggcaataatgtctcgccttttcgatatgccatgtgacgaaactctttgctccgccgatagcttttgcgttaatgattatacgtggggcggatctcgctgtcagtgcacactggggaaagggggtgaatcatgttcagaggacatcgtgatacagtatccacagtttttcggacactcctacgtcaccttcgaacctctaaagaattcttaccaggcatttcaaatcactctcgagtttcgggccgaagccgaggacgggctgctgctgtattgcggggaaaatgagcatggccggggcgatttcatgtctctagccatcatacggcggagtttacaattcagattcaactgtggtacgggtgtcgccatcattgtcagcgagacaaaaatcaagttgggtggttggcatactgtcatgctttacagggatggacttaatggtcttttacaactcaataatggaaccccagtgacgggccagtcccagggacagtattcgaagataacattccgaacccctctgtacttgggaggggctccgtcagcttactggctagtgagagcgacaggtaccaacagggggtttcaaggctgcgttcagtccttggcagtgaatggccggaggatagacatgaggccatggcctctcggaaaggcgctgagtggagccgatgtgggagaatgttcatcaggaatttgtgacgaggcttcttgtatccacggcggaacatgtacggcaataaaggctgacagctacatatgtctatgtccactgggcttcaagggcaggcattgcgaagatgctttcaccctcactattcctcagtttcgtgaatcactgcgcagctatgctgccactccctggcctttggaaccacaacactacctgtctttcatggaattcgaaatcacctttcggcctgattccggtgacggcgtgctattatactcatatgataccggatctaaagacttcttgagtatcaatcttgctggaggacatgtcgaattccgcttcgattgcggctcaggcactggggtgttaaggagcgaagaccctctgacactgggcaactggcatgagctacgcgtgtctcggaccgcaaaaaacggtatcctgcaagtcgacaagcagaaaatcgttgaaggcatggcggagggaggcttcacacaaatcaagtgcaatacagatatatttataggcggagtgcccaattacgacgatgtcaagaaaaacagtggcgtcctgaaaccattctcagggtcaatccaaaagatcatcttaaacgaccgtaccatacatgtgaaacacgattttacttcaggagtgaatgttgaaaatgccgctcatccatgcgtgcgtgcgccctgtgcccatgggggatcttgtcggcctcgcaaggaaggatatgactgcgattgccctctgggattcgagggcctgcactgccagaaggcgatcatagaagctattgagattccccagtttattggtcgttcttatcttacatatgataatcccgacatcctgaaacgcgtttccgggtctagatctaacgtgtttatgaggtttaaaaccactgcaaaggatggtctattactgtggagaggggattcacctatgagaccaaatagtgattttatttctctgggactccgtgacggcgctttagtttttagctataatctcggttcgggcgttgcatctatcatggtgaacggatcctttaatgacggcaggtggcacagagtgaaggctgtgcgcgatggacagtccggcaagattaccgtcgatgactatggagccagaacgggaaaatcacctggaatgatgaggcagctcaatatcaatggcgcattgtacgtaggcggaatgaaggaaattgcactccatactaatcgccagtatatgcggggactggtgggttgcatctcccactttactctttcaacagattaccatatatcgcttgtggaggacgcggtggacggcaaaaacatcaatacttgcggcgctaaatag

SEQ ID NO: 13759 - RNA, 1272 nt, synthetic construct
  misc_feature 1..1272: note = source = /note="Description of Artificial Sequence: Synthetic coding sequence"
  source 1..1272: mol_type = other RNA
atgagcgtgagaggcatcctgagactgggaactcaagaataccctagccccctggatcccgaagtaggaccatactgcgacacaccaacaatgcggaccctctttaacctgctctggcttgccctcgcctgctcgccggtgcacactacacttagcaagagcgacgcaaaaaaagccgcttccaaaaccctgctggaaaaaagtcaattttcagacaaacctgtgcaggatcgcgggctggtcgtcactgacctcaaagccgaaagcgtagtccttgaacacagatcatattgttccgcaaaggcacgggatcggcacttcgcaggcgatgtcctgggttacgtgactccatggaattcccacggttacgacgttacaaaagtttttggctccaaattcacccaaattagcccggtatggttgcagctcaaaaggcgcggtagggagatgtttgaagtgacaggcttacatgatgtcgaccagggctggatgagagctgtaaggaagcacgcgaaagggctacacattgtcccgagactgctctttgaggactggacttacgacgactttcgaaacgtgttggacagtgaggatgaaatcgaagagctctcgaagacggtcgtgcaggtcgcaaaaaatcaacatttcgacggcttcgtagtggaggtgtggaatcagctgctgagccagaagagagtgggactgatacatatgcttacacacctcgccgaagccttgcaccaggcccgattgctggccctgctcgtgatacccccagctataacaccaggcacagaccaactcggaatgtttacacataaagagttcgaacagctagcacctgttctcgatggtttttcactaatgacctatgactacagcactgcacatcagccgggtcctaacgcccctctttcatgggtacgagcttgcgtacaggtactagaccctaagagcaaatggagatccaaaattttactgggattaaatttttacggcatggactacgctacaagcaaagacgcgcgggaacccgtggtgggcgcccgatacattcagacactcaaggatcatcgaccgcggatggtctgggattcccaggcatcggaacacttcttcgagtacaaaaaaagcagatctgggagacacgtggtgttctaccccacactcaaaagtctgcaagtcagattagaattggctcgcgagttgggtgttggtgtgagcatttgggaattaggacaggggttggactacttttacgatcttctctag

SEQ ID NO: 13760 - RNA, 1182 nt, synthetic construct
  misc_feature 1..1182: note = source = /note="Description of Artificial Sequence: Synthetic coding sequence"
  source 1..1182: mol_type = other RNA
atgcgaactctctttaatctgctttggctagcccttgcttgtagtcccgtgcacacaacgctgtccaaatctgatgcgaagaaagcggcatctaagaccctcttagaaaagagccagttctctgacaaaccagtgcaagatagaggactagtggtgaccgaccttaaggctgaatctgttgtcctggagcaccggtcatactgtagtgctaaggcacgagatagacactttgctggtgacgttctcggctatgtgaccccctggaactcacacggttacgatgtgaccaaagttttcgggagcaagtttactcagatttctccggtttggttgcagctgaaacggcggggcagggaaatgtttgaggtgacaggactccatgatgtagaccaagggtggatgagggcggttcgcaaacatgcgaagggcctgcatattgtcccaagactcctgttcgaagactggacctacgatgattttcggaatgtgctcgatagtgaagatgaaattgaagaactctctaaaacagtggtgcaggtggctaagaaccagcattttgatgggttcgttgtggaggtgtggaaccaattattgtctcagaagagagtggggttaatccacatgctcacccatctcgctgaggcactccaccaagcccgcttgcttgctttgctagttataccccccgcaatcacccctggaaccgaccagctcggcatgttcacccacaaagaattcgagcagctggcacctgtcctggatggcttctctctgatgacttacgactactccaccgcccatcagcccggtcccaacgcacccctgtcctgggtaagagcgtgtgtccaggtgctggatcccaaatcaaaatggagatcaaaaatcttgttagggttaaacttttatggtatggattacgccacatctaaggacgccagagaacccgttgttggcgcacgatatatacagaccttgaaagaccatcgcccacgcatggtctgggatagtcaggctagtgaacatttcttcgagtacaaaaagtctaggagcggtagacatgtggttttctatcccactcttaaaagtttacaggttcgacttgaattagctagggaactgggagtgggagtatccatttgggagttaggacagggactcgactatttttacgaccttctatag

SEQ ID NO: 13761 - RNA, 1959 nt, synthetic construct
  misc_feature 1..1959: note = source = /note="Description of Artificial Sequence: Synthetic coding sequence"
  source 1..1959: mol_type = other RNA
atggcaagcgtggcatgggccgtcctgaaagtcctcttactgcttccgacccagacatggtcacccgtgggagccggcaatcctcccgactgtgacgcacccctcgcttcagccctaccacgcagctcgtttagtagttcatctgaactctccagtagccacggcccgggattctcacgactcaatagacgggacggcgccgggggctggacaccccttgttagtaacaaataccagtggctccagatcgatcttggcgagcgtatggaggtgaccgccgttgccacccagggcgggtacggttcatcagattgggtgacttcttacctcctaatgttcagcgatggcggtcggaattggaagcagtatagacgcgaggagtctatatggggatttccaggaaatactaacgccgattctgtggttcattaccgtctgcagcccccctttgaggcccgctttcttagattccttccacttgcatggaatccacgaggtcggatcggaatgcgaatcgaagtgtacggatgcgcgtacaagagtgaagtcgtgtattttgacggccaaagtgccctgttgtacagacttgataaaaagcccctgaaacccataagagatgttatcagcctcaaattcaaagctatgcaaagtaacggtatcctgctgcatcgcgaaggacagcatggaaatcacataacactcgaactaattaagggtaaactggtcttctttcttaatagtggaaacgcaaaactaccgtccactattgcccccgtgaccctaactctcggatccctgctcgatgaccagcactggcactctgttctcatcgagctactcgacactcaggtgaacttcactgttgataaacacactcatcattttcaggccaagggagattccagttatctcgaccttaactttgagatctcttttggcggaatacctactccggggcgctctagagcatttcgcagaaagtcctttcatggctgcctcgagaatctgtactataacggcgtcgatgtgacagaacttgccaagaaacataaacctcagatattgatgatggggaacgtttccttttcatgcccccagccccaaaccgtgccagtaacctttttgtcttcgagaagctatctcgccctcccagggaacagtggtgaggacaaagttagtgtgacctttcagttcaggacctggaatagagcgggtcatctgctgttcggcgagctgaggcgcggaagcgggagcttcgtgttgtttctgaaggacggtaagctcaagctgagtcttttccaacctggacaatcccctcgcaatgttaccgctggagccggcttgaatgacgggcagtggcactccgtgtctttttcagctaaatggagccacatgaacgtggttgttgatgacgataccgccgtccagccactagtcgcggtcttaatcgattcaggcgatacctactattttggtgccctctacgaacaatcatgtgaagcacataaacatcgagggaacccgtcagggctgtattatatcgacgcagacgggagcggccccctcggcccgttcctggtttattgtaacatgacagatgccgcgtggactgttgtgcagcacggaggcccggacgcagtgacattgaggggagctcctagtggtcatcctaggtcggccgtgagttttgcatacgcagccggtgctgggcaattgcggtcagccgttaatcttgctgagaggtgtgagcagagactcgccctgagatgcggaactgcaagacggccagattccagggacggcactccgctgagttggtgggtgggcagaacaaacgaaacgcatacaagctggggtgggagcttgcctgacgcacagaagtgtacttgtggactggaggggaattgtatagacagtcagtattattgtaattgcgatgccggaagaaatgagtggtag

SEQ ID NO: 13762 - RNA, 1455 nt, synthetic construct
  misc_feature 1..1455: note = source = /note="Description of Artificial Sequence: Synthetic coding sequence"
  source 1..1455: mol_type = other RNA
atgtggtatgtctccaccagaggtgtagcacctcgagtgaattttgagggcgctttattttcaggctacgctcccgacggagggctgttcatgcccgaggaattaccgcagctggacagaggaaccttgtgtcagtggagcactcttagttatccgggcctagtgaaagaactgtgtgccctgttcatcggttccgagctgctaccaaaagacgagctgaacgatttgattgatcgcgctttctcccgcttccgccaccgcgaagtagtgcaccttagtcgactgcgcaatggactcaacgtgctggagctctggcacggagttacctatgcctttaaagatctctccctgtcatgtacaacccagtttctgcaatactttttagaaaagcgagagaaacatgttaccgtagtcgtgggaaccagcggggataccggatcagcagccatcgagtcagtgcaaggagcaaagaatatggatattatcgtcctgctgcctaagggccactgtactaaaattcaggaactccagatgacaaccgtccttaaacagaacgtccatgtctttggggtcgagggaaattccgatgaactagacgagcccatcaagaccgtgtttgccgatgtcgcatttgttaaaaaacacaacctcatgtccttaaattctatcaactggagccgggttttggtgcaaatggcacaccattttttcgcttattttcagtgtacgccttctctcgatacacaccccctccccctcgttgaagtcgtggtgccaaccggagccgccgggaaccttgctgcgggatatattgctcagaagatcggactccccatccgtttggtcgttgccgttaaccgtaatgacatcatacatagaacagtgcagcagggcgatttttccctgtctgaagctgtcaagtctacactagcatccgccatggacattcaagtcccctacaacatggaacgggtgttttggcttttgtccgggagcgattcccaagtcacccgcgctcttatggaacagttcgagcgtacccagtcagttaatttgcccaaggagctccattctaagctatctgaggccgtaacctccgtgtctgtatccgacgaggccataacccaaaccatgggtcgctgctgggatgagaaccagtacttgctatgtccacattctgccgtggccgtgaactaccattatcaacagatcgacagacaacagccctccaccccccgatgttgcctggccccagcctccgccgcaaaattccccgaagcagtactggccgccggcctgacccccgaaacgcccgcagaaatagtggctctggaacacaaagaaactcgatgtacgctgatgaggaggggcgataattggatgctaatgctccgagacacgattgaggacctgagccgtcagtggaggtcacatgctttgaataccagccagtag

SEQ ID NO: 13763 - RNA, 264 nt, synthetic construct; identical to SEQ ID NO: 12124
  misc_feature 1..264: note = source = /note="Description of Artificial Sequence: Synthetic coding sequence"
  source 1..264: mol_type = other RNA

SEQ ID NO: 13764 - RNA, 453 nt, synthetic construct
  misc_feature 1..453: note = source = /note="Description of Artificial Sequence: Synthetic coding sequence"
  source 1..453: mol_type = other RNA
atgagattcatggccggccccgctggttcacagtctttgggaccactttgcttccactcatcacctcaagccctgtacaccgtcctgttgattgttctcgttatgatgtccctggtgtttggaaaatttgtacccgtcaactgggagccccctcagccacttcctttccccaagtacctcagatgctacagatgtctccttgagaccaaggagctcgggtgccttctcgggagcgacatctgcctgaccccagccggctcttcatgtattacccttcacaagaaaaatagtagcggtagtgatgtaatggtgtctgattgtaggagtaaagaacagatgtcagactgctcaaacacacgcacatctccagtatctggattttggattttttcacagtactgttttctcgacttttgtaacgaccctcagaatagaggactatacaccccatag

SEQ ID NO: 13765 - RNA, 873 nt, synthetic construct
  misc_feature 1..873: note = source = /note="Description of Artificial Sequence: Synthetic coding sequence"
  source 1..873: mol_type = other RNA
atgtctgtgaggcgcggaagacggcctgcgaggccaggaactcgcttgtcttggctgctgtgctgctccgcactactgagccctgctgctggctacgtgatcgtgtcttcagtatcatgggccgttaccaatgaagtggatgaagagctcgacagcgcctctacggaagaagcaatgcctgctctattagaggattccggaagtatatggcaacaatcttttcctgcttccgctcataaggaagatgcccacctgcgtccaagagccggagctgctagagcaagaccaccccctgcaccccccggcatgtttagctatcggagagaaggtggacagactgcaagtgctcccccgggacctagactgcgcgccgcaaccgcccgctcacttgctcatgcatcggtgtggggctgcctcgccacagtaagcacccataaaaagatacagggcctgcccttcggcaactgccttccagtctctgacggccctttcaataattccacaggtatcccatttttttatatgaccgcaaaagacccggtggtggctgatctaatgaagaacccaatggcttctctcatgctgccagaatcagagggcgagttctgccgcaagaatatcgtcgacccagaggacccccgctgcgtgcagttgacgctgacaggccagatgatagctgtgtcacccgaagaagtggaatttgccaagcaagccatgttttccaggcacccaggaatgagaaagtggcccagacaatacgagtggttttttatgaagatgaggatcgaacatatatggctgcagaagtggtatgggggagcctcctcaatctctcgcgaggagtatttcaaagcagtgccccgaaaagcatag

SEQ ID NO: 13766 - RNA, 2742 nt, synthetic construct
  misc_feature 1..2742: note = source = /note="Description of Artificial Sequence: Synthetic coding sequence"
  source 1..2742: mol_type = other RNA
atgggtcccgaagcattgagctccctgctcttactcttgcttgtggcatctggagacgccgatatgaagggccatttcgatcccgccaagtgtcgctatgccctaggaatgcaagatcgaacaatccccgattcagatatctccgcctcgtcatcctggtccgattccaccgctgccagacactcccggctcgagtcaagtgacggcgatggcgcatggtgccctgcgggctcagttttccctaaggaggaagaatacttgcaagtggacctacaaagactacatctggttgctctcgtgggaactcagggacggcatgctgggggtctgggaaaggaattctcacgctcttacaggctgaggtacagtagagatggcagacgatggatgggctggaaagacaggtggggacaagaagtaatctctgggaatgaagatcctgaaggtgtggtgttaaaggacctggggccaccaatggttgctcgacttgtgagattttatccccgggctgaccgggtaatgagcgtttgtctcagagtggaactttatggatgcctctggcgcgacggccttctgtcttacactgcccccgtgggccagaccatgtatcttagtgaggccgtttacctgaatgattcaacttacgacggacacaccgttgggggactccagtatgggggactgggccagctggcagatggtgtcgtcggattagacgacttcaggaagagtcaggaacttcgagtttggcccggatatgactacgttggatggtcaaaccacagtttctcaagtggttacgtggaaatggaatttgagttcgatagactgcgcgcctttcaagccatgcaagtccactgcaacaatatgcacacactgggtgctcgcctgcccggaggagtcgaatgccgatttcgcaggggaccagccatggcttgggaaggcgagccaatgagacataacttagggggaaatctgggagaccctcgggcccgcgccgtgagtgtgccccttggcggaagagtagctcgtttcctacagtgtagatttctgttcgctggcccgtggttgctttttagcgaaatttctttcatctcggatgtggtgaacaacagtagccccgcacttggtggtacattcccccctgctccgtggtggcctccaggacctccacctactaattttagttcactagagcttgaaccacggggacaacaaccagtagccaaggctgagggctccccaacagccattctgatagggtgtctggtcgcaataatactgctcctgcttttgataatcgccttgatgctgtggcggctgcactggcggcgcctcctgagcaaagcagaaagacgcgtcctcgaggaggaacttaccgtgcaccttagtgttccaggagacacgattctgattaacaatagaccaggccctcgtgagcctcctccatatcaagaacctaggcccaggggcaatccacctcactccgcgccatgtgtgcccaacgggagtgctttgctattgtctaaccccgcctaccgccttttgctggccacctacgcacgacccccacgagggcctgggcctccaaccccggcttgggctaaaccaacaaacacccaggcttactccggcgactacatggaacccgagaaacccggcgcccccctactccccccacctcctcagaattctgtgcctcattatgctgaagccgatattgtcacactgcaaggcgtaacaggaggcaacacctacgcagtgcccgcactgccacccggcgcagtaggcgatgggcctccccgggttgactttcctcggtcaaggctaagattcaaagagaaactcggcgagggccaatttggggaagtgcatctctgcgaagtcgactcaccacaggacctcgtttccctcgactttcccttgaatgttagaaagggacacccattgctggttgcagtcaagatcctacggcccgacgcgacaaagaatgcccgtaacgattttttgaaggaggttaaaattatgtcaagattaaaggatcctaacattatcaggctactgggtgtgtgcgttcaggacgatcccctatgcatgatcacagattatatggaaaatggtgacctgaatcagtttttgtccgcccaccagcttgaggataaagcagcagagggcgccccaggagacggccaggccgcccagggcccaacgatttcataccctatgctcctgcacgtcgcagcccagatcgcttcagggatgagatacctggctactctcaacttcgtacaccgcgacctcgccactagaaattgtcttgttggtgaaaactttacaataaaaattgctgactttgggatgagtagaaacctgtatgccggcgattattaccgcgttcaaggtagagctgtgctgccgatcagatggatggcctgggagtgcattttgatgggaaagtttacaaccgcttcagacgtttgggccttcggggttacactgtgggaggtcttaatgttgtgtcgcgctcaacctttcggacagttgacagacgagcaagtcatcgagaacgctggtgaatttttcagagaccagggccgtcaggtctacttatcccgacccccagcttgtccacaaggcctgtatgagctcatgctgcgatgctggtcacgcgaatccgagcagcgcccccccttcagtcagttgcaccgatttctcgcagaggacgcactaaacacagtatag

SEQ ID NO: 13767 - RNA, 243 nt, synthetic construct; identical to SEQ ID NO: 12128
  misc_feature 1..243: note = source = /note="Description of Artificial Sequence: Synthetic coding sequence"
  source 1..243: mol_type = other RNA

SEQ ID NO: 13768 - RNA, 270 nt, synthetic construct; identical to SEQ ID NO: 12129
  misc_feature 1..270: note = source = /note="Description of Artificial Sequence: Synthetic coding sequence"
  source 1..270: mol_type = other RNA

SEQ ID NO: 13769 - RNA, 264 nt, synthetic construct; identical to SEQ ID NO: 12130
  misc_feature 1..264: note = source = /note="Description of Artificial Sequence: Synthetic coding sequence"
  source 1..264: mol_type = other RNA

SEQ ID NO: 13770 - RNA, 285 nt, synthetic construct; identical to SEQ ID NO: 12131
  misc_feature 1..285: note = source = /note="Description of Artificial Sequence: Synthetic coding sequence"
  source 1..285: mol_type = other RNA

SEQ ID NO: 13771 - RNA, 327 nt, synthetic construct
  misc_feature 1..327: note = source = /note="Description of Artificial Sequence: Synthetic coding sequence"
  source 1..327: mol_type = other RNA
atgagacagcgacttctgccctcagtgacctctctgctcctcgtggctctgctgttccccggaagcagtcaggcacgtcatgtgaaccacagtgctacagaagccttaggagaactgcgtgagcgcgcacccggccaaggcactaacgggtttcagcttctcagacacgccgtaaaaagagacctcttgcctccccgaacacccccctatcaaggagatgtgcccttgggcattcggaacacaatttgtcggatgcagcagggtatttgtaggcttttcttttgccacagtggcacaggccagcaacatagacagcgatgcggatag

SEQ ID NO: 13772 - RNA, 807 nt, synthetic construct
  misc_feature 1..807: note = source = /note="Description of Artificial Sequence: Synthetic coding sequence"
  source 1..807: mol_type = other RNA
atgctgctgctcgctgctgcatttctggtggccttcgtactcttactctatatggtctctccactgatctcccctaagcccctcgcactgcccggcgcccacgtcgttgtgactggaggcagttccgggatcgggaagtgtatagctatcgaatgttataaacagggagcttttatcacactagtggctaggaacgaagacaaattactgcaggccaagaaagaaatcgagatgcactctatcaacgataagcaggtggtgctctgtatctccgttgatgtctcccaggattataaccaggtggagaatgttataaaacaggcccaggaaaagttaggacccgttgatatgctcgtaaattgtgcaggcatggctgtatcaggaaaatttgaagacctagaggtcagcaccttcgaagtgaagccctataacgtatacattactgtggcgtacccccccgataccgacactcctggattcgctgaggaaaataggacgaaacccctcgaaactagattgataagcgaaaccacctcagtgtgtaaacccgaacaggtggctaaacaaattgtgaaggatgccatccagggaaatttcaattcttcgctgggctccgatggatatatgttaagcgccctcacctgcggaatggcccctgttacttccatcacagaggggctacaacaggtagtgacaatgggcttgtttaggactatcgccctcttctatttaggtagcttcgattccattgttagacgatgcatgatgcaacgagagaaatccgagaacgcagacaaaaccgcttag

SEQ ID NO: 13773 - RNA, 1686 nt, synthetic construct
  misc_feature 1..1686: note = source = /note="Description of Artificial Sequence: Synthetic coding sequence"
  source 1..1686: mol_type = other RNA
atgagatggatcctgtgctggtccttaaccctttgtttaatggcccagacggcacttggcgccctccataccaagaggcctcaagtagttacaaagtatggtaccctgcaggggaaacagatgcacgtgggcaaaacccctatccaagtattcctcggcgttcccttctctcgacccccactcggcattctcagattcgctcccccagaaccaccagagccttggaaaggaattagggacgctactacctacccacctggatgcttgcaggagagctggggccaacttgctagcatgtacgtgtcaacaagagaaagatataagtggcttcggttttctgaagattgtctgtacttaaacgtctacgctccggccagagctcctggggacccgcaactccccgtcatggtatggttccctggaggcgcttttatcgtcggggcagcatcatcctatgaggggtccgacttggccgcacgcgagaaagtggtcctggtgttcttacaacacagactgggcatttttggttttctatccacagatgatagtcacgcacgcggaaactggggtttgctggaccaaatggctgctctcaggtgggtccaggaaaatatcgcagcttttggcggcgacccgggtaacgtgacactgtttgggcagagcgccggggccatgtctatctccggacttatgatgtcccctctcgcgtctggtcttttccacagggctatctcccagtcgggtacagcattgtttcgactctttatcacatccaatccgctgaaggtcgctaaaaaggttgctcatttagccggatgcaaccacaatagcacacaaattctggtaaactgcctacgtgcattgtctggcaccaaagtcatgcgcgtctcaaacaagatgcgcttcctgcagctcaactttcaaagagatcctgaagaaatcatttggtcaatgtcccctgttgtggatggggttgtgatccccgacgatccactggtactgcttacccaggggaaagtatcatccgtcccataccttctcggagtaaataacctggaattcaactggctcctaccctacataatgaagtttcctctgaatcgtcaggcaatgcgtaaggaaaccatcacaaagatgttgtggtctacaagaacgttactgaacattaccaaggaacaagtgcccctggtcgtggaagagtatctggacaatgtaaacgaacatgattggaagatgctgcggaaccggatgatggatattgtgcaggatgccacctttgtgtatgccactctccagaccgcccactatcacagagacgcagggttgcccgtttacctatatgagttcgagcaccatgcaaggggaataattgtgaagccacggaccgatggggcagaccacggtgatgagatgtacttcctctttggcggaccctttgccacaggcctttcaatggggaaagaaaaagccctatcactgcagatgatgaagtactgggctaacttcgctcggaccggaaatcccaatgatggcaacttaccttgctggccgcgatataataaagacgagaagtacctccagctcgacttcacgacgcgagtaggcatgaaattgaaagaaaaaaagatggcattttggatgtcactctatcagtcacagcgaccagaaaaacagaggcagttttag

SEQ ID NO: 13774 - RNA, 444 nt, synthetic construct
  misc_feature 1..444: note = source = /note="Description of Artificial Sequence: Synthetic coding sequence"
  source 1..444: mol_type = other RNA
atggcatcatctctaaagatctggggtacactactcgctctgttgtgcatcctctgcactcttctggttcaatctaaggaggtcagctggagggagtttatgaagcaacactacttaagccccagccgcgaatttcgcgaatataagtgcgatgtcttaatgcgagagaacgaggcacttaaagataaatcttctcacatgttcatatatatcagttggtacaaaatcgagcacatttgcacaagtgacaattggatggatcgctttcggaacgcctatgtgtgggttcaaaatcctcttaaagtgctcaaatgccaccaagaaaactcaaagaatagctacaccgaatctcggtcgttcaattatatagaatttcactgctcaatggacggctatgtagactccatcgaagatcttaaaatggtagaacctatcggaaactag

SEQ ID NO: 13775 - RNA, 444 nt, synthetic construct
  misc_feature 1..444: note = source = /note="Description of Artificial Sequence: Synthetic coding sequence"
  source 1..444: mol_type = other RNA
atgactagttctttgaagatctggggtatactgctcgccctcctgtgcattttgtgccggctgtgtgtctattccaacaacatttattggcgggaatttataaaattgcattacctgtcaccatcaagggagtttaaagagtacaaatgtgatgtcctgatgagagagaaggaggcgctcaaagggaagagttttcatatgttcatttattcactgtggttcaagattcagagagcatgtattaacgaaaagggcagcgacaggtatcgaaacgcgtacgtttgggccccaggggctctcaaagtgctcgagtgtcactgggaaaaatataacaaccgatacaccgagtctcgtagttttagttatatcgagtttcattgcggcgtcgatgggtacgtggacaacatagaagatttgcgcattattgaacctatttccaattag

SEQ ID NO: 13776 - RNA, 1248 nt, synthetic construct
  misc_feature 1..1248: note = source = /note="Description of Artificial Sequence: Synthetic coding sequence"
  source 1..1248: mol_type = other RNA
atgtcccccttcctctacctggtgcttcttgtcctgggtctgcacgcaaccatacactgcgccagccccgaaggaaaagtgacggcgtgtcactccagtcagccaaacgcaaccttgtacaaaatgtcttctattaatgcagactttgccttcaatctatatcgccgatttacggtcgaaacacccgacaagaatatcttcttttcccccgtctccatttctgccgcccttgtgatgctctcctttggcgcctgttgctcaacccagaccgaaatcgtcgaaaccctagggttcaatctgactgacactccaatggttgaaattcagcacggattccaacatcttatctgtagcctcaattttcccaagaaagagctggagcttcagatcgggaacgctctctttatcggtaagcacttgaaaccacttgccaagttcctcaatgatgtcaaaacgttgtatgaaacagaagttttcagcactgatttctcaaatatctcagcggccaaacaggaaattaacagccacgtagaaatgcaaaccaagggaaaggtggtcggccttattcaggacctgaaacccaacacaatcatggtactagtgaattacattcacttcaaagctcaatgggctaatcctttcgacccatccaaaaccgaagattctagctcattccttatagataaaaccactaccgtgcaagtccctatgatgcatcagatggaacaatattaccaccttgtggacatggaactgaactgcacagtgcttcagatggattattctaaaaacgccctagcactgtttgtacttcccaaggagggacaaatggaatcggtggaagcagccatgagcagtaagacattgaaaaaatggaatcgtctgcttcagaaaggatgggtggacctattcgtccctaaattctcgattagcgcaacttatgaccttggcgcaacgctgctgaaaatggggatccagcacgcatactccgaaaatgccgatttctctgggctgaccgaggataacggcttaaaactatccaatgcagcccacaaagccgtcttacatattggggagaagggaaccgaagccgccgcagtgcccgaggtggaactcagtgaccagcctgaaaataccttcctacatcctataattcagatagatcggagtttcatgttgttaattctggaacgctcgactcgaagtatcttatttcttggaaaagtggtcaatcctacagaagcatag

SEQ ID NO: 13777 - RNA, 285 nt, synthetic construct; identical to SEQ ID NO: 12138
  misc_feature 1..285: note = source = /note="Description of Artificial Sequence: Synthetic coding sequence"
  source 1..285: mol_type = other RNA

SEQ ID NO: 13778 - RNA, 1062 nt, synthetic construct
  misc_feature 1..1062: note = source = /note="Description of Artificial Sequence: Synthetic coding sequence"
  source 1..1062: mol_type = other RNA
atgaggttaccccgcagggcagcactgggcctgcttccattactgcttttattgccccccgctcctgaagcagcaaaaaaacctacaccgtgccaccgatgcagagggctagtagataaatttaaccaggggatggtcgataccgcgaagaaaaatttcggtggaggtaacacggcgtgggaagaaaaaacgctttctaaatatgaaagttccgagatccgcctgttggaaatactcgaaggtctctgtgagtctagtgacttcgaatgcaaccaaatgcttgaggctcaagaggagcatcttgaggcatggtggctccagctgaagtccgagtaccctgacctgtttgagtggttttgtgttaaaaccctgaaggtgtgctgttcccctggcacctacggaccggactgcttagcatgtcagggagggtcccagagaccatgttctggaaacggccattgtagcggcgacggatcgaggcagggtgacggtagctgtagatgtcatatgggttaccagggccccctgtgcaccgattgcatggatggttatttttccagtctccggaacgaaacacactctatatgcacagcctgcgatgaatcttgtaagacttgctctggcttaacgaatcgagattgcggagaatgcgaggtaggttgggtattagatgagggtgcctgtgtcgatgtcgatgagtgtgcggcagaaccaccaccatgcagcgcagcccagttctgcaaaaacgccaatggtagctacacctgtgaggagtgcgactcctcttgcgtcggttgtaccggcgaagggcctgggaactgtaaagaatgtatcagcggatatgcccgagagcacggacagtgtgcggacgttgacgaatgctcactcgcagagaaaacatgcgtacggaaaaacgaaaactgttataatacgcctggctcctatgtgtgtgtatgtcccgacgggtttgaggagacggaagatgcttgtgtgccaccggccgaagctgaagctaccgaaggagagtccccaacccaactgccttcacgcgaggacctgtag

SEQ ID NO: 13779 - RNA, 651 nt, synthetic construct
  misc_feature 1..651: note = source = /note="Description of Artificial Sequence: Synthetic coding sequence"
  source 1..651: mol_type = other RNA
atgaaactgaatttagttcagatattttttatgcttctcatgctgctgttggggctgggaatgggcttggggctcggactgcacatggcaaccgctgtgctggaagagtcagatcagccgttgaacgaattttggtcatcggatagtcaagataaggccgaagccactgaggaaggggacgggacacagacaacagaaacattagtgcttagcaacaaggaggtggtgcagcccggatggcctgaagatcccatcctcggagaggatgaggtgggagggaacaaaatgcttagagccagtgctttgttccagtctaacaaagactacctgcgattagatcagaccgatagagaatgtaatgatatgatggcgcataaaatgaaagaaccttcacaatcctgcatcgcccagtacgcatttatacatgaagaccttaacactgtgaaagccgtgtgcaatagtcctgtaatcgcatgtgagctcaagggcgggaaatgtcataaaagtagcagacctttcgacctcactctgtgtgaactcagtcagcctgatcaggttacccccaactgtaattatctgacaagcgtgattaaaaaacatatcattattacctgtaacgacatgaagcgacaactgcccaccggacaatag

SEQ ID NO: 13780 - RNA, 222 nt, synthetic construct; identical to SEQ ID NO: 12141
  misc_feature 1..222: note = source = /note="Description of Artificial Sequence: Synthetic coding sequence"
  source 1..222: mol_type = other RNA

SEQ ID NO: 13781 - RNA, 609 nt, synthetic construct
  misc_feature 1..609: note = source = /note="Description of Artificial Sequence: Synthetic coding sequence"
  source 1..609: mol_type = other RNA
atggagcgaggcgccggcgctaaactcttgcccctcctgctactgcttcgggccaccggatttacttgcgcccagacagatggtcggaatgggtacaccgccgtgattgaggtaacatcagggggtccatggggggattgggcgtggcctgaaatgtgtccggatggtttctttgcttcaggcttttccttaaaagtggagccaccccagggaattcccggcgatgacaccgcgctcaatggtatcagattacattgcgcaagggggaacgtccttggaaacacccacgtggtcgaatcgcaaagtgggagttggggagagtggtccgagcccctttggtgccgcggtggcgcttacctggtcgcattctcacttagggtagaagcaccaaccaccttaggagacaataccgccgccaataacgtaaggtttagatgctccgatggggaggagttgcaaggtccaggtctcagctggggagattttggcgattggagtgaccattgtcctaaaggagcatgtggattacagacaaagatacaaggcccgcgaggactcggagacgacacggctttaaatgatgcgcggctgttttgttgccggtcttag

SEQ ID NO: 13782 - RNA, 759 nt, synthetic construct
  misc_feature 1..759: note = source = /note="Description of Artificial Sequence: Synthetic coding sequence"
  source 1..759: mol_type = other RNA
atgcagttaactcgttgctgtttcgtctttctggtgcagggatctctatacctagtgatctgcggacaggacgatgggccacccggctcagaggacccagagcgcgacgatcatgaaggccagcccagaccccgtgtaccccgtaaacgaggccatatctccccaaaaagtaggcccatggcgaattccactctgctgggtttacttgcacctcccggggaggcctggggaattctcggtcaaccacctaacagacctaaccacagtccacccccctcagcaaaagtcaagaagattttcggctggggcgatttttattcaaatattaaaacggttgcactgaacctgctcgtcactggaaaaatcgttgaccatggtaacggcacattctctgtacactttcagcacaacgccactgggcagggcaacatcagcatatccttggtcccacctagcaaagccgtggagttccaccaggagcaacagattttcatcgaggcaaaagcgtcaaagatctttaattgtaggatggaatgggagaaagttgaaaggggaagaagaaccagtctgtgtactcacgatcccgcaaagatttgcagtcgtgaccatgcccaaagctccgctacctggtcctgtagccagccttttaaagtggtttgcgtctacatcgccttttattccaccgattatcgactcgtacagaaggtttgccccgattacaactatcactctgacactccttactacccaagcggatag

SEQ ID NO: 13783 - RNA, 555 nt, synthetic construct
  misc_feature 1..555: note = source = /note="Description of Artificial Sequence: Synthetic coding sequence"
  source 1..555: mol_type = other RNA
atgaagattctcgtggcctttcttgtggtgctaactatctttggaattcaatcacatgggtatgaggtgttcaacattattagcccgtcgaataacggaggaaatgttcaggagactgtcactatcgacaacgagaaaaacaccgccattattaatattcacgctggctcttgcagctcgacaacaattttcgattacaagcacgggtatattgcctccagagttctaagtcgccgagcttgctttatccttaaaatggatcatcaaaatattccccctctgaacaatctgcagtggtacatttacgagaagcaggctctggacaacatgttttctagcaagtacacttgggtgaaatacaatcctctggaaagccttattaaagacgtcgattggtttttgctgggttctcctattgagaaactgtgtaagcacataccactgtacaaaggggaagttgtcgagaatacacacaatgtaggagccggaggatgcgccaaagctggattactgggaattcttggcatatctatctgcgccgatatacacgtatag

SEQ ID NO: 13784 - RNA, 651 nt, synthetic construct
  misc_feature 1..651: note = source = /note="Description of Artificial Sequence: Synthetic coding sequence"
  source 1..651: mol_type = other RNA
atgggggctgtcatggggactttttccagtctacagacaaaacagcgtcgcccatcaaaggacaagatagaggacgaacttgaaatgacaatggtatgtcacagaccagagggattggaacagctagaagcccagacgaactttactaaacgtgagcttcaggtgttgtatagagggtttaaaaacgaatgccctagtggagtggtcaacgaagatacatttaagcaaatatacgctcagttttttccccacggagacgcttcaacctacgcacattacctgtttaacgctttcgatacaactcaaaccggatccgtgaagttcgaagattttgtgacagcactctctattctgctgagaggaaccgtgcacgagaaactgagatggaccttcaatctgtatgatattaacaaggacggatatattaataaagaggagatgatggacatcgtaaaggcgatctatgacatgatgggcaagtacacatacccggtcctgaaagaagacacgcccagacaacacgtggatgtattttttcaaaagatggataagaataaagatggcatcgtgacactcgacgaattcctcgaatcttgccaagaggacgataacattatgcgatcacttcagctgtttcagaatgtcatgtag

SEQ ID NO: 13785 - RNA, 2736 nt, synthetic construct
  misc_feature 1..2736: note = source = /note="Description of Artificial Sequence: Synthetic coding sequence"
  source 1..2736: mol_type = other RNA
atggctcaactcttcctgccgctgctggcagccctggtactggcacaagcccctgcagcgcttgcggacgtattagagggagattcttctgaggacagagcctttcgcgtacgaattgccggcgatgccccccttcaaggtgtgttgggtggcgctctcaccattccatgccacgttcactacctccggccacctccaagcagacgggcagtacttggcagccctagggtgaagtggacctttctgtcccgaggcagagaagctgaggtactggtggcgcgcggcgtacgggtaaaggtaaacgaggcttaccgatttcgagtggccctccctgcatatccagcctcattaacagacgtgagcctggcattatccgagctacgccccaatgacagtggtatatatcgttgcgaagtgcagcatggaattgacgactcatctgatgctgtagaggtgaaagtcaagggtgttgtatttttatatcgtgagggctctgcccggtacgctttctcctttagtggtgcccaggaagcatgcgctaggatcggggctcatatagccacaccagaacagctctacgccgcctacctcggaggatacgaacagtgcgatgccggatggttaagcgatcagaccgtgaggtacccgattcagactccccgagaggcgtgctatggggatatggatggattccctggtgttcgtaactacggcgtagtggacccggacgatctgtacgacgtttattgctatgcagaggacctgaacggagaattgttcctgggagaccctcctgagaagttgacgttggaagaggctagggcttactgtcaagagagaggcgcagagattgctacgactgggcagctatacgccgcatgggatggcggccttgatcactgttcacctggctggctggccgatggcagtgtacgttatcccattgttacacctagccagcgatgcggcggcgggcttcctggtgtcaaaacccttttcctgtttcccaatcaaaccggattcccaaacaagcatagtcggtttaatgtgtactgctttcgcgactccgcccaacccagcgctataccagaggcatctaacccagcttcgaacccagcatccgatggcctggaagccattgtcactgtgacagagacattagaagaacttcagctcccacaggaggctacagaatctgagtctcggggagccatctactcaatcccaatcatggaagacggaggcggaggatctagcactcctgaggaccctgccgaagcaccccgaaccctcctggaatttgagacccaatctatggtcccccctacaggtttttcagaggaagaaggcaaggcacttgaggaggaggagaagtatgaggacgaagaggagaaggaagaggaagaggaagaggaagaggtggaggacgaagcgctctgggcgtggccatctgaactcagctcccctggacccgaagcgtcattacctaccgagccagcggcacaagaagagagtttgtcgcaggcacccgcccgcgccgtactgcagcccggggcaagtcctctgcctgacggagagtctgaggcctctcgcccccctcgcgtccacggaccaccaaccgaaacactgcctaccccacgggagagaaacctagccagccccagtcctagtacactggtggaagccagagaggttggagaggccactggcggaccagaactgagcggagtccctaggggcgagtcagaagaaaccggcagttccgagggcgcacccagtttgctcccagccactcgagccccagaggggacaagagaactggaagcaccctccgaggacaactccggacgaactgcaccagccgggacatctgtgcaagcgcagcctgtgctgcccaccgactcagcttcaagggggggagtggctgtcgtacctgcctccggagactgtgtgcccagtccctgccataatgggggaacctgtctcgaagaagaagaaggagttcgctgcctgtgcctgcctggctacggcggagacctgtgcgacgtgggactgagattctgcaacccagggtgggacgcttttcagggagcatgctacaaacactttagtactagaagaagttgggaagaggccgaaacacagtgcagaatgtatggagcccatttagcttccatctccaccccagaggagcaggatttcattaacaatcgatatagagaatatcagtggataggattgaacgatcgcacaatcgagggggatttcttgtggtctgacggtgtacccttgctatacgagaactggaatcctggtcagcccgacagctatttcctaagcggggaaaactgtgtagtcatggtgtggcatgatcaagggcagtggtcagacgtgccgtgcaactatcatttaagttacacttgcaaaatgggactcgtttcctgtgggccacccccagaacttccgcttgctcaggtcttcggtaggccccgcttgcgctacgaagtcgatacagtgctgcggtatcggtgtagagagggactagctcagagaaacctgcccttgattcgatgccaggagaatggaaggtgggaggccccgcaaatcagctgcgtaccccgtcggccagcgagagcgctccatcctgaggaagatccagaagggagacagggtagactcttgggccgctggaaggcactcttgatccccccatcatctccaatgccaggcccctag

SEQ ID NO: 13786 - RNA, 852 nt, synthetic construct
  misc_feature 1..852: note = source = /note="Description of Artificial Sequence: Synthetic coding sequence"
  source 1..852: mol_type = other RNA
atgggtctcggactgagggggtgggggcgccccctgctgactgtggcaaccgcccttatgctgcccgtgaagccacctgccggctcttggggagctcaaattattgggggacacgaggtgactccacattctcgcccttatatggcgtcagttcggttcggaggtcagcaccactgcgggggctttttgttgcgtgcacgatgggttgtgtctgctgcccactgcttcagccatcgtgatctgagaaccggcctcgttgtgcttggagctcatgttctatcgactgcagaaccaactcagcaggtctttggaattgacgccctcaccactcaccctgactatcaccccatgacacatgctaacgatatctgtctactgcgattgaatggatctgccgtgctgggaccggcagtgggtctgctcaggccgcccggacgaagagctcgaccacccacagcaggaactcgctgtcgcgtagccggatggggattcgttagtgactttgaagaactgccccccgggctgatggaagctaaggtaagggtcctggatccggatgtgtgtaattccagctggaagggtcacctaactttgacaatgctgtgcacaagaagtggggactcgcaccgaagaggcttctgttccgcagattcaggtggcccactagtatgtagaaatagggcccacggactggtgagcttttccgggttgtggtgcggagatccgaagacgccagatgtttatacacaggtcagtgcattcgtagcttggatctgggatgtcgtgcgccgctcaagccctcagcctggcccccttcccgggactacacggcctccaggggaagccgcttag

SEQ ID NO: 13787 - RNA, 1209 nt, synthetic construct
  misc_feature 1..1209: note = source = /note="Description of Artificial Sequence: Synthetic coding sequence"
  source 1..1209: mol_type = other RNA
atgatggttgccctacgcggggcctccgcccttctcgttctgttccttgcagcattcctgccacctccgcagtgcacacaggatccggccatggtccattatatctaccaaagatttcgggtactcgaacaaggtctggaaaaatgcacccaggcaacgcgcgcctatattcaggaatttcaagagttttccaaaaacatttccgtgatgctggggcgatgtcagacatacaccagcgaatataagtccgccgtgggtaatttagcacttcgtgtcgaacgggcccagcgtgagattgactatattcagtatctacgcgaggcagatgaatgtattgaatcagaagacaaaactttagccgagatgctgcttcaggaggctgaggaggaaaagaagataaggaccctgctcaatgcaagttgtgataatatgctgatgggaataaaatcgttaaaaatcgttaaaaagatgatggatactcacggctcatggatgaaagatgcagtttacaattcaccaaaggtctatctgttaatcggaagcagaaacaatactgtgtgggaattcgcaaacattcgtgcatttatggaggataataccaaacccgcaccacgcaaacaaatcttgacattatcgtggcaggggaccggacaggttatatataaggggttcttattcttccacaatcaagccacttccaacgagataataaaatacaacctgcagaaaagaacagttgaggacagaatgcttctccctgggggcgtcgggagggcactggtgtatcagcactctccctccacttacattgacctcgctgttgatgaacacggcctgtgggcaattcatagcgggcctggaactcattcccacctggttcttacaaagatagaacccgggaccttaggtgtagagcattcctgggatacaccttgccgcagccaggacgctgaagcctcatttctgttgtgcggcgtgttgtatgttgtctactccacagggggccagggaccacatagaattacttgtatctatgacccacttggaacaatttctgaagaagatctccctaacctgttctttcccaaaagacctagaagccacagcatgattcattataatccccgggacaagcaattgtatgcctggaacgagggcaatcagattatctataagttacagacaaaaagaaaactgcctctcaagtag

SEQ ID NO: 13788 - RNA, 1221 nt, synthetic construct
  misc_feature 1..1221: note = source = /note="Description of Artificial Sequence: Synthetic coding sequence"
  source 1..1221: mol_type = other RNA
atgcaactgtttctcctcctgtgcctggtgctcctgagtccacagggagctagtctccacagacaccatcctagagaaatgaagaaacgcgtggaagacctgcacgtaggcgctactgtcgcaccgtctagcaggagagatttcaccttcgatttgtaccgcgcccttgcatctgccgcaccaagtcagtccattttctttagccccgtgtctatcagcatgagccttgccatgttatctttgggagccggttcgtcaacaaaaatgcaaatcctcgaaggcctcggactcaacctgcaaaagtcctctgagaaggaactgcacagaggcttccagcaactcctccaagagctgaatcaaccaagagatggattccaacttagcttaggcaatgctctgtttacagatttagttgtggatctccaagataccttcgtgagtgctatgaaaacactttacctagcagatacatttccaactaactttcgggatagcgcaggcgcaatgaaacagatcaatgattacgtggctaagcagacgaagggaaagatcgttgacctcctcaagaatctcgactcaaatgcggtcgtgatcatggtcaactatatattctttaaggctaagtgggagacctcattcaaccacaaaggaacccaggaacaagatttttatgtaacttccgagacagtagtgagggtaccaatgatgagcagagaagaccagtaccattatttgctcgaccgaaacctatcctgtagagtggtgggagtgccatatcaagggaatgccacagccctgtttatacttccaagcgagggcaaaatgcagcaggttgagaatggactcagtgaaaagactctgaggaaatggctgaagatgttcaagaagcgacagctcgagctgtatttacctaagttctctattgaggggtcctaccagctggaaaaggtcctgccctccctaggaatttcaaatgtcttcacttcccatgccgacctgtctggcattagtaatcattctaacatccaagtctcagagatggttcataaagcagttgtggaggttgatgagagcggaacacgcgctgctgctgccaccgggactattttcactttcagatcagctcgcctgaatagccaacgtctcgtttttaacaggccctttttgatgttcatcgtcgataataatattctatttcttggaaaagtaaacagaccatag

SEQ ID NO: 13789 - RNA, 1626 nt, synthetic construct
  misc_feature 1..1626: note = source = /note="Description of Artificial Sequence: Synthetic coding sequence"
  source 1..1626: mol_type = other RNA
atgcgtctaagtccctttcatcttcagctggagtttcacatgaaagaaaaacgcgaggatctgcagattagctggtccttcattagtgtccctgaaatggcagtgaatatacaaccaaaggctcttggggaagatcaagtcgccgagacaagcgcaatgtctgacgtgctaaaggatattctcaagcatttggccggatccgccagcccttctgtggtgctgattaccaaaccaacaaccgttaaagaagctcagaaccttcagtgtgccgcatccacagctcaggaatcatgcccgccaaagcccccccgagcgcatgaactcaaactgttagtgagaaatatccacgttctgttactgtcagaaccaggagcctccggtcacataaacgccgtttgcgtagtgcaactcaatgatcctgtacagagattctctagcacccttacgaagaacacaccggatcttatgtgggaagaagagtttacatttgagctgaacgcgaaaagtaaagagcttcacctgcagatttcagaagcagggcggtcctccgagggactgctcgctaccgccaccgtaccactcgatctatttaaaaaacaaccctcagggccacagagctttacactgacatctggttccgcctgcgggtcatcagtgctcggttcagttactgctgaattcagttacatggaacccggagaacttaaatcctggccaatcccgccgcctgtgccagctgcgaagatcgaaaaagaccgaaccgtcatgccatgtggaacagtggtaacaaccgtgaccgccgtgaaaaccaagccgagagtggacgttggtcgcgcttcacctttgtcctccgattccccagtgaagacaccgattaaagtcaaggtgattgagaaagacatcagtgtgcaagcaatagcctgtaggtccgcgccggtttccaaaacactgtcctctagcgacactgagttgctcgtgcttaacggatctgaccccgtggcagaagtagctatacgccagttatcagaatccagtaaattgaaactgaagagtccaaggaagaaaagtacaattatcatctcagggatttccaaaacatctctcagtcaagatcatgatgccgcactgatgcagggatacaccgcctctgtggactcaacacaccaggaagacgctccttctcatcctgaaagagccgcagcctccgctccacccgaagaagcagagagtgcccaggccagtctagccccaaaaccccaggaggacgagcttgacagttgggatctggaaaaagagcctcaggctgcggcatggtcttctcaggttcttttagacccagacggcgatgaactttctgaatcttctatgtccgttctggagcccggcactgcgaagaaacataagggcggcatactcagaaaaggtgccaaactgttttttaggcggcgacatcaacagaaagatcccggaatgagccaatcacataacgatttagttttcctcgaacaacctgaaggatctagaaggaaaggcataacactaacacgtatcttaaacaagaagctgctatcgcgccacagaaacaagaatactatgaacggagcaccagtggagccatgtacgtag

SEQ ID NO: 13790 - RNA, 993 nt, synthetic construct
  misc_feature 1..993: note = source = /note="Description of Artificial Sequence: Synthetic coding sequence"
  source 1..993: mol_type = other RNA
atggctttccttccctcttgggtctgcgtgttggttggttccttttctgcgtcgctcgctgggacttctaatctgagtgaaaccgagccccctttgtggaaagagagtcccggacagctttccgattatcgagtcgaaaattccatgtatatcatcaatccttgggtctacctcgaacgcatgggcatgtacaaaattattttaaaccaaactgccaggtacttcgctaagttcgcccccgataacgagcagaatattctgtgggggctgcctctgcaatacggatggcagtatagaactggccggttagccgatcccaccaggcgtaccaactgtggatatgaatctggggatcacatgtgcataagtgtcgatagctggtgggcggacctgaattactttcttagttcactgccttttcttgcagccgtggacagtggcgtaatgggcatctcgagtgaccaggtcagactgctgccccccccaaagaatgaaaggaaattctgttacgacgtgagctcctgcagatctagctttcctgaaacaatgaataaatggaatacattttaccaatatcttcaatcacccttttcaaagtttgatgatttattgaaatatctttgggccgctcacacatccaccctggcagataacattaaaagttttgaagaccgctatgactactactcaaaagctgaagctcactttgagaggagctgggtgttagcagtcgatcatcttgccgccgtgctgttccccacaacactgatccggagctacaaatttcagaaaggcatgcccccccgaatcctgctcaacactgacgttgccccttttatctccgattttaccgcgttccaaaatgttgttctggtgttattaaacatgttagacaatgttgacaagtctattggctacctttgcacagaaaagtccaacgtctatagagatcatagtgaatcaagctcccgctcatacggcaacaattcatag

SEQ ID NO: 13791 - RNA, 813 nt, synthetic construct
  misc_feature 1..813: note = source = /note="Description of Artificial Sequence: Synthetic coding sequence"
  source 1..813: mol_type = other RNA
atggattctttagaatggaactgggccttagtgtacgagctgagcggagagcaccacgacgaggagtggtctgtaaagacttaccaggaagttgcccagaagttcgtcgagacccatcccgaattcattggcatcaaaattatttattcagaccaccgaagtaaagatgttgcagttatagctgagtctatccgtatggccatgggcctgaggatcaagtttcctacagtcgttgcagggttcgacctcgtgggacatgaggatacgggacacagccttcatgattacaaagaagcactcatgattccagcaaaggacggcgtgaagttaccatattttttccacgctggagagacggactggcagggaacgagcattgaccgcaatatcttggacgccctgatgctgaatacgacccggataggacacggattcgcactctccaagcaccccgccgtaaggacatacagctggaaaaaagacatccctattgaagtttgcccaatctcaaatcaggtactaaaactggtgagtgacctgcgtaaccaccctgtcgctacacttatggcaaccggacacccaatggttatatcctccgatgatccggcaatgttcggggcaaagggcctttcgtacgatttttacgaggtgttcatgggtattggaggtatgaaagccgatcttagaactctgaagcagctggctatgaacagtatcaagtatagcaccttactcgagtctgaaaaaaatacctttatggagatatggaaaaaacgatgggacaaattcatcgccgatgttgcaacaaaatag

SEQ ID NO: 13792 - RNA, 939 nt, synthetic construct
  misc_feature 1..939: note = source = /note="Description of Artificial Sequence: Synthetic coding sequence"
  source 1..939: mol_type = other RNA
atgggcgttatggcaatgctcatgctccccttactcctacttggcataagcggcctcctgttcatctatcaggaagtgtcccggctgtggtccaagagcgccgtccaaaataaggttgtcgtcataaccgacgctatctccggtctaggtaaggagtgtgccagagtgttccataccggcggagcgagactggtgttgtgtggaaaaaactgggaacggctggaaaacctctacgacgcccttattagtgttgccgacccttctaagcaaacattcacccctaaacttgtgcttctagacctttctgatatctcgtgtgttcccgacgtcgcaaaggaggtgcttgattgctatggttgtgtcgacattctgatcaataacgcctccgtgaaagttaaggggcctgcacataagatctctctcgaactggataagaagataatggacgctaactattttggaccaataacattgacaaaggccttgcttcctaacatgatttcccgacgcactggccaaatcgtgcttgtgaataacattcagggaaaatttggcattccctttcgaaccacatacgccgccagcaagcacgccgcactgggctttttcgactgccttagggccgaggtcgaagagtacgatgtcgttatcagtactgtcagtcctactttcatacgctcctaccacgtttatcccgaacaaggaaattgggaagcctcaatctggaaatttttcttccgcaagctcacgtatggcgtccaccctgttgaagtggccgaggaagtgatgagaacagtgagacggaagaaacaagaggtcttcatggccaatccaattcccaaagctgccgtttatgtccggacttttttccccgaatttttctttgctgttgtagcttgtggggtgaaagagaagttgaatgttccagaggagggctag

SEQ ID NO: 13793 - RNA, 909 nt, synthetic construct
  misc_feature 1..909: note = source = /note="Description of Artificial Sequence: Synthetic coding sequence"
  source 1..909: mol_type = other RNA
atgagaagatgggcttgggcagcggtggtggtgctgctcggcccccagctggtcttgctcgggggagtgggtgctagacgtgaggcacagaggacacaacagcctggtcaaagggcagatccccctaacgcaactgcatcagcttcatccagagaagggctgccggaagcccctaagcctagccaagccagcggaccagagttttctgatgctcatatgacctggctgaacttcgtgaggagaccagatgatggagccctgagaaaacggtgtggatccagagacaagaaacccagagacctctttggcccacctggaccgcctggggcagaagtgactgccgagacattattgcatgagttccaggaactattgaaggaggctactgaaagacgttttagtggattattggatccgctgctacctcagggagccggcttgcgcctggtgggggaggcctttcactgtagacttcagggaccacggagagtggataaacgcactttggtggaactgcacggatttcaggcccctgctgcccaaggagctttcctgcgtgggtccggactgtctttggctagcggaaggttcacagccccagtatccgggatattccaattcagcgcctctctgcacgttgatcacagcgagctccaaggaaaagccagactgcgcgcccgagatgtcgtgtgtgtcttaatctgtatcgagagcctttgtcagcggcacacatgcctcgaagccgtgagcgggctagagtcaaacagcagagtcttcacattacaggttcagggactgctccagcttcaggccggacagtacgcatctgtgttcgtggataatggttcgggtgcagtgctaactatacaagccggatctagtttctctggactcttgctaggtacttag

SEQ ID NO: 13794 - RNA, 1416 nt, synthetic construct
  misc_feature 1..1416: note = source = /note="Description of Artificial Sequence: Synthetic coding sequence"
  source 1..1416: mol_type = other RNA
atggactcagccccccttttcccacggccccatctttttcaaaatctgttattatttctgtgggcgctcttaaattgtggcctcggagtgagcgcccaaggacccggagagtggaccccatgggtgtcttggacacggtgtagctcgtcatgcgggcgcggagtatcagtccgtagcaggaggtgcctgaggctaccaggtgaggagccatgctggggtgattcacacgaatacagactttgccaactgcccgactgcccgcctggcgccgtgccctttcgcgatttgcaatgtgcgctctacaatggtcggcccgtactgggtacacagaagacttaccagtgggttccttttcacggtgctccaaatcaatgtgacctcaactgcttggccgaaggccatgccttctaccattcctttggacgcgtcctcgatggcaccgcttgctctcctggtgctcagggcgtgtgtgttgctggcagatgtctgagtgccggatgcgatggactgcttggcagtggcgctctagaagaccggtgcgggagatgcggtggtgccaatgatagttgtctctttgtccaacgcgtatttcgtgatgcaggtgcttttgccgggtattggaatgtaaccctcatcccagaaggtgcacgacatattagagtcgaacacagatcaaggaatcacctagccctaatgggtggcgacggcaggtacgtgctaaacggacactgggtcgtttctcctccgggaacctacgaggccgcggggactcatgtggtttatacccgggataccgggccacaggaaacactacaggcagccggaccaacttcccacgaccttctgctacaggttctactgcaggaaccaaatccaggcatagagtttgaattttggttaccgagagaacgctattcccctttccaagctcgggtccaggcactgggatggccactccggcagccccagccacgcggggtggaaccgcagcctcccgccgcccccgccgtcacccctgcccagacacccacgctcgcaccagacccttgtcccccttgtcccgacaccagaggccgtgcacatcgactcctccactactgcggttccgatttcgtctttcaggcccgagtgctgggccaccaccaccaagcccaggagacaagatacgaagtccgcattcagcttgtttataagaacaggtcaccattgagagcgagagagtatgtttgggcccccggtcactgcccatgccccatgttagctccccaccgcgattacctgatggctgtccaaagacttgtctccccagatggaacacaagaccagttgcttctccctcatgctggatacgccaggccctggtcccccgcggaggattcacgtattcggttaactgcccgacgatgcccgggatag

SEQ ID NO: 13795 - RNA, 222 nt, synthetic construct; identical to SEQ ID NO: 12156
  misc_feature 1..222: note = source = /note="Description of Artificial Sequence: Synthetic coding sequence"
  source 1..222: mol_type = other RNA

SEQ ID NO: 13796 - RNA, 2349 nt, synthetic construct
  misc_feature 1..2349: note = source = /note="Description of Artificial Sequence: Synthetic coding sequence"
  source 1..2349: mol_type = other RNA
atggcccgcgcgagagctggcgctttactcgcactatgggttttaggggcggcagctcacccccagtgtctggatttccgtcctccttttcgacccacccaaccgctcagactctgcgcccagtacagtgacttcggttgttgcgatgagggccgcgatgccgagctaacaagacggttctgggcccttgcgagccgagtggatgcagccgaatgggccgcctgcgcaggctacgcccgtgacctgctctgccaggaatgtagcccatatgccgctcacctctatgacgccgaagatccatttacacccttacgtacagttcccggattatgtcaagattattgcttggacatgtggcacaaatgccgcgggctctttaggcacttatccactgaccaagagttatgggccctggaagggaacttggcccggttctgtagatatctgagcctggacgacactgattattgtttcccctaccttttagtgaacaagaatctgaattccaacctaggacacgtagttgcagacgcaaagggatgtttgcagttatgcttggaagaagtcgctaacgggttgcgtaaccctgtggccatggtgcacgcacgcgacggaacccatcggttctttgtggcagaacaagtcgggctagtctgggcatatctccccgatcgcagcagactcggcaaaccttttctgaatatcagccgggtggtgctgacctcaccctgggagggcgacgagcgcgggtttttgggaattgccttccatccgtcctttcaacataaccgcagactttacgtgtactacagcgtcggaattagatcctcagagtggatccggatcagtgaatttagagtgagcgaagacgatgagaatgccgtcgaccattctagcgaaaggatcatattggaagtgaaagaacctgctagcaaccacaatggcggtcaactgttgtttggagatgatgggtatctgtatatctttaccggggacggtggtatggccggcgatccctttggtacgttcggtaacgctcagaataaatccgctctgttaggaaaagtgctcaggattgacgtggatagaaaagagcgcgggctcccttatggcatcccacctgacaaccctttcgtcggagaccccgcggcccaaccagaggtctatgcattaggagtgagaaatatgtggaggtgtagttttgatcgcggtgacccttctagcggaacgggaaggggacgtctgttctgcggagacgtgggccaaaataaatttgaggaagttgacgtggttgagcgaggcgggaattatggttggcgagcacgtgaaggatttgagtgctatgaccgctcactgtgtgccaatacatccctgaacgacctgttacctatcttcgcctatccgcatacggtgggaaaatccgtcactggaggctatgtatatagaggatgtgaatacccaaatttgaacgggctttatatttttggagatttcatgtctggccgtctaatgagtctgcaggaaaaccccggtactgggcaatggcaatattcagaaatctgtatgggacacgggcaaacctgcgaatttcccggcctaataaacaactattatccatatattatatcatttggagaagatgaagccggagaattgtactttatgagcacgggggaacccagcgcaactgcaccaagaggcgtggtctataagataatcgatgcatctagacgggccccacccggtaagtgccaaatccaacccgcccaagttaaaatcaggtctagactcattccattcgtccctaaagaaaaattcatacccaagaccaggagtacccctcgccccactgctcgagcaccgacccgcgcacctaggagagggagacccactgcagccccgcccgcccctaccccacgccctgccaggccaacacagcagcctggctcacgtcgcggaggtggccgtcgtcgaggtcggctgaactctgcatcaagggcctttcgcgatggagaggtgcgcctcgtccgcccagccggcctttcatctggatcaggtagagtcgaagtgtttgttggcggtcggtggggaacagtttgtgatgattcatggaatatttccggggccgcagtggtttgtaggcaactgggtttcgcctatgcagtccgagcagtcaaacgcgccgagtttggacagggtgggagcctgccgatcctacttgatgatgtccgctgcgcaggatgggaaaggaatctcctggagtgtcagcataacggcgtgggtacccataattgtgagcacgatgaggatgcaggagtggtatgtagccatcagaaccccgacctttag

SEQ ID NO: 13797 - RNA, 1317 nt, synthetic construct
  misc_feature 1..1317: note = source = /note="Description of Artificial Sequence: Synthetic coding sequence"
  source 1..1317: mol_type = other RNA
atgcatccactgcccggttactggtcctgttactgtctgctcctgctgttctcgctcggcgtacagggttcactcggcgcaccttccgcggcccctgagcaagttcacctgagttaccccggggaacccggtagtatgacagtgacatggacaacttgggtcccaacccgcagcgaggttcaattcggtctgcaaccctcaggccccctgcccctgcgggcacagggaacattcgtgccctttgttgacggcggcatcctgagaagaaaactctacatccatcgagttaccctccgaaaactccttccaggcgtccaatatgtgtatagatgcggctcggcacagggatggagcagaagattcagattccgtgctcttaaaaacggcgcacactggtccccgcgccttgccgtcttcggagatctgggggccgataacccaaaagccgtgccacggcttcgccgcgacactcagcagggcatgtacgacgctgtattacacgttggagactttgcatacaatctagatcaggacaacgcccgtgtgggagatcgcttcatgcgtctgatcgaaccagttgccgcctcgctgccatatatgacctgcccaggtaatcacgaagaacgttataatttctctaactacaaagcccggtttagcatgcccggggacaatgagggactctggtactcatgggatttaggacctgcccacatcatctccttctccactgaggtgtattttttcctgcactacggaagacatcttgtgcaacgacagttcaggtggctggagagtgatttacagaaagcaaacaaaaaccgagccgcccgaccttggattatcaccatgggccaccgtcccatgtactgttcgaacgccgacctagatgactgtactagacacgaaagtaaggtgcgcaaaggacttcaaggaaaactatatggattagaagatctgttctacaagtatggggtggatttgcagctgtgggcacatgagcactcttacgaaagactctggcccatctataattaccaggtctttaacggatcacgcgagatgccatatacaaacccaagaggccccgtgcacatcatcactggatctgcaggctgcgaagagagactgacaccctttgccgtcttccctcgaccctggtcagctgtcagagtgaaggaatacggttataccaggctccacatcttgaatggcacccatattcatattcaacaggtatctgacgaccaggacggcaagattgtggacgatgtatgggtggtgagacctcttttcggacggcgaatgtacctgtag

SEQ ID NO: 13798 - RNA, 411 nt, synthetic construct
  misc_feature 1..411: note = source = /note="Description of Artificial Sequence: Synthetic coding sequence"
  source 1..411: mol_type = other RNA
atggctcggacaaaacaaacagcgcgtaagtcaacaggcggaaaagctcctagaaagcagttggctacaaaagctgcccgaaagagcgctccagcaacggggggtgtgaagaaaccacatagatatagaccgggaacagtggccctgcgcgagattagacggtatcagaaaagtaccgagctattgataagaaagttgccatttcagagacttgtgcgagagattgctcaagatttcaaaaccgacctgcggttccaatctagcgcggtgatggccctccaggaagccagtgaagcatatctggtaggactattcgaagacactaacctgtgcgctatccacgctaaaagggtgacaattatgccaaaggacattcaacttgccaggcgaattagaggtgaaagagcttag

SEQ ID NO: 13799 - RNA, 1209 nt, synthetic construct
  misc_feature 1..1209: note = source = /note="Description of Artificial Sequence: Synthetic coding sequence"
  source 1..1209: mol_type = other RNA
atggctgcccgccctgggccactatggctcctgggacttaccctctgtgctttgggtggaggcggacccggcctgaggcctcctccagggtgcccccagaggcgcttaggtgcacgggagagacgggatgtgcaacgcgaaatcctggccgtgcttggtctgcctggcagacctagaccacgggctcctccagctgcatcacgattgcccgccagtgcaccattgttcatgctcgatctttaccatgcgatggccggagatgacgatgaggacggggccccggcagaacaaagactagggagggctgacctcgttatgtcatttgtgaatatggtagagagggacagagccttgggccaccaagaaccacattggaaagagttccggtttgatttgacccagattcccgccggagaggctgtcaccgctgccgagtttagaatctacaaagtgcctagtatacacctacttaataggaccctacatgtttcaatgttccaagtcgttcaagaacagtctaacagagagagtgatcttttctttcttgacctccagacgttgcgcgccggcgatgaggggtggttagtgctggacgtgactgccgcctccgactgttggctgctgaagcggcacaaagatttgggtttgcgtttgtatgttgaaacggaggatggccattcagtggacccaggcttggcaggtctccttgggcagcgcgctcctcgttctcagcagcctttcgtggtaacgttttttagggcctctcccagccccattcggacccctagagccgttcgccctctcagaagaagacaaccaaagaaatcaaacgaacttcctcaggccaacagattacccggtatttttgatgatgtgagaggaagccacggccgccaagtgtgtcggaggcatgagctatacgtgtcttttcaggatttgggatggctcgactgggttattgccccacaaggatactctgcatactactgtgagggcgaatgttctttcccgttagactcttgtatgaatgccactaatcatgccattttgcaatctctcgtgcacttaatgaaacccaacgcggtgcctaaagcctgctgcgccccaacaaaactttccgcgacatcagttctgtactacgactcttccaacaacgtaattcttagaaaacatcgaaacatggtggtaaaggcttgcggctgccattag

SEQ ID NO: 13800 - RNA, 957 nt, synthetic construct
  misc_feature 1..957: note = source = /note="Description of Artificial Sequence: Synthetic coding sequence"
  source 1..957: mol_type = other RNA
atggccgctgctgccctgccgcctagacctcttctcctgctgccactcgtgctcctactcagcggaagaccgacacgcgccgattctaaggtctttggcgatctcgatcaggtgagaatgacatccgaaggctccgattgccgctgtaagtgtattatgaggccacttagtaaagatgcctgttctagggtgagatcagggcgagccagagttgaagacttttataccgtagagacagtctcatccggtactgattgcaggtgctcttgcacagccccaccatcaagcctaaacccttgtgagaatgagtggaagatggagaagcttaaaaaacaggctccagaactcttaaagagtataaaagcaaatctttcaagggagaatgaggtggtaaaggactctgtaaggcacctctcagagcaattacgccactatgaaaaccattcagccattatgttgggtatcaagaaagagctgtcgagactcggactgcaactgttacaaaaggatgctgccgccgcccccgctacccccgccaccggaacaggctctaaagcccaggataccgctagagggaaggggaaggatatcagcaaatatggaagcgtgcaaaaatcattcgccgaccgcggactgcctaagccacccaaagagaaactgttacaagtggagaagctgagaaaggagagtggaaaaggttcttttctgcagccaacggccaaaccaagagccctcgctcagcagcaggcagttatccggggatttacctactataaggctggaaaacaggaggtcactgaagccgtcgccgacaatactctgcaaggaacttcgtggctggagcagctgccaccaaaagtcgagggacgttccaacagcgcggagccgaacagcgccgaacaggatgaggcagaacctagaagttccgagcgtgtagatctggcaagtggcacatag

SEQ ID NO: 13801 - RNA, 402 nt, synthetic construct
  misc_feature 1..402: note = source = /note="Description of Artificial Sequence: Synthetic coding sequence"
  source 1..402: mol_type = other RNA
atggcactgggggtgcccatctctgtctatctcctttttaacgcaatgacggctctaaccgaagaagctgctgttaccgtcaccccccctattacggctcagcaggccgataacatagaaggtccaatcgccttaaagttttctcatctgtgtctcgaggatcacaattcatattgcattaacggcgcctgtgcatttcaccatgagctggaaaaggcgatatgccgctgttttactggttacacaggagaaagatgcgaacacctcaccttgacatcttatgcagtcgattcctacgagaaatatatcgcgattggaatcggcgtgggattactattaagtgggtttcttgtcatcttctattgttatatcaggaaaagatacgaaaaggataagatctag

SEQ ID NO: 13802 - RNA, 651 nt, synthetic construct
  misc_feature 1..651: note = source = /note="Description of Artificial Sequence: Synthetic coding sequence"
  source 1..651: mol_type = other RNA
atgagttccgaggcagaaacccagcagcctcctgccgccccacccgctgcccccgccttatcagccgcagacacaaaacctggcaccaccggaagcggcgccggcagcggcggccccggaggattgacaagcgctgcccccgcaggaggtgacaaaaaggtcattgccactaaggtgttggggactgtcaaatggtttaatgtaagaaacggatacggctttattaaccggaatgacaccaaggaagatgtctttgttcatcagggagctgaagctgctaacgtcacaggaccgggaggcgtgccagtgcaaggcagcaaatacgcagcggacagaaatcattaccggagatatccacgtcgtagaggtcctcctagaaattatcagcagaactatcagaattccgagtccggggaaaagaacgaaggatctgaatctgcacctgagggacaggctcagcaaagaaggccctatagaagaagacggtttcctccctattacatgaggcgaccatacggaagaagacctcaatacagcaacccacccgttcaaggtgaggtgatggaaggagccgataatcagggcgcgggagaacaggggcgcccagtccgccaaaacatgtaccgaggatatcgtccccgctttcgctag

SEQ ID NO: 13803 - RNA, 756 nt, synthetic construct
  misc_feature 1..756: note = source = /note="Description of Artificial Sequence: Synthetic coding sequence"
  source 1..756: mol_type = other RNA
aacgactggagcgccgaccagctgtacttagaaaccaccggaaagtcccgaactttgcagagcggtttagcactcctgtacggatttcttcctgactttgattggaagaagatttactttcgacatcagccgagtgccctcttttgctctgggtcgtgctattgccccgttagaaatcagtacttagaaaaggagcagagacgacagtatttgctaagattaaagaattcccagcttgaaaaaacttacggcgagatggcaaagatcgtagacgttcccacaaaacagctcagggctgctaaccctatcgactccatgctgtgtcatttctgtcataatgtgtctttcccttgcacccggaacggctgcgttgacatggaacacttcaaggtaataaagacgcaccaaatagaagacgaacgggaaagaagggagaagaaactgtactttggttactccctactcggagcacaccccatccttaaccagacgataggcagaatgcagagggcaacagagggaagaaaagaggaactgtttgccttgtactccgcgcatgacgtcactttgagccccgtgctgtcagccctaggactgagtgaggcccgctttcctcgctttgccgcaagagtaaatataccatccggctttttcaccatggctagcatgtcgcactctacccctctatcagctaaaacaactacaagtgttttgccttctccctgcgccagacttaagacttggtcagcattatag

SEQ ID NO: 13804 - RNA, 576 nt, synthetic construct
  misc_feature 1..576: note = source = /note="Description of Artificial Sequence: Synthetic coding sequence"
  source 1..576: mol_type = other RNA
atggccgcccccagaggaagagcggcaccatggaccactgccctacttttgctgttagctagccaggtcctatctcccggaagctgcgccgatgaagaagaagttccagaagagtgggttctgctgcacgtagtgcagggacagatcggcgcaggcaactatagttatctcaggctgaaccacgaagggaagatcgtgctccgtatgcgttcgctgaaaggcgatgcagatctttatgtctccgccagctccctacaccctagtttcgacgattacgagcttcagtccgcgacctgcgggccagacgccgtatctattcctgcgcattttcgccgaccagttggcatcggagtatacggacatcctagccatcttgaatccgagtttgaaatgaaagtttattacgacggcaccgtagaacaacacccattcggcgaggcagcctatccagccgacggcgccgatgcaggacaaaagcacgccggcgctccagaagacgcatcccaggaggaagagtctgtgctgtggacgatccttatcagtatcctgaaactggtgctggaaatcctcttttag

SEQ ID NO: 13805 - RNA, 2301 nt, synthetic construct
  misc_feature 1..2301: note = source = /note="Description of Artificial Sequence: Synthetic coding sequence"
  source 1..2301: mol_type = other RNA
atgggcaggagacggttgttagtatggttgtgcgccgtagccgccctccttagcggcgcccaagccaggggaacaccgttactggctagacctgccccccccggcgcctccagatacagcctctacacaaccggctggagacctaggctcagaccaggccctcataaggccctatgcgcttatgtggtgcatcggaatgtgacatgtattctccaggagggagccgagtcatatgtcaaagcagagtacagacaatgtagatggggcccgaagtgccctggaacagtgacttacaggaccgtgctacggcccaagtataaggtcggctacaagacggtaactgacctcgcctggcggtgttgtccaggtttcacaggaaaaagatgccccgaacatctaactgaccacggtgcagcttctcctcagcttgaaccagagccacagatccctagcggccagctggaccccggacctcggccaccctcttactcccgtgccgcaccctcccctcacggcagaaaaggccctggattgtttggcgagcggttagagcgtctggagggcgacgtgcaaagactggcccagacatacggaacgctgtcaggcctagtcgcgtcccatgaggatccaaacaggatgacgggcggacctagggctcctgccgttccagtgggattcggcgttatcccagaaggcttggtcgggccaggagacagagccagaggacccctcactccccccttagacgaaattttgagtaaggtaaccgaagtcagcaacacactgcagaccaaggtccaattattggacaaagtccatggcctagccctgggccacgaagctcaccttcagagactgcgagaggctccaccgtcacctctaacctcacttgctctgcttgaggagtacgtagatcgacggctgcatagactatggggatccctgttagacggatttgaacagaagcttcaaggcgtgcagagcgagtgcgacctgagagtccaggaggtacggaggcaatgcgaggagggacaagccgccagtaggcgtctccaccaatctctggacggccgtgaattagcccttcggcaggaactatcacaactggggagtcagctacaggggctcagcgtgtctggaagaggatcttgttgtggccagctcgcactgatcaatgcacgcatggacgggttggaaagggctcttcaggctgtaactgagacacaaagaggccccggggcgccagcgggcgacgagctaactcgcctctctgcagcgatgctggaggggggggtggacggacttttagaaggattggagacactcaacggaacggaaggtggcgcgcgtggctgttgcttgaggctcgatatggggggatggggggttgggggatttggtaccatgctggaggaacgggttcaatctctcgaagaacggctcgctacacttgccggcgagttgagccatgattcagctagcccaggtaggtcagcccgccccctcgtccagaccgagctagccgtgctcgagcagcgtttagtgtctctcgaaacgtcatgtacgccgtctaccaccagcgctatcctggactccctcgtcgccgaagtcaaagcatggcaatctaggtctgaagcattattacggcaggtcgcttctcatgccgccctcctgcagcagctaaacggtactgttgcagaagtacagggtcaactcgcagaagggaccgggtccagtctgcaaggcgagatcactctgctaaaggtaaatctgaattctgtctcaaagtcactcacgggcttgagtgattccgtctcacagtatagcgatgcctttttagcggccaacactagtctggacgagcgggaaaggaaggtcgaggcggaagtgcaggccatccaggaacaggtctcctcacaaggaagcagattacaggctggacatcggcaggtcctgaacctgcgaggcgaactcgaacagctcaaggctggcgtagcaaaggtagctagcggtctttctcgctgccaggacaccgcacagaagctccaacacactgtagggcacttcgatcaaagggttgcgcaggtagagggcgcatgccggagactgggtctgttagccgccggccttgattcactaccaacagagccactgagaccacgagaagggctttggagtcacgtcgaccaactgaaccgcacgttggctcaacacactcaagacatagcacgcttgcgagatgacctgctggactgccaggcccagttagctgagcaagtgcgcccgggtcaggccaactag

SEQ ID NO: 13806 - RNA, 1251 nt, synthetic construct
  misc_feature 1..1251: note = source = /note="Description of Artificial Sequence: Synthetic coding sequence"
  source 1..1251: mol_type = other RNA
atgtatcgacatggaataagcagtcaacgtagttggcctctctggaccactattttcatttttctgggggtcgctgcgatcctaggagttacgatcggtctgctggtgcacttcctcgcggtagaaaagacatactattatcagggcgattttcacatcagcggcgtgacctataacgacaattgtgagaatgcagctagtcaggcttccacaaacctctccaaagacatcgaaacaaaaatgctcaatgcctttcagaatagttccatttacaaagagtatgtgaaatcagaagtgattaagttgcttccaaacgccaatggctccaacgtacagctccagctcaaatttaaatttcctcctgcagaaggtgtgagcatgagaactaagattaaagccaaactgcatcaaatgcttaagaataatatggcttcatggaatgcggtgcctgcgtcaattaaactgatggaaatttcgaaagccgcctccgagatgcttaccaacaattgttgtgggagacaagtggccaatagcataataactggcaataagattgtaaacggaaaatcctccctggagggtgcatggccctggcaagctagcatgcaatggaaaggccgacattactgtggagccagccttatctccagcaggtggctgctatccgctgctcactgtttcgctaagaagaacaactctaaagactggaccgttaattttgggatcgtggtgaataaaccttacatgaccagaaaagtgcaaaatataatatttcacgaaaattattcctctcccggattgcacgatgatatagcattggtccagctggccgaggaagtgagttttaccgagtacatcaggaaaatctgtttacccgaagctaagatgaagctctcagaaaatgataacgtggtggtgacgggatggggaacactgtatatgaacggaagctttccagtgatactgcaggaggattttctgaaaataatcgataacaaaatatgtaacgcttcatacgcgtattccggcttcgtaacggataccatgctatgcgcaggtttcatgtctggggaagctgacgcatgtcagaacgactctggaggaccacttgcctacccagattcaagaaacatctggcacctggtgggtattgttagctggggggacggatgcggtaagaagaataaacctggagtctacacacgcgtaacctcatatcgaaactggatcacatctaaaaccggactgtag

SEQ ID NO: 13807 - RNA, 639 nt, synthetic construct
  misc_feature 1..639: note = source = /note="Description of Artificial Sequence: Synthetic coding sequence"
  source 1..639: mol_type = other RNA
atgttgtccagtgtggtattttggggcctgatcgccctcatcggtacatctcgaggatcctacccattcagccattccatgaaaccacatctgcacccacgactctatcacggatgttatggagatattatgacgatgaagacatccggcgcaacctgtgatgccaattcggttatgaactgcggtattcgcggaagcgaaatgtttgcggaaatggaccttagagcaattaaaccatatcaaacattgataaaggaggtgggacagcgccactgtgttgacccggcggtgatcgctgcgatcatcagtagagagtcccacggcggtagcgtactacaagacggttgggatcaccgcggcttaaagtttggacttatgcagttggataagcagacctaccaccctgtcggcgcctgggatagtaaagagcatctatcacaggcaacaggcattttgactgaaagaattaaggccatccagaagaagttccctacatggagcgtggctcagcatctgaagggagggttaagcgcattcaagtccgggattgaggcaattgctacgccatccgacattgacaacgacttcgtaaacgacatcatagctcgcgccaagttctacaaaagacagtcattctag

SEQ ID NO: 13808 - RNA, 378 nt, synthetic construct; identical to SEQ ID NO: 12169
  misc_feature 1..378: note = source = /note="Description of Artificial Sequence: Synthetic coding sequence"
  source 1..378: mol_type = other RNA

SEQ ID NO: 13809 - RNA, 867 nt, synthetic construct
  misc_feature 1..867: note = source = /note="Description of Artificial Sequence: Synthetic coding sequence"
  source 1..867: mol_type = other RNA
atgaataatctgtcatttagtgaactttgctgcctgttttgttgtcccccttgccctggcaaaatcgctagcaagctcgcctttttacccccggatccaacctataccctgatgtgtgatgagtctggtagtagatggaccctccacctttctgaaagagcggactggcaatactcctctagagaaaaagatgccatagagtgctttatgacccgaacatctaaagggaatcggattgcctgcatgttcgttagatgtagtcccaacgccaaatacaccctactgttcagccacggcaacgccgttgacctgggacagatgagctccttctatattggactcggaagccgaataaattgtaatattttttcttacgactactcaggatatggggcaagtagtggaaaaccaaccgaaaaaaacctatatgcagacattgaagcagcttggctggccttaagaactaggtacggaatcaggcctgagaacgtgatcatttatggtcagagcatcggcacggtcccttccgtggatctagctgcgcgatatgagtccgccgccgtcatcctgcactcccctttgactagtggcatgcgagtcgctttccctgacaccaagaagacttactgctttgacgctttccctaacatcgataagatctcaaagatcacatctcccgtgttgattatacacggtacagaggatgaagtgatagatttttcccacggactggcactattcgaacgctgtcagagaccagtcgaacctctctgggttgaaggcgctggtcacaatgacgtagaattatatggacaatatttagagagattgaaacagttcgtgagccaggaactcgttaacctttag

SEQ ID NO: 13810 - RNA, 417 nt, synthetic construct
  misc_feature 1..417: note = source = /note="Description of Artificial Sequence: Synthetic coding sequence"
  source 1..417: mol_type = other RNA
atggttgcacccgctgctagagtgtttctgagagcagttagagcagctttaacatctaccgtgccagatctgctctgtctactggctagaggctctcccaggggcttagcatcggggcggttaccgcttgcggtacactcggcacagcacggacccggatcaggtgccccttggcttagaattgcgaggagagcactgcgcttcgtactgtcgaaacactggggcgacgactgctaccttacgaatcgcctgtggcaggatttgaaacccccatctcacgtggagaatggtcaggagctgagacttgctccaccagtacagtgggccctccaggtgcagggtaatcagctccagaccgcagttctctgtttacggatggctcccccagaacctgctgggtccagacagagaatctag

SEQ ID NO: 13811 - RNA, 1332 nt, synthetic construct
  misc_feature 1..1332: note = source = /note="Description of Artificial Sequence: Synthetic coding sequence"
  source 1..1332: mol_type = other RNA
atgggcggccctagagcttgggccctgctctgcctcggcctgctactgcctggcggcggtgctgcctggtcgataggagccgcacctttttccggaaggcgtaattggtgttcatacgttgtcacccgaacaatatcatgccacgtacagaatgggacctatctccaacgcgtgttgcagaattgcccctggcctatgagttgccccgggtcgtcataccgcacagtggtgaggcccacatacaaggttatgtacaaaatcgttacagctcgggaatggagatgctgcccaggccactcaggcgtgagttgcgaggaggttgccgcatcctccgcgtctctcgaaccaatgtggtccggcagtactatgagaagaatggcattgcgccctactgcattttcggggtgtcttaactgttccaaggtcagtgaactaactgagagattgaaagtgctagaggccaaaatgacaatgctcaccgtgatcgaacagcccgttcccccgacaccagcaacaccagaagaccctgcaccactctggggcccacctccagcgcagggatcccccggcgacggcggcctccaggatcaggtaggcgcctggggactgcccggaccaactggccccaaaggcgatgcaggatcacgcggcccaatgggcatgcgagggcccccaggcccacagggtccccccggaagccctgggcgagctggcgccgttggcactcccggcgagcgcgggccacccggtcctcccggcccacccggcccacctggacccccggcccctgtgggcccccctcatgcacgcatttctcagcatggcgaccctctactgtcaaataccttcactgaaacaaataaccactggcctcagggccctaccggtccgccggggcctcctggtccaatgggccccccaggacctcccgggcctacaggcgtgcctggcagccctggacacattggaccacccggaccaacgggtcctaaaggcatcagcggacaccccggagagaagggcgagagaggattgcggggagagcctgggcctcaagggagcgcgggacaacggggcgagccaggcccaaagggggacccaggcgaaaaatcacactggggcgaaggactacatcagttgcgcgaggcactaaagatcctagcagagcgtgtgttgattctcgagaccatgatcggcctatatgaaccagagctgggttcgggggccgggcccgctggcacgggaactccaagtttgttgagaggaaaacgagggggccacgccactaattacaggatagtagcacctagatcaagagacgagcgcgggtag

SEQ ID NO: 13812 - RNA, 717 nt, synthetic construct
  misc_feature 1..717: note = source = /note="Description of Artificial Sequence: Synthetic coding sequence"
  source 1..717: mol_type = other RNA
atggtgctgctgttacttgtggcaatcccgttgctcgtgcactcttccaggggacctgctcattatgaaatgctaggacgatgtaggatggtgtgtgaccctcatggtcctcgggggccaggcccggatggcgctcctgcatcggtacccccattccccccaggagcgaaaggcgaagtggggcgaagaggaaaggctggcttgagaggcccaccaggaccacctggcccacgcggaccaccaggcgaaccaggcaggcctggtcccccaggccctccaggccctggccccggaggagtggccccagccgctggatatgtgccacgtatagccttctacgccggactgcgaaggccgcatgaaggatacgaagttcttaggttcgatgacgtagtgacgaacgtcggaaacgcttacgaggccgcatccggaaaattcacctgtccgatgccaggtgtctactttttcgcatatcatgtcctgatgagaggaggagacggcacatctatgtgggccgatctcatgaaaaatgggcaggtaagggccagcgccatagcccaagatgccgaccagaactatgattatgcctcaaactctgtaatccttcatttagacgtaggcgatgaggtcttcattaagctagacggtggaaaagtacacggcggcaataccaataagtacagcactttctctgggttcataatttatccggactag

SEQ ID NO: 13813 - RNA, 282 nt, synthetic construct; identical to SEQ ID NO: 12174
  misc_feature 1..282: note = source = /note="Description of Artificial Sequence: Synthetic coding sequence"
  source 1..282: mol_type = other RNA

SEQ ID NO: 13814 - RNA, 609 nt, synthetic construct
  misc_feature 1..609: note = source = /note="Description of Artificial Sequence: Synthetic coding sequence"
  source 1..609: mol_type = other RNA
atggttaggatttggaccactatcatgattgtcctgattctcctgttaagaattggccctaataagccctccctcagtggaagacaagccccagctcaagcacagacatccgatcttgtaccttctctcttcccactcgggttatgggcacccgggttttgtacctggtctagcccggatgaggacaaagtgtggagaccggcttgggagcagggacctaaaggtgagccggacccaagaggactgcggcccagaaaacccgtccctggaacaggaaaccgcgacagcgggacccggcggcggctgcaggacgccacagagcaagacccacgccctggaaacgacgtcgcatctgctgaaaccgccgggcccccctccccctccggaattagagcacaggaccgcgcgccccggcaccgccgagcacccccagcccgaatgccagtggccccagcgccttcagccgatggtgagcccctccaggaacaaggcggcggactctttcacaggactcggtccgtctacaatggtttagagctgaacacttggatgaaggttgagcggttattcgtggagaagtttcaccaatcatttagccttgacaactag

SEQ ID NO: 13815 - RNA, 342 nt, synthetic construct
  misc_feature 1..342: note = source = /note="Description of Artificial Sequence: Synthetic coding sequence"
  source 1..342: mol_type = other RNA
atgctgccctgcttagctctactgctgctgatggaactgtctgtgtgcacagtggccggtgatgggggcgaagaacagactctgagcactgaggcagagacgtgggtgattgtggccctagaagaaggagcaggaccttcaattcagctccagctccaggaagtcaagacaggaaaagcatctcagttttttggactcatgggcaagagagtgggggggaggccactaattcagcctaggcgcaaaaaggcatatcagcttgaacatacttttcagggattgctgggcaaaagatccctgtttacagaagggcgggaagatgaggcacagggaagcgagtag

SEQ ID NO: 13816 - RNA, 1269 nt, synthetic construct
  misc_feature 1..1269: note = source = /note="Description of Artificial Sequence: Synthetic coding sequence"
  source 1..1269: mol_type = other RNA
atggggcctgcgtggctatggctgctgggcacaggtatattagcctctgtgcattgccaaccgctgctcgcacacggggacaaaagtttacaaggaccacagccccctcgtcaccagctttccgaaccggcacccgcctaccacagaatcacaccaacaatcacgaacttcgctctccgactgtataaagaactggcagcggatgcccctgggaatatctttttctcccctgtttctatttcgactactttggccctgttaagtctgggagcacaggccaacactagcgctttgatcctcgagggcctcggcttcaacctgaccgagacccctgaggccgatatccatcaggggttcagatcactcttacacacactggcactgccatctcccaaattggaattaaaagtcggtaactctctctttctggacaaacggctcaaaccacggcagcattacctcgattccattaaagaattatacggagcctttgcattttctgctaattttacggattccgtaactactggacgccaaatcaacgactaccttcggagacagacatatgggcaagtggttgactgtcttcctgagttctcccaggatacatttatggtcctcgctaattacatcttttttaaagccaagtggaagcatcctttctcccgttatcagacacagaaacaggagtctttctttgttgatgaaaggacttctctgcaggttccaatgatgcaccaaaaagaaatgcatagatttctctatgaccaagacttggcgtgcacagttcttcagatcgagtacaggggaaacgccctggcacttctcgtcttacccgatcctggaaagatgaagcaggtggaggccgctttgcaaccccagacactgaggaaatggggacagcttcttcttccctcactgctcgatttacatctgccccgattctctattagtggcacctataacttagaagacatacttcctcagatcgggttgacaaacattctcaacctcgaggccgacttcagcggggtaacaggacagctcaataagaccatatccaaagtctcacacaaggccatggtagatatgtcagagaaaggcacggaagccggcgctgcatccggactcttaagccagccaccaagcctgaacactatgtcggatccccacgcacattttaataggccattccttttactgctgtgggaagtcaccacccaatctcttttgttcttaggcaaagttgttaatccagtcgccgggtag

SEQ ID NO: 13817 - RNA, 237 nt, synthetic construct; identical to SEQ ID NO: 12178
  misc_feature 1..237: note = source = /note="Description of Artificial Sequence: Synthetic coding sequence"
  source 1..237: mol_type = other RNA

SEQ ID NO: 13818 - RNA, 2139 nt, synthetic construct
  misc_feature 1..2139: note = source = /note="Description of Artificial Sequence: Synthetic coding sequence"
  source 1..2139: mol_type = other RNA
atggcagctgcagggcttgtcgcagtcgcagccgccgctgagtactctggcaccgttgcctctggaggaaacctgcccggagtgcactgcggccccagcagcggcgcgggtcccggcttcggccccggatcatggtctaggagtctcgatagagcactcgaggaagctgccgtcaccggcgtcctttcccttagtggcaggaagctcagagaattcccgcgaggagcagccaatcacgacctcaccgacaccactagagctgacctgagtaggaacagactgtctgaaatacccatcgaggcgtgccacttcgtaagcctggaaaacctcaacctgtatcagaattgcatccggtacatcccggaggctatcttaaacctccaagctctgacttttctcaacatttctagaaaccagctgtccacccttcctgtccatctgtgcaatctacccctgaaagttcttatagctagcaataacaagctcgtcagcctcccagaagaaatcggacatttgcgacacctaatggagcttgatgtgagctgcaacgaaatccaaaccattccctcgcaaattggcaaccttgaggccctgagggatctcaatgttagaagaaaccacctagtccatctcccagaagagctcgccgagcttccactgatcaggttagatttctcctgtaacaagataactacgatacccgtgtgctatcgaaacctgcgacaccttcagacaataaccctggacaacaatcccctgcagtccccacccgcccaaatatgtataaaggggaaagtgcacatattcaaatacctcaatatccaagcctgtaaaatagcccccgatctacccgactatgacaggagaccactcgggttcggttcttgtcacgaagagctgtatagttccaggccatacggcgccttagattctgggttcaattctgtggattctggggataaaagatggagcggaaatgagccaaccgacgagttttctgacttgcctttaagagtggccgagattacaaaagaacaacggttacgtcgtgaaagccagtatcaggaaaatagaggctcactcgtggtcactaatgggggggtggaacacgacttggatcagattgattatatagacagctgtaccgcagaagaggaagaagcggaagtacgccagccaaagggacccgacccagactctctttccagtcagttcatggcatacattgaacagcgccgcatttctcacgaaggatcacccgtcaaaccagtcgccatcagagaatttcagaaaaccgaagatatgagaagatacctacatcagaatcgcgtacccgccgaaccttcctctctgctgtccctgagtgcctcccataaccaactttcccacacagacctggaacttcaccagaggcgcgaacagctcgtggagcgcaccaggagagaggcccagctggcagccttgcagtatgaagaagaaaaaatacggacgaaacagattcagagagatgctgtcttagactttgtgaagcagaaggctagtcagtccccacagaagcaacatcctctgctcgacggtgtagacggcgaatgtccctttccttctcgcaggtcccaacacaccgatgattccgctttgtgcatgtcattgagtggtctgaaccaggtcgggtgtgccgcgacccttcctcactcttccgccttcacccctctcaagtctgacgaccgccctaacgcgcttctgtcgtcccctgctactgaaaccgtccatcattcacccgcctattcctttccagccgccatccagagaaaccagcctcagagaccggagtctttcctctttcgggcgggggttcgcgctgaaacaaacaaaggccacgcctcccctctcccaccctccgccgctcccaccaccgattccaccgattcaatcactggccaaaatagccggcagagagaggaagaactcgagcttattgaccaactgaggaagcatatcgagtatcgactgaaagtctccctcccttgcgatttaggcgctgcgttgacagacggagtggttctttgtcacctagccaaccacgtgcgaccaaggagcgttccctctatacacgttccctctcccgctgtcgtttcctag

SEQ ID NO: 13819 - RNA, 213 nt, synthetic construct; identical to SEQ ID NO: 12180
  misc_feature 1..213: note = source = /note="Description of Artificial Sequence: Synthetic coding sequence"
  source 1..213: mol_type = other RNA

SEQ ID NO: 13820 - RNA, 789 nt, synthetic construct
  misc_feature 1..789: note = source = /note="Description of Artificial Sequence: Synthetic coding sequence"
  source 1..789: mol_type = other RNA
atggcagctgccagcgccggtgcaacaagacttctgctgctgttgctgatggccgtagcagcaccatctagagctcggggcagcggctgtcgcgctggaactggtgccaggggagccggggctgaggggagagaaggggaagcctgcgggacggtagggttgctgcttgagcacagttttgaaatcgatgactcagctaacttcaggaaacggggcagccttctgtggaaccaacaggacggcaccttaagcctgagccagcgacagctaagcgaagaggagaggggacgactgagggacgttgcagctcttaacggcctgtacagagttagaatccctagacgaccaggagctctcgatggcctagaagccggaggctacgtttcttccttcgtaccagcttgcagcctcgttgagagtcacctctccgaccagctcactcttcacgtagatgtcgccggtaacgtggtgggcgtctctgtagtcacccaccctggaggctgccggggccacgaggtggaagacgtggacttggaactttttaacacatctgtacagctgcagcctcccactacagcccctggaccggaaaccgcagcattcattgagcggctagaaatggaacaggcccagaaggcaaagaatccacaggagcagaagtccttttttgctaagtattggatgtacattataccggttgttctctttctgatgatgagtggagctcctgacacaggtggacaaggaggcggcggcgggggtggaggagggggcggaagtgggcggtag

SEQ ID NO: 13821 - RNA, 150 nt, synthetic construct; identical to SEQ ID NO: 12182
  misc_feature 1..150: note = source = /note="Description of Artificial Sequence: Synthetic coding sequence"
  source 1..150: mol_type = other RNA

SEQ ID NO: 13822 - RNA, 213 nt, synthetic construct; identical to SEQ ID NO: 12183
  misc_feature 1..213: note = source = /note="Description of Artificial Sequence: Synthetic coding sequence"
  source 1..213: mol_type = other RNA

SEQ ID NO: 13823 - RNA, 711 nt, synthetic construct
  misc_feature 1..711: note = source = /note="Description of Artificial Sequence: Synthetic coding sequence"
  source 1..711: mol_type = other RNA
atgatgcccgccgagcgacgcctgccactctcatttgtgcttgatgtgctggaggggagggcacaacatccgggtgttttgtatgtgcagaaacagtgttccaatttaccatctgaactcccccaactactacctgacctagagtcgcacgtgccttgggccagcgaagctctcggaaagatgcccgatgcggtgaacttttggctgggcgaagccgctgccgtgactagcctgcataaagaccactatgaaaatctgtattgtgtcgtgtctggcgaaaaacacttcttattccaccccccctctgacagacccttcattccctacggactccgcgtcccaggctgtttgcagtttccacatacactactcccctgggcaccagagttgtacacacccgccacctatcaactcacagaagagggcacctttaaggtcgtggatgaggaagcaatggagaaggtcccttggattccactagacccattggcccctgacttggctcgctatccttcttacagtcaagcacaggcactgcgatgtaccgtgcgcgccggggagatgctgtacttgcctgccctttggtttcatcatgtgcagcaatcgcaaggatgtatcgccgtaaacttttggtatgatatggagtacgaccttaaatattcttattttcagctgttagattcccttactaaagcttcgggcctcgactag

SEQ ID NO: 13824 - RNA, 1098 nt, synthetic construct
  misc_feature 1..1098: note = source = /note="Description of Artificial Sequence: Synthetic coding sequence"
  source 1..1098: mol_type = other RNA
atggcccccaaactcatcactgttctttgcctcgggttctgcttgaaccagaagatctgtccacatgccggcgcacaagacaagttctctctatccgcgtggccatctccagtggttcccctaggaggcagggttaccctgtcttgtcactcccacctgaggtttgtgatttggaccatcttccagacaactggcacaagatcacacgaactacacaccggacttagcaataacattacaattagccctgtcacacccgagcacgccggtacctatcgctgcgtgggaatttataaacacgcaagcaagtggtcagccgagtctaatagcctgaagattatcgttacaggcctgttcacaaaaccttcaatctccgctcaccccagtagcctggtccacgcaggtgcaagggtctctctgcgctgtcattctgagttagccttcgacgagttcattttgtacaaagaagggcacatacaacactcacagcaattagaccagggaatggaagccgggatacattatgttgaagctgtattttccatgggacccgtcacacccgcccacgccggtgcctatcgctgttgcggctgcttttcacactctcgatatgagtggtctgctccaagcgatccactcgacattgttatcacaggcaaatataaaaaaccatctctgtccactcaggttgacccaatgatgcgtctgggtgaaaaactaaccctcttctgcagtagtgaaattagcttcgaccaataccatctgtttagacacggagttgctcatggccaatggctgtccggaggccagcgccacagagaggcgtttcaagcaaatttttcggtcggacgagcaacccccgtccctggtggcacgtatcggtgctatggcagtttcaacgattctccctataaacctccggtgacccggtgcaactttacgccacaagagaccttaagagtgctcctgtgccattcccagaatcccccactgaacctcacacctccatggcaaactcagtctcctaggaaagcaaatggacgaatgaagagatccctccaacagaagagacatcgaagatcctacatgccatcatag

SEQ ID NO: 13825 - RNA, 198 nt, synthetic construct; identical to SEQ ID NO: 12186
  misc_feature 1..198: note = source = /note="Description of Artificial Sequence: Synthetic coding sequence"
  source 1..198: mol_type = other RNA

SEQ ID NO: 13826 - RNA, 198 nt, synthetic construct; identical to SEQ ID NO: 12187
  misc_feature 1..198: note = source = /note="Description of Artificial Sequence: Synthetic coding sequence"
  source 1..198: mol_type = other RNA

SEQ ID NO: 13827 - RNA, 237 nt, synthetic construct; identical to SEQ ID NO: 12188
  misc_feature 1..237: note = source = /note="Description of Artificial Sequence: Synthetic coding sequence"
  source 1..237: mol_type = other RNA

SEQ ID NO: 13828 - RNA, 2868 nt, synthetic construct
  misc_feature 1..2868: note = source = /note="Description of Artificial Sequence: Synthetic coding sequence"
  source 1..2868: mol_type = other RNA
atgtgggcgggtcttcttttgcgggcagcttgcgtcgcactgctgcttccaggggcacctgcaaggggttacactgggcgtaaaccacccggccactttgccgcggaaaggagaaggctgggacctcacgtttgcctaagcggattcggttcaggttgctgtccaggctgggctcctagtatggggggcgggcactgcactctgcccttatgctcatttggctgtggatccggaatctgcattgccccaaacgtctgcagctgtcaggatggagaacaaggtgccacatgccctgagacccacgggccctgtggagagtacggatgtgacctcacctgcaatcacggggggtgtcaggaggtcgcaagagtctgcccagtgggcttctccatgacagagaccgcagttggaattagatgtaccgatattgatgaatgcgtcacaagttcttgtgaggggcactgtgtgaataccgagggtggattcgtgtgcgagtgtgggccaggaatgcagctctccgcagacagacactcatgccaagacaccgacgaatgcttaggaacaccatgccagcagcgatgcaaaaatagtattggtagctacaaatgtagctgtcgaacaggcttccatttacatggaaataggcactcctgcgtggatgtcaacgagtgtcggcgccccctagagagaagagtttgtcatcattcttgtcacaacactgtcggttcttttctgtgtacatgtcgacccggattccgcctgcgcgctgatagagttagttgcgaagccttccctaaggccgtcctggcaccaagcgcaatcctccagccacgtcaacacccttctaaaatgctgctcctcttgcccgaggccggaagacctgcactgagtcctggccactcacctcccagtggcgccccagggcctcctgccggtgtcagaactacccgacttccctcaccaactccacggctgcctacttctagcccatctgcgcctgtttggctgctctcgacgttacttgccactcccgttcctaccgcctcactgctgggcaacctccgaccgccatccctcctccagggagaagttatgggcacgccgagttctcctagaggacctgaatcgccccggctagccgcgggaccctcaccctgttggcacctcggcgcaatgcacgagtcgcggtcccggtggactgaaccgggttgtagccagtgttggtgcgaagatggaaaggttacatgcgaaaaggtccgctgcgaagccgcttgttctcacccaataccatccagggacggcgggtgttgcccttcttgtaccggctgctttcacagtggggtagtgcgagctgaaggggacgtcttttctcctcccaacgaaaattgtacagtgtgcgtgtgtcttgcaggcaacgtgtcttgtatcagccctgaatgcccttcaggaccttgtcagaccccgcctcagacagattgttgtacatgcgtgccagttagatgctactttcatggacggtggtatgcggacggcgccgtgttcagcggaggtggggacgagtgcaccacatgcgtctgccagaacggggaggtcgaatgtagcttcatgccatgtccggaacttgcgtgtccacgggaagagtggcggctgggtccaggacagtgttgctttacgtgtcaggaacctacaccttcaacaggctgctctctagatgataacggggtggagtttcccatcggacaaatctggagcccaggggatccttgcgagctgtgtatatgtcaggctgacgggtcagtgagttgcaaaaggaccgactgcgttgactcatgtcctcaccctattagaattccaggacaatgttgccctgactgctctgctggatgcacttacacaggccgcattttctataataatgagaccttcccgtcggtgttagacccttgcttgtcttgcatctgcctcctcggcagtgtcgcctgttcccctgttgattgtccaattacctgtacgtatccatttcacccagacggagaatgttgccccgtttgtagagattgcaactacgagggcaggaaggtcgcaaatggccaggtattcacactggatgacgaaccgtgcactcgctgcacctgccagttgggggaagtcagttgcgagaaggtcccctgtcagcgagcatgcgctgatcccgcactgctccccggcgactgctgctcttcatgcccagattcactctcacccctagaagaaaaacagggactaagtccacacggcaatgtggcctttagtaaggccggacgttctctccacggtgatacagaagcaccagtgaattgtagctcgtgtccgggtccaccaaccgcttcaccctccagaccagtgctccacctgctgcagcttctgctaagaaccaacttgatgaaaacacaaacactgcccacctcccctgccggagcgcacggccctcattccctggcattggggctgactgccacgtttcccggcgaacccggcgcatctccaagactgtcccctggtccatctacccccccaggcgcacccactctgcccttagcctctcccggcgcaccacagcccccgcccgttacacccgagcggtccttctctgcctcaggtgctcagatcgtgtcacggtggcccccattacccggaacattgctaactgaggcttccgcactgtccatgatggacccaagcccaagtaagacacctatcaccctcctcgggcccagagtgctttcacctaccacaagtcgactttcaacagctctcgccgctaccactcatccgggacctcaacagcctccagtgggcgcctccagaggagaagaaagtaccatgtag

SEQ ID NO: 13829 - RNA, 270 nt, synthetic construct; identical to SEQ ID NO: 12190
  misc_feature 1..270: note = source = /note="Description of Artificial Sequence: Synthetic coding sequence"
  source 1..270: mol_type = other RNA

SEQ ID NO: 13830 - RNA, 600 nt, synthetic construct
  misc_feature 1..600: note = source = /note="Description of Artificial Sequence: Synthetic coding sequence"
  source 1..600: mol_type = other RNA
atggaaactttccctctcctcctactctccctgggcctggtattagcagaagcctctgaaagcacgatgaaaatcattaaggaagaatttactgacgaagagatgcaatatgacatggcaaaaagcggtcaagagaaacagactatcgagatactgatgaaccctatcttacttgttaagaatacaagcttaagcatgtccaaggatgatatgtctagtaccctgttgacttttaggagcctgcactacaatgatccaaaggggaattctagtggaaatgacaaggagtgttgtaatgatatgactgtctggcggaaagtttccgaagcaaatggatcttgcaaatggagcaacaattttatccgtagttctaccgaagtgatgaggagagtccacagggcgccaagttgcaagttcgtccagaatccaggcattagttgctgcgaatccttagagctggaaaacacagtttgccagttcaccaccggcaagcagttcccaagatgtcagtaccattccgtgacctccctcgaaaaaatactgacagtcctgaccggacactctctgatgtcatggctagtgtgtggctcaaaactctag

SEQ ID NO: 13831 - RNA, 729 nt, synthetic construct
  misc_feature 1..729: note = source = /note="Description of Artificial Sequence: Synthetic coding sequence"
  source 1..729: mol_type = other RNA
atggctgccgccacccgcggatgtcggccatggggttccctgcttgggttgctcgggctcgtgtctgccgccgctgcagcatgggacctcgccagtttaagatgtacattaggagcattttgtgagtgtgactttcgccctgacttaccaggactggagtgtgatctggctcagcaccttgccgggcagcacttggctaaggccctcgttgtcaaagcccttaaggcgtttgtacgggatcccgctcctaccaaaccacttgttctgtcactgcacggatggacaggaaccggtaagagctacgtgtcatctcttctggcccattatttgttccagggtggacttcgttcaccacgagtgcatcatttctccccagttctccacttcccccacccaagtcatatagagagatacaagaaagatctgaaaagttgggtccaaggaaaccttactgcttgtgggaggagtctgttcctttttgatgagatggacaagatgccccctggcttaatggaagtgcttcgcccgtttctgggaagttcatgggtggtatacgggactaactataggaaggccatatttatttttatccgctggcttttgaaactaggccatcacgggagggctccaccacgaagaagcggtgcgctgcctcctgcccctgctgcacctagaccggcacttagagctcaacgggctggtcctgctggcccaggcgccaaaggatag

SEQ ID NO: 13832 - RNA, 627 nt, synthetic construct
  misc_feature 1..627: note = source = /note="Description of Artificial Sequence: Synthetic coding sequence"
  source 1..627: mol_type = other RNA
atgttaggacttttggtagccctgctggccttgggacttgctgtgtttgccctgctggatgtctggtacctagtccgactgccctgtgctgttctgcgcgcacgcctccttcagccccgggttcgcgatcttctagccgaacaaagattccccgggcgtgtcctcccttcagatctcgacctcctgcttcatatgaacaacgctcgctacctgcgagaggccgactttgcaagagtagcacatctaactcggtgcggcgtgttaggcgcgctgagagagctgagagcgcacaccgtccttgccgctagctgcgccagacaccgtaggtcactcagactactcgaacctttcgaggtgcgcacccgcctgttgggttgggacgatcgtgccttttatttggaggcccggtttgtgtcattaagggatggctttgtgtgtgcattgcttcggtttcgccagcacctattggggaccagtcctgaaagggtcgtacaacacctttgccaacgacgggtggagccccccgagctgccagccgaccttcaacactggatttcttacaatgaggcctcgtctcagctgctgagaatggaatcaggattatctgacgtgaccaaggaccaatag

SEQ ID NO: 13833 - RNA, 423 nt, synthetic construct
  misc_feature 1..423: note = source = /note="Description of Artificial Sequence: Synthetic coding sequence"
  source 1..423: mol_type = other RNA
atgctggtaaagcttaactcccaggcaagattgagctccatggttaagaaagtgagactgccttcaagatgtgagcccccaggtacaacgtgcaccgtttcagggtggggtaccacaacctctcccgacgtaacttttccgtctgatttgatgtgcgttgatgtgaaactgattagcccacaggactgcactaaggtttacaaagacctccttgaaaactctatgctttgcgccggcattcctgatagcaaaaaaaacgcctgcaatggcgacagcggaggaccccttgtatgtcgtggcaccctgcagggccttgttagttggggaacattcccttgtgggcaacctaatgatcctggcgtgtacactcaggtctgtaagtttacaaagtggataaatgatacaatgaaaaaacatagatag

SEQ ID NO: 13834 - RNA, 354 nt, synthetic construct
  misc_feature 1..354: note = source = /note="Description of Artificial Sequence: Synthetic coding sequence"
  source 1..354: mol_type = other RNA
atgctcagcaaagctcatggctgcaagaccgcgctttcattaggccgctgcccgaagatccgtgaggagtgcgagttccaggagagagatgtgtgcactaaagatcgtcagtgccaggataacaaaaagtgctgtgtcttctcatgtggaaaaaaatgcctcgacctaaaacaagatgtatgtgaaatgcccaaagagaccggcccctgcctcgcctatttcctacattggtggtacgataaaaaggacaatacatgtagcatgttcgtttacggaggatgtcaaggcaacaacaataacttccaatcaaaagccaattgcctaaatacttgcaaaaataaaagattcccctag

SEQ ID NO: 13835 - RNA, 2328 nt, synthetic construct
  misc_feature 1..2328: note = source = /note="Description of Artificial Sequence: Synthetic coding sequence"
  source 1..2328: mol_type = other RNA
atgcacccaggacccgaagaagctggttcaggccggtatggcccgcggtatatcactgacatgggtgccggagaagacgacgaaggctttgaggatgatcttgatctcgacatttcattcgaagaggtcaaaccactgccagctactaagggtgggaataaaaaatttcttgtagagagcaaaaaaatgtccatctctaatcctaagactatcagcaggctcattcctcccacctctgccagccttcctgttacaactgtagcaccccagccaatccccatccagcggaaaggaaagaatggtgtggcaattatgtcacgactgtttgacatgccttgcgacgagaccttatgcagcgccgattctttttgcgtgaacgattacacctggggaggttctagatgtcaatgcaccttgggcaaaggcggtgagtcgtgcagcgaggacattgtgatccagtatccccaattttttggccacagctacgtgacctttgaacccctgaaaaacagttatcaagcttttcagattactctcgaattccgggcagaggccgaggacggattgctcttgtattgcggagaaaacgagcatggtaggggtgactttatgagcttagcaattatcaggcgttccctgcaattccggtttaactgcggaacaggagtagcaatcatcgtgtctgaaacaaagattaagttggggggctggcacaccgtgatgttgtacagagacggcttgaatggacttttgcagctgaataatggaacccctgtcactggccagagtcagggacaatacagcaagattacgttcagaacccccttatatctgggcggggcgcccagtgcctattggttggtcagagcgacgggcaccaatcgcggattccagggatgcgttcagtctctagctgtgaacggacgacgaatagacatgagaccatggccattgggcaaggcattatctggcgctgatgttggcgaatgttcttcagggatctgcgatgaggcctcatgtatacacggcggcacgtgcaccgccatcaaagctgacagttatatttgtctctgccctctcgggttcaaagggcgccactgtgaagacgcctttacccttaccattccccagttccgtgagagcctacgatcttacgccgctaccccatggcctctcgaaccacaacattacctgtccttcatggagttcgaaataacttttagacctgactcaggggatggtgtactcctgtatagctacgacacaggaagtaaggactttctgtccattaatctcgcagggggccatgttgagtttcgtttcgattgtggatccggcacaggcgtactaagaagtgaggaccctctgacgctcggtaactggcacgagttacgtgtgtcacgtacagcaaagaatggtattttgcaggtggacaagcaaaagatcgtagagggcatggcagaaggcggtttcacccagattaaatgtaacacagatatattcatcggcggagtgcccaactacgatgacgttaaaaaaaattccggagtgctgaagcccttttctggtagcatacaaaaaatcatcttaaacgatcgcaccatccatgttaaacacgatttcacatcaggtgtcaatgtcgaaaatgctgcccacccctgcgtccgcgcaccttgcgcacacggaggttcctgccggccgagaaaggaaggctacgactgtgactgccccctcggattcgaaggtctccactgtcagaaggctatcattgaagccattgaaattccacagttcatcggccgatcatacctaacctacgacaaccccgacattcttaaacgtgtgagcgggagtagatcaaacgttttcatgagatttaaaaccaccgctaaggacgggcttttgttatggcgcggggactcgccaatgcgtcctaatagcgacttcatatccttgggtctgcgcgacggcgctctggtgttttcctacaatcttggcagcggtgtggccagcatcatggttaacggctcatttaatgacggacgctggcatcgggtcaaagcggtacgagatggacagtccggtaaaattaccgtcgacgattacggagccaggacaggcaagtcaccagggatgatgcgccaactgaacataaacggggctttatatgtgggaggaatgaaagaaattgcgctgcacaccaatagacaatacatgcgagggcttgtgggttgcatttcccattttaccttaagcactgattatcatatctctttggtggaggacgctgtcgatggcaagaacatcaacacctgcggggcgaaatag

SEQ ID NO: 13836 - RNA, 1257 nt, synthetic construct
  misc_feature 1..1257: note = source = /note="Description of Artificial Sequence: Synthetic coding sequence"
  source 1..1257: mol_type = other RNA
atgagaacactgttcaatttactgtggctagctctcgcctgttctccagttcacacaacacttagcaagtccgacgccaaaaaagcagcgagtaaaacccttctagaaaaagtgaaattctgttcctgttgtcccggttggtcagctatggcacggtcctggctgaccgcaacgtccgccacccaatcacagttctccgacaaaccagtgcaggatcgaggcctggtagttaccgaccttaaggccgagtcagtagtcctcgagcacaggtcttactgtagcgccaaggcaagagacagacatttcgccggggatgtgctgggctacgttaccccttggaattctcacggatatgatgtgacaaaggtgtttgggtccaaatttacacaaatttctccagtctggctccaacttaaacgacgcgggagagagatgttcgaagtgacagggctccatgatgttgaccaggggtggatgcgggctgttaggaagcatgcaaaaggccttcacatagtgcctagactactgtttgaagactggacatatgacgatttcagaaacgtgctcgattcagaggatgaaatcgaggaattatcgaagactgttgtgcaagtggccaaaaatcagcactttgatggattcgtggtggaagtgtggaatcaactgttatcgcaaaaacgtgtcgggctcattcacatgttgacccacctcgccgaagcccttcaccaggctagactcctcgccctgcttgtgattccaccagctattaccccaggcaccgaccagctgggtatgttcacacataaagaatttgagcagctcgcgccagttctcgatggattctccctgatgacttatgactactccaccgcacaccaaccaggccccaacgccccattatcgtgggtcagagcctgtgttcaagtactcgaccctaagagcaaatggagatctaaaatacttctcggattgaacttctacggaatggattatgcaacctccaaagacgccagggaacctgtggtaggcgcaaggtatatccaaaccctgaaggatcaccgtccaagaatggtctgggactctcaggccagtgaacacttcttcgagtataagaaaagtagatcaggcagacatgtggtcttttaccccacactgaagagcctgcaggtccgactggagctggcaagagaactcggcgtcggtgttagtatttgggagctgggccaggggttagactatttttatgatttgctgtag

SEQ ID NO: 13837 - RNA, 813 nt, synthetic construct
  misc_feature 1..813: note = source = /note="Description of Artificial Sequence: Synthetic coding sequence"
  source 1..813: mol_type = other RNA
atgatgctccgactgttgtcgtctctgctcttggttgccgtggcgagtggttatggacccccaagtagcaggccctcctcccgagtggtgaacggtgaagacgcagtgccctattcgtggccctggcaagttagcctgcagtatgagaaatccggttcattctaccacacctgcggcggatccttgattgcaccagactgggttgtgactgctggtcattgtatttcatcatccaggacataccaggtggttctcggcgagtacgatcgcgctgttaaagagggaccagaacaggtgatccctattaatagtggagacctgtttgttcaccccctgtggaatcgctcatgcgtggcttgcggcaatgacatcgctctcattaagctctcccgtagcgcccaattgggcgatgcagtacaactagcgtctttgccccctgctggcgacatccttcccaatgaaaccccatgttacatcaccggatggggtaggctctacaccaatgggcccctgcctgataaactgcaggaagcactgttaccagtggtggattatgagcattgcagccgatggaattggtggggaagtagtgtgaaaaaaaccatggtgtgtgcaggcggagatatacgctcaggctgtaatggggatagcggaggcccactcaactgccctactgaagacggcggctggcaagtacatggcgtaacgtcttttgtaagcgcttttggctgtaatacacggagaaaaccaaccgttttcactcgagtatctgcttttatcgattggatcgaagaaaccatagcttcacactag

SEQ ID NO: 13838 - RNA, 585 nt, synthetic construct
  misc_feature 1..585: note = source = /note="Description of Artificial Sequence: Synthetic coding sequence"
  source 1..585: mol_type = other RNA
atgaccatgcgccacaactggacccctgatctctctcctctgtgggtcctactcttgtgcgctcacgtggtgaccctgctggtcagagccacacctgtgagccaaacgactactgctgctacagcctccgtccggtccaccaaagatccctgtccgtctcagccacctgttttcccagccgccaagcaatgccctgccctagaagtcacatggccagaggtcgaagtccctcttaatggaaccctgagcctatcctgcgtagcctgttcccggtttccaaactttagcattctttattggctcgggaacggatccttcatagaacatttaccgggccggctgtgggagggctctaccagtagggaaaggggatctacaggaactcaattatgcaaagccttggtcttggagcagctcacacctgcactgcactcaaccaatttctcatgtgttctcgtagaccctgaacaggttgtgcagagacacgtcgtgttagctcagctgtgggctggacttcgcgcaacccttcctcctacacaagaggcactgcccagttctcatagttccccccagcagcaaggatag

SEQ ID NO: 13839 - RNA, 1308 nt, synthetic construct
  misc_feature 1..1308: note = source = /note="Description of Artificial Sequence: Synthetic coding sequence"
  source 1..1308: mol_type = other RNA
atgcaaggccagggtagacgaaggggcacttgcaaagatattttctgcagtaaaatggccagttacttatacggagtgctattcgctgtcggcttgtgtgcccccatctactgtgtttcacctgctaacgctcccagcgcttacccgcgaccatccagcacaaaatccacccctgcatcccaagtctacagcctgaacacagatttcgcattccgcctgtatcgcagacttgttctagaaaccccatctcagaatattttcttctctcccgtgagcgttagcacttctttggcaatgttaagtctcggggcccacagcgtaacaaaaacacagattctgcagggtttaggctttaacctcacacacacaccagaatccgctatccaccaaggatttcaacatctagttcactcgctaacagtaccatctaaggacctgacgctgaaaatgggatccgccttgtttgtgaagaaggaactgcagcttcaggctaattttctgggaaatgtcaagcgcctgtatgaggccgaagtgttttctactgacttttccaacccaagcattgcccaggcgaggattaattcccatgttaaaaagaagactcagggaaaagttgtggacattattcagggtttggaccttcttacagccatggtgctggtcaatcacattttctttaaagcgaaatgggagaaacctttccatcccgaatacaccaggaaaaattttccttttcttgtgggtgagcaggtaactgtgcatgtcccaatgatgcaccagaaggaacagttcgcatttggtgtggatacagaactaaactgttttgttctgcagatggactataagggtgacgccgttgcattttttgtgttgccttcaaaagggaagatgcgacaactggaacaagcgttgtctgccagaactttgcgaaaatggtcccatagccttcagaagagatggatagaagtgtttatcccaagattttccatatcagcctcctacaatttagaaactattcttccaaaaatgggtatccagaatgtttttgacaagaacgccgatttctcagggattgccaagagagacagtctccaagtctccaaagccacacacaaagcagtgctcgatgtttctgaggaaggaactgaggcaacggccgccaccacaacaaagttcatcgtgcgatctaaagatgggccctcctattttactgtgtcctttaatcgcaccttcttgatgatgatcacaaacaaagcaacagacggcattctatttctcggcaaagttgagaacccaacaaagtcctag

SEQ ID NO: 13840 - RNA, 393 nt, synthetic construct
  misc_feature 1..393: note = source = /note="Description of Artificial Sequence: Synthetic coding sequence"
  source 1..393: mol_type = other RNA
atggcttccgacttgatacgaactatcctcgccgtcgctttaatctcaaaactggggaccgccgttgatgcggagcttatgcctagtggagcgatcctgcagaacaaacgcgagaatcttcctagagtttgtcacgcactcgcctttcttggtatggcgcgttgtcaagacctgtttcttgtccgattgcagggatggaaattgggtaccaggttccaggatggccccagatcaactccacaggaggaggggggctctccacaaagaaagagagggatgcctgtgcagattcacttcctgctgaaatcatttctatcatctccaataactttcgcctttatcagcttagcacgcaccgtgagtctagccaccgctatatgtaagattgtctag

SEQ ID NO: 13841 - RNA, 837 nt, synthetic construct
  misc_feature 1..837: note = source = /note="Description of Artificial Sequence: Synthetic coding sequence"
  source 1..837: mol_type = other RNA
atgcagtggctgcgagtccgagagtcaccaggggaagcgaccggtcatcgcgttacaatgggcacagcagcattaggacccgtgtgggcggcgctactattatttcttctgatgtgtgaaatcccaatggtcgagctcacatttgacagagccgttgcttccggttgccaacggtgttgtgattccgaagaccccctggatcccgcacacgtctctagtgcctcttcttcaggacgcccccacgctcttccagaaatacgtccctatataaacattacgatcctgaagggggataaaggagatcccgggcctatgggtttgcctggctatatgggacgtgaaggtcctcaaggagagcctggtccccagggtagtaaaggggataaaggagaaatgggcagcccaggtgctccttgtcagaaaaggtttttcgcattctctgtcggacgcaagacagccttacacagtggggaagactttcaaactctcctgttcgagcgcgtgtttgtcaatctggacggctgttttgatatggcaacaggacaatttgctgctccattgcgcggaatttatttcttcagtcttaacgttcactcttggaactacaaagaaacatacgtacacattatgcacaatcagaaagaagccgtgatcctttatgcacagccaagcgaacgatccattatgcagtcacagtcagtcatgttggacctcgcttacggcgaccgggtctgggtgcggctgtttaaacgacaaagggagaacgccatctacagcaatgactttgacacttacatcacatttagcggacacttaatcaaagccgaagacgactag

SEQ ID NO: 13842 - RNA, 1635 nt, synthetic construct
  misc_feature 1..1635: note = source = /note="Description of Artificial Sequence: Synthetic coding sequence"
  source 1..1635: mol_type = other RNA
atgtgtacagtggtggaccccagaatagttcgcagatacttgctgagaagacaactcggacagggcgcttacggaatagtgtggaaggcagtcgatcgccgtaccggagaagtcgtggccattaaaaaaatctttgacgctttccgcgacaaaacagatgcccaaagaacgttccgcgagattacactattacaggaatttggcgatcatcccaacattatttccctcctcgacgtgatacgcgccgagaacgacagggacatttaccttgtgtttgaatttatggataccgacctcaacgcagtaatcagaaaaggcggactgttacaggatgttcatgtacggagcattttctatcagttattacgcgctacgcgttttctgcactccggccatgtggtgcatcgcgatcagaagccatctaatgttctgctcgacgcaaactgcacagtcaagctatgcgacttcgggctagctcgaagtctaggagatcttcccgaagggcccgaggaccaggctgttacagaatacgtcgccacccgatggtaccgggctcctgaagtgttattaagttctcacaggtacactctgggtgtggacatgtggtctttaggatgtattttaggtgagatgctgcgaggaaggccgctctttccaggcacgtcgacactccaccaactcgagttaattcttgagaccataccaccccctagcgaagaggacttgttggccttgggctcaggttgccgtgcatccgtgttacaccaacttggctcacgtcctcgccaaacccttgatgccttgttgccacccgatactagtcccgaagccctggatctgttacgccgcctgttagtgttcgcccccgacaaacgactgtctgccacccaggccctccaacacccctatgttcagcgcttccactgccctagcgatgaatgggcaagagaagctgatgttcgccccagagctcacgaaggcgttcagctatccgtaccggaatatagatctagagtgtaccagatgatattagaatgtggaggttccagcggaacaagccgggaaaaaggccccgagggggtcagcccaagccaggcacatttgcacaagccacgcgccgatccacagctgccaagcagaacccccgtacagggccccaggcccagacctcagagcagccccggccacgaccccgccgaacacgagagcccgcgcgcagcaaaaaatgttccccgacagaattcggcccctttgctgcaaaccgcactcctaggcaatggagaacggccccctggagctaaagaggctccaccgctgacactgtcccttgttaagccttccggccgcggcgctgctccctcactcacgtctcaggctgccgcccaagttgcaaaccaggctcttattcggggcgactggaatcgtggaggaggcgtgcgagtggcaagcgtgcagcaggtacccccacggcttccacctgaggcccgaccaggccgtagaatgttttccacttcggcactgcagggagcacagggaggcgcccgtgcattgctgggtggttactcccaagcatatggaaccgtctgtcattctgcccttggacatcttcccttgctcgaaggccatcatgtctag

SEQ ID NO: 13843 - RNA, 399 nt, synthetic construct
  misc_feature 1..399: note = source = /note="Description of Artificial Sequence: Synthetic coding sequence"
  source 1..399: mol_type = other RNA
atgaagtcttccggtctctttccgttcctcgtcctgcttgccctcggtaccctggccccatgggcggtcgaaggttccggcaaatccttcaaggcgggagtttgcccgccgaagaagtcagcacaatgcctcagatacaaaaagcccgagtgccagtccgattggcagtgccctggcaaaaagcgttgttgccctgatacctgtggaattaagtgcctggaccctgttgacacacccaatccaactagaagaaagcccggcaagtgccctgtgacatacggtcagtgtttaatgttgaacccacctaacttctgcgagatggacggtcaatgcaaacgcgatcttaaatgctgtatgggcatgtgcggaaaatcttgtgtctctcccgttaaagcctag

SEQ ID NO: 13844 - RNA, 1401 nt, synthetic construct
  misc_feature 1..1401: note = source = /note="Description of Artificial Sequence: Synthetic coding sequence"
  source 1..1401: mol_type = other RNA
atgaagccccctctgctcgtattcattgtgtgcctgctgtggctgaaagactcccattgtgcccccacatggaaagataagactgcaatcagtgagaacctgaaatccttcagtgaagttggagagatcgacgccgatgaagaggttaaaaaagccctaaccggaataaaacagatgaagatcatgatggagcgaaaagagaaagagcataccaatctgatgagtactctgaaaaagtgccgggaggaaaaacaggaagctctgaagctgctgaacgaggtccaggaacatttggaagaagaagagagactgtgtagagaatcgttggcagattcttggggagaatgccgtagctgcctggaaaataactgtatgagaatttacacaacgtgtcagccatcgtggtcatcggtgaaaaacaaaattgagagattttttcgcaagatttaccagttcttgtttcccttccacgaagataatgaaaaagaccttcctatatccgagaaacttattgaggaagatgcccagcttacccaaatggaagacgtattcagtcagttgactgtagatgtgaattccctgtttaaccgcagctttaacgtcttcagacaaatgcagcaggaatttgaccagaccttccaaagccattttattagcgacactgatcttacagagccgtattttttccctgcattctccaaagaaccaatgactaaagccgatcttgagcagtgctgggatatcccaaattttttccagctcttttgtaacttctccgtgagtatctatgagtcagtatctgagaccatcaccaaaatgctgaaagctatcgaggacctccccaagcaggataaagcacctgatcatggaggactgatttctaagatgttacccggacaggatagagggctgtgtggtgagttagatcaaaatctgagcaggtgcttcaaattccacgaaaaatgccagaagtgccaggcacatctctctgaagactgtcctgacgtacccgcgctgcacaccgagcttgacgaagctattcgactggtcaatgtctcaaatcaacagtacggacagatactgcaaatgactagaaaacatctggaggacacagcttatctcgttgagaagatgagagggcaatttggttgggtatcagagcttgccaatcaagcgccagagaccgaaataatcttcaatagcatacaagtcgtgccaagaatccatgaaggtaacatttccaaacaggatgaaaccatgatgaccgacttgtccatcctcccaagctccaatttcacactcaagattcctctggaagagtcagcagagagcagcaactttattggctacgttgtcgctaaagccctccagcactttaaagaacatttcaagacatggtag

SEQ ID NO: 13845 - RNA, 522 nt, synthetic construct
  misc_feature 1..522: note = source = /note="Description of Artificial Sequence: Synthetic coding sequence"
  source 1..522: mol_type = other RNA
atgcactggaagatgttgctactactcctcctgtattacaacgctgaggcctctatgtgccaccgctggagtcgggcagtcctgtttcccgccgcacatcgaccgaaaagaagttccagcctcccgctaaatccagtactgcaaacttccctcgaggaagtcgaactactgtatgagtttttgttggccgagcttgaaatttcccccgacctacaaatcagcataaaagacgaagagcttgctagcttgagaaaagcatccgactttcgaaccgtatgcaacaatgtgatcccgaagagcatcccggatatacgtcgtttatccgcctctctcagctcgcatccaggtattctaaaaaaagaagatttcgagcgtaccgttctaactctggcctacactgcgtacagaacggcccttagccacggacaccagaaagacatctgggcccagtcattagtgtccttatttcaagcactcaggcatgatctgatgaggtcctcacagccaggcgtgcccccctag

SEQ ID NO: 13846 - RNA, 1473 nt, synthetic construct
  misc_feature 1..1473: note = source = /note="Description of Artificial Sequence: Synthetic coding sequence"
  source 1..1473: mol_type = other RNA
atggaagattccgacagtgctgccaagcagctcggacttgcagaagccgcagcagtcgcagctgcagccgcagttgctgccgctgctgccgccgccgcaggaggggaagcagaagagccagtgttgtccagagacgaggactcagaggaggacgccgatagcgaggctgagagggaaaccccccgggttacagccgtggctgtaatggcagcagaacccggtcacatggacatgggagcagaggctctcccaggcccggatgaggctgccgccgctgccgcctttgctgaagttaccaccgtcacagtcgcaaacgtcggggcagccgctgacaatgtattcaccacgagcgtcgctaacgcggcatcaatctccgggcatgtactgagcgggagaaccgccttgcaaataggggacagtctgaatactgaaaaggcaacactgattgtggtgcacaccgatggttccatcgtggagaccactggattaaaaggccctgcagcaccactaacaccaggcccacaaagcccaccaactccactcgcacccgggcaggaaaagggggggactaaatataattgggatccttccgtctacgattccgaactgcctgttagatgcagaaatatctcaggaaccctctacaaaaatcgactcggttcgggttgggacttgaagccatccaggtgtctgctacatctgtgctgcctgttgcggagacatgacctaatcacagtgacaccctctgggcagatcaccacttccggagctctgacattcgaccgcgcctccaccgtcgaagctacagccgttatttctgaaagccccgctcaaggtgatgtgtttgccggcgccactgtccaagaagcatccgttcagcctccctgccgggcaagtcatcccgaaccgcattacccaggctaccaggattcatgtcagatcgcaccattccccgaggccgctttgcctacctcacatcctaaaatcgtactgacttcacttcccgctctcgcagtaccaccaccaacaccgaccaaagccgcacctccagctctcgtgaacggcttagagcttagcgaaccccggagctggctgtatcttgaggagatggtgaactcactcctgaacaccgctcaacaactgaagacactcttcgaacaggccaagcacgcaagcacctatagagaagccgcaaccaatcaggccaagattcatgctgacgcagaaagaaaagaggttatccacccaccaagactgccgaaagtactgggcttacaacagagttgtgtgaattgcggtagagaggcgatgtcggagtgtacaggctgccacaaagtaaattattgttctacattctgtcagcgcaaagattggaaagatcaccagcatatttgcggtcagagcgcagctgtgacagttcaggcagatgaggtgcatgtcgcagagtccgtcatggagaaagtaaccgtctag

SEQ ID NO: 13847 - RNA, 1476 nt, synthetic construct
  misc_feature 1..1476: note = source = /note="Description of Artificial Sequence: Synthetic coding sequence"
  source 1..1476: mol_type = other RNA
atgccatccacagttctgccgtctaccgttttaccttccttgctgcccactgcaggcgctggctggtccatgcgctggatactctgttggtctctcactctatgtctcatggcccaaacagcactgggagctctccatacgaaaagaccccaagtggtgactaaatatggtaccctccagggtaagcagatgcatgtgggcaaaacacctatacaggtgtttctgggagtccccttcagtaggcctcctttgggcattctgcgtttcgccccccctgagccacctgaaccttggaaaggaattcgtgacgccacaacctaccctcccggatgtttacaggaatcgtggggtcagctggcgtccatgtacgtctccactagagaacgctacaagtggctgagatttagtgaggattgcttataccttaatgtgtacgcgccagctcgcgctcccggtgaccctcagctgcccgtcatggtgtggtttccaggtggggccttcatagtcggcgcggcctcttcatacgagggttccgacttagccgctagagaaaaggttgtccttgtcttcttacagcacagactggggatttttgggttcttgagtactgatgattcccatgcgagaggaaactggggacttctggatcagatggcagctctccgctgggtacaggagaatattgctgccttcggaggagatccaggcaacgtgactctattcggccaatcagcaggcgccatgtccatttccggcctgatgatgtcccctctggcgtcaggcctctttcacagagctatcagccagtccggcacagcacttttccgactgtttattacctccaaccctttgaaagtcgccaaaaaagttgcccatttggcaggctgtaatcacaattctacgcagatcctggtgaattgtttgcgagccctttccggtacaaaggtcatgcgcgtgtctaataagatgaggttccttcaactgaatttccagagggaccctgaagaaataatttggtctatgtctcccgtggtggacggagtggtgattcctgacgaccctcttgtcctcctgactcaaggcaaagtgtcctccgttccatacctgctcggcgtaaataatctcgagtttaattggctccttccctatataatgaaattcccgcttaaccggcaagccatgcgaaaagaaactattactaagatgctttggtccactcgaaccttgctgaatatcacgaaagagcaagtgccattggtggttgaagaataccttgataacgtaaatgaacacgactggaaaatgcttcggaacagaatgatggacatcgtgcaagacgcgacctttgtatacgccactctccagactgcacattatcatagagagacaccaatgatgggaatctgccctgctggacacgccactacccgtatgaagtctacctgcagttggattttaccccaggagtgggcatag

SEQ ID NO: 13848 - RNA, 753 nt, synthetic construct
  misc_feature 1..753: note = source = /note="Description of Artificial Sequence: Synthetic coding sequence"
  source 1..753: mol_type = other RNA
atgcccgcaagcagtccctttttgttagctcccaaaggcccgccgggcaacatgggcggaccagtacgtgagcccgcgctgagcgttgccctgtggttgtcgtggggagccgccctgggagctgtagcgtgtgccatggccctactcactcagcaaacagagctgcagagcttacgtcgggaagtgtcccgcctgcagggaaccggtggcccaagtcagaacggagaagggtatccgtggcagtcattgcctgagcagtcttctgacgccttggaggcctgggaaaatggcgaaaggtctcggaaaaggcgtgccgtgcttacgcagaagcagaaaaagcagcattctgtgctccatctagtacctattaacgctacctccaaagacgacagcgatgtaaccgaagtgatgtggcagcctgcccttcgaagaggacgtggtctccaggctcagggctatggggtaagaattcaggatgccggggtttatctactctactcccaggtactctttcaggacgttacatttacgatgggtcaggtggtcagtagagaaggccaagggaggcaagaaactctatttcggtgtatcagaagcatgccgtcccatccagatagagcctacaactcatgctactcggccggtgtgttccatttgcaccagggtgacatcctctcagtgattattccacgagccagagcaaaattaaatctctctccccacggcaccttcctgggatttgtgaagttatag

SEQ ID NO: 13849 - RNA, 1437 nt, synthetic construct
  misc_feature 1..1437: note = source = /note="Description of Artificial Sequence: Synthetic coding sequence"
  source 1..1437: mol_type = other RNA
atgagtcctcccctgctaaagttaggagccgtcttatcaacaatggctatgatcagtaattggatgagccagaccctcccttcccttgttggactcaacacaactcgactgtctaccccagacaccctcactcagatctctccaaaggaggggtggcaggtttactcttcagcacaagaccctgatgggcgttgcatctgcacagtcgttgcccccgaacagaacttatgctcccgcgatgctaagtcacgccagctccgacaactcctggagaaagttcagaatatgtcccaaagcatagaagttttaaacttgcggacacagagggacttccagtatgtcctaaaaatggaaacacagatgaaaggcctgaaagcgaaatttaggcaaatagaagatgaccgcaaaacactgatgaccaaacacttccaggaactgaaagaaaagatggacgaactgctgcccctgattcctgtcttagaacaatataaaacagatgccaagctgatcacccaattcaaagaggaaataagaaacctttccgctgtactcaccggaatccaagaagagattggggcttatgattacgaggaattgcaccagcgggtactgtctctcgaaaccaggctgcgggactgtatgaagaaattgacctgtggaaagctgatgaaaatcactggccccgtgaccgtgaagacgtcaggcacacgatttggagcttggatgaccgaccctttagcctctgagaaaaataaccgggtatggtatatggattcttatacaaacaataaaatcgtccgcgagtacaagtctattgccgattttgtctctggggcagagtctagaacttacaaccttcccttcaagtgggcaggcacaaatcacgtggtgtataacggcagtctatactttaataagtatcagtcaaacataattattaagtacagtttcgatatgggccgggttctagcacagagatctctcgaatacgcaggctttcataacgtgtatccctatacctggggcggattcagtgatattgatctgatggccgacgagattggtctgtgggcagtgtatgctaccaaccaaaatgctggtaacatcgtgatttcccagttgaatcaggatactctggaggtcatgaaatcgtggtctacgggataccctaagagaagcgcaggtgaatcctttatgatctgcgggacgctgtacgtgaccaactcccacttgacaggggctaaggtgtactattcctatagcacgaaaacttctacttacgagtatactgacatacccttccacaatcaatactttcatatctccatgctcgactacaacgcaagggaccgagcgctctacgcatggaacaatggccatcaggtattgtttaacgttacccttttccacattattaagaccgaagatgatacctag

SEQ ID NO: 13850 - RNA, 1101 nt, synthetic construct
  misc_feature 1..1101: note = source = /note="Description of Artificial Sequence: Synthetic coding sequence"
  source 1..1101: mol_type = other RNA
atggcacgagagcgccctcccggacgcggatgcggtgtactccgtcgttgcttgttgggcgccgtgttactgtttggactgcgtctctgcgctgagctgagaagagccggcccaggctcacctactcggtccgctccaccaggcccagcttggagaccacccggcccacacctgccccccgcaccagggcagccacgaggcgcttccagaaggcaagtgacatacgtccggtcaggaagacgcgcaccaccaggagggggcggctcaggaacaccagagcctggttgctgtgctccacgcggcaggcctagacgaaaaggcccccggtggcacattgacctccaaccctgggcggggagcgctcaaagcctggacgaagaagcctggagatttctccggtacatcagcaccacacaaattgcttgcaatcatatgaacaccgactcattggccacagatagcagtcccacccacaaaccttggtcagtctgcttggatgatagattcaatctcgctcaccagatcagaaacaaacagtgtcgcctgtactcactggggcttggatctgacgacacacatttcgaagtaagcatggcaaacaatggttgcgaagtgcaccgattcgacccttcagtgaagtccgcacatatacttgaaagtcagcacctgtggtatcaccggctcagcattgattggcgtgacccgcatccagcggtggcagctcagaaaccccatagcaatacccgcaaattaggcagcatcctcaacgagtttgggcaccataagattgacgtattaaaggcagatttggagagcgccgaatggaaagttctggagaatctgatcctcgaagacgtactggagcagatcggacagctaatttttgagatacacctgcattggccaggtttcgaagtgtcaggaagcgattctagtgtggtgcgcttttggtactccttgctgaaggaattggagcagaaggactttcggttatttcattcttacaaagatttgtcaaaacctcagctgttcctgaagaaagatatctttaatgccagttcatgttatactctgtcctgggtgaacactcgatggaaatag

SEQ ID NO: 13851 - RNA, 300 nt, synthetic construct; identical to SEQ ID NO: 12212
  misc_feature 1..300: note = source = /note="Description of Artificial Sequence: Synthetic coding sequence"
  source 1..300: mol_type = other RNA

SEQ ID NO: 13852 - RNA, 618 nt, synthetic construct
  misc_feature 1..618: note = source = /note="Description of Artificial Sequence: Synthetic coding sequence"
  source 1..618: mol_type = other RNA
atgatgagaactctgattaccactcacccacttcccctgctgctattacctcaacagttactgcagctcgtccagttccaggaagtggacactgattttgatttccctgaggaggacaaaaaagaggaattcgaagaatgtttagaaaagttcttttctaccggaccagcccgcccccccacaaaggaaaaggtgaagagaagggtattgatcgaaccggggatgccacttaatcacattgaatattgtaatcatgagatcatgggtaaaaacgtgtactataagcaccgctgggtcgccgaacattattttctgctcatgcagtatgacgaacttcagaagatctgttataacagatttgtcccatgtaagaatggtatcagaaagtgcaatcggagtaaagggctggtagagggcgtgtattgcaatcttaccgaggcatttgaaattcctgcttgtaagtatgagagcctgtataggaaaggatacgtcttaattacttgttcttggcagaacgaaatgcagaaacggattccccacaccatcaacgatttagtggaacctcctgagcacagatcatttttgagcgaagacggcgtgtttgtaatatcaccatag

SEQ ID NO: 13853 - RNA, 402 nt, synthetic construct
  misc_feature 1..402: note = source = /note="Description of Artificial Sequence: Synthetic coding sequence"
  source 1..402: mol_type = other RNA
atgctcgactggagactggcaagcgctcactttatactcgcagtaacacttaccctttggagcagtggaaaagttctatccgtcgatgttactacaactgaagcctttgattccggtgtaattgatgtgcagtctactcctacggtgagggaggaaaagagcgctaccgatctgaccgctaaacttcttctgctcgacgagctggtcagccttgaaaatgacgtgatcgaaacaaagaaaaagcgatctttcagtggctttggaagccccctcgataggctctcagccgggtccgtggatcataaaggcaaacagaggaaagttgtggaccaccccaaacgccgattcgggattccgatggacagaataggcagaaacagattgagcaattcaagaggctag

SEQ ID NO: 13854 - RNA, 846 nt, synthetic construct
  misc_feature 1..846: note = source = /note="Description of Artificial Sequence: Synthetic coding sequence"
  source 1..846: mol_type = other RNA
atgggttccagaggccaaggattactgctggcgtattgtctcctgcttgcattcgcctcaggcttagtgctgagccgagtgccccatgttcagggggaacagcaagaatgggaggggactgaagagctaccatcaccaccagatcacgccgaaagggccgaggaacagcacgagaaatacagaccgtctcaggaccaaggactgcccgccagtaggtgtctgagatgctgcgaccccgggaccagcatgtatcccgccactgccgtgccacagattaatatcaccattctcaagggagagaagggagatagaggggacagaggactccagggcaagtacgggaagacaggctcagcaggcgccagaggtcacactggtccaaaaggacaaaaagggagcatgggtgcgcctggcgaacgctgcaagagccactacgccgcttttagcgtcggccgcaaaaaaccaatgcattctaatcattactaccaaacagttatttttgacaccgaattcgttaatttatatgatcacttcaatatgttcacaggtaagttttactgctatgtccccggtctatactttttcagtttaaatgtgcacacatggaaccagaaagagacctatctacatattatgaaaaacgaggaagaggttgttattttgtttgcacaagtaggagatcggtcgatcatgcaatcccagtcattaatgcttgaactcagagaacaggaccaagtttgggtgagactgtacaagggcgagcgcgaaaacgccatcttcagtgaagaactggacacttacatcaccttttctggctatctcgtgaagcatgctaccgagccttag

SEQ ID NO: 13855 - RNA, 132 nt, synthetic construct; identical to SEQ ID NO: 12216
  misc_feature 1..132: note = source = /note="Description of Artificial Sequence: Synthetic coding sequence"
  source 1..132: mol_type = other RNA

SEQ ID NO: 13856 - RNA, 861 nt, synthetic construct
  misc_feature 1..861: note = source = /note="Description of Artificial Sequence: Synthetic coding sequence"
  source 1..861: mol_type = other RNA
atgaaagtattactacttaccgggctcggtgcattgtttttcgcttactactgggacgataattttgatccagcctcattgcagggagctagggtgctgttgacaggagctaatgcaggggtaggcgaagagttagcttatcactacgccaggcttggcagccacttagtactgaccgcccacacagaggctctgttacagaaagtagtgggtaactgccgaaaactgggcgcccctaaagttttttatattgcagcagatatggcttcacctgaggcaccagaaagcgttgtgcagtttgcacttgacaagttaggcgggctcgactacctcgttctcaaccatattggcggggcccctgcaggtacaagggctcgatccccacaggccaccagatggttgatgcaagtgaatttcgttagttatgtccagcttacttcgcgggctctcccatccttaactgactccaaaggttcactcgttgttgtatcgtccctgcttggccgagtccctacttccttttccacaccttatagtgccgccaagtttgcattggatggctttttcggaagcctgaggagagaattggatgtacaagacgtgaatgtggctataacaatgtgtgtgttgggtttgcgggatagagcaagtgctgctgaggctgtgagaggagtgacgagagtgaaagccgcaccaggacccaaagctgccctggcagttattcgcggcggtgctacccgtgctgcaggagtgttttacccatggagattccggcttttgtgcctgttgcgtcgttggttgccacgtccccgggcctggttcattagacaggaactcaacgttactgccgctgcggcatag

SEQ ID NO: 13857 - RNA, 1326 nt, synthetic construct
  misc_feature 1..1326: note = source = /note="Description of Artificial Sequence: Synthetic coding sequence"
  source 1..1326: mol_type = other RNA
atgcgggtggtcacaatcgtgattctgctgtgtttttgtaaagccgctgaattgcgaaaagcctcaccgggatccgttagaagtagagttaaccacggcagggctggtggagggcggcggggcagcaatcctgtgaaacggtatgctcctggcctaccatgtgacgtgtatacatacttgcatgagaagtatctggactgtcaggaaagaaaactggtttatgtgctccctggttggccacaagacctcctgcatatgcttttagccaggaataaaatcagaacacttaagaacaatatgttttcaaagtttaagaagttaaaaagcctagatctacagcagaacgagatcagcaagatcgagtctgaggccttcttcgggcttaacaagctcaccaccctgctcctccagcataatcaaataaaagtgctaaccgaagaagtattcatttacacccccctactctcatacctacgactgtacgataatccctggcattgtacatgtgaaattgagacactgatcagcatgctccagatccctagaaatagaaacctcggtaattacgccaaatgcgaaagcccacaagagcaaaagaacaagaagctgcgccaaataaaatctgaacagctgtgtaacgaagaagagaaggagcaactagaccccaagccacaggtttcaggtaggccccccgtgattaaaccggaagtggatagcactttttgtcacaactatgtttttcccattcaaacattagattgcaagcgcaaagagctgaaaaaggttcctaataatattccaccagacattgttaagttagacttaagctataataaaataaatcaactgagaccgaaagagttcgaggacgtacacgagctgaaaaaattgaacctgagtagcaatggtatagaattcatcgatcctgcagcatttctgggcctgacccacctggaggagttggatttgtcaaataatagcctgcaaaattttgattacggggttctcgaagacttgtatttcctgaagcttttgtggctgagagacaatccatggagatgcgattacaatattcactacctttactactggctgaaacatcattataacgtacattttaacggtctagaatgtaaaactcctgaggagtataaaggctggtccgtgggcaagtacataagatcatactatgaggagtgcccaaaggacaagttgccggcctatcctgaatctttcgaccaagacaccgaggatgacgagtgggaaaaaaaacatagagatcataccgccaagaaacaatctgtgattattacaattgtaggctag

SEQ ID NO: 13858 - RNA, 1539 nt, synthetic construct
  misc_feature 1..1539: note = source = /note="Description of Artificial Sequence: Synthetic coding sequence"
  source 1..1539: mol_type = other RNA
atggcggaatccggcctcgccatgtggccaagccttctgctgctccttctattaccagggccacctccggttgccggtctggaggacgcagccttcccacacctgggagaatccctccagcccctgcccagagcttgccccctcagatgttcttgccctagagtggacacagtcgactgcgacggattagatctacgcgtgttccccgacaacataacccgtgctgcacaacacttaagccttcaaaacaatcaattacaagagttgccctacaacgagcttagccgtttgagcggcttgcggacccttaacttacacaacaacctgattagctccgaaggcctacccgacgaagcctttgaaagtcttacacagctgcaacatctatgtgtcgcgcataataaactctccgtggcgccacaatttttgccgaggtctctgcgcgtcgccgacttggcagccaatcaggttatggaaatcttcccattaacctttggtgaaaagcctgcacttagatctgtctatttgcataataatcagctttccaatgccggcctacctccagatgcgtttcgaggctctgaagccatcgctaccctgtcactgagcaataatcaactgtcctacctgcctccttctctacccccgagcctcgaacgattacacctgcagaataacctaatatctaaggtacctcgcggagcgctcagcagacaaacacagctcagagaactctatctccagcacaatcaacttaccgacagcgggttagacgccaccacatttagcaaactgcattccctggaatacctcgacctctctcacaatcaactaacaacggtccccgccggacttccccgcactttggcgatcttgcatctgggtcgaaatcgcatccgacaggtcgaagccgccagattgcatggagctcgtggtctgcgataccttctgcttcagcataatcagttagggagctctggccttcctgccggagccctccgacctctaaggggcttgcacacactccacctatacggtaatggactcgaccgcgttccacctgctttgcccagaaggctgcgggcgctggtcttgccacacaaccacgtagcagctttgggagccagggacctggttgctacccctggtctaaccgaattgaatctggcttataatagactcgcctccgcacgcgtgcatcaccgagcgtttagacgtctcagagccctacgatcattggacctcgcaggtaaccagctgacaagattgcctatgggcctgccaaccggcttgcgaacactgcagctccaaagaaaccaattacgtatgcttgagccggaacccttggccggcctagaccagttgcgagaactgtcattggcacacaaccgcctcagagttggggatatcggacccggcacttggcatgaactccaggccctgcaggttcggcatcgactggtctcacacacagtcccccgagctccaccatcaccctgtcttccgtgtcatgtccccaatatccttgtgtcctggtag

SEQ ID NO: 13859 - RNA, 2328 nt, synthetic construct
  misc_feature 1..2328: note = source = /note="Description of Artificial Sequence: Synthetic coding sequence"
  source 1..2328: mol_type = other RNA
atgaaagaaggtccagaagaagcaggcagcggacgatacggcccacggtacattacagacatgggggccggtgaagatgacgagggcttcgaggatgacctcgatttggatatctctttcgaggaggttaagcctctccccgccacaaagggaggaaacaagaaatttctggtcgagtcgaagaagatgagcatctccaatccaaaaaccatatctcggttgatcccacctacctccgcgagcctcccagtcactacagtagctccccaaccaattccaatccaaagaaagggcaagaatggagtggcaataatgagtaggttgtttgacatgccttgcgatgagactctatgctcagcagattcgttctgcgttaatgattacacatggggtggcagtagatgtcagtgcactctcgggaaaggaggtgaaagctgttctgaggacatagtgatccagtacccacagttttttggtcattcctacgtcacatttgagcctctcaaaaactcctatcaggcctttcagatcacactggaatttagagctgaagccgaagacggcctgcttctgtattgtggagagaacgaacacggtaggggtgatttcatgagtctcgcaattattcgtaggagtttacagttcaggttcaactgtggcaccggagtggcgatcattgtgtctgagacaaagattaagctgggtggctggcatacagtcatgttataccgtgacggtcttaacggtctgttacaactcaacaacggcacccccgttacaggccagagccagggccaatactcaaaaatcacattcaggacacccttgtatctgggcggagccccatctgcatattggctggtcagagccactggtacaaaccgcggctttcagggttgcgtacaatcccttgccgtcaacggaaggaggatcgacatgagaccttggccactcggtaaggcgctgtctggcgccgacgtgggtgaatgttcatcaggaatttgtgatgaggcatcctgtatccatggcggcacttgcaccgcgattaaagccgactcttatatctgcctgtgtccactcgggtttaagggaagacattgcgaggacgcttttactctcactatcccccagtttcgtgaatctttgagatcttacgccgccacgccttggcccctcgagcctcagcactacctttcattcatggaatttgaaatcactttcagacctgactccggagatggcgttctgctatacagctatgacaccggaagcaaagattttctctccattaatctggctggaggacatgttgagtttcgctttgattgtggatcaggtaccggagtcctcagatcagaagacccactgaccctaggcaactggcacgagttacgagtgagcaggacagcaaagaacggcatactgcaagtcgacaaacagaagattgtggaggggatggcggagggaggatttacacagatcaaatgtaacaccgatatcttcattggaggagtccctaattacgacgatgtgaaaaagaattcaggcgtattgaaaccattcagcggtagcattcagaagattatattaaatgacagaactattcacgtcaagcacgattttacaagcggagtgaatgtggagaatgcagctcatccatgtgtccgcgcaccctgtgcccacggcgggagttgtagaccccggaaggaaggttacgactgtgattgccccctggggtttgaaggtcttcattgccagaaagccattatcgaagccatcgagatccctcagtttataggcaggtcctacttgacatacgacaatcccgatatcctgaagagagtatctggctcccgctctaatgtatttatgaggtttaaaacgacagctaaagacggcttgctcttgtggagaggagattcacctatgagacctaatagtgactttatttcactgggactaagagacggcgccctggtgttctcctacaatctgggttccggcgtggcctcgattatggtgaacggaagcttcaacgacggacggtggcacagagtgaaggcagtcagggatggccaaagcgggaagattaccgtcgatgactatggggcacgtaccggtaaatctcctgggatgatgcggcagcttaacatcaatggagctctgtatgtgggaggaatgaaagagatcgccctgcacacaaatcgtcagtatatgcgcggactcgtgggctgcatttctcactttacactcagcaccgactatcacataagtcttgtggaggacgccgtagatgggaagaatataaatacctgtggcgcgaaatag

SEQ ID NO: 13860 - RNA, 1431 nt, synthetic construct
  misc_feature 1..1431: note = source = /note="Description of Artificial Sequence: Synthetic coding sequence"
  source 1..1431: mol_type = other RNA
atgaagttccagggaccgctggcttgtcttcttctggcactgtgtttaggatctggcgaagcagggcccctgcaaagcggggaggaatcaaccggaacaaacataggtgaagctctgggacacggcctgggagacgcgttgagtgagggagtggggaaggcaatcggcaaggaggcaggaggagccgctggtagcaaggtatccgaggcacttggccaggggacccgagaggccgtggggactggcgtgcggcaggtgcccggattcggcgtggccgacgccttaggtaacagagttggtgaggctgcccacgcactcggtaatacagggcacgaaatcgggagacaggcggaagacgtgattagacacggcgcagatgccgtgcggggaagctggcaaggtgtgcctggccataacggtgcctgggaaacttccggagggcacggaatcttcgggtcacagggggggctgggagggcagggacagggcaatccgggcgggcttgggacaccatgggtacacggctaccctggcaacagcgctgggagcttcggaatgaatcctcagggggctccttgggggcaggggggaaatggaggcccccccaactttgggacgaacacgcaaggggcagtcgcacaacccggctacggctccgtcagagctagcaatcaaaacgaggggtgtacaaaccccccgccatcagggtcaggtggaggatcgtcaaactccgggggtggcagcggctctcagagcggttcgtcgggaagcggatcaaatggcgataacaataatggcagtagtagcggcggtagttccagtggctcaagtagcggtggctcatccgggggctcttcaggagggtcatccggcaactctggcggcagtagaggagacagcggatcagagagttcttggggtagctcaacaggaagctctagtggcaaccacggaggctcaggaggcggcaatggacataagcccggctgcgaaaaacccggtaacgaggctaggggtagcggcgaatccgggatccagaacagtgaaacatcacctggcatgttcaactttgacactttctggaagaattttaagtcaaaactcgggtttattaattgggatgctataaataaaaatcaagttcccccaccttcaacacgcgctctgttgtacttctctagactgtgggaggactttaagcagaatactccttttttaaactggaaagccatcatagagggtgccgatgcgtcttcgctgcagaagcgagccggccgggacgaccagaattataactacaatcaacatgcataccctacagcatacggcgggaaatacagtgtcaaaacacctgcaaaggggggcgtttccccttctagttcagcaagtcgagttcagcctggcctcctccagtgggtaaagttttggtag

SEQ ID NO: 13861 - RNA, 1911 nt, synthetic construct
  misc_feature 1..1911: note = source = /note="Description of Artificial Sequence: Synthetic coding sequence"
  source 1..1911: mol_type = other RNA
atgacaacatggtctctgcgccgccggccagctcgaactcttggattactgttgctcgtggttctcggttttctggtcctccgcagactagattggagcactctggtgcctctcaggcttcgccatcgtcagctgggcctgcaagccaagggatggaatttcatgcttgaagacagcactttttggatatttggaggatcaatacactactttagagttccccgagaatattggcgcgacaggttgttgaagatgaaggcgtgtgggttgaacactctaacaacatatgtgccctggaacctccacgaacctgagagaggaaaattcgatttctccggtaatctggacctggaggcctttgttttaatggctgctgagatcggactatgggtcatactacgaccaggcccatatatatgcagcgaaatggacttaggcggactgccaagttggctgctacaggatccggggatgaggctgcgtacaacctataaggggtttaccgaagccgtcgatttgtatttcgatcacttaatgtctcgcgtggtgccgctgcagtacaaaagaggaggccctatcattgccgttcaagtggaaaatgagtacgggagctacaataaggatcccgcctatatgccctatgtcaagaaagcattagaggaccgcggcatagtcgagctattactgacatcagacaataaagacggactcagcaaaggtatagtgcaaggagtgcttgctaccatcaacctccaatccacccacgaactgcagcttctcacaacatttttatttaatgttcagggcactcagcctaaaatggtcatggagtactggacaggttggtttgactcttggggtggaccccacaatatacttgattcatctgaagtcctgaagaccgtttccgcaattgtcgacgccggaagctctattaacctttatatgttccacggcggcactaacttcggattcatgaacggggctatgcatttccacgactacaagtcagacgtgacctcttacgattacgatgctgtactcaccgaagcgggagactatacggctaaatacatgaagctgcgcgactttttcggttccatatctggtatacccctccctcctccccccgaccttctgccaaagatgccttacgagcctttaacccccgtcctctatctatccctatgggacgcactgaagtatctcggcgaaccaatcaaatccgagaaacctatcaacatggaaaatttacctgttaacggcggcaacggccaatcttttggctacatcctatatgagacaagcatcacttccagcggtatcctttctggacacgtacatgatcgaggacaagtgttcgtaaatacagttagcatcggctttctggattataagacaacgaagatagctgttcctctgatacagggctacactgtcctgagaatcctggtcgagaatagggggagagtgaactatggcgagaacattgatgaccagcgcaaaggccttatcggcaacctctacctgaatgattcccccctaaaaaacttccggatctacagtttagatatgaaaaagtctttcttccagaggtttggtctggacaagtggtcctcattgccagagacccctaccctgccagcgtttttcctgggatccctgagtatttcctctacgccgtgtgataccttcctcaagcttgaagggtgggagaaaggtgtggtctttatcaacgggcaaaacctcggacgctattggaacatcggcccccaaaaaacactgtacctgcctggcccatggctgtcctcaggaattaatcaagttattgtcttcgaggaaacaatggccggaccagcattacagtttaccgaaacaccgcatctgggaagaaatcagtacataaaatag

SEQ ID NO: 13862 - RNA, 672 nt, synthetic construct
  misc_feature 1..672: note = source = /note="Description of Artificial Sequence: Synthetic coding sequence"
  source 1..672: mol_type = other RNA
atgacacggtggagttcttatttactgggctggaccacttttttgttatacagttacgaaagttccggcggcatgcatgaggaatgtgttttccccttcacctataaggggtccgtctactttacttgcactcacattcatagtcttagtccttggtgcgcgacgagggccgtatacaatggtcaatggaagtactgccagtcagaggactacccaaggtgtattttcccattcatctaccgcggcaaggcctataatagttgtatctcacagggctcctttttgggcagtctctggtgcagtgtcactagcgtgttcgacgagaaacaacagtggaagttctgtgagaccaatgagtatggtggaaactccctgagaaaaccatgcatattcccctcaatttatcgaaacaatgtcgtatccgattgcatggaagatgagagcaataagctgtggtgtcccaccaccgagaatatggataaagatggaaagtggtcattttgcgctgacaccagaatttccgccctggtacctggctttccttgccatttcccttttaattacaagaacaaaaattatttcaactgtaccaatgaaggctcaaaggagaatttagtctggtgcgctacgtcatacaactacgatcaggatcacacatgggtgtactgttag

SEQ ID NO: 13863 - RNA, 1368 nt, synthetic construct
  misc_feature 1..1368: note = source = /note="Description of Artificial Sequence: Synthetic coding sequence"
  source 1..1368: mol_type = other RNA
atgctacacccggagacatcaccaggccggggtcatctgcttgcagtcctgcttgccctcttgggcactacctgggcagaggtttggcccccccagcttcaggagcaggcacctatggcaggcgccttaaaccgcaaagaatccttcctcctgctctccctccataatagactaaggtcttgggtgcaaccaccagcagccgacatgcgtagattagactggtctgattccttggcccagctggcccaggccagggccgccctctgcggaattccaacccccagcctcgcttccggtctgtggcgaaccctgcaggtgggttggaatatgcagttgctgccggctggtctcgcaagtttcgtcgaagtcgtgtcattatggttcgccgaaggtcagcgctactctcatgcagccggtgaatgtgcccgtaacgccacatgtacacactatactcaactcgtgtgggctaccagttcacagctgggatgcggaagacacttatgctctgcaggtcaaaccgctattgaggccttcgtatgtgcctactccccaggggggaactgggaggtgaatggtaaaactatcatcccttacaagaaaggcgcatggtgtagcctctgtactgccagtgtgtctggttgcttcaaagcctgggaccacgcaggtggattatgcgaggtgcctaggaacccttgtcgtatgtcgtgccaaaatcatggaaggctgaatatttcaacatgtcactgccactgccccccagggtataccggcagatattgtcaggtcaggtgctcccttcagtgcgttcacggcaggtttagagaggaggaatgttcttgcgtgtgcgatatcggatacggcggtgcacagtgtgctaccaaggttcacttcccattccatacgtgtgaccttagaatcgacggcgactgttttatggtgtccagcgaggccgatacctattaccgcgcgagaatgaagtgccaaaggaagggcggagtacttgcacagataaaatcacagaaagtgcaggatattcttgcattttacttgggcaggttggagaccacaaacgaggttattgatagcgactttgagactcggaatttctggatagggctaacctataaaacagcaaaggatagctttaggtgggcgaccggagaacatcaagcatttacttctttcgctttcggacagccagataatcatggcctcgtttggctgtcggctgcaatgggtttcggtaattgcgtagagctccaggcatccgccgcctttaactggaatgaccaaagatgcaagacgagaaatagatacatatgccagttcgcacaggaacatatctcaaggtggggaccaggttcttag

SEQ ID NO: 13864 - RNA, 1425 nt, synthetic construct
  misc_feature 1..1425: note = source = /note="Description of Artificial Sequence: Synthetic coding sequence"
  source 1..1425: mol_type = other RNA
atggccgacatgcaaaacttggtagagaggctggaacgggcagtaggacgcttagaagctgtctcacataccagcgacatgcatagaggctatgctgactccccctcgaaaggtgcagccccatatgtgcaggcctttgactcactattagccggaccagtcgcagagtatctgaaaatctctaaggaaattgggggcgacgtgcaaaaacatgcggagatggtgcacacaggattaaaactggaacgggcactcctcgtgactgcatcacagtgccagcagcctgccgaaaacaagctttctgatttgttagcgcccatttcagaacagataaaggaggtgattacgtttcgcgaaaaaaaccggggaagcaagctattcaaccatctgagcgccgtgagcgagagtattcaagctcttggatgggtcgccatggccccaaagcccggtccctacgtgaaagagatgaatgatgccgcaatgttttacacaaatagagtgttaaaagagtataaagacgtggacaagaaacatgtggactgggtgaaagcctacctcagcatttggacagaactgcaagcttatataaaagagttccatacaactggccttgcctggtcaaaaactggacctgtagctaaggaactctccggcctcccttctggcccctctgccgggtcttgtccgcccccccccccgccatgccccccgccaccccccgtctccactattagttgcagctacgagtccgcctctcgatccagcctcttcgcccaaattaaccaaggagagtccattacgcacgctcttaagcacgtcagtgatgacatgaagacccataaaaatccagccttgaaagctcaatcaggccctgtgaggtctgggccaaagcctttctcagcccctaagcctcaaacctctcctagccccaaacgcgccactaagaaagagccggccgtcctcgaactggaaggaaagaaatggagagtggagaatcaagaaaatgtatcaaatctcgtcatcgaagatactgagctgaagcaggtggcatatatatacaaatgcgtcaatacaaccttgcagattaaggggaaaataaattcgatcactgtagacaattgtaagaaactgggactggtattcgacgatgttgtcggcatcgtggaaataattaactccaaagatgttaaagtgcaggtgatgggaaaagtacctactatatctataaataaaaccgatggatgccacgcctaccttagcaagaacagcctggattgtgaaattgtctcagccaagagtagtgagatgaatgtgttaattccgaccgaaggtggcgacttcaacgagtttcctgtaccagagcaattcaaaaccctttggaacggccagaagttagttactacagtcaccgaaatagccggatag

SEQ ID NO: 13865 - RNA, 360 nt, synthetic construct
  misc_feature 1..360: note = source = /note="Description of Artificial Sequence: Synthetic coding sequence"
  source 1..360: mol_type = other RNA
atgaataagattttgtcatcgaccgtatgctttggcctactgacactgctgtccgtgctgtccttcttacagtccgtgcatggccgaccgtatcttacgcaagggaatgaaatcttccccgacaaaaaatatactaacagggaagaactcctcctggcattgctgaataagaactttgatttccagcgtccctttaacaccgatctcgccctaccgaacaagttagaagagctgaaccagctcgagaaactcaaggaacaactagtggaggaaaaggactctgagactagttatgctgttgatggattattctcctcgcacccctctaagcgcgcatgtttctggaagtactgtgtctag

SEQ ID NO: 13866 - RNA, 3756 nt, synthetic construct
  misc_feature 1..3756: note = source = /note="Description of Artificial Sequence: Synthetic coding sequence"
  source 1..3756: mol_type = other RNA
atgagactgctgttgctggtccctctcttgttagcacccgcccccggctccagcgctccaaaagtcagaagacagagcgacacttggggaccttggagccagtggagtccatgctcacgaacctgtggaggcggagtctctttccgtgagaggccttgttactctcagcgcagagatggagggtcaagttgtgtcggccctgctaggagccacagatcttgtcgcacggaatcatgccccgacggcgctagagattttagagcagaacagtgcgcagagttcgacggagccgagttccaaggtcgaagatataggtggttgccttactacagcgcacccaacaagtgtgagcttaattgtatcccaaagggtgaaaatttctattataagcatagggaagctgttgttgatgggacaccttgtgaaccaggtaaacgcgacgtgtgtgtggacggaagctgtcgggtagttggttgtgatcacgagcttgactctagtaagcaggaagataaatgcttgagatgtggaggggatggtaccacatgttacccagtagctggcaccttcgatgccaacgacttgtctcgcgcggtcaaaaacgtccgaggggaatattatttaaacgggcattggaccattgaagctgccagggctctgcctgccgcctccacaatcctccactatgagagaggtgcggaaggagatcttgcgccagagagactacatgcgcggggcccaactagtgaaccactcgtcatcgagcttatcagccaagagcctaacccaggagtccattatgagtatcacctccctctacgacgcccatcacctggattcagttggagccatgggagctggtccgattgcagcgccgaatgtgggggcggccaccagtcacgacttgtgttctgtaccatagaccatgaggcataccccgatcatatgtgccagagacagccacggcctgccgacagaaggagctgtaatctccatccctgtccggagactaaaagatggaaggctggaccatgggcgccctgcagcgcttcgtgtggaggtggctctcagtcaaggtcggtttattgtatcagctcagatggcgccggtattcaagaggcagtcgaggaggcagaatgtgcaggactcccgggtaaacctcccgccatccaggcctgcaacctacaaagatgtgcagcatggtctccggagccttggggcgagtgtagtgtgtcatgtggtgtaggcgtgcgcaagagatcagtcacctgtaggggtgaacgggggagcctactgcatactgccgcatgttccctcgaggacaggccgcctctgaccgaaccatgtgttcacgaagactgtcccctgctatccgatcaggcctggcacgtgggcacttgggggctctgttcgaaatcttgctcttccgggactagaaggcgtcaggtaatttgtgctattggacctcctagccattgtggcagcttgcagcactcaaaacctgtggatgtcgagccttgtaacacccaaccttgccaccttccccaggaagttcccagcatgcaggatgtgcacactcctgcttccaacccttggatgccgttagggcctcaagagtcaccagcctctgattcacgcggacagtggtgggccgcccaggaacatcccagcgccagaggagaccacagaggcgaacgcggagatccgagaggagatcagggtacacacctctctgcactgggaccagccccttccctgcagcaacccccctatcagcagcctctccgaagtggatctggcccccatgactgccgccactctcctcacggatgttgcccagacggacataccgcctccttggggcctcagtggcagggctgccctggtgccccatgtcagcagtcgaggtatggctgttgtcctgatagagtttcagttgcagagggccctcatcacgccggctgtaccaaaagctacggaggagatagtaccggtgggatgccaaggtctagagccgtcgctagcactgttcataacacacatcagcctcaagcacagcagaacgaaccatccgaatgtcgtggctcccagtttgggtgttgttatgacaatgttgctacagctgcaggaccactcggcgaggggtgtgttggacagccctcccacgcttaccctgtgcggtgcttgctcccttcagcccacggctcctgcgctgattgggccgcccggtggtatttcgttgcttctgtcggacaatgcaatcgattttggtatggcgggtgccacggtaacgctaacaacttcgcttctgagcaagaatgcatgagctcatgccagggcagtctccatggcccaagacgcccacaaccgggagcttccggacgaagcacccacacagacggcgggggatccagcccagccggcgaacaggaaccctctcaacaccgaaccggcgccgctgtgcagaggaaaccatggccttcaggcggcctctggagacaggaccagcaacccggacccggagaagcaccccacactcaggcgttcggagaatggccctggggccaagagctcggcagtcgtgctcccggactcggcggtgatgccggcagccccgcccccccattccattcttcatcctaccgaatttctctagccggagttgagccctcactggtgcaggccgccctggggcagctagtgcgactatcatgcagcgatgacactgctcctgaatctcaggccgcttggcaaaaagacgggcagccaatttcatccgaccgacaccggctgcaattcgatggctctctcataattcatcccctacaagctgaagacgcaggcacatactcttgcggaagtaccagacctggaagagactcccagaaaatacagctgaggatcataggcggggatatggcggtcctgtcggaagctgaactttctagatttccacaacctcgtgatccggcacaggacttcggtcaggctggtgcagcgggcccactgggggccattccttcgtcacatccccagccggctaatagactgcggcttgatcagaatcaaccccgagtagtggatgcctcacccggtcaacgcatacgaatgacctgcagagcagaaggattccccccccccgcgatcgaatggcagagagacggacagccagtttcctccccaagacaccagctccagccggacgggtccctagtgatcagcagagtagcagtggaggacggtgggttctatacttgcgtcgcattcaacggtcaggatcgtgaccaacgctgggtgcaattgcgtgtcctcggcgagctgactatttctggattgccccctaccgtgacggttcccgagggagacacggcccgtctgttatgcgtggtagcaggcgaatctgtcaatattcgttggtctcgcaatggactgcctgtgcaagctgatggtcacagagttcaccagtcccctgatgggactctgttaatctataatcttcgcgcccgggatgaagggtcttacacctgttcggcctatcagggttctcaggccgtctcacgttctacagaagttaaagtcgtgtcacccgcaccaactgctcaacccagagaccccggacgtgattgcgttgaccagcctgaacttgctaactgtgatctcatcttacaggcgcagctttgtggaaacgaatactacagttctttttgttgtgccagctgctccagattccagcctcacgcacagcccatatggcagtag

SEQ ID NO: 13867 - RNA, 1731 nt, synthetic construct
  misc_feature 1..1731: note = source = /note="Description of Artificial Sequence: Synthetic coding sequence"
  source 1..1731: mol_type = other RNA
atggcccagggcgttctatggattctgttaggattactgctgtggtctgatcctggcacggcctcccttcctttgttgatggactccgtcattcaggctttggctgagctggagcagaaggtaccagcggcgaaaacacgacataccgcttctgcctggcttatgtctgctcccaacagcggcccccataaccgtctttaccactttctgctgggcgcatggtctcttaatgccactgaactggatccttgccccctttcacccgagcttctgggcctgactaaagaagtggccagacatgacgtgcgggaaggaaaagaatacggtgttgtgcttgccccagatggctctactgttgctgtcgagcctttactcgcaggcttggaagctgggctgcagggccgtagagtgattaatcttccgcttgactcaatggcagcaccctgggagaccggtgacacgtttcccgatgttgtcgctattgccccagatgtgcgggccacatccagtccaggattgagggacggttctccagacgtcaccacagcagatattggagctaacactcctgacgctactaaaggttgcccagacgtgcaggcctcactgcctgatgctaaagccaaatctccccctacaatggtcgactcactgctggccgtcacactagcgggtaatctgggcctgacatttctcagaggcagccaaactcagtcccaccccgacctgggcaccgaaggatgctgggatcaattgagcgcccccaggacgtttacgttgctagaccctaaagcatctctgctcaccatggcttttcttaacggcgctttagacggtgtgattttaggcgattacctgtcccgtacacctgagcctaggccctccttgtctcacctgctgtcacagtactatggagctggcgttgcccgggatccaggattcaggagcaacttccggcggcaaaacggggccgccctgacatccgcaagcattcttgcccaacaggtatggggtaccctcgttctgttgcagcgtttggaacctgttcatctccaactccagtgtatgtcccaggaacaactcgcccaggttgcggcaaatgcaacaaaggaatttactgaggcctttctcggatgccctgccatccaccccagatgccggtggggtgctgccccttacagaggacgtcccaaacttcttcaactccccctcggttttttatatgtccatcacacctacgtacctgcgccaccatgtaccgactttactcgctgcgcggccaacatgaggagtatgcaacgctatcaccaggatacccagggctggggagacatcggatactcatttgtcgtcggctccgacggatatgtatatgagggcaggggatggcactgggtgggtgctcatacgcttggacacaattcacggggctttggtgttgctattgtgggtaattacacagccgcactgcccacagaagctgctctgcgcactgtaagggacacgttgcctagttgcgctgttagagccggactgctgagacctgattatgccttgctgggccatagacaactcgttcgtaccgattgcccgggcgatgctctctttgacctgctgagaacatggcctcatttcaccgccactgttaaaccaagacctgcgagatcagtcagtaagcgcagccgccgagaacctccaccaagaaccctgccggcaaccgatctgcaatag

SEQ ID NO: 13868 - RNA, 846 nt, synthetic construct
  misc_feature 1..846: note = source = /note="Description of Artificial Sequence: Synthetic coding sequence"
  source 1..846: mol_type = other RNA
atgttgcctaaatcacggcgtgccctgactattcaggagattgctgccctcgcgcgctcttctctccatggcatctcacaggtagtcaaagatcatgttacgaaacctactgcgatggcccaggggcgggtcgcacacctgattgagtggaaagggtggagcaaaccctcggattcccctgcagctctcgaatccgcttttagtagctatagcgatctcagcgagggggagcaggaggctagattcgccgcaggagtagctgaacagtttgctatcgccgaagccaaattacgtgcttggtctagcgttgacggagaggattccactgatgattcctatgacgaggactttgcgggaggcatggataccgacatggccggccaacttccactgggcccccatttacaggacttgttcaccggccacaggttttcgaggcctgtgcgccagggtagcgtagaaccggagagtgattgttctcagactgttagccctgataccctgtgttcttccctgtgttctctggaagatggattactaggtagtccagcgagattggcatcacaacttctaggtgacgagctcttgctcgcaaagctgccaccttctcgcgaatcagcctttcgatcactcggccctctagaagcccaggactctctctataatagcccgctgaccgagagctgcctcagcccagccgaggaggaaccagccccttgcaaagattgtcagcctttatgcccgcctcttacaggatcatgggagcgtcagcgccaggcatcagacctggcatcatccggtgtcgttagcctagatgaggatgaagccgaacctgaagagcagtag

SEQ ID NO: 13869 - RNA, 2619 nt, synthetic construct
  misc_feature 1..2619: note = source = /note="Description of Artificial Sequence: Synthetic coding sequence"
  source 1..2619: mol_type = other RNA
atgggtatcgtttggattctgatgtcagtattgccatggtggggtcggtgtgctgatctggcaattgcttctactcagctggtgccctcaaccgcatctgctcgtatggcactgtcttctcagctcatgggtcgcacagtctggacacctatgtccgcatccgcccttcaggaacccgcttatccagctttggctagaacctcaagggctccaagcgctgcatccgttcctctggccagccgctgcagggtcacaacagccctgatctctaccagtgcccagcgctcccccacatcagctagtctggcacccgtccctactgccttaggcgcgtcatcagccagcgcccacctggccctcagctccctgacaatggggacagtcgcacttacccacggccgcgtcagcgcaagtcccgtccttagactcggctctgcaagatgtcctaaactgtcaacaccccctcgtcctgccgccgccgccgtacggggactgggtcgtgccggcgaaacccctgcaaactgtgtgcctcggagggcagtgccgggccctgacgattccagagaagacgtgaacgaatgtgcagaaaatccgggcgtatgcaccaacggagtgtgcgtgaacacagacggatcatttcggtgtgaatgcccatttggatactcccttgatttcacaggaattaactgcgtggatactgatgagtgcagtgtggggcacccctgtggtcagggaacctgcacaaacgtgataggaggcttcgagtgcgcctgtgccgatggatttgagcccggcctgatgatgacatgcgaggatattgacgagtgctctctgaaccccctgctgtgtgccttccgttgtcataatactgagggctcttatctctgtacatgtccagccggttatactctgcgggaggacggggccatgtgtcgggatgttgatgaatgcgctgacggccagcaagattgtcatgctcgcggaatggagtgcaaaaatctgattggcacattcgcttgtgtgtgtcctccaggcatgagacccctcccaggttccggcgaagggtgtactgacgacaatgaatgccacgcccaacccgacttgtgcgtgaacggcagatgcgtgaacactgcaggttctttcagatgtgactgcgatgaaggctttcagcccagcccaactctcactgaatgccatgacattcgtcaaggaccttgttttgccgaagtcctccagaccatgtgccgctctttgtcctcttccagtgaggctgtgacacgtgcggagtgttgttgcgggggtggtcggggatgggggcccagatgtgaattatgtcctctacctggcacctcggcatacagaaagctgtgtccccatgggagtggttacaccgcagaaggccgggatgtggatgaatgcagaatgctcgctcatttatgtgcgcacggcgagtgcatcaactctttgggctcgtttcgatgccattgccaagcaggctacacccccgacgccacggccactacttgcttagatatggatgaatgtagccaggtccccaaaccatgtacttttttatgcaaaaataccaaggggtcatttctttgttcctgcccaagaggatatttattagaggaggacggtcggacctgcaaggatctagatgaatgtactagccgccagcataattgccaattcctatgtgtgaacaccgtgggcgctttcacctgcagatgtcccccaggctttactcagcatcaccaggcatgtttcgacgtaaatgaatgcgacggaccacatcggtgccagcatggatgccagaaccagttgggaggatacagatgctcctgcccccaaggatttacacaacattcccagtgggctcagtgtgttgacgaaaacgaatgcgccttgtcgccgccaacctgtggctcagcttcatgtcgcaacactttaggcgggtttaggtgcgtatgtccatccggattcgacttcgaccaggcactgggaggatgccaggaagtcgacgaatgtgccggacggagaggcccctgttcgtatagctgcgctaatacgcctggtggatttttgtgtggttgccctcagggatacttccgcgccgggcagggacactgcgtatccgggcttggcttctcaccagggccgcaggatacacccgataaggaagagctcttatccagcgaggcttgttatgaatgcaaaattaacggcttgtcacccagggaccgtcctcgacgctccgcccaccgagaccatcaagttaacctggccacactggatagtgaagcactgctgaccctaggactgaacttatctcatcttggtcgggccgaaaggattctagaattgcgacccgcactcgaaggtctggaaggccgcatacgctatgtgattgttcgcggtaatgaacagggcttcttccgaatgcatcacctgaggggagtaagcagcttgcagctaggcaggcggagacccggaccaggcacctacaggctcgaagtggtaagccatatggcaggtccttggggagtgcagcctgaggggcaacccggaccatggggacaagcattaagattgaaggtccagctccagctcctgtag

SEQ ID NO: 13870 - RNA, 1368 nt, synthetic construct
  misc_feature 1..1368: note = source = /note="Description of Artificial Sequence: Synthetic coding sequence"
  source 1..1368: mol_type = other RNA
atggctcgtaaggctctaaagttggcatcctggacttccatggccttggccgcaagcggcatatatttttacagtaacaagtacttagacccaaacgacttcggggcagtgagagtcggaagagccgtcgctacaactgcagtcataagttatgattacctgacatcccttaagtcagtgccatatggatctgaggagtacctccagctgcgctctaaaattcatgacctgtttcaaagtttcgacgataccccattaggcaccgcctctttggcccaggtccacaaggctgttctgcacgatgggcgtacagtggcagttaaggtgcaacacccaaaagtgagagcccaatcttctaaagatatcctgctgatggaagtgttagtactggcagtaaagcaattatttcctgagtttgaatttatgtggctagtagatgaggcaaaaaaaaatctgccattagaactggatttcctcaacgaaggacgtaacgccgagaaagtctcacaaatgctgcgacattttgacttccttaaggtacctcgcattcactgggatttgtctaccgaacgcgtattgctaatggagttcgtggacggcggccaggtgaacgacagagactatatggaaagaaacaagatcgacgtcaatgaaattagccgccatttaggcaagatgtactccgagatgatcttcgtgaacggctttgtgcactgcgacccacaccctgggaatgttcttgttagaaaacaccctggtaccggaaaggcggaaattgttctccttgaccacggcctctatcagatgttaactgaggagttccgtctgaactactgccacctttggcaatccctaatctggacggatatgaagcgcgtgaaagaatactctcagagactcggcgctggggacctgtacccactgtttgcctgcatgctcaccgcacgttcatgggattctgttaatcggggcatcagccaagcgccagtgacagccactgaagacttggagattaggaacaacgcagctaactatctcccccaaatctcacacctgttgaaccacgttcccagacaaatgttactgatactgaaaaccaacgatctgttacggggtattgaagccgccctcggcacacgcgcctccgcatcctccttcctgaacatgagtagatgctgtattagggctctggctgagcataagaaaaagaatacttgttcatttttccgtagaacccaaatatcattttccgaagcatttaacctttggcaaatcaaccttcacgaactgatcctcagagttaaaggactaaaactcgcagaccgcgtcctggccctaatatgttggctgttccctgccccactctag

SEQ ID NO: 13871 - RNA, 1245 nt, synthetic construct
  misc_feature 1..1245: note = source = /note="Description of Artificial Sequence: Synthetic coding sequence"
  source 1..1245: mol_type = other RNA
atgaaccctacactcggattggctatcttcttggcagtcctcctaaccgtaaaggggctcctaaaacctagcttctctccacgaaactacaaagccttaagcgaagtgcaggggtggaaacagcgcatggcagcgaaagaattagcgagacagaacatggatttaggcttcaagttgcttaaaaagctcgccttctacaaccctggccgcaatatcttcctttctccactgtctatttcaacagctttcagcatgctgtgcttgggtgcacaggattctacactagacgaaatcaagcagggcttcaatttcagaaaaatgccagaaaaagatctgcacgaaggcttccattatattatccacgagctcacacaaaagacacaggatctgaaactgtctattggtaataccctattcattgaccagcgcttacaaccccagagaaaattcctagaagatgccaaaaacttttattccgctgagacaatcttgaccaatttccagaatctagaaatggcccaaaagcaaattaacgacttcatttcacagaaaactcacggaaaaatcaataaccttatcgaaaatattgatcctgggacagttatgctactggccaactacatatttttcagagcacgctggaagcacgagttcgatcccaatgtgaccaaagaagaagatttttttctcgaaaagaacagttctgtgaaagtacccatgatgtttcgatctggcatttaccaggtgggctatgacgacaagctgagctgcaccatccttgagataccataccagaaaaatattactgccattttcatcctgcccgatgagggtaagctgaaacacctggaaaaaggcttacaggtggatactttctctcgatggaaaaccctgctaagtagacgagtcgtcgacgtctcagtgccgagactgcatatgacgggcacttttgacttgaagaagacactctcctatatcggagtttcaaagatttttgaggagcacggagacctcacaaagatagcaccccaccgttctctgaaggtgggagaagccgtgcacaaagccgaattgaaaatggacgagcggggaactgagggagcagctgggacaggagcacagaccctgcccatggaaacccccctagtggtgaaaattgacaagccttacctcctcctgatatacagcgaaaaaataccctctgtgttattcctcggaaaaatcgtcaaccccatcggcaagtag

SEQ ID NO: 13872 - RNA, 942 nt, synthetic construct
  misc_feature 1..942: note = source = /note="Description of Artificial Sequence: Synthetic coding sequence"
  source 1..942: mol_type = other RNA
atgagcgatctcctgctgttagggctcattggcggtctgactcttctactattattgaccctcttggcctttgctgggtactcaggtttactcgctggagtggaggtctctgccggtagcccgccaattaggaacgtgacggtagcttacaaatttcacatgggcctgtatggagaaaccgggagattattcacagagtcatgttctatatcgccaaaattaagatcaatcgccgtctactacgacaatccacacatggtccccccggataaatgcagatgtgcagtgggatccatcctgtctgaaggcgaagagtccccctcacctgaactgatcgacttatatcaaaaatttggctttaaggtttttagcttccccgcccctagccatgtcgttactgctacttttccgtacaccactatcctcagcatttggttagcaaccaggagggtacatcctgcactcgacacttatattaaagaacgcaagctttgcgcctatcctaggctggaaatctatcaagaggaccagattcacttcatgtgtccccttgcaagacaaggggatttctacgtgcctgaaatgaaggaaactgaatggaaatggagaggccttgtggaggcgatagatacacaggtagacgggacaggcgcagacaccatgagcgataccagcagcgtttccctcgaggtaagtcctggatcacgcgaaacatccgccgctaccttatccccaggtgctagtagccgcggctgggatgacggggatacacggtctgaacattcttattcagagtccggtgcatctgggtcctccttcgaagagcttgacctggagggagaagggccgctgggggaatcaagattagatcctggcaccgaacctctcgggaccacaaaatggctatgggaaccgacagcacccgagaaaggcaaggaatag

SEQ ID NO: 13873 - RNA, 603 nt, synthetic construct
  misc_feature 1..603: note = source = /note="Description of Artificial Sequence: Synthetic coding sequence"
  source 1..603: mol_type = other RNA
atggcctggggcggggtccatacttgttgcttccatctttgctgctgttgttcctggcctcaaggcgccgtgccggaagaactgcacaagcatcctggccagacgttgctgctacagtgccagtattcaccaaaacgcggcccctaccaacccaaatcatggtgccagcagaccagcccgtcccggtgtactctcctcgttacctctagtaaaccatggaccgctgtccagaaatcgcattacaccatctgggataaacctaacgccggctttttcaatattacaatgattcaactgacccaaaacgattcaggcttctactggtgtggaatctacaacgcctcggaaaacattattaccgtcttaaggaacatatccctagtcgtctccccagctccaacaactagccccatgtggacgctgccatggttaccaacgagtaccgttctcatcacctcacccgaaggcaccagcgggcacccgtccatcaacggttccgaaacccgcaaaagccgcgcacccgcctgcctgggaagcggaggcccccgcttccttgttcttgtcctctgcggattgttgctggccaagggtctgatgctctag

SEQ ID NO: 13874 - RNA, 1035 nt, synthetic construct
  misc_feature 1..1035: note = source = /note="Description of Artificial Sequence: Synthetic coding sequence"
  source 1..1035: mol_type = other RNA
acaacaccctctcgagcactgcctggctggagcaattgtcgacctcgctggcgtgctggcccaacacctcagtcacccactcctcagtccagaatgcgcttgagtccaggtcccccctctgagtggacctggctcctgccccacttcaacccctgtcatcaccatcaccgccaccatcacccaaatcctaccaccagtcttttgcctacagaaccgccatccggacccgaagtatcaagccaagggcgggaagcaagttgtgagggcacactgagagctgtagaccctcctgtcagacatcacagctacgggagacatgaaggggcttggatgaaggaccccgctgcacgagatgacagaatctacgtcaccaattactattacggaaatagcctggtcgagtttcgaaatttggaaaatttcaagcaaggccggtggagcaatatgtacaaattaccatacaactggattggaacaggtcacgttgtctatcagggagctttttattacaacagagcgttcacaaaaaatatcattaagtatgatttaagacaaaggtttgtcgcgtcgtgggctctattgcccgatgtggtgtatgaagatacaaccccctggaaatggcgagggcactcagatatagattttgctgtggacgaatctggactgtgggtcatctatcccgcagtggacgaccgggacgaagcgcaacccgaagtgatcgttttatcaaggctagatcccggcgatcttagtgtacacagggagacaacatggaaaactcggctgagaagaaacagttatggcaattgcttcctagtctgtggaatcctgtacgctgttgacacgtacaaccagcaggaagggcaggtagcctacgctttcgacacacacaccggcacagatgctcggccccaattgccatttctgaatgaacatgcttacactacccagattgattacaacccaaaagaaagagtgttgtacgcttgggataatggtcaccagttaacttatacactccatttcgttgtttag

SEQ ID NO: 13875 - RNA, 2682 nt, synthetic construct
  misc_feature 1..2682: note = source = /note="Description of Artificial Sequence: Synthetic coding sequence"
  source 1..2682: mol_type = other RNA
atggccgaagccgctctggaggcagtgagatctgaactgagagagtttcccgccgcggccagagaattatgcgtccccctcgccgtcccttatctcgataaacccccaaccccattacatttttacagagattgggtttgccctaacagaccttgtatcatccgcaatgccctgcagcactggccagccctacagaaatggtcccttccctacttccgagcaactgtgggaagcacagaagtgagtgtcgccgtgactcctgacggttacgcagatgcagtgcggggagaccggtttatgatgcccgccgaaagacgccttcccctctcctttgttctagatgtgctcgaagggcgggcccagcatcctggagtcctatatgtacagaagcaatgctcaaacctgccttccgaactgcctcaactgttacctgacctggagtcacacgtcccttgggcttcagaggctctgggcaagatgccagacgccgtgaatttttggcttggggaggctgctgcagtgaccagtctacacaaagatcattacgaaaacctctactgtgttgtgtcaggcgagaaacactttctcttccaccctcccagtgataggcctttcatcccatacgaactgtacacccccgccacctaccaacttaccgaggaaggaaccttcaaagttgtagacgaagaagctatggagaaagccgaggtatcccgcacctgcctcctgaccgtgcgagtcctgcaggcccaccggttgcccagcaaggacttagtgactccgagtgactgctacgtgacgttgtggctgcctactgcatgtagccaccgcctccagaccagaactgttaagaactcatctagtccagtttggaaccagtcttttcattttaggattcatagacagctgaaaaacgtaatggagctgaaggttttcgaccaagatctggtgaccggggacgacccagttctgagcgtgctgtttgatgcaggaacacttcgagcaggcgaatttcgacgagagtctttcagtttgagtccacagggggaaggtcgcctggaggttgagtttaggcttcaaagtcttgctgatcgcggggagtggctggtgagcaacggtgtgctggtagcacgcgaactgtcatgccttcacgtgcaactcgaagaaacaggagaccaaaagtccagcgagcatagagtacagcttgtggttccaggatcctgcgaggggccacaggaagcctctgtcggcactgggacattccgttttcattgccccgcatgttgggaacaagagctttctataaggctccaggacgcccccgaagagcagctcaaggccccccttagtgcccttccctctggccaggtcgttaggctggtgttccctacttcccaagagcctttgatgcgtgtcgaactcaagaaagaagctggactgagagagctggccgtccgcctcggatttggaccttgtgcagaagaacaggcttttctgagcagacgtaaacaggtcgtcgctgcggcccttcgccaagccttgcaattagatggtgaccttcaggaggacgaaattcctgtagtggctataatggccacgggcggtggaattagagctatgacaagcctttacggccagcttgctggattaaaagaattgggcctcttggattgcgtctcttacattacgggagcgagcggaagcacgtgggcattagcaaacttatatgaagatcctgagtggtcacagaaagacttagccggacctaccgagctcctgaaaacccaagtgacaaagaacaaacttggcgttttagccccatctcaattgcaacgctatagacaggaattggccgagagagcccgattaggctatccttcttgtttcactaacctgtgggcactcataaatgaagccctcttgcacgacgagccacatgatcacaaattatctgatcagcgcgaagccctcagtcacggacagaatcctttgcctatctattgtgcattaaacactaaagggcaatctctaaccacctttgagttcggagaatggtgcgaattctccccctacgaggtcggatttccaaagtacggcgcattcataccgtccgaactgtttgggtctgagttttttatgggtcagctgatgaaaaggctccccgagtcacgtatttgctttctcgaagggatttggtctaacttatacgcggccaacctccaggactcgctatactgggcaagtgaaccctcacagttttgggaccggtgggttcggaatcaggccaacttagacaaggaacaggttccacttctgaaaattgaagagccaccatctaccgcaggcaggattgcagagttctttaccgacctcttaacttggcggcctctcgctcaggccacccataacttcctacgcggtctgcactttcacaaagactacttccaacatccccatttttcaacttggaaagctacaacattagacggtctccctaaccagctaacaccttctgaacctcacctctgccttctggacgtgggctatctgattaacacctcctgtttacccttgttacagcctaccagagatgtagatctcatcctctccctggattacaatctccacggtgcttttcagggatctggtggccatccccggcgaaggcagctcggccgatag

SEQ ID NO: 13876 - RNA, 354 nt, synthetic construct
  misc_feature 1..354: note = source = /note="Description of Artificial Sequence: Synthetic coding sequence"
  source 1..354: mol_type = other RNA
atgattatcgactcgagccgcattccttctttcacacaactccacagcactatgacaagagcccccctcctgctgctctgtgtggcgctcgttctcctggggcacgttaatggcgcaacagtccgcaatgaggataagtggaagcctcttaataaccctagaaaccgagatttattcttccggcgtctccaggcgtatttcaaaggtcgagggctggacttggggaccttcccaaacccattcccaacaaacgaaaaccctagaccgcttagctttcaatccgaacttactgcttccgcgagtgcagattatgaagaacagaaaaattccttccacaattatttaaagggctag

SEQ ID NO: 13877 - RNA, 4143 nt, synthetic construct
  misc_feature 1..4143: note = source = /note="Description of Artificial Sequence: Synthetic coding sequence"
  source 1..4143: mol_type = other RNA
atgagacatggtgtggcttgggcactgctggtggcggccgcgttgggtcttggggcaaggggtgtaaggggcgccgttgccctcgccgatttttaccctttcggcgccgagcggggtgatgcagttacacctaagcaggacgacggaggttctggcttaagaccgctatcagtaccttttcccttcttcggcgccgagcactctggcctttacgtcaacaacaatggaataatctcattcttaaaagaggttagtcagtttaccccggttgctttcccaattgccaaagaccgatgcgttgtggccgcgttctgggccgacgttgataaccggagggccggcgatgtttattatagagaagccaccgatccagctatgcttagaagggccacggaggacgtcagacattattttccagaactcctcgatttcaatgcaacatgggtattcgtcgcgacatggtatcgggtgactttcttcggaggcagttcttcatcacctgttaacaccttccagacagtattgattaccgacggaaagcttagttttacgattttcaactatgaatccattgtttggacaacagggacacacgcctcctctgggggaaacgctactgggttaggtggcattgctgcacaggccggcttcaacgctggggatgggcagcgatacttctctattcctggcagccggaccgcggacatggcggaagtcgagaccaccacgaatgtcggtgtgccaggacgttgggcttttcgaattgatgacgcgcaagtacgcgtaggaggctgcggacataccactagtgtttgcctcgccctcagaccatgcctgaatggtggtaagtgcattgacgattgtgtgaccggaaacccaagctatacatgctcctgtctatctggtttcacaggaaggcgctgtcacttggacgtgaatgaatgcgcgagtcaaccttgtcagaatggaggcacctgtacacacggaatcaatagtttccggtgccagtgtccagccgggttcggaggaccaacgtgcgaaacggctcaatccccatgcgacactaaagagtgtcaacacggcggccaatgtcaagtagagaatggtagtgccgtgtgtgtctgtcaggcaggttacacgggggccgcctgcgagatggatgtcgatgattgttcccctgacccatgtctcaatgggggctcatgtgtggaccttgtcggaaactatacttgtctgtgcgcggaaccttttaaggggctccgctgtgaaacaggcgaccaccctgtaccagatgcttgtttgtctgctccttgccataatggaggcacctgtgttgatgcagaccagggctacgtctgcgaatgtcccgagggatttatgggcctcgactgcagagagagagttcctgacgattgcgaatgccggaatggcggtagatgcttaggagcaaacacgaccttatgtcagtgtcccctcgggtttttcggcttactgtgtgagttcgagattaccgctatgccatgcaatatgaacacccagtgccccgatggcggttactgtatggagcacggaggtagttatctatgcgtctgccacacagatcacaatgcatctcactctctcccaagcccctgtgacagcgacccttgttttaatggtggttcatgtgatgcgcatgatgactcctatacctgtgagtgtccacgcggatttcacggcaagcattgtgagaaggcccggcctcacctctgttcctcaggcccctgtagaaatggcggaacatgtaaagaagctgggggcgaatatcactgttcctgcccctaccggtttacaggacggcactgcgaaatcggcaagcctgattcctgtgcctcaggcccttgccacaatggggggacttgcttccactatatcggaaaatataaatgtgactgccctcccggattttctggacgtcattgcgaaattgcccctagcccttgttttagatctccttgcgttaatggtgggacgtgcgaagatagagataccgattttttctgccactgccaggctgggtatatgggccgcaggtgccaggcggaagtggattgcggccccccagaggaagttaagcacgccaccctccgatttaatggtactcgtctgggggccgtcgctctctatgcatgtgatcgcggatatagtctgtctgcacctagcaggattcgggtttgccaaccgcatggggtctggtctgaaccacctcaatgcctggaaatagacgaatgccggtcccagccttgtctgcacgggggatcatgccaagatcgggtcgccgggtacttatgtctgtgctcaaccggctatgagggggcccactgcgaattggaaagagacgagtgtcgagcccacccatgcagaaatggagggagctgtcgtaacctaccgggcgcatatgtatgtagatgtcctgccggctttgtgggcgtacattgcgaaacagaggttgacgcctgtgactcgagcccttgccaacatggaggcaggtgcgagagcggtggtggggcctatctctgcgtgtgtccagaatcgtttttcggctatcattgcgagacagtctctgacccatgtttcagtagcccatgtggtggcagaggctattgcctggcgtcaaacggaagccatagttgtacttgcaaggtcggctatacaggagaggactgtgccaaagagctctttccaccaaccgccctcaagatggagagagttgaagaaagtggcgtctcaatcagttggaatcctccaaatggtcccgcagccaggcagatgctagatgggtatgctgtcacctatgtcagttcggacgggtcttatcgcagaaccgacttcgtggacaggacccggtcatctcatcagcttcaggctctagccgccggccgcgcctacaatatctcagttttctcagtcaaaagaaactcgaacaataagaatgatatctcccgacctgctgtcctcctggctcgaacccgcccgcggcccgtagagggttttgaggtgaccaatgtgacagcctccactatctcagtacagtgggctctgcatcgcattaggcatgctaccgtttctggtgttcgagtctccataaggcacccagaagcactgagagaccaggccactgatgtggatcgcagcgtggacaggtttacgtttagagcactgctacccgggaagaggtatacgattcaacttacaacgttgtctggactccgcggagaggaacatcccaccgaaagcttggctaccgctcccacccacgtctggacacggccactgccccccgcaaacctcaccgccgcacgcgtaaccgcaacctccgctcacgtcgtgtgggacgctcctacacctggctctttactggaggcatatgtaattaacgtgactactagccagtctacaaagtctcggtacgttcctaacgggaagttagcaagctatacagtccgcgatttacttcctggaagacgctatcagctctccgtaatcgctgtccagagtacagaactcggtccccagcactccgaacccgcacatttgtacatcattacttcacccagggatggtgcagaccgcagatggcaccaaggtggccaccacccaagagtactcaaaaacagaccaccccctgcccgtctgcctgaattgaggctactgaatgatcacagcgcacccgaaacccctacacagccccctcgtttttccgaactcgtcgatggacgcggcagagtgagcgctcgcttcgggggctcaccgtcaaaagccgcaacagtgcgtagccacgtgcccggaaactgttcggaaaacccctgtcagaacggaggcacatgcgtgcctggagctgacgcccactcctgcgactgcgggcccgggttcaagggtagacggtgcgagctggcctgtattaaagtctcgcgtccttgcactcgactgttttccgagacaaaggcgttcccagtgtgggagggaggcgtctgtcatcacgtttacaaaagagtttaccgcgttcatcaggacatttgctttaaggagtcgtgtgaatccacctcattgaaaaaaacaccaaataggaaacagtctaagtcgcagactctggagaaatcttag

SEQ ID NO: 13878 - RNA, 474 nt, synthetic construct
  misc_feature 1..474: note = source = /note="Description of Artificial Sequence: Synthetic coding sequence"
  source 1..474: mol_type = other RNA
atggaggccctccggagagcacatgaagtggccttacgcctcctcctgtgcagaccatgggctagcagagccgctgccaggcctaaacccagtgcatctgaagttttaacaagacatcttctacagcgtcggctaccacattggaccagtttttgcgtcccatattctgccgtccgaaatgatcagttcggcctttcccattttaattggcccgtgcaaggtgccaactatcacgttctgcggacaggatgtttccctttcattaagtaccactgctctaaggctccgtggcaggaccttgccagacagaataggtttttcacggctctgaaagtagttaacttaggcattcccaccctactgtacgggctcggttcttggctgttcgcaagggtaactgaaactgtccacactagctacggaccaattacagtgtatttcctaaacaaggaggatgaaggcgctatgtattag

SEQ ID NO: 13879 - RNA, 288 nt, synthetic construct; identical to SEQ ID NO: 12240
  misc_feature 1..288: note = source = /note="Description of Artificial Sequence: Synthetic coding sequence"
  source 1..288: mol_type = other RNA

SEQ ID NO: 13880 - RNA, 1053 nt, synthetic construct
  misc_feature 1..1053: note = source = /note="Description of Artificial Sequence: Synthetic coding sequence"
  source 1..1053: mol_type = other RNA
atgaaatgctcgctgagggtgtggttcctttcagtcgccttcctactcgtatttataatgagtctgctcttcacctactcccaccatagcatggcaacgctaccctatctagactcaggagccctcgacggtacacacagggttaaactagtgcctgggtacgcaggattacagcggcttagcaaggaacggctttcagggaagagttgtgcatgcagacgatgtatgggtgacgcaggcgccagcgactggttcgattcccacttcgatggcaatatcagtcccgtatggaccagagaaaacatggacctgccccctgatgtgcagcgctggtggatgatgttgcaaccacaatttaagagtcataatacgaatgaagtgctggaaaagttgttccagattgtacctggagaaaacccctaccgctttagagaccctcaccagtgtaggcggtgcgctgttgttggtaattcaggtaaccttagaggctctgggtacggacaggatgtggacggtcacaattttattatgcgaatgaatcaagctcccacagttgggtttgagcaagacgtgggttccaggaccacccatcacttcatgtatcccgaatccgctaaaaaccttcctgcaaatgtttcctttgtattggtgccttttaaagtacttgacctcctgtggatcgcgtccgctctctcaactggccagataaggtttacatacgcaccagtgaagtcttttctgagagtcgataaggagaaggtccagatttataaccctgcattcttcaagtatattcacgatcgctggacagaacaccacggaagatatccctcaacaggcatgctggttttgttctttgccctacatgtatgtgacgaggtcaacgtttatgggtttggagctgatagcagagggaattggcaccactactgggagaataaccgatatgcgggtgaatttaggaagaccggggtccacgacgcggatttcgaagcccatatcatcgacatgctagccaaggcatccaagatcgaagtttataggggtaactag

SEQ ID NO: 13881 - RNA, 600 nt, synthetic construct
  misc_feature 1..600: note = source = /note="Description of Artificial Sequence: Synthetic coding sequence"
  source 1..600: mol_type = other RNA
atggcatctcctgaagctcctgagtccgtggtccagtttgctctcgacaagttaggggggctagattacttagttcttaaccacattggtggggcccccgccggcacccgcgccagaagtccgcaagctacccgctggctaatgcaagttaatttcgtgtcttacgtgcaactgacgtcccgggcactgccttccctgaccgactccaaaggctccctagtcgttgtcagtagcctgctcgggagagttcccacgtcattctcaactccatactctgctgcaaagttcgccttagacggcttctttggcagcttacggagagaattggatgtgcaggacgtcaatgtagccattaccatgtgtgtcctgggcctgcgcgaccgggcatcggctgctgaggctgttaggggagttaccagagtgaaagctgccccaggaccgaaagccgctctagcagtaattcgtgggggtgccacccgcgcagcgggagtgttttatccctggaggtttcgactgttgtgtcttcttagaaggtggctaccccgcccccgtgcatggttcatacgtcaggaattaaatgtcacagcagccgcagcgtag

SEQ ID NO: 13882 - RNA, 411 nt, synthetic construct
  misc_feature 1..411: note = source = /note="Description of Artificial Sequence: Synthetic coding sequence"
  source 1..411: mol_type = other RNA
atggtgcgcccttatcctttgatttattttttgttccttcccttaggcgcttgttttcccctccttgacagacgcgaacccactgatgcaatgggcggtttgggcgcaggcgaacgctgggctgacttggccatggggcccagaccgcacagtgtgtggggatctagccgatggctgcgcgctagccagccccaagctctgctggttatcgccaggggattgcagacttctggacgggaacacgctggctgtaggttccgctttggccgccaagacgaaggcagcgaagcaacaggctttcttcctgccgcaggagagaagacctcgggaccactcgggaatctggctgaagaacttaatggctattcacgcaaaaagggcggatttagtttcagatttggtcgaagatag

SEQ ID NO: 13883 - RNA, 663 nt, synthetic construct
  misc_feature 1..663: note = source = /note="Description of Artificial Sequence: Synthetic coding sequence"
  source 1..663: mol_type = other RNA
atgagaggccagggaagaaaagagtcactgagtgattctcgcgatctcgatggctcatacgaccagctaaccgatagcgttgatgatgagtttgagctatctactgtatgccatagacctgagggcctggagcagttgcaagagcaaaccaaatttacgcgaaaagagttgcaggtcctgtacaggggctttaaaaacgaatgccctagcggaatagtcaacgaagagaacttcaaacagatctatagtcagttctttccccaaggtgattcaagtacttacgctacattcctttttaatgctttcgatactaaccatgatggctccgtcagctttgaggatttcgtcgcaggtctgtccgtgattttgcgaggaacagtagacgatagattgaattgggcctttaacctctatgatctgaacaaggacggatgcattacaaaagaggaaatgcttgatatcatgaagtccatctacgatatgatgggcaaatatacataccctgcattgcgagaagaggcaccccgcgagcatgttgaatcattctttcaaaaaatggaccgtaataaagatggcgtggtgaccattgaggaattcattgagtcgtgccagaaagacgagaatattatgcgctccatgcaactcttcgacaatgtgatttag

SEQ ID NO: 13884 - RNA, 2175 nt, synthetic construct
  misc_feature 1..2175: note = source = /note="Description of Artificial Sequence: Synthetic coding sequence"
  source 1..2175: mol_type = other RNA
atgctccgaacctcgactcccaatttgtgtggcggtctacactgtcgagccccatggctctccagcggaattctctgcctgtgcctcatttttttactcggacaggttggcctcctccagggccaccctcagtgcctcgattacggccctccctttcaacctcctctccatctcgaattttgtagtgactatgaaagttttggatgttgcgaccagcacaaggatcgaaggatcgcagcccgctactgggacattatggagtattttgatttgaagagacacgaattatgtggtgattatatcaaagatatcctttgtcaggaatgttccccgtatgctgctcacttgtatgacgccgagaacacacaaaccccgctgcgtaatttaccaggactctgctcagattattgttcagcctttcactctaattgtcattctgccatatccttgctaactaatgacagggggctgcaggagagccatggaagagatggaacccgcttctgtcacctgctcgacctgccagacaaagattactgtttcccgaatgtgttgcgtaatgactatcttaacaggcacctgggaatggttgcccaagaccctcagggctgcttacagctgtgcctgtccgaagtcgctaatggactcaggaaccccgtatctatggtgcacgcaggtgatggcactcacaggtttttcgtagccgaacaggtcggtgtagtatgggtgtacttgccagatggaagcagacttgaacagccctttctcgatcttaagaacatcgtattaaccacaccgtggattggtgatgagcgcgggttcctgggtttggcttttcatccaaaatttcgtcataacagaaaattttacatatattattcttgtctcgacaagaaaaaagttgaaaaaattcgaatatcagaaatgaaagtctctcgtgctgaccctaacaaagctgacctaaagagtgaacgagtgatcctcgaaatcgaagagcctgcatccaaccacaatggggggcagctgttattcggacttgacgggtatatgtatatattcacgggcgatggtgggcaggctggggatcctttcggactgtttggtaacgcgcaaaataagagcagtctactcggcaaagtattacgtatcgacgtgaaccgcgctggctcccacggaaagaggtatagggtgccctccgataaccccttcgtatcggagcccggagctcatcctgcgatttatgcttatggaattcggaacatgtggcggtgtgccgtggaccgcggggaccctattactagacagggtaggggacggattttctgtggggacgtcggccaaaatcggtttgaggaggtggatctcatccttaaaggaggaaactacggatggcgcgctaaagaagggttcgcttgctacgacaaaaaactttgccacaatgcctcactagatgatgtactgcccatctatgcttacggccacgccgttggtaagtcggtcacaggcggctacgtataccgcggctgcgaaagccctaatcttaacggtctgtacatctttggagactttatgtccggacgcctgatggctctccaggaggatcgtaaaaataaaaaatggaagaaacaggatttgtgcctcggcagcaccacatcttgcgctttccctggtctcattagcacccattcgaaattcatcatctcctttgctgaagacgaggcaggagaactatactttttggccacctcctatccctccgcctacgccccacgaggctctatctataagtttgtggacccatcccgaagagccccccccggaaagtgcaagtacaaaccagtcccagtcaggaccaagtccaaacgcatcccctttaggcccctcgctaaaactgttctggacttgctgaaggaacaatccgaaaaggctgcccgcaaatccagctccgcaacgctggcctccggtccggcccaagggttaagtgagaagggatcctctaaaaaacttgccagtcctacctctagtaagaatactctccgtggcccaggaaccaagaaaaaagctagagttgggcctcatgtgcgtcaggggaagcgacgcaaatcgctgaagtcgcatagtggacgaatgagaccctctgccgaacagaagagagccggaagatcactaccttag

SEQ ID NO: 13885 - RNA, 1218 nt, synthetic construct
  misc_feature 1..1218: note = source = /note="Description of Artificial Sequence: Synthetic coding sequence"
  source 1..1218: mol_type = other RNA
atgtggtatgtgagcacacgaggggtcgcaccaagggtgaattttgagggagcacttttttctggttatgcacccgatggcggtctatttatgcctgaagaactgcctcagttagacagggggaccctgtgtcaatggtcaacactcagttatcccggacttgtgaaggagctctgtgccctgttcataggttcagagttgctgcctaaagatgaacttaacgacctgatcgatcgggcattttccaggttcagacacagagaggtcgtgcaccttagtcggctacgtaatggactcaacgtcctggaactatggcacggggttacatatgcattcaaggatctgtccctatcttgcacaacgcagttcctccaatattttctggaaaagagagaaaagcatgtcaccgtagttgtgggaacatcaggtgataccggctctgcggctattgaaagcgtccagggggccaaaaatatggatatcattgttttactgccaaaagggcactgcaccaagatccaggaactccaaatgactacagtgctgaagcagaatgttcacgtatttggcgtggaaggaaactcggatgagttggatgaacccatcaaaactgtgtttgccgatgttgccttcgtaaagaaacacaaccttatgagtctcaactctatcaactggtccagggtgttagtccaaatggcacaccacttttttgcctatttccagtgtacaccaagcctggacactcacccactccctctcgtagaagtcgtcgttccaaccggcgcagcgggtaatctcgcggccggctatatcgcccaaaagattggattgccaattcgtttggtggttgctgtgaatcgcaatgatatcattcatcgtaccgtccaacagggggatttcagtctgagcgaagctgttaaaagcaccttggccagcgcgatggatatccaggtcccttacaatatggagcgagtcttttggctgcttagcggttcggactcacaggtaaccagagccctgatggaacaattcgagcggacacaatcagttaacttaccaaaggagctgcatagcaaatgggagcgtcaggactacgagaagatggcagtgatggagtgtgacggctgttgtgttgaactgtgcctggggaactgtggaccacgccggggcagcgtcaccgacatccccggtaccgcaatggtgcggggcgggggatag

SEQ ID NO: 13886 - RNA, 492 nt, synthetic construct
  misc_feature 1..492: note = source = /note="Description of Artificial Sequence: Synthetic coding sequence"
  source 1..492: mol_type = other RNA
atgactatgaggcacaactggacccccgatcttagcccactgtgggttctgctgttgtgcgcacacgtggtgaccctcctggtgagagctacccccgtatctcaaacaaccacggccgccacagcttccgttcgctccacaaaggatccctgcccttctcaaccccccgtcttccctgccgccaaacagtgcccagccctggaagtgacttggccagaagtcgaggtccctttaaatggcaccctgtccctatcctgtgtcgcgtgctcccggttccctaacttctccatactctactggctgggtaatgggtcattcatagagcacctgcccggtcggttatgggaaggatcgacttctagggaacggggttctactggctgggcagagggaaatctggccccccacccccgctcacctgcgcttcaaccgcaacagagtacagccgccggtctacgcctatctaccggtcccgcagcagcacagccatag

SEQ ID NO: 13887 - RNA, 1590 nt, synthetic construct
  misc_feature 1..1590: note = source = /note="Description of Artificial Sequence: Synthetic coding sequence"
  source 1..1590: mol_type = other RNA
atggctcctgctcggacaatggcccgcgctcgtctggctcccgccggtattcctgcagtggccctgtggctcttgtgcacacttgggcttcaggggacccaagccggccctccccccgccccccctggtctgcctgccggagctgactgcctgaattcttttacagcaggggtccctgggttcgtcttggatacaaacgcttctgtttcaaatggcgccacctttttagagtcaccaacagtgagacgtggatgggattgtgtaagagcttgctgcacaacccagaactgtaaccttgccctggtggaattacagccagaccggggggaggatgctattgctgcctgctttctcattaattgtctctacgagcagaacttcgtatgcaagtttgcccccagagaaggctttatcaactatctcacccgcgaggtgtatcggagctacagacaactaaggacacaaggattcggaggcagtggaataccaaaagcttgggcagggatagatctaaaagtgcaacctcaggaacctttggttctaaaggacgtggaaaataccgactggagacttctcagaggggatacagatgtaagggtggaacggaaagatcccaaccaagttgagctctggggcctgaaggagggtacttacctgttccagttaacagttacttcatccgatcatccagaggacaccgcaaatgtgaccgtcaccgtgctgtctacaaagcagacagaagactattgtcttgcctccaataaagtcggccgctgccggggcagcttccctagatggtattatgatcctacagaacagatttgcaagtcattcgtatatggcggctgcctcggaaataaaaacaactatctgagagaagaagaatgtatcctggcctgtagaggagttcagggcggtccactgcgagggagctccggcgcacaggcgaccttcccccagggtccctccatggagcggcgtcaccccgtgtgttcgggaacctgtcagccaacccagtttcgatgttccaacggatgttgtatcgattcatttttagaatgcgacgataccccgaattgcccagacgcttccgatgaagctgcttgtgagaaatacacatcaggatttgacgagttgcagagaatacacttcccatccgataaaggccattgtgttgatctgcccgatactgggctgtgcaaggagtctatccctagatggtattacaatcccttctctgaacactgtgccaggttcacctatggaggatgctatgggaataagaataattttgaggaggagcagcaatgtctggaaagttgtagaggaatctcaaagaaggatgtttttggattaagacgcgagataccaatacctagcaccggatccgttgagatggcagtcgctgtgtttctggtaatttgtattgtggtggttgtggccattctgggctattgtttttttaagaaccaaagaaaagattttcacggccaccatcatcaccccccacctacacccgccagcagtactgtttcgacgacagaggatacagaacatcttgtatacaatcacacaaccagaccactttag

SEQ ID NO: 13888 - RNA, 1803 nt, synthetic construct
  misc_feature 1..1803: note = source = /note="Description of Artificial Sequence: Synthetic coding sequence"
  source 1..1803: mol_type = other RNA
atgcaggggccactcttgctcccaggcctgtgttttttgttgagtcttttcggcgctgtcacccagaagacgaaaacctcgtgcgccaaatgtcctccgaatgccagctgcgttaataacacacactgtacatgcaaccacggatatactagcgggtccggccaaaagctgtttacctttcccttagaaacatgcaacgatacaacgagctcaaagactacagaggggaggaaagaattacagaagattgtcgataagttcgagtcactgctcacaaatcagaccttatggagaacggaaggacgccaagagatcagctctaccgccactacaattcttcgcgatgtcgaatcaaaggtcctcgagacggcactgaaggatccggaacaaaaggtgctaaaaattcagaacgactctgtggctatcgagacacaggccataaccgacaattgctccgaggaacgtaagaccttcaaccttaacgtccagatgaattcgatggatatcaggtgctcagacataatccagggagacacgcagggaccgtccgcaatcgcttttattagttatagctccttaggcaatatcatcaacgccacttttttcgaagaaatggataaaaaagaccaagtgtacctgaattcacaagtcgtgagcgcagctatagggcctaagcgaaacgtttcacttagtaaatccgtgactctgaccttccagcatgtcaagatgaccccttcgacaaaaaaagtgttctgcgtgtattggaagtccaccggccaaggaagccagtggagccgcgacggctgcttcctgatccatgttaataagtcacatacaatgtgcaactgttctcaccttagctccttcgcagttttaatggcactgacatctcaggaagaggatccagtgctcaccgtaattacctacgtaggtctcagtgtgtccttactgtgtctcttgctcgccgccctgacctttttgctgtgcaaggccattcgaaacacttctactagtctccatcttcagctgagcttatgtcttttcctggcccacctcctctttcttgtcgggatcgaccgcaccgaacccaaagtgctgtgctcaataattgccggtgctctgcattacctgtacctcgccgcttttacatggatgctgctcgagggggttcacctattcctgaccgcccggaatcttacagtcgtcaactacagtagcattaaccgccttatgaaatggataatgtttccagtaggctatggagtcccagctgtcactgtggcaattagtgccgcttcatggccacacctctacggtaccgcagaccggtgctggctgcacctcgatcaaggctttatgtggagctttctcggacccgtctgtgccatcttctccgcaaacctcgtgctatttattcttgtgttctggatactcaagcgaaaattatcctctctgaatagcgaagtatcaaccatccaaaatacacggatgctggcctttaaggcaaccgctcagcttttcatccttggttgtacctggtgcctcggcttactacaggttggacccgccgcccaggttatggcttatctgttcaccattattaacagtctccaggggttcttcatttttctggtctattgcttgctgtctcaacaggttcaaaaacaatatcaaaagtggtttcgagagatcgtcaaatctaaatccgagtcagaaacatacactttatcttcgaagatgggccctgatagcaagccgagtgagggggacgtctttccaggacaggttaaacgcaagtactag

SEQ ID NO: 13889 - RNA, 660 nt, synthetic construct
  misc_feature 1..660: note = source = /note="Description of Artificial Sequence: Synthetic coding sequence"
  source 1..660: mol_type = other RNA
atgaagctcctgctgtgggcgtgcattgtttgcgttgccttcgctcgtaaaagaaggttcccattcattggggaagacgacaatgacgacggtcatccgctgcatccctctctaaatatcccatatggaatccgtaatctacctccccctctgtattaccggcctgtcaataccgttcccagctatccggggaatacctacaccgatacaggccttccctcatatccatggatcctgacctcccccggcttcccttacgtctatcacattcgcggctttcctttagccacgcaactgaatgtccctcccctgccaccacgtgggtttcccttcgtcccccccagccggtttttttcagctgctgcagctccagccgcccctcctattgcagcagaaccagcagccgcagctcccctgacagccactcccgtcgccgccgaaccagccgccggagctcccgtggcagctgaaccagctgctgaagctcctgttggagcggaaccagctgcggaagccccagtcgccgccgaaccagccgcagaggccccagtgggagttgaacctgctgccgaggagccatcaccagcagagccagccaccgcaaagcccgctgcgcccgaaccccatccctcaccttctcttgaacaagccaaccagtag

SEQ ID NO: 13890 - RNA, 1743 nt, synthetic construct
  misc_feature 1..1743: note = source = /note="Description of Artificial Sequence: Synthetic coding sequence"
  source 1..1743: mol_type = other RNA
atgcatctaagcgcagttttcaatgccttgcttgtgtcggtccttgccgcagtgctttggaaacacgttcggctcagggaacatgctgcaacactggaggaggagctggccctatctagacaagccacggaacctgcccctgcactccggattgactatcccaaagctttacaaatcctaatggagggcggtacacacatggtatgtaccgggagaacccatactgatcgtatttgtcggttcaaatggctgtgctactcaaacgaagcagaagagttcatttttttccatggaaacacttcagtgatgctgcctaatctgggctctcggagattccaaccagccctactcgacctctctactgtagaagaccacaacacacagtactttaacttcgtagaactgcccgccgccgccttaaggtttatgcccaaacccgtatttgttcctgacgtcgcactgatcgccaaccgatttaaccccgacaatctgatgcatgtctttcatgacgacctcctgcccctattttatacactcaggcagttcccaggcctggcacacgaggcaagactgttttttatggagggctggggcgaaggtgctcatttcgatctctacaagctcctaagtcccaagcagcccctcctgagggcccaactcaaaacgctcggcaggctcctgtgtttctcacacgccttcgtgggtctatctaaaatcaccacttggtatcagtacgggtttgtgcagccccaagggcctaaagcgaacattctggtgtctggtaatgaaattcggcagttcgctcgattcatgacagaaaaacttaacgtcagccacaccggcgtgccactgggcgaggaatatattttagtgttctcacgaactcaaaatcgccttattctcaatgaagcagagctactgcttgcacttgcacaggaatttcagatgaaaacagtaactgtctcacttgaagaccacactttcgccgatgtcgttaggctggtatctaatgcatcaatgttagttagcatgcatggcgcacagctcgtgactacgctcttcctgcccaggggggcaacagttgttgaactctttccttacgcagtcaaccccgaccactatacaccgtataagaccttagctatgttacccggtatggatctccagtacgtagcttggagaaacatgatgccagagaatactgtaacacatcctgaacggccgtgggaccagggcgggattactcatctcgatagggccgaacaagcaaggatactccagtcacgagaagtgcccaggcatttgtgctgccgcaaccccgagtggctgtttcgcatataccaagatacaaaagttgatataccttctctgattcagacgatccgaagagtggtcaagggcagaccgggccctaggaagcagaaatggactgttggtctgtatcccgggaaagtgagagaggccagatgtcaggcatccgtgcatggcgccagtgaagcgagactgacagtcagctggcagatcccctggaacctgaaatacctcaaagtcagagaagtaaaatatgaagtctggctccaagaacagggtgagaacacttatgtaccgtacatcctcgctcttcaaaatcatacttttaccgagaacatcaaacccttcaccacctatctcgtgtgggtgagatgcatcttcaataaaatactcctgggtcctttcgccgacgtcctggtgtgcaacacgtag

SEQ ID NO: 13891 - RNA, 5130 nt, synthetic construct
  misc_feature 1..5130: note = source = /note="Description of Artificial Sequence: Synthetic coding sequence"
  source 1..5130: mol_type = other RNA
atgggttttcttccaaagctgctattgttggccagtttttttccagcaggacaagcctcatggggtgtgagctctcctcaggatgtccagggcgtgaagggaagctgccttttgattccatgtatctttagttttccagccgacgtagaagtcccggacggcatcacagccatctggtattacgactactctgggcagcggcaggtggtctctcattcagctgaccccaaactagtggaggcgcgatttagagggcgtacagaatttatgggcaacccggagcaccgagtttgcaacctgcttctcaaagacctgcaaccagaagactctggcagttataatttccgtttcgagatttcagaagttaacagatggagcgatgtgaaaggaacgttggtgaccgtgacagaggagccccgtgtgcccactatcgcctccccagtggaactcctggaaggtacggaggtagacttcaactgcagcacgccctatgtgtgcctccaggaacaggtgcgacttcaatggcagggtcaggatccagctagatcagttacctttaattctcagaaatttgagcctaccggtgtgggacaccttgaaacacttcacatggctatgtcatggcaggatcatggccgcattctgcggtgccagctgtctgtcgcgaaccatcgggctcaatccgagattcacctgcaggtcaaatatgctcccaaaggcgtaaaaatcttgctctcaccaagtgggcgaaatattctacccggcgaattagtgacgctgacatgtcaagtcaatagctcatatcctgcagtctcctcaattaagtggttgaaggatggagtgaggctgcagaccaaaacaggagttctgcatttgccgcaagccgcatggtccgacgctggcgtttacacctgccaggcagagaacggtgtgggatccttggtgtctcctccaatatcactgcacatctttatggccgaagtacaggttagccccgcagggcccatcctcgagaatcagaccgtaactcttgtgtgcaatacccccaacgaggccccttccgatctgcgctatagctggtataaaaaccatgtccttctcgaagacgctcacagccacactctccgcttgcacctggccacccgagctgatactggattctatttctgtgaggtgcaaaatgtgcacggatccgaacgctccgggccagtttccgttgtagtgaatcaccctcctctcacccctgtcctgactgccttcttagagacacaagctggcctggtcggcatacttcattgctcagtggtctctgaacctctagcaacactggtcctatcacatggagggcacatcctggcaagcacaagtggcgatagcgatcactccccccgattctcaggaacctctggaccaaattcattaaggctggaaattcgcgacctcgaagaaaccgatagcggcgaatataagtgctctgccacaaactcattggggaacgccacatcgactctggatttccacgcaaacgccgctaggctcttgatctcacccgccgccgaggtggtagaaggccaagccgtgacactgagctgcaggtcaggtctgtctcccacccctgatgctcgatttagctggtacttgaacggtgcactgctgcacgaaggaccaggttcctctctgcttttacccgctgcttcttccactgacgcaggatcctaccattgtagagctcgtgatgggcactctgccagcggcccaagctcccctgctgttctgactgtgctctaccctccgaggcagcccacattcaccactaggctagatttagacgcagctggtgctggagcaggcagacgtggattgctgctatgtagagtcgattcggatcctcccgccagattgcaacttctgcacaaggatcgcgttgtcgccacaagtttgccttcaggcggcggctgcagcacatgcggagggtgctcaccccgcatgaaggtgacaaaagcgcctaacctcctacgcgtcgaaatacataacccactgcttgaagaagaggggctgtatctgtgtgaagcgtctaacgcccttggaaatgcatcaacttcagccacctttaatggccaagctaccgtgcttgccatcgccccatcacatactttgcaggaaggtactgaagcaaatctcacttgcaatgtgtctcgcgaagccgcaggttctcccgccaattttagctggtttagaaatggcgtcctgtgggcccaaggacctctggagacagtaactctgttgccagttgcccgcaccgacgctgctctgtatgcatgccgaattctcacagaggctggagctcaattgtcaacacctgttctgcttagcgtcctttatccacctgaccgccctaaactatcagcactgctagacatgggacaggggcacatggcattgttcatctgtacagtcgacagtaggcctctcgcactcctggcgctttttcatggcgaacaccttctcgctacttctctgggtccccaggtgccttctcacggaagatttcaggccaaggccgaagcaaatagcctaaaactcgaggtaagggagctaggccttggcgactccggctcttatcggtgtgaagcaacaaatgtcttaggatcatcaaacacttcactgttttttcaggtgcggggcgcttgggtgcaggtgtcgccgtcccccgagcttcaagagggccaagcagtagttctttcctgtcaagtgcatacaggggtaccagagggaacttcctataggtggtatcgagatggccagcccttacaagagtctacgtcagcaacgttgaggttcgcagctattactctgacacaagctggggcttatcattgccaggctcaggccccaggctctgcgacaacttctctcgccgctcccatttcactgcacgtgagctatgctccacgtcatgtgacattaacaacccttatggatacaggtcctggaaggctgggactgctgctctgccgcgtggactcagaccccccagctcagctgcgtctgctgcatggagatagactggttgcatctacgctccagggcgttggcgggcccgaaggcagctccccacgcctccacgttgcagtggcccccaacacattaaggttggaaatccatggcgcaatgttagaggatgaaggcgtgtacatctgtgaggcttcgaatactctaggtcaggcatccgcctctgctgatttcgatgcacaagccgttaatgtacaggtctggccaggcgccaccgtccgcgagggtcagttagttaacttgacctgcctcgtctggactacccaccctgcccaactcacctacacctggtatcaggacggacaacagaggctagacgcccactccatccccctccctaacgtgaccgtgagagacgcaacctcatatcgctgtggcgtggggccgcctggacgcgcccctagactgtcccggccaattacgctggatgtcctgtacgctcctcgcaaccttaggttgacttaccttctggagagtcatggcggtcaactagcactggttctgtgcacagtggattctcgcccacccgcccaattggcgttgtctcacgctggtcgtctcttggctagttcgactgccgcatctgtgccaaatactctcagattagaacttcgcggcccccagccacgcgatgaggggttctactcatgttcagcacgctcaccactcggtcaggctaatacctccctcgaattaaggttggagggcgtcagggtgatcctcgcaccagaggctgccgtccccgaaggcgcgcccattacggtgacctgtgccgatccagccgcacacgcccccactctgtatacctggtaccacaatggtagatggctgcaggaaggacctgctgcttctctctcatttctggtggccacacgggctcacgccggagcatattcttgccaggctcaggacgcgcagggaacccggagttccagaccagccgctctccaggtcctgtatgctccccaggatgcggtgttatcctcatttcgcgactctcgtgctagaagcatggccgtgattcagtgtaccgttgatagtgaacctccagccgagttggctttgtcccacgacggaaaggtgcttgccacatcttccggtgtgcactcccttgcatcgggcaccgggcacgttcaggtcgctagaaacgctcttagattacaggtccaggacgtgcctgcaggagacgacacatacgtgtgcactgctcaaaacttactaggaagtatcagcactataggcagacttcaggtagagggcgcacgagtggttgcggaacccggcttagacgtgcccgaaggcgccgccttgaacctaagctgccgactgctgggcggccccggtcctgttgggaactcgacgtttgcatggttctggaacgacaggagactccacgctgagccagttcctacactcgccttcactcacgtagcccgcgctcaggctggtatgtaccactgtctcgctgaacttccaacaggggcagcagccagtgcgcctgtgatgctgagggttctttatccccctaaaacccctacaatgatggtgttcgtcgaaccagaagggggactccgaggcatcctggactgccgcgttgattccgaaccgctggcaagtttgacactccacttaggtagtaggctcgtcgctagttcacagccccagggcgctcccgctgaaccgcatattcatgttcttgctagtcccaatgcacttagagtcgatatcgaagccctgagaccaagcgaccagggagaatacatttgttccgcctcgaacgtgctggggagcgcctcaacaagcacctactttggcgtgcgcgcattgcatcggctgcatcagtttcagcaactgctgtgggtactgggtctcctggtcggattactccttctcctgttaggactgggtgcgtgttacacatggcgtcggagaagggtttgtaaacaatcaatgggtgagaattccgtagaaatggccttccagaaagaaaccactcaactaattgaccctgacgcagcaacatgcgaaacctccacttgtgcaccccccctcggctag

SEQ ID NO: 13892 - RNA, 693 nt, synthetic construct
  misc_feature 1..693: note = source = /note="Description of Artificial Sequence: Synthetic coding sequence"
  source 1..693: mol_type = other RNA
atgtgcgtcacatatcacaacgggacaggctattgtaagtgccctgagggctttctgggggagtactgccagcatcgggacccctgtgaaaaaaacaggtgtcaaaatggtggcacatgcgtcgcgcaggcaatgctcgggaaagcgacatgccgctgcgcctctggatttaccggcgaagattgtcagtacagcacatctcacccttgcttcgtttctaggccctgcctcaatggaggaacatgccatatgctaagccgagacacctatgaatgtacctgccaggttggttttaccgggaaggagtgtcaatggactgatgcatgcctctctcatccttgcgccaatggtagcacgtgtacaactgttgcaaaccagttcagctgcaaatgtcttaccggatttacgggccaaaagtgcgagacagatgtgaatgagtgtgatatacctggccactgtcagcatggcggcacgtgtcttaatctccccggaagctatcaatgccagtgcctgcagggttttacgggacaatattgtgattccctctatgtgccttgcgctccttctccttgcgtcaatggcgggacatgccggcaaacaggcgatttcaccttcgagtgcaattgtctgcctgcgacatggcccatctttccaaaattattgtccctgcaagaaaaagagtcttactgctag

SEQ ID NO: 13893 - RNA, 660 nt, synthetic construct
  misc_feature 1..660: note = source = /note="Description of Artificial Sequence: Synthetic coding sequence"
  source 1..660: mol_type = other RNA
atgttcgtaagctacctcattctcactctcctccacgttcaaacagcagtgctggcgaggccaggcggagaatctatcggctgtgacgattacctcggaagtgacaaggtggtggataaatgcggcgtgtgtggaggcgataatacaggctgccaagtcgtgtccggggtgtttaagcacgccttaacaagcttggggtatcaccgtgtcgtcgaaataccagagggagcgaccaagattaatatcaccgagatgtataagagcaacaagaagaagtcccatctcaaaccagctacaaggggcagccagttcagcagcgtgaaagtgtgttcagtcccggccgcttgcaaactcttagggacccccggtagagccaggcaaccggttcctgcaccccgtgagctggagcacgacaaaaattctccacattgtgcctatctgtctctttatttaacgtcattagcccagtctagttggcgcgtcttctcgctgttttcttatgtcctgatctacttattctctaaatacctcgcctttaatacgctgtttgctctgaagaggatggcccttcagcgagacagaaaggagaaaactcgcgcatggtgtattttcattaagttatgtggacgagaaattcagatcctcccaggccctgtgtag

SEQ ID NO: 13894 - RNA, 363 nt, synthetic construct
  misc_feature 1..363: note = source = /note="Description of Artificial Sequence: Synthetic coding sequence"
  source 1..363: mol_type = other RNA
atggataacgtacagcctaagatcaaacatcgcccattttgtttttctgtgaagggccacgtgaaaatgcttaggcttgccctgacagtaacgagcatgaccttttttataatcgcccaggccccagaaccctacattgtaatcaccggcttcgaggtaactgtcatcctcttttttattttactatacgttttaagactcgatagactcatgaaatggcttttctggcctctattagtctttgcactcgttactgctgtttgctgccttgccgatggagcattgatttaccgtaaattactgtttaacccatcaggcccataccagaagaaacccgttcatgagaagaaagaagtactctag

SEQ ID NO: 13895 - RNA, 864 nt, synthetic construct
  misc_feature 1..864: note = source = /note="Description of Artificial Sequence: Synthetic coding sequence"
  source 1..864: mol_type = other RNA
atggctccctggtcccacccctctgcgcaattacagccggttggaggagacgcggtgtctcccgcactcatggttctgctatgcttgggcaatctcagtaaggctacactctgggctgagcctgggagtgttatctcccgcggcaattcagttactattagatgccagggcactctcgaagcgcaggaatacagactggttaaagagggatctcccgaaccttgggacactcaaaacccccttgaaccaaagaataaagcccgtttttctatcccttcaatgactgaacatcatgcaggccggtatcgatgctattattactcgccggcaggatggtccgaaccttctgatcctctggaactcgtggtcacaggattttataataagcctacactatccgccctgccaagccccgtcgtgacgtctggtgagaacgtaacacttcagtgtggtagtaggctgagatttgaccggtttatcctgaccgaagagggcgatcacaaactgtcttggactcttgactcacagctgacaccctccggacagttccaagcactgtttcccgtcgggcccgtaactccctcacaccgatggatgctcaggtgctatgggagtagacggcacattctccaggtgtggtcagaaccaagcgatctacttgagatcccagtaagcggagccgcagataatctctccccttcccagaataaatctgacagtggcactgcttcacatctccaggactatgccgtcgagaatctgatcaggatgggaatggctggcctcatccttgtcgtacttggcatcttgatctttcaagattggcattcacaaagaagtccacaagcagccgccggacgctag

SEQ ID NO: 13896 - RNA, 438 nt, synthetic construct
  misc_feature 1..438: note = source = /note="Description of Artificial Sequence: Synthetic coding sequence"
  source 1..438: mol_type = other RNA
atgggaatcggttgttggcgcaatcctttacttttacttatcgcactcgtcctgtcagccaagttaggccacttccaaaggtgggagggcttccagcagaagttaatgagcaaaaagaatatgaattcaacccttaactttttcatacaatcgtataacaatgcctccaatgacacttacttgtacagagtgcagagactgattcgatcccagatgcaactcacaaccggcgtagaatacatagttacggtgaaaatcgggtggacaaaatgtaaacggaatgatacctcgaattcatcctgccccctccaaagcaaaaaactacggaaatccctcatctgcgagtctctcatttatacaatgccgtggatcaactattttcagctgtggaataattcttgtcttgaagcagagcacgtcggcaggaacctgagatag

SEQ ID NO: 13897 - RNA, 1776 nt, synthetic construct
  misc_feature 1..1776: note = source = /note="Description of Artificial Sequence: Synthetic coding sequence"
  source 1..1776: mol_type = other RNA
atgcaacaggacggcctcggcgtgggtacccgcaatgggtctggaaaaggacgctcagtacatccttcttggccctggtgcgcccctcgtcctctccgctatttcggtagagatgcccgtgctcgcagagcccagaccgcagctatggccctcgctattcaagtcactgtctcaaatccgtaccatgtggtgatcctgtttcagcccgtaactttgccttgcacctatcagatgacgtccactccaacccaacccatagtcatttggaaatacaagagtttttgcagggatagaattgcagatgcttttagcccagcctccgttgacaatcaactcaatgcacagctcgctgcagggaaccccggatacaacccctatgtggagtgccaggattccgtgcggacagttagggttgtcgcaacaaagcagggcaatgctgttacactcggggattactaccaaggacggagaattacaataacaggaaacgccgatctcaccttcgatcagaccgcgtggggggacagtggagtgtattattgcagtgtcgtatccgctcaagatctccagggaaataacgaagcttatgccgaactgattgtgctggggcgtacatccggcgtggccgagcttctgccagggttccaagccggccccatcgaagattggctgtttgtcgtcgtagtttgtctcgccgctttcctgatctttttactgctgggaatatgttggtgtcagtgctgccctcatacatgctgttgctatgtacgatgtccttgttgtcccgataaatgctgctgccccgaagctctatatgctgccggcaaggctgctacttcaggcgtgccctcaatttacgcaccatctacctacgctcacctctcccctgctaagaccccacccccccccgctatgattcccatgggtcctgcctacaacgggtaccccggcggctaccctggagatgtagacagatccagctctgtgagaagcggttatagaatccaggcctctcagcaagacgatagcatgcgggtgctctactacatggaaaaagagttggctaattttgacccgtcgcggcccggaccacctagcggcagagttgaacgcgccatgtccgaagtgacaagcctgcacgaagatgattggagatcaagaccctcaagagggcccgccctgactcccattagggacgaggagtggggcggacactctcctaggagcccacgaggatgggatcaagagccagccagggagcaggcgggcggtggatggagagcgcggcgcccccgcgcgaggtcagtagatgctctggacgacttgacaccaccaagtactgccgaatccgggagccgctcaccaactagtaatggaggaagatcgcgagcctacatgccaccacgctcacggtccagggatgatctgtacgatcaggacgatagccgagactttcccaggtcaagagatccacattatgatgatttccgctcgcgagagcgcccacctgccgatcctcgaagccaccaccacagaactcgggacccacgcgacaacggttctagatctggagacctgccatacgatggaagactgcttgaagaggccgttcggaaaaagggttcagaggaaagacgtcggccccataaggaagaggaggaagaggcctactatccccctgctccacccccgtatagcgagactgactcacaagccagtcgggaaagacgcctgaagaagaatctcgctctgagtagggagagcctagttgtttag

SEQ ID NO: 13898 - RNA, 678 nt, synthetic construct
  misc_feature 1..678: note = source = /note="Description of Artificial Sequence: Synthetic coding sequence"
  source 1..678: mol_type = other RNA
atgaacaggtgtccccgcagatgtcgatctcccctcggtcaagctgcacgttcattataccagcttgttaccgggtcactgagtcccgacagtgtggatgacgagtttgaactgtctacagtgtgccacagaccagagggactagaacagctacaggagcagacaaaatttacgcgaaaggaactgcaggttttatatcgaggattcaagaacgaatgcccctccggcatcgtaaacgaagaaaacttcaaacagatctactcccaattttttccccaaggcgactcatccacatatgccacgtttctgttcaacgcatttgacaccaatcacgatggctcagtgtcctttgaagacttcgttgccgggctttctgtcattttacgaggaactgtggacgatcggctcaattgggcatttaatctctatgacctgaataaggacggctgcattacgaaggaagagatgctcgacataatgaagtccatctatgacatgatgggtaaatatacgtatccagctttgcgcgaagaggccccccgagagcacgtagaatccttttttcagaagatggatagaaataaggacggggtggtgactatcgaagaatttattgaatcttgccaaaaagatgaaaacattatgagaagtatgcagctgttcgacaacgtgatctag

SEQ ID NO: 13899 - RNA, 705 nt, synthetic construct
  misc_feature 1..705: note = source = /note="Description of Artificial Sequence: Synthetic coding sequence"
  source 1..705: mol_type = other RNA
atgccagcctcctcaccctttctgctggccccaaagggcccccctggtaatatgggaggaccagtgagagaacctgcattatccgtcgccctctggctgtcatggggagccgcactaggcgccgtggcctgcgcaatggccctcttgactcagcagactgaactgcaaagcttgagacgagaagtttccagactgcaggggacaggcggtcctagtcagaatggggagggttacccctggcagtcactgcccgaacagtctagtgacgccttggaagcgtgggagaacggagaaagatctcggaagcgccgagcagtcttgacccagaaacagaagaatgatagcgatgtgacagaagtgatgtggcagccagccctacgccgcggccggggtctgcaagcacaggggtatggggttagaattcaggacgcgggtgtttacttgctgtactctcaggtgctttttcaggacgttactttcacaatgggccaagttgtgtctcgcgagggccaaggaagacaagagactctcttccgctgcattcgctctatgccctctcatcccgatagagcctacaactcttgctacagcgctggggttttccatctccaccagggcgacattctttccgtgataattccacgcgcacgcgccaaactcaatctctccccacatggcacctttctgggattcgtcaagctgtag

SEQ ID NO: 13900 - RNA, 2400 nt, synthetic construct
  misc_feature 1..2400: note = source = /note="Description of Artificial Sequence: Synthetic coding sequence"
  source 1..2400: mol_type = other RNA
atgaaaccaatgcttaaagacttcagcaacctattgctagtagtgctgtgcgattacgtcctgggagaggctgagtacctgttgctccgcgaacctggccacgtggccctctcaaatgataccgtgtacgtagacttccagtattttgatggcgccaacggcacgctgcgcaacgtgtctgtgctactattggaggccaatactaaccaaacagttaccaccaaatacctactgacaaatcagagtcaaggaacattgaaatttgaatgtttttattttaaagaggcaggcgattactggttcaccatgaccccagaggcaaccgacaattcgactccctttccgtggtgggagaagtcagcgtttcttaaggtcgaatggcctgtgttccatgttgatttgaaccgtagcgctaaagcagcagaggggacctttcaggtaggcctgtttacctctcagcctctgtgccccttccctgtagataaacccaacattgtagtcgacgttatttttacgaattccctgcccgaagcccggaggaactctcgtcaacccctcgagataagaacatccaaaagaacagaactcgcacagggccagtgggtggaattcggatgcgcaccgctaggcccagaagcttacgtgaccgtcgtattgaaactcctgggtcgggattcagttataacaagtaccggtccgatagatctagctcagaagttcggatataagctcgtaatggtccccgaactgacgtgcgagtctggtgtcgaagtcaccgtgctgccgccaccgtgcacatttgtccagggtgtggtgaccgttttcaaagaggcccctcgatatcccggaaaaaggactatccacttagcggagaacagcctgccactgggcgagaggaggaccattttcaattgtaccctgtttgatatgggaaaaaataagtattgcttcgactttggcatcagttcccggagccacttcagcgccaaggaagagtgtatgctgattcagaggaacaccgccttccagccctcgtcgccctcccctctccaaccccagggccctgtcaagtctaataatatagttactgtcaccggtatctccctgtgtcttttcatcattatcgccaccgttctaatcactctttggaggagattcggtcggccagctaaatgctctacccccgccagacacaattccattcatagtcccagcttcaggaagaatagcgatgaagaaaacatttgtgagctatccgagcaacgtggaagcttttctgacggcggcgatggccctacaggctcccccggcgacacagggataccccttacctacagacgttcgggcccagtcccccccgaagatgatgcctctggttccgaatcctttcagtcgaacgctcaaaagataattccacccctgttttcctatcgtcttgcccagcagcaacttaaggagatgaaaaaaaaaggactgactgaaacaactaaggtgtaccacgtcagtcagagcccgcttacagatacggccatcgacgccgccccctctgcaccccttgacctcgaaagtcccgaagaagccgccgccaacaaattccggataaaaagccccttccctgaacagccagcggtgagtgcaggagaaaggcccccctcaagattagacctcaatgttactcaggcttcatgtgcgataagccccagccaaacgctgattcggaagtcccaagcccgccacgtgggaagccggggcggtccctcggagcgcagtcacgctaggaatgcccacttccgcaggaccgcaagcttccacgaggcccgccaagcgcgaccattccgtgagcgaagcatgtctactctgaccccccgccaggctccagcatactcttctcggaccagaacctgtgaacaggccgaggatcgatttcgcccacagtctagaggggcccacttattcccggagaagctggagcacttccaagaagcaagcggtacacgaggtcctttgaaccccctcccaaaatcttatactttgggccagcccttacgcaaacctgatttaggtgaccaccaagccggcctggtcgctggaatcgaacggactgagccgcaccgagccagaagaggaccgtccccgtcccataagtctgtgagtcggaaacagtctagccctatatcccccaaagacaattatcagagagtttcaagtttgtcacctagtcagtgcagaaaggacaagtgccagtcattccccacccaccccgagtttgcattttacgataacacaagcttcggcctgactgaggcagaacagcggatgcttgatctacccggatattttggtagcaatgaggaggacgaaaccacatccacccttagcgtggaaaagttggtcatatag

SEQ ID NO: 13901 - RNA, 927 nt, synthetic construct
  misc_feature 1..927: note = source = /note="Description of Artificial Sequence: Synthetic coding sequence"
  source 1..927: mol_type = other RNA
atgcggctactccccgagtggtttctgctgctttttggcccttggctgttaagaaaggccgtcagcgcacaaattcccgaatcaggaagacctcaatatctaggccttcggcctgccgccgcgggggcgggcgcgcccggtcagcagttacccgaaccgcgatccagtgatggattgggagtgggcagagcctggtcctgggcctggcctacaaaccacactggagctctggcccgtgcaggggcagctggcgcacttcccgcacaacgaaccaaacggaaacctagtattaaggctgcgagggcaaaaaaaatttttggctggggcgacttttattttcgcgttcatacattgaaatttagtttgctcgtgacagggaagattgtagaccatgttaatggaaccttctcggtttattttaggcacaattcatctagcttggggaatctcagcgtatccattgtaccaccttccaaaagggtcgaattcggcggtgtgtggttacccgggcctgttccacatcccctccagtctacactggcactcgaaggtgtgctgccaggtctgggtcctccattaggaatggctgctgccgccgccggtcctggacttggcggatccctcggcggagccctcgccggccccctgggaggagctctgggcgtcccaggtgcaaaggaaagtagggccttcaactgtcatgtggaatacgaaaagacgaaccgagccagaaagcatcgaccttgtctctacgacccatctcaagtgtgtttcaccgagcatacacaatcacaagccgcgtggctgtgcgctaagcctttcaaagttatttgtatttttgtgtcctttctgtcgttcgactacaagcttgtccagaaagtctgtcccgattataattttcaatccgagcatccttactttggctag

SEQ ID NO: 13902 - RNA, 795 nt, synthetic construct
  misc_feature 1..795: note = source = /note="Description of Artificial Sequence: Synthetic coding sequence"
  source 1..795: mol_type = other RNA
atgaagttaggatgcgttctgatggcatgggcattgtatctctcattgggtgtgctttgggtggcccagatgcttctagcggcaagcttcgagactctgcagtgcgaaggccctgtgtgtactgaagagtcaagctgtcataccgaggacgacctgaccgacgcacgagaagctggtttccaggtgaaagcctataccttttctgaaccatttcacctcatagtttcgtacgactggttaatcctgcagggacctgcgaagcctgtctttgaaggcgacttgcttgttctgagatgtcaggcttggcaagactggccactaacccaggtcacattttaccgggacggctccgccttaggaccccccggaccgaaccgcgagttctccattactgtcgtacagaaagccgatagcggccactatcactgcagtgggatcttccaatcaccaggccctggcatacctgagacggcatctgtggttgctattactgttcagggcgcttcatcctctgccgctccacctacgttaaatcccgcacctcagaagtccgccgccccgggaacagcaccagaggaggctcccggtcctcttccaccaccgcccaccccttcctccgaggaccccggcttctcctctccgctaggcatgccagatcctcatctttaccatcaaatgggcctattgcttaaacatatgcaggatgtccgagtcctacttggccacttactcatggagctaagggaactgtctggtcaccgcaagccgggaacaacaaaagccactgctgaatag

SEQ ID NO: 13903 - RNA, 1362 nt, synthetic construct
  misc_feature 1..1362: note = source = /note="Description of Artificial Sequence: Synthetic coding sequence"
  source 1..1362: mol_type = other RNA
atgctgcggattctgtgcctcgctctctgctccctactgaccggaactagagccgacccaggggcactgttgaggctggggatggatataatgaaccaggtgcaatctgccatggatgagagtcacattttggagaagatggccgctgaagccgggaaaaaacagcctggtatgaagccgattaaaggaattactaatctcaaggttaaggatgtacagctcccagttataacattgaatttcgtgcctggtgtgggtatctttcagtgtgtttccacaggaatgacagtgaccggtaagtcctttatgggtggcaacatggagattattgtcgctttaaatatcactgccacgaacaggctactgcgggacgaggaaaccggcttacccgtctttaaaagcgagggctgcgaagtgattctcgtgaatgtgaaaactaatctgccaagtaacatgcttcccaagatggtaaacaaattcctcgactctaccctgcacaaagtactacctggcctcatgtgcccagcaattgatgcagtattggtctatgtaaatcggaagtggacaaacctctctgatcccatgcccgtagggcaaatggggaccgttaagtacgttttgatgtccgcccccgccacaaccgcaagctatatacagttagatttcagcccagtcgtgcaacagcaaaagggaaagaccattaaactggcagatgcaggcgaagctctcaccttccccgagggttatgccaaaggctcctctcagctcctgctgcccgccacattcctctcagccgaactcgcccttctgcagaaaagctttcatgtcaatatacaggataccatgattggagagttgcccccacagacaaccaaaacgctggctagatttatccctgaagtggcagtggcgtatccaaagagcaagcccctcacaacccagatcaaaatcaaaaaacctcctaaggtcaccatgaagacgggcaagtctctcctccacttgcacagcacattggagatgtttgcagcccggtggcgcagcaaagcccccatgagtttgtttttacttgaagtccattttaacctgaaagtacagtactcagtccacgaaaaccagttacagatggccacttcgcttgataggctgttatctttgtcccggaaatcttcctccatcggtaattttaatgagagagaattgaccggctttattaccagctatcttgaagaggcttacatcccagtagtcaatgacgtgctccaggtgggcctgccactaccagattttcttgcgatgaactacaacctcgccgagcttgacattgtcgagaatgctcttatgttggatctgaaacttggatag

SEQ ID NO: 13904 - RNA, 1323 nt, synthetic construct
  misc_feature 1..1323: note = source = /note="Description of Artificial Sequence: Synthetic coding sequence"
  source 1..1323: mol_type = other RNA
atgtctgcccggggacgatgggaaggcggtggcagacgcgcctgtagaggttctttagggctggctagagcccaaggagccgaaagggtgacatcttctgagcaacggcccgccatggcctctctgggtttacttcttttactgttgctgacggcgttgccgccactctggagttcttccctgcccggtcttgacaccgcagaatccaaagccacaattgcagatctgattctttctgcgttagaacgagctaccgtgtttctcgagcagagactgcccgagatcaacttagacggaatggtcggcgtccgagtcctcgaggaacaattaaaaagcgtgcgggaaaaatgggcacaggagccacttctgcagccattgagtttaagagtagggatgttaggagagaaactggaagcagccattcagagaagcttgcactacttgaagctgtcagaccctaagtatctgcgtgaattccagctgacgcttcagccaggattttggaagttgcctcacgcttggatacacactgatgccagcttggtgtatcccacattcggcccacaggactccttcagcgaggaaaggtctgatgtgtgtcttgttcaactgctgggaactggcactgactcgagtgagccgtgcggccttagtgatctctgtcggagccttatgacaaagcccggttgctctggatactgccttagccatcagttactgtttttcttgtgggccagaatgagaggatgtacacagggacctctgcagcagtcgcaggattacattaatcttttttgtgccaacatgatggacttgaatcgccgcgcagaggctatcggctatgcataccctaccagggacatattcatggaaaacatcatgttttgcggaatgggtggcttttccgacttctacaagctgcggtggctcgaggcgatactcagttggcagaagcaacaggaaggctgctttggcgaacctgacgcagaggacgaagaactgtcaaaggccattcagtatcagcagcacttcagccgacgcgtaaaaagacgagaaaagcaatttcccgattccagatccgtggcccaggccggcgtgcagtggcggaatctcggatctctgcagccccttcctcccggattcaaacaattctcctgcctgatccttcctagctcgtgggactacagaagcgtacccccctatcttgctaatttttacattttcttggtcgaaactggttttcaccacgtggcacacgctggactcgagctgctcatatcccgcgaccctcccacctctggcagtcaatccgtggggctctag

SEQ ID NO: 13905 - RNA, 708 nt, synthetic construct
  misc_feature 1..708: note = source = /note="Description of Artificial Sequence: Synthetic coding sequence"
  source 1..708: mol_type = other RNA
atgaagtacgtgttctacctgggagtgcttgctggcacatttttctttgccgattcctcagtgcagaaagaggaccccgccccctacctcgtgtatctaaagtctcactttaacccctgcgttggtgtcctgattaaaccgtcttgggtgctagctcccgcccactgttaccttcccaaccttaaagttatgcttggtaatttcaaatctcgcgtccgtgacggtactgaacaaacgattaatcctatccagatcgttcgatattggaattattctcatagcgccccccaggacgaccttatgctgatcaagctcgccaagcccgctatgctgaaccccaaggtgcagccactgacattagccacaacgaatgttagaccaggaactgtgtgtttattaagtggtttggactggtcacaggagaattcgggcaggcacccagatctgcgccaaaacctagaagcacctgtgatgtccgatagggagtgccagaaaacagaacagggcaagagtcacagaaatagcctgtgcgtgaaattcgtcaaagtgttcagtagaattttcggagaggtcgccgttgctacagtgatttgcaaggacaaattacagggcattgaggtcgggcactttatggggggagacgtgggtatctatacgaatgtgtataagtacgtgtcgtggattgagaacacagcaaaggacaaatag

SEQ ID NO: 13906 - RNA, 426 nt, synthetic construct
  misc_feature 1..426: note = source = /note="Description of Artificial Sequence: Synthetic coding sequence"
  source 1..426: mol_type = other RNA
atgctgaaaaaaatttctgttggggtagccggtgacttaaacactgtcaccatgaagcttggctgcgtgctcatggcctgggctctgtatctttccctaggtgtcttatgggtcgctcaaatgttgctcggcgcctcatccagtgctgctcctcccactctaaatccagccccccaaaaatccgcagcacctggcacggctccagaggaagcacctggcccactgccacccccgcctacaccttcttcagaagaccccgggtttagttcaccacttgggatgccagaccctcatctctaccatcagatgggactgctgttgaagcatatgcaggacgtgagagttttactgggtcatctgcttatggaacttcgcgagctgagcggccaccggaagccaggaacaactaaagctactgccgaatag

SEQ ID NO: 13907 - RNA, 2886 nt, synthetic construct
  misc_feature 1..2886: note = source = /note="Description of Artificial Sequence: Synthetic coding sequence"
  source 1..2886: mol_type = other RNA
atgcttgctccccgtggtgctgcggtgctactactccatcttgtcctgcagagatggctggccgccggtgcccaagcgactccacaggtgttcgacctcttaccatctagctcccagagactaaatcctggggctctcctccccgtcctcaccgatccagcactaaacgacctgtatgttattagtacttttaaacttcagaccaagtcttccgctaccatttttggtctctattcatctacagacaacagtaaatactttgagtttacagtcatgggccggcttaataaggctatattgcggtatctaaaaaacgatgggaaggtgcatctcgtcgtatttaacaatctgcagctggctgacggacgcaggcatcgaatccttttgcgactctctaatctgcagcgcggcgcgggttccttagagctttatctcgattgcatccaggtcgactccgtgcataacttaccacgagcctttgctggaccctcacagaagccagagacaattgagttacgtactttccagaggaaaccccaagattttctggaggagctgaaactggtggtcagaggcagcctgttccaagtggcttctttacaggattgtttcctccagcagtccgagccattggccgccacaggaacaggtgacttcaatagacagttcctagggcagatgacacagcttaatcaacttctgggagaagtgaaagacctattgagacagcaggtgaaggagaccagttttctgcgcaatacaatcgccgagtgtcaggcttgtggcccactgaaatttcaatctccaactccttccacagttgtaccccccgcccctcctgctcccccgactaggccccccaggcgttgcgattcaaatccctgctttagaggcgtgcagtgcaccgattctcgagacggctttcaatgcggtccctgtcccgaaggctataccggcaatggcataacctgcattgacgtcgacgaatgtaaataccatccatgttacccaggagtgcattgcattaatttatcaccgggatttcgctgcgacgcatgtcctgtcggttttactggacccatggtgcagggcgtcggaatctcatttgctaaatccaacaagcaggtatgtactgacatagatgaatgccgcaacggtgcctgtgtgccaaactcgatttgcgtcaacactctcggatcctaccgttgcggcccgtgtaaaccaggatatactggcgatcaaattaggggttgtaaagcagaaaggaactgtcgcaacccggaactaaatccctgctctgtaaatgcccagtgcatagaggaaaggcagggagacgtgacttgtgtgtgtggcgtgggatgggcgggtgatggatacatttgtggaaaggacgttgatatcgatagctaccctgacgaagaactgccttgtagcgctagaaactgtaagaaagacaactgcaaatatgtgcccaatagcggtcaggaggatgcagacagggacggaatcggagatgcatgtgacgaagacgctgatggcgatggcatcctcaatgagcaggacaactgtgttctcatccataatgtggatcagaggaactccgacaaggacatctttggcgacgcttgcgacaactgcctctcggtattgaataacgaccagaaagataccgatggtgatggacggggcgatgcttgtgatgatgatatggatggcgacggaattaaaaatatacttgacaactgccctaagttccctaacagagaccagcgggataaggatggcgacggagttggagacgcatgtgactcctgtcctgatgtctccaaccctaatcaatccgacgtggataacgacctggtgggggactcctgtgacaccaaccaggactctgacggagacgggcaccaagactccaccgataattgccccaccgtcatcaattctgcacagctcgatacagacaaagatggaataggcgacgagtgcgacgatgacgatgataatgacggaattcccgacttagtacccccaggacccgataactgccgattagtgccaaatcctgcccaagaagactccaatagcgatggcgttggggatatttgtgagtcagattttgatcaggaccaagtgatagaccgtatagatgtgtgccctgagaacgctgaagtaacattgactgactttcgcgcataccagaccgttgttctggaccccgaaggagacgctcagattgatcctaattgggtggtcttgaatcaggggatggagatcgtacagaccatgaactctgatcctggcctggccgtaggctacaccgcctttaacggtgtcgactttgaaggaacctttcatgtcaacacgcagacagacgatgactacgctggcttcattttcggctatcaggactcctcctcattttacgtggtcatgtggaaacagacagagcagacctattggcaagcaacaccctttagggcagtggcggagccaggaattcagctcaaagccgtgaaaagcaagaccggccctggagaacacctaaggaactcattgtggcacactggcgacacttcagaccaagtacggctcttgtggaaagattctcggaatgtcgggtggaaagacaaagtcagttatagatggtttctgcagcatcgaccacaggtaggttacattcgagtgcgcttttatgagggaagtgaacttgtagccgatagtggagtgacgatcgacacaactatgaggggtggccggctgggcgtgttttgtttcagccaagagaacattatatggtctaatctgaaataccgctgcaatgatactatcccagaggacttccaagagttccagacacagaattttgaccgatttgacaactag

SEQ ID NO: 13908 - RNA, 300 nt, synthetic construct; identical to SEQ ID NO: 12269
  misc_feature 1..300: note = source = /note="Description of Artificial Sequence: Synthetic coding sequence"
  source 1..300: mol_type = other RNA

SEQ ID NO: 13909 - RNA, 408 nt, synthetic construct
  misc_feature 1..408: note = source = /note="Description of Artificial Sequence: Synthetic coding sequence"
  source 1..408: mol_type = other RNA
atgagccctcacttgactgccttattgggactcgtgctatgccttgcccagaccatccacactcaagaaggcgcactgccgcggcccagtatctctgccgagccgggaacagttatttccccaggaagccacgtcactttcatgtgtagaggaccggtgggagtccagacatttcggcttgagcgtgaggaccgggcgaaatacaaagattcttacaatgttttcaggctcggaccttccgaaagcgaggcaagattccacatcgattctgtttctgaagggaacgcggggctgtacagatgcctctattataaaccaccaggctggtccgagcatagcgatttccttgaactgctggtcaaaggcactgtccccggcacagaagctagtggatttgatgcgccatag

SEQ ID NO: 13910 - RNA, 231 nt, synthetic construct; identical to SEQ ID NO: 12271
  misc_feature 1..231: note = source = /note="Description of Artificial Sequence: Synthetic coding sequence"
  source 1..231: mol_type = other RNA

SEQ ID NO: 13911 - RNA, 684 nt, synthetic construct
  misc_feature 1..684: note = source = /note="Description of Artificial Sequence: Synthetic coding sequence"
  source 1..684: mol_type = other RNA
atgagaggccagggaagaaaagagagcctgagtgacagtcgtgatctggacggatcctacgaccagctaaccgatagtgtggatgacgagttcgaactgagcacggtttgccacaggcccgaaggactggaacaactccaagagcagacaaaatttacaagaaaggaattacaagtgctgtatcgcggatttaaaaacccaggtgcgcttagtttccaggaatgcccaagcggtatcgtgaacgaggaaaacttcaaacagatctatagccagttctttccacagggggacagtagcacatatgctacgttcctgtttaacgcatttgacaccaatcacgacggctccgtttccttcgaagattttgttgccggattgtcagtaattctgaggggcaccgtggacgacagattgaattgggcattcaatctttatgatctgaataaagacggctgtattactaaggaagaaatgctggacattatgaaatccatttacgatatgatgggcaagtatacatacccagcgttacgggaggaagcccctagagaacatgtagaaagttttttccaaaaaatggatcggaacaaggacggggtcgttactattgaggagtttattgagagttgccagaaggacgagaacatcatgaggtcgatgcagttatttgataacgtcatttag

SEQ ID NO: 13912 - RNA, 876 nt, synthetic construct
  misc_feature 1..876: note = source = /note="Description of Artificial Sequence: Synthetic coding sequence"
  source 1..876: mol_type = other RNA
atgatgtcagccactgggccgggaagaaagatgggatccagaggccaagggcttcttctggcttattgcctccttttagcctttgccagtggcctcgtgctgagccgtgtcccgcacgtgcaaggtgagcagcaagagtgggaagggacagaggaattaccatcgcctcctgaccacgccgagagggcagaagaacagcatgagaaataccgaccatcacaggaccagggattgccagctagccgttgtttaagatgctgtgatccgggcacgtcaatgtacccagccaccgccgtcccccagattaacattaccatccttaagggagagaagggagataggggcgaccggggactgcaaggcaagtacggcaaaacgggatcagccggcgccagaggccacacaggaccaaagggacagaagggcagcatgggagcacccggagaaaggtgcaaatctcattacgccgcatttagtgtcggccggaaaaaacctatgcacagcaaccattattaccaaactgtgatctttgacaccgagttcgttaacctgtacgaccactttaacatgtttacaggaaaattctactgctatgtgcctggtctgtattttttctctctcaacgtgcacacatggaaccagaaggagacctacctgcatatcatgaaaaatgaagaggaagtggtcatattgttcgctcaggtaggggacaggtcgatcatgcaaagccaatctctcatgttggagttaagagaacaagatcaagtgtgggtgagactttataagggggaacgcgaaaatgctatcttttcagaggagctcgacacatacataactttttctggctatctcgtcaagcacgccaccgaaccttag

SEQ ID NO: 13913 - RNA, 213 nt, synthetic construct; identical to SEQ ID NO: 12274
  misc_feature 1..213: note = source = /note="Description of Artificial Sequence: Synthetic coding sequence"
  source 1..213: mol_type = other RNA

SEQ ID NO: 13914 - RNA, 402 nt, synthetic construct
  misc_feature 1..402: note = source = /note="Description of Artificial Sequence: Synthetic coding sequence"
  source 1..402: mol_type = other RNA
atgggctcctccggtttgctgagtctcctcgtcctctttgtgctgctagccaatgtgcagggtccaggactgactgattggctgttcccgagaagatgtccaaaaataagggaggaatgcgagttccaggagcgcgacgtgtgcactaaagatagacagtgccaagataataagaaatgctgtgtcttcagctgtggtaagaagtgcttagatctgaagcaggacgtgtgtgagatgcccaaagaaactggtccctgtcttgcttactttctccattggtggtacgataaaaaagataatacttgctcaatgttcgtctacgggggatgtcaaggtaacaacaacaacttccaatctaaagccaactgcctcaacacatgcaaaaataaaaggttcccctag

SEQ ID NO: 13915 - RNA, 771 nt, synthetic construct
  misc_feature 1..771: note = source = /note="Description of Artificial Sequence: Synthetic coding sequence"
  source 1..771: mol_type = other RNA
atgttccagaccggaggcctcatcgtcttctatggactgttggcgcagacaatggctcaattcggtggcctgccagttccacttgatcagactctcccactgaacgttaatcctgctctgcccttgtcacctaccggattagccggctccctcactaacgcgttatctaatggtttgctctccggcggactgctcgggatcctggaaaatctcccccttctggatatcctcaagcctggcggcggcactagcgggggcctgttaggcggtttactgggcaaggtgacatcggttatccccggcctcaacaacatcatcgatattaaagtgacagatccccagctcctggaactcggactggttcagagtccagacggacaccggctctacgtgactatacctctaggaattaaactgcaggtcaacacaccattagttggagcatctcttcttagactggcagtaaaattggatataaccgctgagatcctggcagtgagagacaagcaagagaggattcatttggtcctgggagattgtacccatagtcccggtagtcttcagatttcccttctagatggattaggtcccctgcccattcagggtctgttggactcattaactgggatcctgaacaaggttttaccggagcttgtccaagggaacgtgtgccctttagtgaacgaagtcttacgcggattagatatcactcttgtgcacgatattgtcaatatgctaatccacggcctccagtttgtaattaaggtctag

SEQ ID NO: 13916 - RNA, 1386 nt, synthetic construct
  misc_feature 1..1386: note = source = /note="Description of Artificial Sequence: Synthetic coding sequence"
  source 1..1386: mol_type = other RNA
atgtctttagatattcagagccttgacatccagtgtgaagagctaagcgatgctcggtgggctgagctgctccccctgctgcaacagtgtcaggtcgttagactcgacgattgtggccttaccgaggcacgatgcaaggacatatcctccgccctcagggtgaatcctgctttggcagaactgaatttaagatctaatgaactgggcgatgtcggcgttcattgcgtgctgcaagggttacagactccatcctgcaagattcaaaagttatcccttcagaactgttgtctgaccggcgccggatgtggtgtcttatcctccaccttgcgaaccctgccaaccttgcaagagctacacctctcagacaacttactcggggacgccgggctgcagctcctgtgcgaagggttgctggacccccaatgtcgcttagaaaagctgcaacttgaatactgttcattgagtgctgcctcttgcgagccactggccagtgtgctgagagcaaaacctgacttcaaagaactgaccgtatctaataacgacatcaacgaagccggtgtgcgtgtcctgtgtcagggcctgaaagattcgccctgccagttagaggctctgaagttggagagttgcggcgtgacgagcgacaattgccgagatctgtgtggtatagtggcttctaaggcttctctgagggagctggccctgggctctaataagctgggagacgtgggaatggctgaactttgccctggcctgctgcacccatctagcagacttcgaaccctgtggatctgggaatgtggaatcaccgccaagggttgtggcgatctgtgccgcgtcctgagagcaaaagagagtttaaaggaattaagcctggctggcaacgagcttggtgatgaaggagcccgtctgctctgcgagacccttttagaacctggttgtcaattagaatccctgtgggtgaaatcctgtagcttcactgctgcatgttgctcccacttttcctctgtgcttgcccagaatcgcttcctgcttgagcttcagataagcaataataggctggaggacgccggagtgagagagctatgtcagggcctgggccagcccggttccgttctgcgcgtgttatggctcgccgattgtgatgtctcagattcgtcgtgttcaagtttggctgctacgctacttgcaaatcactcacttcgggagcttgatcttagtaataattgtcttggcgatgccggcattctccaactcgttgagtccgtgagacaacctgggtgtctgttggagcaactcgtactctacgatatttattggtctgaggagatggaagacagactgcaggccttagagaaggataaaccatctctgcgcgtaatatcatag

SEQ ID NO: 13917 - RNA, 534 nt, synthetic construct
  misc_feature 1..534: note = source = /note="Description of Artificial Sequence: Synthetic coding sequence"
  source 1..534: mol_type = other RNA
atgaggctgttgatactcacctgtttggttgctgtcgcactagccaggcctaaactccccctgcggtatcctgaacgcctccagaacccgtcagagtcttcagaacccatcccattggaatctcgcgaggaatatatgaacggcatgaatcgccagagaaacatacttcgagagaaacagactgatgaaatcaagaattgtgtcgttgccgaacctgagaagatggaatcttcaatctcctcatcctccgaagagatgtcgttgtctaagtgtgctgagcagttttgcagattgaacgagtataatcaattgcagctgcagaaaatgagtaagcaagagcagatacggagaatgaacgaaaacagccatgttcaagtaccatttcagcaacttaatcaactggccgcctacccttatgccgtgtggtactatccccaaatcatgcagtatgtgcctttccctccttttagcgatatctccaatcccacggcccatgagaactacgagaaaaataatgttatgctccaatggtag

SEQ ID NO: 13918 - RNA, 3054 nt, synthetic construct
  misc_feature 1..3054: note = source = /note="Description of Artificial Sequence: Synthetic coding sequence"
  source 1..3054: mol_type = other RNA
atggatctgatccgtggggtcttgctcaggcttctcctgctcgccagttcacttgggcctggggccgtctcactccgtgccgcaatcaggaaacccggcaaagttggaccacctttggacattaaattgggcgctctcaactgtactgcttttagcattcagtggaaaatgccacgccatccagggtcccccatcctgggctacactgtgttttattctgaagtcggtgccgataaaagtttacaggaacagctgcattccgtgcctttatctcgggatatcccaaccactgaggaagtgatcggcgatttgaagcctggaaccgaataccgagtgtcgatcgcagcttacagtcaggctggcaagggcagactttcctctccacgacacgtaaccacactgagtcaggatagttgccttccccctgccgctccccagcagcctcatgtaatcgtggtgtctgattccgaagttgccctcagctggaagcctggagcatccgaggggtctgccccaatccaatactacagtgttgaattcattcgaccagactttgataagaaatggacaagcattcacgagaggattcaaatggacagtatggtcattaaagggcttgatcccgatactaactaccagtttgccgttagagcgatgaacagccacggaccttctcctcgcagttggccatcagacattatccgtacgttatgccccgaagaggccggctctggtcgatacggcccaagatacattacagatatgggtgctggtgaggatgatgagggctttgaggacgatcttgacttggacattagctttgaggaagtaaagcctttgcctgctaccaaaggaggcaacaaaaaatttctcgtggaatcgaagaagatgtcaatcagcaacccaaaaaccatctcacgtttgattccaccgacatctgcctctctccccgtgaccacagtggcaccgcagccgatccccatccagcgtaagggaaagaatggagtcgcaatcatgagccgcctctttgacatgccttgcgacgaaaccctgtgttcagccgacagcttctgtgttaatgattatacatggggtggctccagatgccagtgcacacttggaaaaggcggtgaaagctgctcagaagatatcgtgatacagtatccccagttcttcggccactcttatgtaacatttgaaccactgaagaactcttaccaggcctttcaaatcactcttgaatttagagcagaagccgaagacggcctcctgttgtactgtggcgaaaacgagcacgggcgcggagatttcatgtcactggccattattagaagaagccttcagtttaggtttaactgcggtactggagtcgctataattgtgtctgagactaagattaagctgggagggtggcacaccgtgatgctttacagagatggactgaacggattattacagctaaacaatggtactcctgtgactggccagagtcaggggcagtacagcaagattacctttcgaacacccttgtatctgggaggggcaccttcggcatattggttggtaagggcaaccggaacaaatcgtggatttcaaggatgtgtgcaatccctagcagtgaacggaagacgtatcgatatgcggccttggcccttgggaaaggcgctgagcggcgctgacgtaggagaatgttctagtggcatctgcgatgaggcgtcgtgcatacacggggggacttgtaccgctatcaaagctgactcttatatatgcctgtgtcctctgggattcaaaggacgtcattgtgaagacgcatttaccctaaccatacctcagttcagggagagccttagatcctacgcagccactccatggcctctggagccacagcattatctgtccttcatggagttcgaaattacatttaggccggacagcggggacggcgttctcttatattcctacgacaccgggtccaaagactttctttcaattaacttagcgggaggtcacgtggagtttcgattcgattgtggcagtggtaccggcgtattacgctcagaggatccccttacactgggcaactggcacgagttacgagtctcacgcacagcaaagaacggaattctgcaggtggataaacagaaaattgtggaaggaatggcagaaggcggttttactcaaatcaagtgtaatacagacattttcattggcggtgtcccgaattacgacgacgtgaagaagaactcaggtgttttaaaaccattttccggctctatacagaaaattatcctaaatgatcggactatccatgtaaaacatgatttcacatccggagtgaacgtggaaaacgcggcccacccctgcgtgcgcgctccctgtgcccatggcggaagctgccgccctaggaaggagggttatgactgcgactgtccactaggattcgaaggcctgcactgtcaaaaggaatgcggcaactactgtcttaacacaataatcgaggctatcgagattccccaattcattgggcgctcatatttgacctacgacaaccctgacatacttaagcgcgtgagtgggtcacgctcaaatgtatttatgagattcaagacaactgcaaaagacgggcttctgttgtggcggggagattcccccatgcgtcctaattcagacttcattagccttggtttgcgcgacggagccctggtgtttagttacaatctcggcagcggagtggcaagtataatggtcaatggcagctttaacgacgggaggtggcatagagtgaaggctgtgcgcgatgggcaatcagggaagattacggtggacgattatggggctcggaccggcaaatccccaggaatgatgcgacaactcaacattaacggtgcattatacgtcggagggatgaaagaaattgctctgcacacaaacagacagtacatgcgcggcctggtcggttgcatctcccatttcacgctatcaacagattaccacatttcacttgttgaagatgcggttgatgggaaaaatataaacacatgtggagctaaatag

SEQ ID NO: 13919 - RNA, 1893 nt, synthetic construct
  misc_feature 1..1893: note = source = /note="Description of Artificial Sequence: Synthetic coding sequence"
  source 1..1893: mol_type = other RNA
atgcagcaggacggcttgggcgtgggcacaaggaatgggtccgggaaaggtcggagtgtgcatccatcatggccatggtgtgcccccagacctttacggtattttggaagagacgcacgagctcgaagagcacagacagcagctatggccctgttggccggtggtctctccaggggacttggtagtcatcccgcagctgcaggtcgcgatgcagtggtctttgtttggcttttgctgagtacctggtgcactgcaccagcccgcgccatccaggtcacggtgtcaaatccataccatgtcgtaattctttttcaacccgtcacactcccatgtacctatcaaatgacatccactcctacacagcctattgtgatttggaagtacaagtcattttgcagagatcggattgcggatgcgttctctcccgcttcagtagacaatcagttaaacgcccagttggccgccggaaaccctggatacaacccatacgtggagtgccaggattcggtgagaacagttcgcgtggtcgccactaaacaggggaacgcagtgacactgggggattactaccagggccggcgaatcaccattacaggtaatgctgacctcacattcgaccagaccgcatggggggattctggagtttattactgtagtgtggtgtccgctcaagatctacaaggtaacaacgaagcctacgctgaacttatcgtgcttgactggctctttgtggtggtcgtttgcctcgctgcattccttatcttcctcctgctaggaatttgctggtgtcagtgttgtcctcacacctgctgctgctacgtccgatgtccgtgttgcccagataagtgttgctgccctgaagctctctacgctgccgggaaagctgcaacaagtggtgttccatctatctatgccccaagtacctacgctcacctttcacctgccaaaacaccacctccacccgccatgattccgatgggcccagcttataatggataccctggcggctaccccggagacgtggatcgcagttcctcagccggtggacaagggagttatgttcctctcctccgggacacagacagctctgtggcgtccgaagtcaggagtggctatcggattcaggccagccaacaagatgacagtatgcgtgttctgtattatatggaaaaggaattagcaaattttgacccttcacgtcctggcccaccctctggtagagttgaacgagcgatgtcagaggtgactagtctccatgaagatgactggcgatctagaccatcacgaggacccgcactcactccaatccgcgacgaggagtggggtggccactcacccaggtctccccggggatgggaccaagaacctgcccgagagcaagctggagggggatggagagccagacgacctcgagcaaggagtgtcgacgccttagacgacctgaccccaccttcaaccgccgagtcgggatcgcgctcccctacctccaatgggggacgatcccgggcatacatgccccccaggagccgcagccgagacgacttatacgatcaagacgattcacgagattttcctagatccagagacccccactacgacgattttagatcccgtgagcggccccccgcagatccacggtcccatcatcaccgcacccgtgaccccagagacaacggctccagatcgggcgacctcccttacgatggaagacttctcgaagaggccgtcagaaagaaaggatctgaggagaggcgaagacctcataaggaggaggaggaagaagcttactacccccctgccccacccccttatagtgaaaccgacagtcaagcaagcagagagcggcggctaaagaaaaacctcgccctaagtcgcgaaagtttagttgtgtag

SEQ ID NO: 13920 - RNA, 750 nt, synthetic construct
  misc_feature 1..750: note = source = /note="Description of Artificial Sequence: Synthetic coding sequence"
  source 1..750: mol_type = other RNA
atgttgcagttatggaaactggtactattgtgcggcgttctaaccggtacatccgaaagtttgctcgataatcttggaaatgacttgtcaaacgtggtagacaagctggaacccgtgctccacgaaggtctcgagaccgttgacaacactttaaagggaatcttggagaaactaaaagtagatctgggagtgctccagaaaagctccgcatggcaattggccaagcaaaaagcacaggaagccgaaaagttgctcaacaacgtgatatctaagctacttcccaccaatacagacatttttggactgaagataagtaattccctgatcctagatgtcaaagccgaacctatcgacgacggcaaaggactgaatctgagttttcctgtaaccgccaacgttaccgttgcagggcctatcattggacaaatcattaatcttaaagcctctcttgatttgttgacggctgtcacaatagagaccgaccctcaaactcatcaaccagtcgctgtgctgggagagtgcgcttcagacccgacaagtatctctctctctttgttggacaagcacagtcaaatcattaacaagtttgtcaacagcgtaatcaacactttaaaatccactgtttcttctctcttacaaaaagaaatttgccctctgatccgcatcttcattcacagtctggacgttaacgtcatccagcaagtcgtcgacaatcctcagcacaagacccagctgcaaactctgatatag

SEQ ID NO: 13921 - RNA, 3057 nt, synthetic construct
  misc_feature 1..3057: note = source = /note="Description of Artificial Sequence: Synthetic coding sequence"
  source 1..3057: mol_type = other RNA
atggtaagtcacttcatgggatcacttagtgtgctatgctttcttcttctgctcggtttccagttcgtgtgccctcagccatcaacacagcatagaaaggtcccacaacggatggcagccgaaggagctccagaagatgatggcggcgggggggctccaggtgtctggggagcatgggggccctggtccgcgtgttctcgctcatgtagtggcggggtgatggagcagactaggccctgcttgcctcgatcatacagactgcggggcggtcagcgaccgggtgctccggccagagcttttgccgaccacgttgtctcagccgttcggacctccgttccacttcacaggtctcgcgacgaaacaccagccctggcagggacagacgcatctagacagggccctaccgtgctccggggctcaagacatccccaaccccaaggccttgaagtcaccggcgacagacgctcacggacaaggggaaccatcggccccgggaagtatgggtatggcaaagccccgtatatcctgcccctacagaccgataccgcccacaccccacagcgactcagacgccaaaaattgtcctcgcgacacagtaggtcccagggagcgagttcagcacggcacgggtactcttcacccgcccatcaagtgcctcagcatggacccttatatcagagcgactcaggtccacggagtggtcttcaagccgcggaagcccctatttatcagctgcctctgacgcacgatcaaggttatccggctgcctcttccctcttccattccccagaaacaagcaataatcacggtgttgggactcacggtgccacccaatccttcagtcagcccgcccgcagcaccgcaatctcttgtatcggagcatacaggcagtacaaactttgtaacacgaacgtatgtccagagagcagtagaagcatacgcgaagtccagtgcgcctcctacaataacaaaccatttatggggcgattttatgaatgggaacctttcgccgaggtaaaggggaatagaaagtgtgaactcaactgtcaggccatgggctataggttttatgtgcgccaggcggagaaagtcatcgatgggaccccatgtgaccaaaacggtactgccatttgtgttagcggacagtgtaagagcatagggtgtgatgactacttaggtagcgataaggtggttgataagtgcggtgtgtgtggcggagacaacaccggctgtcaagtggtatccggcgtatttaaacatgccctgacaagtttaggctatcatagagtcgtggagattcccgaaggtgcaacaaaaatcaacattaccgaaatgtacaagtctaataattatctggctttgaggagccgaagcggacgtagcatcattaatggaaattgggcgatcgacagaccgggaaagtacgagggggggggaacaatgtttacatataaacgtcctaatgaaatcagctcgaccgctggagaaagcttcttggccgagggccccacgaacgagatactagacgtatacatgattcaccagcaaccaaaccccggcgtacattatgagtacgtgatcatgggaaccaacgcaatctctccacaggtaccccctcacagaaggccaggcgaaccctttaatggacagatggtgactgaaggaaggagccaggaagaaggcgagcagaaaggccgcaatgaagaaaaagaagacttgcgcggtgaggctcccgagatgttcaccagcgaatcagcacaaacatttcctgtgcgccaccccgaccgtttttctcctcaccgccctgataatctagtaccacccgctccacagccaccaaggaggtcgcgggatcataattggaagcagttagggacaaccgagtgttctactacctgcgggaagggaagccagtaccccatatttagatgcgttcatcgctcaactcatgaggaagccccagaatcatattgtgattcctcgatgaaacccacacccgaagaggagccctgtaacatttttccttgccccgcgttctgggatattggagagtggtccgagtgctcaaaaacatgtggtctgggcatgcaacatcgacaggttctttgccgacaagtgtatgccaataggtccttaaccgtgcagccttatagatgccagcacctggaaaaacccgaaaccacaagcacttgccaacttaaaatttgctccgagtggcagattagaacggactggacctcctgttcagtaccatgcggggtggggcaacgcacaagagacgtgaaatgcgtgagcaacatcggagatgtcgtagatgacgaggaatgcaatatgaaactgagacccaatgatattgagaattgcgacatgggaccctgcgcgaaatcatggttcttgactgagtggagtgagcggtgtagtgccgagtgcggagccggtgtgcgaacacggtccgtggtgtgtatgactaaccatgtctcttccttgcctctcgaggggtgcggaaacaaccgacccgccgaagctactccctgcgataacggcccctgtactggcaaggtcgaatggtttgcgggatcttggtctcaatgctccatcgagtgcggttccggtacacagcagcgcgaagtgatttgcgtgaggaagaatgccgatacattcgaggttctcgatccttctgaatgtagtttcttagagaaaccgccctcacaacaatcctgtcatctgaaaccatgcggcgctaagtggttttccactgaatggtctatgtgctccaaaagctgccagggaggatttagggtgagagaagttcgatgtctatctgacgatatgactctgtctaacctgtgtgacccacaactaaaaccagaggagagggagtcctgtaatccccaggattgtgtgcctgaggtcgatgagaattgcaaagacaaatattataattgtaacgttgtggtacaggcccgtctctgcgtctataactattacaaaactgcatgctgcgcttcatgcacccgagtagcaaaccggcagacagggtttctgggtagtcgttag

SEQ ID NO: 13922 - RNA, 1311 nt, synthetic construct
  misc_feature 1..1311: note = source = /note="Description of Artificial Sequence: Synthetic coding sequence"
  source 1..1311: mol_type = other RNA
atgcagggcactcccggcggcggaacccgacctggacctagccctgtcgatagacgcacattactcgtcttctcattcatcctcgcagctgcgctggggcagatgaatttcactggagatcaggtgttgcgggtgttggctaaagacgagaagcaactcagcctacttggcgacctcgagggcctcaaaccccagaaggtggatttttggcgtggcccagctcggccttctctgcctgtcgacatgcgggttcccttttcagaattgaaagacatcaaagcctaccttgaatcacacggtctggcatattccatcatgatcaaagacatccaagtcctgttggatgaagagagacaagccatggccaagtctcgtcggctggaaagatctaccaattcatttagctactcaagttaccacacattagaggaaatttacagttggatcgataacttcgttatggagcactctgatatagttagtaagatacaaataggcaacagtttcgagaatcagtctatcttggttctgaagttttctacaggcggatcaagacaccccgccatttggattgacaccggtattcacagtagggagtggattactcatgcgacaggaatttggacagctaacaaaattgtgagcgactacggcaaagaccgcgttttaacggacatcttaaacgcgatggatatcttcattgagcttgtgactaaccctgacggcttcgcattcacccactctatgaatcgtctatggcgcaagaacaaaagcatccgacctggcattttttgtatcggcgtagacctaaatcgcaattggaagtccggttttggcggcaacggaagtaactctaatccttgctcagagacatatcatggcccctcaccacagtctgaacctgaagtggctgcaatcgttaatttcattaccgcccacgggaattttaaagctctgatcagtatccactcctactcccaaatgctcatgtacccctacggtaggctactggagcccgtttccaaccagcgcgaactgtatgatctggccaaggatgccgttgaagcactctataaggtgcacgggattgaatatatcttcggctccatctcaaccaccctgtatgtcgccagcggcattaccgttgactgggcctacgattccgggatcaaatatgccttctcattcgagttgcgggataccggacagtacggcttcctactccctgcgacccaaattattccgacagctcaagaaacatggatggctcttcgcaccataatggaacacacactgaaccacccttattag

SEQ ID NO: 13923 - RNA, 492 nt, synthetic construct
  misc_feature 1..492: note = source = /note="Description of Artificial Sequence: Synthetic coding sequence"
  source 1..492: mol_type = other RNA
atgtttcagggtctgcttctcctccttctcctttctatggggggaacctgggcatcaaaggagcctttaagaccaagatgtcgtcctattaatgccacacttgcggttgaaaaggagggatgccccgtgtgcataacggtaaatacaacaatttgcgccggctactgtcctaccatgacccgtgttctgcagggcgtgttgcctgcccttcctcaggtcgtgtgcaattatagggatgtacggtttgagagcatccgtcttcctggctgtcccagaggtgtaaacccggtggtgagttatgccgtcgcactttcctgccaatgcgccctatgccggcgatctaccaccgattgcggcggccccaaagatcacccacttacctgcgatgaccctagatttcaagattcttcctcctccaaggctcccccaccatctctgccttcaccatccaggctccctggaccaagcgacactccaatcctgcctcagtag

SEQ ID NO: 13924 - RNA, 213 nt, synthetic construct; identical to SEQ ID NO: 12285
  misc_feature 1..213: note = source = /note="Description of Artificial Sequence: Synthetic coding sequence"
  source 1..213: mol_type = other RNA

SEQ ID NO: 13925 - RNA, 1098 nt, synthetic construct
  misc_feature 1..1098: note = source = /note="Description of Artificial Sequence: Synthetic coding sequence"
  source 1..1098: mol_type = other RNA
atgtggctgctcctaacaatggcctccttgatctccgtgttgggaactactcatggcttgttcggaaaattgcacccaggctcacccgaggtcaccatgaacattagtcagatgatcacttactggggttatcccaacgaagaatatgaggtggtgacggaggatgggtatattttagaagtgaatagaatcccttatggcaagaaaaatagtgggaataccgatgccggatatgatgtgtggctgggcaacagcagagggaacacatgggcacgacgaaatctgtactactcgcctgactcagtggaattttgggcttttagtttcgacgaaatggctaaatacgatctccccgcaaccatcgacttcattgttaaaaagacgggccagaagcagcttcattacgtcggccattcccagggcaccaccatcggattcatagcatttagcactaatccgtctctggcaaaaagaatcaaaacattttacgcattggcacccgtggccacagtcaagtacactaaatcattgataaacaaactcagattcgttccgcaatccctgttcaagttcatttttggtgacaaaatcttctatccacataatttttttgaccaattcctagctaccgaggtgtgcagccgtgaaatgctaaaccttctctgctcgaatgccctcttcatcatttgtggattcgattctaaaaactttaatacctccaggctggacgtgtatttgtcacataatcccgctggaacttccgtgcagaatatgttccactggacccaggctgtcaagtccggtaaattccaggcctatgattgggggtctcccgttcagaataggatgcattacgatcagagccaacctccctattataatgtgactgcaatgaatgtgccaattgccgtttggaatgggggaaaggatttacttgccgaccctcaagatgttgggctactcttacctaaactgccaaatcttatttaccacaaggagatacccttctacaaccacttagactttatctgggctatggatgctccacaggaggtgtacaatgacattgtcagcatgatcagtgaagataagaagtag

SEQ ID NO: 13926 - RNA, 2535 nt, synthetic construct
  misc_feature 1..2535: note = source = /note="Description of Artificial Sequence: Synthetic coding sequence"
  source 1..2535: mol_type = other RNA
atgggcccaggggccccttttgcccgggtgggttggccactgcctcttctagttgtgatggccgctggcgtcgcacccgtttgggctagccactcaccccacctgcctagacctcactcacgcgtaccgccacacccaagttccgaacgaagggctgtgtacattggggcactgttcccaatgtctggaggatggccgggaggacaggcctgtcagcctgctgttgaaatggccctggaggatgtcaacagtcgacgggatatactgcctgactatgagctcaaacttatacatcatgacagcaagtgcgatccggggcaggctaccaaatacttgtacgagctactttacaacgatccaatcaaaattatccttatgccaggctgcagtagtgtctcgacccttgtagcggaggctgcacgtatgtggaaccttattgtgcttagttatggatctagcagccctgctctaagtaatagacagcgattcccaacattctttcgaactcacccatctgccacactccacaatcctacaagagtgaaactctttgagaaatgggggtggaaaaaaattgcgacaattcaacagaccacagaggttttcacctcaacgctagacgatttggaggaacgtgtaaaggaagccgggattgagatcacattccgccagagtttctttagcgaccccgccgtgcccgttaaaaatctgaagcgtcaggatgctaggattatcgttggtttattctatgaaaccgaggcaaggaaggtgttctgcgaagtgtacaaagaaaggctttttggaaaaaaatatgtgtggtttctgattggttggtatgcagataactggttcaagatctatgatccatccataaattgtaccgtagacgaaatgactgaggcagtggagggacacatcaccacagaaattgtgatgttaaatccagctaacacccgttccatttctaatatgacctcacaggaattcgttgaaaaacttacaaagcggctgaagagacatcccgaagagacaggaggtttccaagaggctcccctggcttatgacgccatctgggcactggcactggcactcaataagacgtcgggagggggtggccgtagtggggtaaggctagaggactttaattataataaccagaccattactgaccaaatctaccgcgccatgaatagtagctctttcgaaggcgtgtccggccacgtcgtgttcgacgcttccggcagtagaatggcttggacactgatcgagcagttgcagggaggcagttacaagaaaatcggctactacgattctaccaaggacgacctatcatggagcaagacagataagtggattggtggttccccgcccgcggaccaaactcttgtcatcaaaacttttagattcctgtctcagaaactttttatttccgtgtcagttctcagtagcctcgggatagtactggccgtagtctgtctgagtttcaacatttataactcccacgtacggtatatccagaactcacaaccaaacctgaataacctgaccgccgtaggctgcagcctggcactggccgctgtttttccacttgggttggatggctatcacattggcagaaatcaatttccattcgtttgccaagctcggctatggctgctggggctagggttctctctcggctatgggtctatgtttacaaaaatttggtgggtgcatactgtgtttacaaagaaagaagagaagaaggagtggagaaagacactagagccctggaaactctacgccaccgtaggactactggtgggaatggacgtattgacattagcaatctggcaaattgtcgatcctctgcacagaactattgaaacttttgccaaggaggaacctaaagaggacatcgacgtgagcatcctgccacagctcgaacactgtagttctagaaagatgaacacatggttagggatattttatggctataagggactcctattgctgttgggtatattcctggcttacgagacaaagtccgtgtcaaccgagaaaattaacgatcatagggctgtcgggatggcaatctacaacgtggcggttctctgtctcatcactgctcccgtcaccatgattctgtcatcccagcaggatgccgcttttgccttcgcaagtctggccatcgtattctcctcctacattaccctggtagtcctgtttgtaccaaagatgagaaggctcatcacccgaggcgagtggcagagcgaggcgcaggataccatgaaaacagggtcatctacgaacaacaatgaagaagaaaaaagtaggctattggaaaaagagaacagagagttagaaaaaataattgctgaaaaagaagaacgcgtgtcagaactcagacaccaattacaatctcgtcagcagcttcgatcccgccgccacccaccaacgccccctgagccttccggaggacttccacggggcccacctgagcctcccgacagactttcctgtgatggcagccgcgtacatctactgtacaagtag

SEQ ID NO: 13927 - RNA, 1020 nt, synthetic construct
  misc_feature 1..1020: note = source = /note="Description of Artificial Sequence: Synthetic coding sequence"
  source 1..1020: mol_type = other RNA
atggtatcaaaatccagatggaaattgctagccatgctcgcgcttgttctggtggtaatggtgtggtactcaatcagtcgagaggatcggtatatcgagctgttctacttccccattcccgagaaaaaggagccctgtctacaaggcgaggccgaatccaaggccagcaaactgtttggcaaactgtcaccactatgtagttactcacgggatcagcctatctttctgagattggaagattacttttgggtcaaaaccccctctgcctacgagctcccgtacggcaccaaaggctctgaagacctcctgctgagggtgctcgctattacgagttcatcgattccaaagaacatccagtcgttacggtgtaggcgttgtgtcgtagtaggtaacgggcaccgcttgcgaaactcatccctgggcgatgctataaataaatacgacgttgtgatcagactgaacaatgcacctgttgccggttacgagggagatgtaggatcaaaaacaactatgaggctgttttacccggaatccgctcatttcgatcctaaggttgagaacaatccagatactctgctggtcctggtcgcttttaaggcgatggacttccattggattgagacaattctgtccgataagaagagagtccgcaagggcttttggaaacagccacccctgatttgggacgtgaaccccaagcagattagaatcctgaacccttttttcatggaaattgccgccgacaagttactgagcctcccaatgcaacaacctcgaaaaatcaagcaaaaacccaccaccggactcttggccatcacgctggcgcttcacttatgtgatctcgtgcacattgccgggttcggctaccccgatgcatataataagaaacagactattcactactacgaacaaatcactttaaagagcatggcaggctccggccacaacgtttcccaagaggccctcgccatcaaacggatgttagaaatgggcgccatcaagaatctaacctcattttag

SEQ ID NO: 13928 - RNA, 1386 nt, synthetic construct
  misc_feature 1..1386: note = source = /note="Description of Artificial Sequence: Synthetic coding sequence"
  source 1..1386: mol_type = other RNA
atgtcacttgatatacaaagtttagatattcagtgtgaagagctttccgatgcccgatgggccgaacttcttcctctacttcagcagtgccaggttgtgcggttggacgactgtggactgactgaggctcgctgtaaagacatatcttccgccctcagggtgaacccggccctggccgaactgaatctcagatcgaatgagcttggcgacgtgggggtccactgtgtccttcagggcctgcagacgccatcttgcaaaatccagaaactctccttgcagaattgctgcctaacaggagctggatgcggagttctttcttctaccctccgaacactgccaacgctgcaggagctgcatctgtctgacaatttgctaggggacgccggactccagctgctttgcgaaggcctgcttgatcctcagtgcagactggaaaaattgcaattagagtactgctcattatctgccgccagctgcgaaccacttgcctcagtgcttagagccaagccagattttaaagagctcacagtctccaacaacgatatcaacgaggcaggggtgcgagttctctgtcagggattgaaagactctccatgccagctggaggctcttaaattagagagctgtggtgtcacctccgataattgtagggacctgtgtggcattgtggcaagtaaagcctctctgcgagaattggcgctcggttcaaacaagctgggggacgttggaatggccgaactctgtccaggacttctgcatccttccagcaggctgagaaccctctggatttgggagtgtggcatcactgctaaagggtgtggcgacttatgtagggtcctgagagctaaagaaagtcttaaagaactctcactcgctggaaatgaactgggagacgaaggtgcacgactgttatgcgagacgcttttggaacccgggtgccagcttgagtcactttgggttaaatcatgctcattcactgccgcttgctgttctcattttagctccgtcctggcacagaaccgattcttactcgaactacagatttctaacaaccggctggaggacgccggtgtgcgcgaactctgccaagggcttggtcagccagggagtgtactgagagtgctttggcttgctgactgcgacgtgtctgactcctcatgtagcagcctcgcagctactctcctggctaatcattctctcagagaactggacctgtcgaataactgtcttggagacgcaggcatattgcagctcgtggaatctgtgcgacaacctggctgccttcttgaacagttagtcctctacgatatctactggagcgaagagatggaggaccgactgcaggcattggagaaagacaaaccttctttacgcgtaatatcatag

SEQ ID NO: 13929 - RNA, 1695 nt, synthetic construct
  misc_feature 1..1695: note = source = /note="Description of Artificial Sequence: Synthetic coding sequence"
  source 1..1695: mol_type = other RNA
atggcacccaagaagctctcttgtctaaggtccctattgttgcccctgtcactgaccctcctactgccccaagccgatacacgatcttttgtggtagaccgcgggcacgaccgttttctcctggacggtgcaccttttagatacgtctccggaagtctccactacttcagagttccaagagttctgtgggcagaccggttgctgaaaatgcgttggtcaggccttaatgccatccagttttatgtcccatggaattaccacgagccgcagcctggggtatataactttaacggatcccgcgatctgattgccttcctcaacgaggccgctctagctaatctgttggtaatattacggcctggtccttatatctgtgcagaatgggagatgggcgggctacctagctggctactacgtaaaccagagatccatcttaggacaagcgaccctgcagacaatatgacaaaaatatttacactactccgcaaatatgaaccacacggacctctagtaaattcagaatactatacaggctggctcgattactggggtcagaatcattcgacgagatctgtatcggcagtcacaaaggggctggagaacatgttgaagcttggcgcctccgtcaatatgtatatgtttcacggtgggaccaactttggttattggaatggggctgataagaagggacgctttctacccattactacatcctacgactacgatgccccgattagcgaagccggagacccaacccccaaactcttcgcgctgcgagacgtgatttcaaaatttcaggaagttcctttgggacctctaccccccccttccccgaaaatgatgttaggacctgttactctgcatctagtggggcacctgcttgcatttctggaccttctctgtcccaggggtccaatacattcaatccttcctatgacatttgaagctgttaaacaagatcacgggtttatgctgtacagaacctacatgacccatacaatattcgaacccacaccattttgggtgcccaacaacggagtgcatgacagagcctacgtgatggtggacggtgtgtttcagggggtggtcgaaaggaacatgcgtgataagttatttctgacgggtaaattaggcagcaagctcgacatcttagtagaaaacatgggaaggctctcctttggctcgaattcatctgattttaagggcctgctgaaaccccctatccttggacagactattctaactcagtggatgatgtttcccctcaaaatcgataacctggttaaatggtggttccctttacaattgcctaaatggccttacccacaagcacccagcggtccaacgttttactccaagacattccctatactgggctctgttggcgataccttcctttacctgcccggatggacaaagggtcaggtctggattaacgggttcaacttaggaagatattggactaaacaggggccccagcagacgttgtatgttcctaggtttctgctgtttccccgaggagctctgaataagatcactcttctagagttggaagatgtacccttacagccacaggttcaattccttgacaagcctattctgaatagcacctccacacttcaccgcacacatattaactcactatctgctgacacactgtccgccagtgaacccatggagctgtcaggacactag

SEQ ID NO: 13930 - RNA, 1317 nt, synthetic construct
  misc_feature 1..1317: note = source = /note="Description of Artificial Sequence: Synthetic coding sequence"
  source 1..1317: mol_type = other RNA
atgatgtatgcgccagtggagtttagcgaagctgagtttagtcgtgccgagtaccagcgcaaacagcagttctgggactccgttagattggcactgttcacactcgcaatcgtggcaattattgggatagcaatcggaatcgtcacccactttgtggtcgaggacgataagagcttttattaccttgcatcgttcaaggtcactaatataaaatacaaagagaattacggcattcggtcatcaagagaatttatagaacgcagtcatcagatcgagcggatgatgtcaaggatatttcggcattcctccgtgggcgggcggtttatcaagtctcatgttataaagctgtcaccagacgaacagggtgtcgacattctgattgtactcatctttcgctatccttccactgactctgccgagcaaattaaaaaaaaaatcgaaaaagctttataccagtctctgaagaccaagcaactgtccctaaccataaacaaaccctctttccgccttactcctattgactctaaaaaaatgcgaaacctgctgaattccagatgcggaattcgaatgacctcatcaaacatgccactcccagcatcttcttcaacacagaggattgttcagggacgggagactgctatggaaggggaatggccatggcaggcaagtctgcagctcattggctccggccaccagtgcggtgcttcacttatctccaacacatggctactcacagcagctcactgtttttggaagaacaaagatcctacccagtggatcgcaacctttggcgctacaattaccccaccagccgtaaaaagaaatgtccgtaagattatccttcacgaaaattaccaccgagagactaacgagaacgacatcgccctggtacagctgagtactggcgtggaattctctaatatcgttcaacgtgtatgcttgcccgactcaagcatcaaactacctcctaagaccagcgtgtttgtaaccgggtttggcagcatagtggatgatggacctatccagaatacactccgtcaggcaagggttgagaccataagcaccgatgtgtgcaatagaaaggacgtttacgacggactgattaccccagggatgttatgtgcaggatttatggaagggaaaatcgatgcttgtaaaggggatagtggtggacctttggtgtatgacaatcatgatatttggtacatcgtcggaattgtgagctggggccagagctgtgccctgcctaagaagccaggagtctacactcgcgttacaaagtatagggattggattgcctcaaagacaggaatgtag

SEQ ID NO: 13931 - RNA, 4392 nt, synthetic construct
  misc_feature 1..4392: note = source = /note="Description of Artificial Sequence: Synthetic coding sequence"
  source 1..4392: mol_type = other RNA
atggaacctagactcttctgttggaccacattatttctgcttgccggctggtgtctcccgggtctcccatgcccttcccgctgtctgtgcttcaagtcaaccgtcaggtgtatgcatctgatgttagaccacattcctcaagtgcctcagcaaaccacagtccttgaccttcgttttaatcgcattcgggaaatccctggttcagcttttaaaaagctcaaaaatttgaacaccctgttactgaataataatcatattagaaagattagtcgcaacgccttcgaaggcttagaaaatcttctgtatctgtatctatataagaacgaaatccacgctctcgacaaacagactttcaagggactgataagtctcgagcatttatacatccacttcaaccaactggagatgttgcagcccgaaactttcggagacctcctgagactcgaacgcctctttctgcacaacaataaactttccaaaatcccagcaggcagcttctccaatcttgacagcctgaagagactgcgccttgatagtaacgctctcgtttgcgactgtgatctgatgtggctgggtgagttactccaggggtttgcacaacacggccatacacaagccgccgctacttgcgagtacccacggagattgcatggcagagctgttgccagcgtgactgtcgaggagttcaattgtcaatccccgcgtatcacctttgagccacaggacgttgaggtccccagcggcaacactgtgtacttcacttgcagggcagaaggtaaccctaagccagaaataatatggatacataacaaccattccctggatctggaagatgataccagacttaacgtattcgatgatgggactctcatgattagaaatacacgcgaatccgaccagggtgtctatcaatgcatggctagaaattcagccggagaagcaaaaacccagtcagcaatgctccgctattcatcactgcccgccaaaccttcttttgttatccaaccccaggacacagaggttctgattgggacaagcactacactggaatgcatggcaactggacacccccacccattgatcacatggactagggataacggtctggagttagatgggagtcggcacgtggcaacgagttctggcctgtacctgcagaatattacacaaagggaccatggacggtttacgtgtcatgcaaacaattcgcacggaaccgtacaagcagcagcgaatattatagttcaagcacccccccagtttacagtaaccccaaaggatcaggttgtcttggaggagcatgcagtggagtggctgtgtgaggctgatggaaaccctcctcccgtcattgtctggacgaaaacaggcggtcagctccccgtcgaaggtcaacataccgttctctcgtctggcactctgcgcattgatcgagctgctcagcatgatcaggggcaatacgagtgccaagcagtgagttctctcggtgtaaaaaaagtgtctgtgcagttaacagtaaagcctaaggcactcgccgtgtttacacagctaccacaggatacctccgtagaagtcggaaagaacattaacatttcatgccatgcgcagggggagccacagccaattatcacctggaacaaggaaggcgtgcagataactgaatctggaaaattccacgtggacgacgaagggacactcacaatttacgacgccggttttccagatcagggacggtatgagtgcgtcgcacgtaatagctttggacttgctgttaccaatatgttcctcacagttaccgccattcagggtaggcaagctggggatgacttcgttgaatcctcaattctcgatgcagtccaacgagttgacagcgccattaactccacccggaggcacctcttttctcagaaaccacatacatctagtgatctgcttgcacaattccattacccccgggacccactgattgttgagatggctagagccggcgagatctttgagcacaccttacagctgattcgtgagagagtgaagcagggcctcaccgtcgacctggaaggaaaagaattcagatacaatgacctagtgtcaccgcgatcattaagtctgattgctaacctctcaggatgtacagcacggcgtccgctcccaaactgctcaaaccgctgtttccatgcaaaatacagagcacacgatggcacttgtaacaatctacaacagccaacttggggcgctgcgctcactgccttcgcacggttacttcagcctgcttaccgcgacggaattcgggctccacggggtctaggcttaccagtgggatcccgacagcctctccctcccccccgtctggtcgccaccgtatgggctagagccgcagcagtcacgcccgaccattcatataccagaatgctaatgcactggggatggtttctcgagcatgacttagaccataccgtgcctgcactctctacagcgagattttccgatggccgaccttgttccagcgtttgcacaaatgacccaccctgctttcccatgaacactcgccacgccgaccccagaggtacccacgcaccgtgcatgctgttcgccaggtcttccccggcatgcgcaagcggcaggccttcagctacagtagacagcgtctacgccagggagcaaattaaccagcagacagcatacatcgacggaagcaatgtttatgggagctcagaacgggaaagccaggctctacgtgatcctagcgtcccacgaggcctgttgaaaaccggatttccatggccgcccagcggtaaaccacttttgcctttctcaactggacccccaaccgagtgtgcccgccaggaacaggaaagcccatgctttctagcaggagatcacagagccaacgagcatctcgcactggccgctatgcacaccttatggtttagagaacataaccgtatggctacagagctcagcgccctcaaccctcactgggagggaaacactgtttatcaagaagctcggaagattgtcggcgctgaactgcagcacattacctacagtcattggctgccaaaagtactgggggacccaggtaccagaatgctccggggctaccgcggttataaccccaatgtgaacgcaggtatcataaacagtttcgcaacggctgctttcaggttcggccacacactaatcaatcccatactttatcgactaaatgcgaccctgggcgaaatctctgaaggacacctgccatttcataaagcactgttctctcccagccggattattaaggagggtggtattgaccctgtgttaagaggactgttcggcgtcgcagccaagtggagagcaccgtcctacttactatctcctgagctgacacaacggctgttctcagccgcgtatagtgctgccgtggactctgccgctaccatcattcaacgaggaagagaccacgggatcccaccctatgtggatttccgagtattttgtaacctgacctccgttaagaactttgaagacctgcagaatgaaatcaaggacagcgagataagacagaaattacggaaactgtacggtagccccggtgacattgacctctggccagcccttatggttgaagatctgattccagggacgcgggtgggccccacgctgatgtgcctctttgttacacagtttcagcggttacgcgacggcgaccgattttggtacgagaaccctggagtgtttaccccagcccaactcacccagttaaagcaagccagcctcagccgggtactatgtgacaacggagattcaattcaacaggtgcaggccgatgtctttgtcaaggctgagtacccacaggactatctcaactgtagcgaaatccccaaagttgacttacgagtttggcaagattgttgcgccgactgcagatcgcgcggccaatttagggccgtaactcaagaaagccagaagaaacggtccgcccagtacagttatcccgtcgacaaagacatggaattgagtcacttaagaagccgccagcaggacaaaatttacgtgggagaagatgctagaaatgtgaccgtgcttgccaagactaaatttagccaggacttctcaacattcgccgccgagatccaggagacaataaccgcactccgagagcagatcaacaaacttgaggccagactccgccaggcaggctgtacagacgttagaggagtgccccggaaagctgaggaacgctggatgaaggaagattgtactcactgtatctgcgagtcaggccaggtcacttgtgtcgttgaaatctgtccacctgctccctgtcccagccctgaactggtgaaaggaacatgttgccctgtttgtcgtgatcggggaatgccaagcgatagtccagaaaagcgctag

SEQ ID NO: 13932 - RNA, 1206 nt, synthetic construct
  misc_feature 1..1206: note = source = /note="Description of Artificial Sequence: Synthetic coding sequence"
  source 1..1206: mol_type = other RNA
atggggcttaaagcattatgcttaggccttttatgcgtcttgttcgtcagccatttctacactcccatgcctgataacatagaagaaagttggaagatcatggctctggatgcaatcgccaaaacttgtacatttactgcgatgtgtttcgagaatatgagaattatgagatacgaagagttcatcagtatgatttttagacttgattatacccaaccactgtcagacgagtacatcacagtgacagataccactttcgtcgatatcccagtacggctttacctcccgaaaagaaagagcgagacacgaaggagagcagtaatttatttccatggagggggcttttgctttggctcctcaaagcagcgtgcatttgactttctaaaccggtggactgccaatacactggacgccgtggttgttggcgttgactataggcttgcaccacaacatcacttccctgcacagttcgaggacgggcttgccgctgtgaagttttttcttctggagaaaatacttactaagtacggagttgatcccacaaggatctgcattgccggggacagctctggcgggaacctggcaacagcagtaactcagcaggtccaaaacgacgcggagataaaacataaaattaagatgcaggtacttctctatcctggcctacagatcactgattcttacttaccgagtcatagggagaacgagcacgggattgtccttacaagagacgttgcaatcaagttggttagcttatatttcactaaagacgaggctctgccttgggctatgaggcggaatcaacacatgcctcttgaaagccggcacctattcaagtttgtgaactggagtatcctcctgccagaaaaataccgtaaggattatgtatacacagagcctatcctgggtgggctctcctattcactgcccggcctcactgattctcgggctctgcccttactggcaaacgactcacagcttcaaaatctgcctctgacatacatcctcacctgccagcacgatctcctaagggatgacggactcatgtacgttacccgattgcgaaatgtgggcgtccaagtggtacatgaacatattgaagacgggattcacggtgccctctcctttatgacaagtcccttttacctcagattgggtctcagaattcgtgatatgtacgtctcatggctggacaaaaacctgtag

SEQ ID NO: 13933 - RNA, 264 nt, synthetic construct; identical to SEQ ID NO: 12294
  misc_feature 1..264: note = source = /note="Description of Artificial Sequence: Synthetic coding sequence"
  source 1..264: mol_type = other RNA

SEQ ID NO: 13934 - RNA, 813 nt, synthetic construct
  misc_feature 1..813: note = source = /note="Description of Artificial Sequence: Synthetic coding sequence"
  source 1..813: mol_type = other RNA
atgagaggacagggcagaaaggaatccctgagcgattcacgcgaccttgacgggagttatgatcagctgacagggcacccccccggacccactaagaaagcactgaagcagagatttttaaagctactgccttgctgtggtccccaggctttaccctccgtgtccgaaacccttgctgcccccgcttccctcagaccccatcgcccaaggttactggatcccgatagcgtggacgatgaattcgaacttagtactgtatgtcatcgccctgagggtttagagcagttgcaggaacagacaaagttcactagaaaggagttgcaggtcctgtatagaggtttcaaaaacgaatgtcctagtgggatcgtgaacgaagaaaattttaagcaaatttatagtcagttcttcccccagggcgactcatctacatatgccactttcctgttcaatgcttttgacaccaatcacgacggttctgtctcattcgaagattttgttgccggcttatccgtcatactacgagggaccgtagacgatcgactgaactgggcttttaacctgtatgatctgaacaaggatggctgcatcacgaaggaggaaatgctcgatattatgaagagtatttatgacatgatgggcaaatacacttaccccgccctgcgcgaggaagccccacgtgaacatgtggaatcgttctttcaaaaaatggacagaaacaaagacggggtcgtcaccattgaagagttcatagaatcctgccaaaaagatgagaatatcatgcgctcaatgcagctgtttgacaacgttatttag

SEQ ID NO: 13935 - RNA, 819 nt, synthetic construct
  misc_feature 1..819: note = source = /note="Description of Artificial Sequence: Synthetic coding sequence"
  source 1..819: mol_type = other RNA
atgcatctcagacttatttcctggttgtttataatactgaacttcatggagtatattggctctcagaatgcatcacgtggcaggcgtcagagaagaatgcatcctaacgtttcacagggctgccaagggggctgtgccacttgctctgactataacggttgcctgagctgtaaacctcgcctatttttcgcactggaacgcataggtatgaaacagattggtgtatgcttatcgagctgtcccagcgggtattacggcacccgatacccggacatcaataaatgtacaaagtgtaaggcagactgcgatacctgtttcaataagaatttttgtaccaaatgtaaatccggcttctacttacatctcgggaagtgcctggataattgccctgaaggcctggaagcaaataatcatactatggaatgtgtgtctatcgtccactgcgaggttagtgaatggaacccctggtcaccctgtactaagaaagggaagacctgtggctttaaaaggggtaccgagactcgcgttcgcgaaataattcagcatccatcagctaaagggaacctgtgcccccctactaatgaaacccgcaagtgcaccgtgcagagaaagaaatgtcagaaaggagaacggggtaaaaaaggtcgagagcggaagaggaaaaagcccaacaaaggcgagtctaaagaagcgatcccagactcaaaatccttggagtcttcaaaggaaatacctgaacagcgggagaataaacagcagcaaaaaaagaggaaagtccaggacaaacagaaaagtgtcagtgttagtacagtccactag

SEQ ID NO: 13936 - RNA, 294 nt, synthetic construct; identical to SEQ ID NO: 12297
  misc_feature 1..294: note = source = /note="Description of Artificial Sequence: Synthetic coding sequence"
  source 1..294: mol_type = other RNA

SEQ ID NO: 13937 - RNA, 726 nt, synthetic construct
  misc_feature 1..726: note = source = /note="Description of Artificial Sequence: Synthetic coding sequence"
  source 1..726: mol_type = other RNA
atgtggacagtgcgcactgagggcggccacttccctctccattcccctactttctcttggcggaacgtcgctttccttttactcttgtccttggccctcgagtggaccagcgccatgcttacgaaaaagattaagcacaaaccaggcctctgtcctaaggaaagacttacttgtacaacagaactcccagatagctgtaatacagatttcgattgtaaagaataccagaagtgctgctttttcgcttgccagaagaagtgcatggaccccttccaggagccttgcatgcttcctgttcgccacggtaactgtaatcacgaggcccaacgctggcatttcgactttaaaaattaccgctgcactcctttcaaatatcgcggctgcgaaggcaacgccaacaatttccttaacgaagacgcatgtagaaccgcttgtatgctgatcgtgaaagatggccaatgccccttgtttccatttaccgaacgtaaggaatgtcctccatcgtgtcatagcgatatcgactgcccacaaaccgacaagtgctgcgagagtcgctgcggattcgtctgtgccagggcttggactgtgaaaaaagggttctgcccccgcaagcctctgctttgtaccaagatcgataaacccaaatgtcttcaagatgaagaatgtcccctcgttgaaaaatgttgctcgcattgtggactgaaatgcatggatcccagaagatag

SEQ ID NO: 13938 - RNA, 1827 nt, synthetic construct
  misc_feature 1..1827: note = source = /note="Description of Artificial Sequence: Synthetic coding sequence"
  source 1..1827: mol_type = other RNA
atggccagagcacgcgccggagctctgcttgctctgtgggtgctgggtgcggccgcacacccgcagtgcttggatttccgacctcctttcagacccacacagcccctccgcctctgtgctcaatactcagattttgggtgctgcgacgagggacgggatgctgaacttaccaggagattctgggctctggcctcaagagtcgacgccgccgagtgggccgcttgcgctggatacgccagagatctactgtgccaggagtgtagtccttacgctgctcacctctatgatgccgaagacccttttacccctctgagaactgttcctggactatgccaagattactgcctcgacatgtggcacaaatgcaggggcttgttccgacatctctcaactgatcaggaactatgggcgcttgaagggaatttagctagattttgccggtacctttccctggacgatacggactattgttttccatacctgctggttaataaaaatctgaatagcaatctgggacacgttgtcgccgatgcgaagggctgtcttcaattatgtttagaagaggtggcaaatggtttaagaaatcccgttgctatggtacacgctcgtgatggaacccatagattctttgtagccgaacaagttgggttggtttgggcctacctaccggacaggtccaggcttggcaaacctttcctcaatatatcccgagtggtgctaacctccccttgggagggggacgagcgggggttcttgggcatcgcatttcacccctccttccagcataatcgtaggctgtacgtttattactctgtgggaatacggtcttccgagtggattagaattagtgagtttagagtatctgaagacgacgagaatgcagttgaccattcatcagagagaatcatacttgaggttaaggaaccggcttcaaatcacaatggaggccaactcctgttcggtgatgacgggtatctctacatcttcacaggagatggcggaatggctggagaccctttcggaacattcggtaatgctcagaataagtcagccctgcttggtaaagtgttgagaattgacgtcgataggaaggagaggggtctaccttacggtatcccgccagataacccctttgtaggcgatccggcagcccagcctgaagtctacgcattgggcgtgagaaatatgtggcgttgctccttcgacaggggagacccttcttctggcacgggacgcggacgcctgttttgtggagacgttgggcagaataagttcgaagaagttgatgttgttgagagaggtggtaattacggctggcgcgcaagggaaggatttgaatgctatgatagaagcttatgcgctaacactagtctgaacgatctgttgcctatatttgcctacccacacaccgtggggaaatccgttactggaggttacgtttatagaggctgtgagtacccaaacctgaatggcctgtacatattcggggacttcatgtctgggcgccttatgagtttacaggaaaaccctggcacgggccagtggcagtattccgagatttgcatgggccatggacagacgtgcgaatttcccggccttataaacaattattacccatatatcatctcattcggggaagacgaggccggagaactctattttatgtcaaccggggaacccagcgctaccgccccaagaggcgtcgtgtataagattattgacgcgtcctcctgcaaagcacgttcagccatgccaggatatgtacccgctccctccgtttgttcttcactcaccagtcagccctttatattgcaatggtggaaatag

SEQ ID NO: 13939 - RNA, 351 nt, synthetic construct
  misc_feature 1..351: note = source = /note="Description of Artificial Sequence: Synthetic coding sequence"
  source 1..351: mol_type = other RNA
atggcccctccttctgtacccctcgtcctcctcctcgtcctcctgctcagtctggcagagactccagccagcgcccccgctcatcgaggcagagggggctggacgttaaattccgccggctatctactgggacctgtcttacacttgccacaaatgggggaccaggatgggaagagagaaacagccctcgagattctcgacctgtggaaggccattgatgggctcccttactcgcacccaccacaaccctctaagcgcaacgtcatggaaacctttgccaagcccgaaataggcgacctggggatgctctccatgaagatacctaaagaagaagacgttttgaagtcctag

SEQ ID NO: 13940 - RNA, 3618 nt, synthetic construct
  misc_feature 1..3618: note = source = /note="Description of Artificial Sequence: Synthetic coding sequence"
  source 1..3618: mol_type = other RNA
atgagaaaacctagaagaaaatcacgtcagaatgctgaaggtcgccgatcaccgagtccctattccctgaaatgttcaccaacgagagagactctgacatacgcacaagcacaaagaatagtggaagtggacatagatggcaggcttcaccgaatctcaatttacgatccactgaaaattattacagaggacgaactcaccgcacaggacattactgagtgtaacagtaacaaggagaattcagagcaaccccaatttccaggaaaatccaagaaaccttcctccaagggcaagaagaaggagtcctgtagcaagcacgcctcagggacaagtttccacctgcctcaaccaagctttcggatggtggatagcggtatccagccagaagccccccctcttccggctgcgtattacagatacatagaaaagccccccgaagacctggacgccgaagtggaatatgatatggatgaagaggacctcgcatggttggacatggtgaatgagaagaggagagtggacggtcacagcctggtgagtgcagacacatttgaacttcttgtggacagattggagaaggaatcatatctcgaaagtcgctccagtggcgcgcaacagtcactcattgacgaagatgctttttgctgtgtatgtctagacgacgagtgtcataacagtaatgtaatccttttctgcgatatctgcaacctcgccgttcatcaggaatgttatggagtcccctacatcccagaaggacagtggctatgtcggtgttgtctccagtctccctcgcggcccgtggactgcatcctgtgccctaataaaggtggagcctttaagcagacttctgacggccattgggctcatgtggtatgcgctatctggatacctgaggtatgcttcgccaatacggtcttcttagagcctatcgaagggatcgataatatccccccagcccgctggaagcttacctgttatatttgtaagcaaaaaggtctcggagctgccattcaatgccacaaagtgaactgctatactgccttccatgtaacgtgtgcgcagcgcgcaggactctttatgaaaatcgaacctatgcgcgaaacctctctgaacgggacaatttttaccgttagaaaaactgcttactgcgaagcacactcccctcctggggccgccaccgccagaagaaaaggagatagcccaaggtctatttccgagaccggcgatgaggagggcttgaaggaaggtgatggagaggaagaggaggaagaagaagttgaggaagaagagcaggaggcccaaggcggtgtctcagggagcctgaagggtgttccaaaaaagtctaaaatgtccctaaagcaaaaaatcaaaaaagagcccgaggaggctggtcaagacacaccaagtactctcccaatgttggctgtcccacagattccatcttacagacttaacaagatttgttccggcctgtcatttcaacggaaaaatcagttcatgcagaggctccacaactactggttgttaaaacggcaggcgcgtaacggtgtgccactgatcagacgactgcactcacatctgcaaagccaacggaatgctgagcagagggagcaagatgagaagaccagcgcagttaaggaagaactgaaatattggcaaaaactccgacacgacttggagagagcacgtttattaattgaactcatacggaaaagggagaagctgaaacgcgagcaggtgaaagtacagcaggctgctatggaacttgagttgatgccattcaatgtgctgctaaggactactttagacctactccaggaaaaagatccagcccacatctttgccgagccagttaatttaagcgaagtgcctgattacctggaatttattagcaaaccaatggatttctcaactatgcggaggaaattggaatctcatctctaccggacactcgaggaatttgaagaagactttaatctgatcgtcacaaactgtatgaagtacaacgccaaggacaccatcttccaccgggccgctgtgaggctcagggatttgggaggcgccatccttagacatgcccgcaggcaggcggaaaacattggatatgatccagagagaggcacccatctgcctgaatcgcccaagctcgaggacttctaccgcttttcgtgggaagatgttgacaatatcctgattccagagaatcgtgctcatctgagccctgaagtgcagctcaaggaacttctagagaagttagatctggtctccgccatgagaagcagcggcgctagaactagacgagttagactgctgagaagagagattaatgctctcagacagaagcttgcccagccccctcctccacagcccccttcattaaataaaacggtgagcaacggtgagctgccagctggtccacaaggggacgctgccgtattggagcaagcactgcaagaagagccagaagacgatggtgaccgcgatgatagtaaactgccccctcctcctactctcgaaccaaccggcccagcaccctccctgtcagaacaagagagcccaccagagcctcccacacttaaaccgatcaatgacagcaagcctccttccaggtttctgaaacctagaaaagtcgaagaagacgaactgcttgagaaatcacctcttcaattaggaaacgaaccactgcagcgccttctctccgataacggaataaatcggctatccttaatggccccggacacccctgccggcacccccctttccggggtcggtagacgaacctcagtattgtttaagaaggcgaaaaatggagtcaaattacagcgatctcccgatagagtcttagaaaatggagaggaccatggcgtagccggatcaccagccagccccgcatccattgaagaagaacgccactcaaggaaaaggccccgatcaagatcttgttcagagtccgagggggaacgtagccctcagcaggaagaagaaactgggatgacaaacggcttcggaaaacatactgaatcaggatcagacagcgaatgttcacttggtctcagcggcggactggcctttgaagcatgttctggtctcacaccacctaaacgctctcgcggtaaacctgccctctcaagagttccattcctggagggagtcaatggcgactccgactacaacggttcgggccgaagcctgttgctgccgttcgaagatcgcggtgatctcgaaccactcgagctggtgtgggcaaagtgtagaggttacccaagttaccccgccctcattatcgatcccaaaatgccccgggagggcctgctccataatggcgttccaataccggtgcctccactcgatgtactcaagctaggagaacaaaagcaggctgaggccggcgagaagcttttccttgttcttttctttgacaacaaaagaacctggcagtggttgcccagagataaggtcttaccccttggagtagaagataccgtggacaaactaaaaatgctggaaggccgaaaaacgagcatacgcaagtccgtgcaagtggcttacgaccgagctatgatacatctgtctcgcgtgcggggaccacactcattcgtgacatccagctatctctag

SEQ ID NO: 13941 - RNA, 1977 nt, synthetic construct
  misc_feature 1..1977: note = source = /note="Description of Artificial Sequence: Synthetic coding sequence"
  source 1..1977: mol_type = other RNA
atgttcgtttcttacctaattctcactctgttgcacgtacagaccgctgtgctggcccgcccaggtggcgaatctattggatgcgatgattacctcggcagtgacaaggtggtcgataaatgtggagtttgcggtggcgataatacaggatgccaagtcgtaagcggagtgttcaagcacgccctgacaagtcttggttatcatcgcgtcgttgagatacctgaaggcgccactaagattaatattaccgagatgtataaaagcaataactatctcgcgctgcgtagccgctctggaaggtcaattatcaacgggaattgggcaattgatcggcccggaaaatatgagggaggcggcacaatgttcacttataaacgacctaacgagatatcttccacagctggagagagttttttagcagaggggcccaccaatgagatactagacgtgtatatgatccaccagcagcccaaccccggcgtccactacgaatatgttatcatgggaacaaacgcaatatcgccccaggtgccaccccacagacgtcctggcgaaccatttaacggacagatggtgaccgaaggtaggtcacaagaagagggcgaacagaaagggcggaatgaggaaaaggaggacttgcgtggcgaagcaccggaaatgttcacctctgaaagcgcacaaacctttccagtcagacacccagacaggttttccccacatcgaccagacaatcttgtacccccagctccacagccacctcgcaggtccagagaccataactggaagcagcttgggaccactgaatgttctacaacctgtggaaagggatcccaataccccatctttcgctgcgtgcacaggtctacacacgaggaagcacccgaatcttactgtgattcctctatgaagcccacaccagaagaggaaccatgcaatatttttccatgtccggccttttgggacatcggagaatggtcggaatgcagcaagacctgcggactgggaatgcaacataggcaggtgctgtgtcgtcaggtgtatgcgaaccgttctcttaccgtgcagccgtaccgttgtcagcatctggaaaagcccgaaacaacgtccacctgtcagctcaagatatgttctgaatggcagatccggactgattggacatcttgcagcgtaccctgtggagtaggacagagaaccagagacgtaaagtgcgtgtcgaatataggtgacgtcgtggatgacgaagaatgtaacatgaaactgagaccaaacgacatagagaattgtgatatgggaccctgcgcgaaatcctggttcctgaccgaatggtcggagaggtgttcagccgaatgtggcgctggggttcgaacccgtagcgtagtttgtatgaccaatcatgtttcttccctgcctcttgagggctgtggcaataatcgtcccgctgaagccacaccatgcgataacggcccttgtactggtaaggtcgaatggttcgccggtagctggagccagtgcagtattgagtgcgggagcggcacacagcaaagagaagttatttgtgtgaggaagaacgccgatacatttgaagttctagatcccagcgagtgttctttcctggaaaagccgccgtctcagcagagttgtcatctaaagccatgcggtgcaaaatggtttagtaccgaatggtcaatgtgtagtaaaagttgtcaaggcggatttagggtacgagaagtcagatgtttgtccgacgatatgacgttaagtaatctctgtgacccacaactgaaacctgaagagcgagagagctgcaatccacaggattgtgtgcctgaggtggacgaaaactgcaaggacaaatattataattgcaacgtggttgttcaggctcgactttgtgtatacaattattacaaaactgcctgctgcgcatcttgtacaagagtggcaaacagacaaacaggatttttaggatccagatag

SEQ ID NO: 13942 - RNA, 708 nt, synthetic construct
  misc_feature 1..708: note = source = /note="Description of Artificial Sequence: Synthetic coding sequence"
  source 1..708: mol_type = other RNA
atgcgacctttagccgggggtttacttaaagtggtgttcgtagttttcgcgtctctatgtgcctggtatagcggttatctcctcgccgaacttattccagacgcccctcttagctctgcagcatattcaattaggtcaatcggagagcgtccagtactgaaagctccagtccctaagcggcagaagtgtgaccattggaccccttgtccctctgacacttacgcctaccggctgctctccggcggcggacgctctaagtatgcgaaaatttgttttgaggataatctgctgatgggcgagcaactcgggaacgtggcccggggaattaacattgctattgtgaactatgtgactggcaatgtcacggccactcggtgttttgacatgtatgagggagacaactctggacccatgacgaagtttatccagtccgctgcacctaaaagcttgctgtttatggttacatatgacgacggctccacacgattgaacaatgatgccaaaaacgccattgaagccctgggaagtaaggaaattaggaatatgaaatttaggtcatcatgggtttttattgcggcaaagggccttgaactaccatcagaaatccagagagaaaagattaatcattccgacgctaaaaacaatagatactccggatggcctgccgagattcagattgagggatgtattccaaaagaacgttcctag

SEQ ID NO: 13943 - RNA, 759 nt, synthetic construct
  misc_feature 1..759: note = source = /note="Description of Artificial Sequence: Synthetic coding sequence"
  source 1..759: mol_type = other RNA
atgcgcggacaggggcggaaagaatctctgagtgactcacgcgacttagatggatcttacgatcagctaaccggccatcctcccgggcctacgaagaaagccctaaagcaacgctttctgaaactcctgccctgttgtgggcctcaggctttgccatccgtgtccgaaaatagtgtggacgacgaattcgaattaagcacagtttgtcatcgccccgagggtctggaacagcttcaggagcagactaaatttacaagaaaggagctgcaggtgctgtacaggggatttaagaatgaatgccccagcggcatcgttaacgaagaaaatttcaagcagatttactcccaattcttcccccagggtgactcttctacctacgccacatttttattcaacgctttcgacactaaccacgatggatcagtgtcattcgaagactttgttgccggactaagtgtgatcctgagagggaccgtggatgatagacttaactgggccttcaacctctatgatctcaacaaagacggctgtatcactaaggaggaaatgctggatattatgaaatcaatttatgacatgatggggaaatatacatatcctgctctccgcgaagaggcaccaagagagcacgtagagagtttttttcagaagatggaccggaataaagatggcgtggtgaccattgaggaattcatagaatcttgccagaaggacgagaacataatgcgctcaatgcaattattcgataatgtcatttag

SEQ ID NO: 13944 - RNA, 312 nt, synthetic construct
  misc_feature 1..312: note = source = /note="Description of Artificial Sequence: Synthetic coding sequence"
  source 1..312: mol_type = other RNA
atgtcaggtagagggaaggggggtaaaggattgggcaaaggcggggccaaacggcaccgcaaagtcttgcgggataacatccagggcatcactaaaccagccatccgcaggctagcaaggcgaggaggagtgaagcggatatctggtctaatctacgaggagacgcgaggtgtgttgaaggtgttcctggaaaatgtaatccgcgatgccgtcacatatactgaacacgcaaaaagaaagacggtcaccgcaatggacgtagtatacgctttaaagagacagggaagaacattatatggcttcggaggctag

SEQ ID NO: 13945 - RNA, 3120 nt, synthetic construct
  misc_feature 1..3120: note = source = /note="Description of Artificial Sequence: Synthetic coding sequence"
  source 1..3120: mol_type = other RNA
atggaagtgactgcagtggctactcaagggggttacggttcttctgattgggtgacctcttatcttttgatgttttctgatggcggcagaaattggaagcagtatcgtagagaggagtcaatttggggcttcccaggcaacactaacgcggactccgttgtgcattacaggctgcaacctccgttcgaagcccggtttctgaggttcctcccactagcatggaatccaagagggaggattggcatgcggattgaggtatacggatgcgcatataaatcagaagtggtgtattttgacgggcagtcagcactgctgtatagactggataagaaaccgttaaagcccattcgcgacgttatatctctgaaattcaaggcaatgcagagcaacgggatccttctgcatcgcgaggggcagcatggaaatcacatcacactcgaacttataaaaggcaagctcgtattctttctcaattccggaaatgccaagctgccatccacgattgcacccgtcacacttacactggggtctttgctcgacgaccaacactggcattctgtccttatcgaacttctggatacacaggtgaacttcacagtggacaaacacactcaccattttcaagctaaaggcgactcctcctacctggatctaaattttgaaattagttttggcggtataccaaccccagggaggtcacgggcattccggagaaaatcattccatggctgcctcgaaaacctgtactacaatggagtcgacgtgaccgagctggcgaagaaacataagcctcagattttaatgatgggcaacgtgagcttttcgtgccctcagccacagacagtccccgtcacattcctatcctccagaagctatctcgcactcccaggaaattccggtgaagataaagtctcagtcactttccaattccgcacgtggaatcgcgccggccacctacttttcggcgaattgagaaggggatccggttcgtttgtgttattcctgaaggatgggaagctcaagctgtcactattccaaccaggccaatctcctcgcaatgtgaccgcaggagcaggactcaatgacggtcagtggcattccgttagtttcagtgccaagtggtcccacatgaatgttgtggttgacgacgatacagccgtgcagcctctcgtggccgtgttaattgactctggagacacctattatttcggaggttgtctggacaattcctccggctcaggttgcaaaagccctttgggtggctttcagggatgtttgcggttaattaccattggcgataaggccgtcgaccccattttggtgcaacagggtgctctcgggagcttccgggacctgcaaattgacagctgcggcatcacagataggtgccttccgtcttactgcgaacatggcggagagtgctcacagagctgggataccttctcatgcgattgccttggcacaggttatacaggggaaacttgccactcctcactctatgaacaatcctgtgaagctcacaaacatcgcggaaatccttccggtttatattacatcgatgcagacggtagcggtccactggggccgttcctggtctattgcaatatgaccgccgacgcagcttggaccgtagttcagcatggaggacctgacgcagtcaccctgagaggtgcgccttcaggacacccacgatcagcagtctctttcgcgtatgctgctggagcaggacaactgcgcagcgcagtcaacttggcagaacgctgcgagcagcggctggccctacgttgtggcaccgctcggcgtcccgatagccgagacggtacccctctgtcctggtgggtgggtcgaacaaacgaaacccacacaagttggggagggtctctgcctgacgcccagaaatgcacatgtggcctagaaggaaattgtatagactctcagtactattgtaactgtgacgccggacgcaatgaatggacttccgacacgattgtcctttcccagaaagaacacctgcccgtcacccaaatcgtcatgaccgatgctggtcgaccgcattccgaggcggcctatactcttggacccctcctgtgccggggagatcagtcattttggaactcagcctcattcaacacagaaacctcctacctgcactttcctgcgttccacggcgaattaacagctgacgtgtgttttttctttaaaactacagtctccagcggggtattcatggaaaacttgggaatcaccgactttatccggatcgaactgcgtgcaccaactgaagtaaccttcagctttgacgtggggaatggtccatgtgaggtgaccgtgcagtccccaacaccctttaacgataaccagtggcatcatgtgcgtgcagaacggaacgtgaaaggagcctctctccaggtagaccaattgccgcagaaaatgcaaccagctccagctgacggccatgtgagactgcagctgaattcacaacttttcattggcggaaccgcaactcgacaacgcggttttctagggtgtatacgatcgctgcaactcaacggagtggccctggacttggaagagagggctacggtgacaccaggagtagagccaggatgcgcaggtcactgttccacatacggacatctctgccgcaacgggggcagatgcagagagaagaggcggggagtaacctgtgattgcgcttttagcgcttatgatggcccattttgcagcaacgaaatctctgcctactttgcaactggctcctccatgacctaccacttccaggagcattataccctgtccgagaactcatcctccctcgtatcctctttacaccgagacgtcacactgacgcgcgaaatgatcacgttgtctttccgaaccaccagaacaccttcattgctcctctacgtcagttctttctacgaagagtatttgagtgttattctggctaacaatgggtctcttcagatcagatacaaattggaccgacatcaaaatcctgacgcattcactttcgactttaaaaacatggctgacgggcagttacatcaggtcaaaataaatcgagaagaagctgtggtaatggtggaggtaattcctcagatgcagaaatctaattag

SEQ ID NO: 13946 - RNA, 1257 nt, synthetic construct
  misc_feature 1..1257: note = source = /note="Description of Artificial Sequence: Synthetic coding sequence"
  source 1..1257: mol_type = other RNA
atgaggagtctactgcttctttccgccttctgcctcctggaagccgccctggccgctgaggtgaaaaaacctgccgccgccgccgcacctggtacagccgaaaaactgtcccccaaagcagccactctggccgaacggagtgccggactggctttttcgctctaccaagcaatggcaaaagaccaggccgtggagaatatccttgtttctccggtagttgtcgcaagctcactgggattggtctccctcgggggaaaagcaaccaccgcttcgcaggccaaggccgtgttgtccgctgagcaactacgggatgaagaggtgcacgcaggactgggggagctgttgcgttcattatctaactccacagccaggaatgtgacatggaagctaggctcaagactttatggaccttcctcggtctcctttgccgacgatttcgtccggtcaagcaagcagcactacaattgtgaacactcaaagatcaactttagggataagaggtcagcactgcagagcatcaacgagtgggccgcccagacaaccgacggcaaactcccagaagtcactaaagacgtggaaagaacagacggcgctttactggtcaacgccatgttttttaaaccacattgggacgaaaagttccaccacaaaatggtggacaaccgcggattcatggtaactcgcagttatacagttggtgtgatgatgatgcaccggactggcctctacaactattacgatgacgagaaggagaagttgcagatcgtagagatgccactggcccataaattaagtagccttatcatcctgatgccccaccatgtagaacccctcgaaaggctggaaaaacttctgaccaaggaacagttaaagatctggatgggtaaaatgcagaagaaggctgttgccattagcctgcccaaaggtgtcgttgaggttactcatgatctgcagaagcatctcgccggtctgggactcaccgaagcgatcgacaagaataaagcagatctctcaaggatgtcaggtaagaaggatttgtatctggcatcagtttttcatgccaccgcattcgagctcgatactgacggcaatccctttgatcaagatatctacggccgcgaagaactgcgttccccgaaattattttatgccgaccacccatttatttttttggtacgggatacccaatcaggatccctccttttcataggccgattagttagacctaaaggcgacaaaatgagggacgagctgtag

SEQ ID NO: 13947 - RNA, 378 nt, synthetic construct
  misc_feature 1..378: note = source = /note="Description of Artificial Sequence: Synthetic coding sequence"
  source 1..378: mol_type = other RNA
atgcaattgctgaaagccttgtgggctctcgccggggccgccctgtgttgcttcctggtgttagtcatccacgcccagttcttaaaagagggtcagcttgccgccggaacctgtgaaatcgtaactctggaccgggactcctcacaacctagacgcactattgctcgtcagacagctagatgtgcctgtcgtaaaggtcagatcgctggaaccacccgagcacgccctgcatgtgtggacgcacgcataatcaaaacgaagcagtggtgcgatatgctgccgtgtctcgaaggagaggggtgcgacttgctcatcaatcgatctggatggacttgcacacaacctgggggcagaatcaagactacgaccgtcagctag

SEQ ID NO: 13948 - RNA, 5859 nt, synthetic construct
  misc_feature 1..5859: note = source = /note="Description of Artificial Sequence: Synthetic coding sequence"
  source 1..5859: mol_type = other RNA
atgcccgctctgggacccgcacttctgcaggccctttgggctggatgggttctcacactgcaacccttgcctcccaccgctttcacccccaatggcacataccttcagcacctagcccgagaccccacttctggtaccctgtatctcggcgcaactaacttcctgttccagctttcccccggcctgcagcttgaggcaactgtttccactggacccgttcttgactcacgtgattgcctcccaccggtgatgcctgatgagtgtcctcaggcccaaccgactaataaccctaatcagctcttgctggtctcacctggcgcattggttgtgtgtgggtccgtgcaccaaggcgtgtgtgagcagagaagattaggtcagctcgaacagttactgctcaggcccgagagaccgggagacactcaatatgttgccgccaatgacccagcagtaagcaccgtgggacttgttgctcaggggctcgcaggggagccactgctgtttgtcggcagggggtacacatcacgcggcgttggcggcggaattcctccaatcactaccagggcactatggccaccagatccacaggcagcatttagctacgaagaaacggctaagctcgccgttgggcgtctctcagaatattcccatcattttgtttccgcattcgctcggggcgcctccgcgtacttcctgttcctgaggagggacctgcaagcacaatccagggcttttcgggcttacgtgtccagagtttgtctacgagatcagcattattatagttacgtcgagctgccgttggcatgcgaagggggtcggtacggactcatacaggcagctgcagtggccacatccagggaggtagctcacggggaagtcctattcgccgcttttagctctgctgccccccctactgttgggaggcccccgtctgctgccgccggcgcatccggagccagtgccctgtgtgcattcccactggacgaagttgaccgcctagcaaacagaactcgcgacgcatgctacactcgagaaggcagggccgaggacgggacagaggtggcgtacatcgaatatgacgtgaattcagactgtgctcagttaccagtagacactctggacgcatacccctgcggatctgatcacacaccatccccgatggcttcacgggtgccacttgaggccactccaattcttgaatggcccggaattcaactgactgctgtggccgtcaccatggaggatggtcacactatcgctttcctgggagatagtcagggacaattacatcgtgtttacctgggacccgggagtgatggacacccatacagtactcagagcattcagcaaggtagcgccgtgagcagagacctgacatttgatggtacattcgagcacctttacgtcatgacccaatctactcttctcaaggttcctgttgctagttgtgcccagcatctcgattgcgcatcctgtctggctcatcgagacccttactgtgggtggtgcgtcctgttgggtcgctgcagccgacggagtgaatgttctcgcggtcaaggcccggagcaatggctgtggtcatttcagcctgagttgggctgtctgcaggttgccgcaatgagccctgctaatatctctcgcgaagagacacgcgaagtcttcctgtccgttccagacttacctcctttatggcccggggagtcgtattcatgccattttggcgagcaccaaagtcctgcattattgacgggttcaggagtgatgtgtccatcccccgatccctcagaagcacctgtgttgccaagaggagctgattatgtcagtgtctcagtggagctccggttcggggccgttgtcatcgctaaaacaagcttgagcttttacgattgcgtggcagtaaccgagctccgaccctccgctcagtgccaggcctgtgtttccagccggtggggctgcaactggtgcgtctggcagcatttgtgcactcataaagcatcctgtgacgctggtcccatggttgcctcccatcagtccccactcgtatcacccgacccccccgccagaggcgatggagatagtgcagagttagaaggtccccccgcaccccttatcctcccctcctccctggactatcagtatgatacccccgggctttgggagcttgaagaggctacacttggtgccagtagctgtccatgcgttgagtctgtgcagggttctacactgatgccagtgcatgtcgagagagagattcgcttactagggagaaatttgcatctttttcaggacggccccggtgacaacgaatgcgtgatggagctggaaggactggaggtggttgtggaggctcgggtggaatgcgaacccccccccgacactcagtgtcatgtcacatgccagcagcatcagctctcatacgaagcattgcaacctgagctgagagttggactgttcctgagacgagccggccgtctgagagtagatagtgccgaggggctccatgtggtcctttatgattgctccgtaggtcacggggattgcagccggtgccagacagctatgccccagtacggatgcgtgtggtgcgaaggtgagagaccaaggtgcgtcactagggaggcctgtggcgaagcggaagctgtcgcaacccaatgccccgcccctttgattcactccgtggaacctctgaccgggcccgttgatggcggaacaagagtcaccatcaggggcagtaatctgggacaacacgttcaggatgtcctcggaatggttacggtggctggcgttccatgtgcagtggatgctcaagaatacgaagtgtcaagctccctggtctgcattaccggcgccagcggggaagaagtcgctggagctaccgcagtggaggtgcccggcagaggtagaggggtaagcgagcatgactttgcctatcaggaccctaaagtccattccattttcccggcaagagggcccagggctggggggacacggctgaccttaaacggcagtaagttgctgacagggcgccttgaagatatccgtgtggtggttggagaccagccttgccatcttctcccagaacagcagtccgaacaattgagatgtgaaacaagtccgaggcctacgcctgctactctgccagttgccgtgtggtttggcgcaacagaacgccggttacagcggggacaatttaagtacacgctcgacccaaacatcaccagcgccgggcccaccaaatctttcttgagtgggggaagagaaatctgtgttcgcggtcaaaacctcgacgtggtgcaaacccctcgtattcgagtgacagtggtgtccaggatgttacaaccatcacaaggactgggtcgaagacggagagtggttcctgaaacagcatgcagtctgggcccctcttgttcctcacagcagttcgaagaaccctgtcacgtgaacagttcacagctgattacatgccgaactccagcactgcccggtcttccagaggatccctgggtgcgagtggaattcatcttagataacctggtctttgacttcgctacattgaaccccacccccttttcctatgaagccgaccctacgctccagcctttaaaccctgaggaccctactatgccatttcggcacaagccaggaagtgtgttttctgtagagggcgagaaccttgacttggcgatgagcaaggaggaggtcgtggctatgataggggacggaccatgtgtggtaaaaactctgacccgacatcacctgtactgcgagccacctgttgaacaaccactgccccgccaccacgccctccgagaggcccctgattccctacccgaatttactgtccagatgggaaatctgcgtttctccctcggccacgtgcagtatgacggagaaagccccggcgccttccctgtcgccgcacaggtgggactcggtgtcggtacttctctgctcgcccttggagttatcataatagtgttgatgtatcgccgcaagtctaaacaagctctccgcgactataaaaaggttcagatccagctcgaaaacctggaatcctccgtgcgtgaccgctgtaaaaaggaatttaccgacctgatgacagagatgaccgatctcactagcgatctactggggtcaggcatcccctttctcgactataaagtgtacgcggagcgaatcttttttccaggacatcgggaatccccattacaccgtgatctcggagtccctgagtcccggcgccctactgtcgagcagggcctcggccaactatccaatctgctcaactccaaactttttctgaccaagttcatccatacgttagaatcccagcggacattcagcgctagagatcgtgcatatgtcgccagcctgctaaccgtggcattacatggaaagctggaatactttactgacattctccgaaccttgctgtctgacttagtggcccagtacgttgctaagaacccaaaattaatgcttcgtagaaccgaaaccgtggtcgaaaaattgctgactaattggatgtctatctgcctctacaccttcgtacgtgactccgttggtgaacccctatacatgctcttccggggaatcaagcaccaggtggacaaaggcccagtcgatagcgttaccggcaaagccaagtacaccctcaacgacaaccggttactgcgagaggacgttgaatacaggcccctcacattgaatgcactcttggccgtaggccccggggccggtgaagcacagggcgttccagtgaaagttttggactgcgatactatcagccaggctaaagagaaaatgctggaccagctctataagggcgtcccactgacacagcgccccgatccaagaactctcgacgtcgaatggaggtccggtgtagctggtcatttgattcttagcgacgaagatgttacatccgaggtacaaggtctgtggcgtagacttaacacattacaacattataaggtgcccgacggcgcgactgtggcactggtgccttgtctgacaaaacacgtcctgagagaaaaccaggattatgtgcccggtgagagaaccccaatgctggaagacgtggatgaaggcggtatccgcccctggcatctggtgaagccatctgacgaaccggaacccccccgtccgcgccgtggcagcttgcgtggtggcgagcgcgagcgagccaaagcaatcccggaaatctacctgactcgcttgctcagtatgaaggggaccttacaaaaattcgtcgacgatctcttccaggtgatactatctacaagccggcctgttcctctcgcagtgaaatatttcttcgaccttctcgacgagcaagcacagcaacacggaatctccgaccaagacacaattcatatctggaaaaccaatagtttgcccttaagattttggataaatattataaaaaatcctcagttcgtatttgacgtgcaaacctccgataacatggacgctgtgctgctggttatcgcccagaccttcatggacgcctgtacactggccgaccataaacttggccgcgactcaccaattaataaactgttgtatgcgcgcgacattcccagatataaaaggatggttgagagatactacgctgatatacgacaaacagttcccgccagcgatcaggaaatgaacagtgttctggcggagctatcctggaattactctggcgatctgggagcacgagttgccctgcatgagctgtataagtacatcaacaaatactatgatcagattatcaccgccctggaagaagatggcaccgcccagaaaatgcagctaggttaccgcctccaacaaattgcggctgctgtagaaaacaaagtcacggatctctag

SEQ ID NO: 13949 - RNA, 342 nt, synthetic construct
  misc_feature 1..342: note = source = /note="Description of Artificial Sequence: Synthetic coding sequence"
  source 1..342: mol_type = other RNA
atgcttgttctgtttttgttaggaacagtattcctgctgtgcccttactggggggagctacacgaccctatcaaagccaccgagattatgtgctacgagtgtaagaagtatcatctgggtttgtgctacggcgtgatgactagctgttccctgaaacacaaacaatcctgcgccgtggagaacttctacatccttacacgcaaaggccagtctatgtatcattactctaagttatcttgcatgacatcttgcgaagatattaatttcctgggttttactaaaagagtagagctgatatgttgtgatcatagtaactactgcaatttgcctgaaggagtctag

SEQ ID NO: 13950 - RNA, 6408 nt, synthetic construct
  misc_feature 1..6408: note = source = /note="Description of Artificial Sequence: Synthetic coding sequence"
  source 1..6408: mol_type = other RNA
atgcctgccctgggacccgctctgctgcaggctctttgggccggttgggtactgaccctccagccccttcccccgaccgcctttactcctaatggtacatatcttcaacacctagcacgcgacccgaccagtggcacactgtatctgggcgctaccaatttcctattccagctctcccccggacttcagttagaagcaacagtgtcaacaggacccgtgttagattcccgtgactgcctgccacctgtaatgcccgatgaatgtcctcaggcccaacctacaaacaacccaaatcagttactgttagtttcgcccggcgccctcgtggtttgcggatcagttcaccagggggtatgtgaacagagaagactcggccagctcgagcagctgttactgcgcccagagagaccgggggacacacaatacgtcgccgccaatgatccagctgtgtcaactgtgggactcgtagcccagggcctcgcaggagaacccctgctatttgttggtcgtggttacacgagcaggggggtgggcggcggaattccaccaattaccactagggccttgtggccaccagatcctcaggccgcttttagctatgaagagacagccaagctggccgtcggtcgcttaagcgaatacagccatcacttcgtttccgccttcgcccgtggagccagtgcctacttcctgtttttgaggagggacctacaagcccagtcacgagctttccgggcctatgtttcccgggtatgtctgagagatcagcactattattcttacgttgaattacctctggcctgtgaaggaggaagatacggtttgattcaggctgccgccgtggctactagcagagaagttgcacacggagaagtcttgttcgcggcttttagctctgctgcccctccgactgtggggagaccaccctccgcagctgccggagcttctggagcaagtgctctgtgtgccttccctttggacgaagtggaccgattagctaataggaccagggacgcatgctacacaagagaaggaagggctgaagacggaacagaagttgcctacatcgaatatgatgttaattcagattgcgcccagctgccggtggacacattagacgcatacccctgtggctcagaccacacaccatctcctatggcatcccgggtacccctagaggccacacccattctggagtggcctggtattcagctgacagccgttgccgtgacgatggaggacggtcatacaattgcatttttgggtgatagccagggtcagttacatcgggtgtacctgggcccaggttcagacggccatccttactctacccagtcgattcaacaaggatccgcggtttccagggatttgacattcgatgggacattcgagcacttatacgttatgacgcagtccactctcctcaaagtgcccgttgccagttgcgcccagcacctagactgtgcgtcgtgtctcgcccaccgggacccatactgtggttggtgtgtcctattaggccgttgtagccggcgtagtgaatgttctagaggacagggtccagaacagtggctatggtcttttcaacccgaacttggatgcctccaggttgcggccatgagtcccgctaacatcagtcgtgaggagacccgtgaggtctttctatcagtaccagatcttcctcctctgtggcctggtgagtcttattcatgccatttcggcgagcaccagagtccagctctgctcactgggtcaggggttatgtgcccttctccagacccttctgaagcacctgtcttgccccgcggcgctgactacgtttcggtttccgtggaattgcgtttcggagctgtcgtgatcgccaaaacaagcctaagcttctacgattgtgtggccgtaactgaactgagacccagtgcccaatgccaagcatgcgtttcgtcacggtggggttgcaattggtgtgtctggcagcatctctgtacacataaagcctcatgcgacgccggaccaatggtagcaagccatcagagccccctggtctcacctgacccccccgcacgagggggaccctccccatcccctccaactgcgcctaaagccctggccacccccgctccagacacactgccagttgaacccggtgccccttctacagccactgcctccgacatttccccgggtgcctccccgtccctgctctccccatgggggccctgggctggatcaggatctattagttcacctggctctacgggttctcccctccatgaagaaccatctccaccatcaccccagaacggtcctggtactgctgtgcctgctccgactgactttagaccaagtgcgacgcccgaggacttgcttgcatcccccttatcaccctcagaggttgctgcggtgccacccgctgatcctggccccgaggccctgcacccgaccgtccctttagatttgcctccagctaccgtgccggctacaacgtttccgggagcgatgggctctgtgaaaccggcacttgattggctgaccagagagggaggagagctacccgaagccgacgaatggaccggaggagacgcgccagctttttcaaccagcacacttctcagcggagacggggacagcgccgagctcgaaggccccccggcccctctgattctcccttccagccttgactaccagtatgacaccccagggctctgggaactcgaagaggccactttgggagcctcaagttgtccttgtgtggaatcagtccaagggtcaaccctgatgcctgtgcatgtcgagagggaaataagacttctcggaaggaacctgcaccttttccaggacgggccgggagacaacgaatgcgtcatggagctagagggcctggaggtggtcgtggaggccagagtggagtgcgaacccccccccgatactcagtgtcacgttacatgccaacaacatcaactcagttacgaagcgttacagcccgagctgcgggtgggcctgttcctaaggagagctggtagactgagggtggactctgctgaggggcttcacgttgtactgtacgactgcagcgtcggacacggagactgcagccgctgtcaaactgccatgcctcaatatggatgtgtctggtgtgagggagaaaggccaaggtgtgtaactcgggaagcgtgtggagaagcggaggctgttgcaactcagtgtcctgcgcccctaatccattctgtggagcctctgactggccccgtcgacggcggaactcgcgtgacaatcaggggcagtaatttaggtcagcacgtccaggatgtgctgggcatggtcaccgtagctggcgtcccctgtgctgtcgatgcccaggaatacgaagtttctagtagtttagtgtgcatcaccggtgcgtctggcgaagaggttgcaggagccacagccgtagaagttccagggcgtggaaggggcgtgtctgaacacgatttcgcttaccaggatccaaaagtgcattccattttccccgcaagagggccgcgcgctgggggaactcgcttgaccctgaacggctctaagctcctcaccggcagactggaagacattcgggttgtagttggagatcaaccttgccacctacttccggaacagcagagtgagcagctgcgatgcgagaccagcccccggccgacccccgctacacttccggtagctgtttggttcggtgcaacagagcgacgtcttcagcgggggcagtttaagtacacactcgaccctaacataacaagcgccggtccaaccaagagctttctgtcggggggacgagaaatctgtgttcgtggtcaaaatttggacgttgtacagacacctaggatccgtgtaactgttgtttcaaggatgctgcaaccctcccagggactcggaaggcgtcggagagtggttcctgagacagcatgttctctcgggccttcttgcagtagtcagcagtttgaagaaccctgtcacgttaactcgagccaactgatcacatgccgcacgccagcactgcctggcctcccagaggacccctgggtacgagtagagtttattttagacaatctggttttcgactttgctaccctaaaccctacacccttttcgtatgaagctgatccaacactacagcccctaaaccccgaagaccctaccatgccgtttcgacataagcccggctctgttttttcagtcgagggcgaaaacctggatctggcgatgtcaaaagaagaagtggtggcaatgataggtgacggaccatgcgtcgttaaaactctcaccagacaccacctctattgcgaaccccccgttgaacaaccactgccgcggcaccacgccctccgtgaagccccagacagccttcctgaattcactgtgcaaatgggaaacttgaggttctctttgggacacgttcaatatgatggcgagagtccaggcgctttccctgtggcagctcaagtcgggctcggcgtgggtacgtcattactggctctaggggttattatcatagtactcatgtataggcgtaaaagtaaacaggccttgagagattacaaaaaggtgcagatccaattagagaatttggagagttccgttagggaccgctgcaagaaggaattcacggacttgatgacagagatgacggacctgactagtgacctgctcggcagtggaattcccttcctagactacaaggtatacgcagagcgcatttttttccctgggcatagagagagcccattacatagagacctgggcgtgcctgaatcaaggaggccgaccgtcgaacagggattaggccagctttcgaatttgcttaattcaaagttatttcttaccaagtttattcataccctagaaagccaaaggaccttcagcgcaagagaccgcgcttatgtagccagcctcctgaccgttgcgttacatggtaaattggagtactttacggacatacttaggaccctcttgtccgacctggtagcccaatatgtagcaaagaatcctaaactgatgttgagacgcaccgagaccgtggtggagaaacttctcacaaactggatgagtatatgcctgtacacgttcgttcgcgactccgtaggcgagccactctatatgcttttcaggggtattaaacatcaggtggacaaaggaccagtcgattctgtgaccggaaaagctaagtacacgctcaatgataataggctcttgagggaagatgtcgagtaccggcctctaacactgaacgccctcctcgccgttggccctggcgctggcgaagcgcaaggcgtaccagtcaaagtgctcgattgtgacacgatatctcaggcaaaggaaaaaatgctcgaccagctgtataagggcgtacctctcacccagagacctgatccccggacactggatgttgagtggagaagtggggttgccggacatctgatcctcagtgatgaagacgtaacctcggaagttcagggattatggcgcagattgaatacgctgcagcactataaagtgcctgatggtgcaacggtggcactggttccgtgcctcacaaaacacgtgctcagagaaaatcaggactatgtaccaggtgaaagaacccccatgctggaggatgtggatgaaggaggcattcgcccttggcatctcgttaaaccgtcggacgaaccggagccaccccggccaaggagaggttcccttcgcggtggagaacgagagcgggctaaggcaattcccgaaatttacttgactaggctgttatctatgaagggtacgctgcaaaagtttgtcgatgacctattccaggttatcctgtccactagcagacctgtgccattggctgttaaatacttctttgatctgctagacgagcaagcccaacagcacggaatctcagatcaggataccattcacatttggaaaacaaattctctgcccctaagattctggatcaacatcatcaaaaacccacaatttgtcttcgacgtccagacatccgacaacatggatgcagtcctattagtcatcgcacaaaccttcatggacgcttgcacgctagccgaccacaagctcgggcgagattcacctatcaacaaattgctgtatgccagagatatcccacgctacaagaggatggtggagcgttactacgctgacatcagacagaccgtacccgcttccgatcaagagatgaactcggtcttagcagagctcagctggaattattccggagacttaggagctcgcgtagccctacacgagctgtataagtatatcaataagtactacgaccaaataataacagccttggaagaggatgggactgcccagaaaatgcaattaggatatagactgcaacaaatcgctgccgctgtcgagaataaagtgaccgacctctag

SEQ ID NO: 13951 - RNA, 390 nt, synthetic construct
  misc_feature 1..390: note = source = /note="Description of Artificial Sequence: Synthetic coding sequence"
  source 1..390: mol_type = other RNA
atgagacctctgaaacctggagctcctttgcctgcacttttcctgctcgcactggccctgtcaccccacggtgcgcatggaaggccccggggtcgcagaggcgcgagagtcacagataaagagcccaagcctctgctcttccttccagccgcaggcgccgggcgcacaccatccggatcccgctccgcagaaatattcccacgagactcgaatctgaaagataaattcattaagcacttcaccgggcccgtcaccttttctcccgaatgttctaagcactttcatcgtttgtattataatacgcgagaatgctccactccagcttactacaagagatgtgcccgcctcctgactagacttgctgtatccccattatgctctcaaacttag

SEQ ID NO: 13952 - RNA, 252 nt, synthetic construct; identical to SEQ ID NO: 12313
  misc_feature 1..252: note = source = /note="Description of Artificial Sequence: Synthetic coding sequence"
  source 1..252: mol_type = other RNA

SEQ ID NO: 13953 - RNA, 1455 nt, synthetic construct
  misc_feature 1..1455: note = source = /note="Description of Artificial Sequence: Synthetic coding sequence"
  source 1..1455: mol_type = other RNA
atgtggtacgtttcaactcgcggagtcgcgccccgcgtgaattttgagggcgccttgttttccggatacgcccccgacggaggcctttttatgcccgaagaactcccccagctggataggggaacgctttgtcaatggtcaactttatcttaccccggcctggttaaggaactttgcgccctgtttatcggaagtgaattattgcctaaggatgagctgaacgacctgatcgaccgagctttctcacgtttccgtcacagggaagtcgtgcacctctcaagactccggaacggattgaatgtcttggagctgtggcacggtgttacatacgctttcaaggacttgtccctcagctgcacaacccagttcttacagtatttcttagagaagcgagagaaacatgtgacggtcgtcgtgggaacatccggtgatacagggagcgctgcaatcgaatccgtgcagggagcgaaaaacatggacatcattgtcttattaccaaagggccattgcactaagattcaggaattacaaatgaccactgtacttaaacaaaatgttcacgtatttggtgtcgaaggaaattccgacgagctggatgagccaataaaaacagtgtttgcagatgtagcattcgtaaaaaagcataacctgatgtctctcaactcaatcaactggagtagggttcttgtgcagatggcccatcacttttttgcctactttcagtgcactccctctctcgatactcatccactccccctggtagaagtcgtggtgcctacgggagccgccggaaatctcgctgccggatacattgcgcaaaagattggtctccccatccgccttgtagttgccgtgaacaggaacgacattattcacaggacggtgcaacagggtgacttctctcttagcgaggcagttaaaagtaccctcgcgagcgcaatggatatccaagtaccgtacaatatggaacgcgtgttctggttactatctggctcagattcccaggtgacgcgtgccttaatggaacaattcgagcgaacacagagcgtgaatctgccgaaagaactccattcaaaattatccgaggccgtgacctcagtatccgtgagcgatgaagccatcacacagacaatgggacgatgttgggatgagaaccagtacttactatgcccacattctgctgtagccgttaattaccattatcagcaaattgatagacagcaaccttccacacccaggtgttgtttggcacctgcttccgcagccaaatttccagaggctgtgctggccgctgggctgacccccgagactccggcagaaattgtcgcattagagcataaagagacacgctgtacgcttatgagacgaggagataattggatgctgatgcttagagacactatagaagacctgagtagacaatggcggtctcacgccctgaacacgtcccaatag

SEQ ID NO: 13954 - RNA, 159 nt, synthetic construct; identical to SEQ ID NO: 12315
  misc_feature 1..159: note = source = /note="Description of Artificial Sequence: Synthetic coding sequence"
  source 1..159: mol_type = other RNA

SEQ ID NO: 13955 - RNA, 675 nt, synthetic construct
  misc_feature 1..675: note = source = /note="Description of Artificial Sequence: Synthetic coding sequence"
  source 1..675: mol_type = other RNA
atgcgtgtgtctggcgtgctcagactgctggccctcatcttcgctattgtaacaacatggatgtttatcagaagctacatgtccttttctatgaaaaccatccggctgcctcgttggctggcagcctctccaaccaaagaaatccaagtgaaaaagtataagtgtggtctcatcaagccctgtccagcgaattatttcgccttcaaaatctgctctggtgctgcaaatgtggtgggacctaccatgtgtttcgaggaccgaatgattatgtctcccgttaagaacaatgtaggcagggggttgaacatcgcactagtcaacggtacgacaggagccgtcttgggacagaaggctttcgatatgtattccggcgatgtcatgcatctggtcaaatttctgaaagagatcccagggggtgcgctggttctggtggcttcatatgatgatcctggtactaagatgaacgacgaatctagaaaattgtttagcgacctcggctcaagttatgccaaacagcttggattcagagattcctgggtctttattggcgcgaaagaccttagaggtaagagccctttcgagcaatttctcaagaacagcccagacacaaacaagtatgagggatggcctgagctactggagatggaaggctgtatgccaccgaaaccattctag

SEQ ID NO: 13956 - RNA, 1404 nt, synthetic construct
  misc_feature 1..1404: note = source = /note="Description of Artificial Sequence: Synthetic coding sequence"
  source 1..1404: mol_type = other RNA
atgctcatcttttggactattactttgttcctcctgggtgctgcaaaaggaaaagaagtttgctacgaggatctggggtgcttttcagacaccgagccatgggggggaacagcaataaggccattaaaaattcttccgtggtcccccgaaaaaattggcacacgcttcttgctgtatactaacgagaatccaaacaattttcaaattctgcttctcagcgatccaagtaccatagaagcctctaacttccaaatggatcggaaaacaagatttatcatccacggatttattgataaaggagacgaatcatgggtgactgatatgtgcaaaaagttgttcgaagtggaggaagttaattgcatctgtgttgattggaaaaagggtagtcaggctacttacacccaggccgcaaataatgtgagggttgtcggcgcccaagtggcccaaatgctcgacattttattaactgaatactcttaccccccatctaaagtgcatctcatcggccattctctaggcgctcacgtcgcaggggaagctggcagcaaaacacctggactgtcccgcatcactgggttggaccccgtagaggcttccttcgaatccacacctgaggaggtaagactcgatccatcagacgcagatttcgtggatgtgattcataccgacgcagccccacttatccccttccttggatttggtaccaatcaacagatgggacacttagacttttttccaaacggcggagaatccatgccaggctgcaagaaaaacgcgctgagtcagatcgttgacctggacggcatatgggcgggaacacgggactttgtggcttgtaaccacctgagatcctacaagtactatcttgaatcaatcttaaaccctgacggttttgcggcctacccttgcacatcttacaagtccttcgaatcagacaaatgttttccttgccctgatcagggttgtccccagatgggtcattatgccgacaagtttgcaggtagaacttcagaagaacaacagaaattttttctgaatacaggggaagcgagcaacttcgctagatggcgctacggggtctccattaccttatccggtcgcacagctaccgggcagatcaaagtggccctcttcggcaataaggggaacactcatcagtattccatatttcgaggcattctgaaaccaggctctacccatagttatgaatttgacgcgaaattagatgtaggtactattgaaaaagtgaagtttctgtggaacaataacgtgattaaccccacacttccaaaggtgggcgctacaaaaattactgtccagaaaggagaggaaaagactgtctacaacttctgctccgaggatacagtgcgagaagatactctacttactttaactccatgctag

SEQ ID NO: 13957 - RNA, 237 nt, synthetic construct; identical to SEQ ID NO: 12318
  misc_feature 1..237: note = source = /note="Description of Artificial Sequence: Synthetic coding sequence"
  source 1..237: mol_type = other RNA

SEQ ID NO: 13958 - RNA, 291 nt, synthetic construct; identical to SEQ ID NO: 12319
  misc_feature 1..291: note = source = /note="Description of Artificial Sequence: Synthetic coding sequence"
  source 1..291: mol_type = other RNA

SEQ ID NO: 13959 - RNA, 1083 nt, synthetic construct
  misc_feature 1..1083: note = source = /note="Description of Artificial Sequence: Synthetic coding sequence"
  source 1..1083: mol_type = other RNA
atggggctcctgctgttagtccctttactcctgttgcctggctcctatgggcttcctttctataatggattttactacagtaattctgctaatgaccagaatctcggaaatgggcacggtaaagacctcttgaatggcgtgaaactcgtggttgaaactcctgaggagacattgtttacatatcaaggtgccagtgtaatcctgccttgtcgttaccggtatgagcccgcactcgtgtcgcccaggcgggtaagagtcaagtggtggaagttaagtgaaaatggcgctcccgaaaaagacgtgctagtcgccattgggctgcggcacagatcttttggagactaccaaggaagggttcatttgaggcaggataaggagcacgacgtttcactggagattcaggatctgagactagaagactatggcagataccgttgcgaggtgatcgacggtctggaggatgaatcgggcctggtggaacttgagttacgcggcgtcgtctttccctaccagtcgcccaacggcagatatcaattcaattttcacgaggggcaacaagtgtgtgcggaacaagctgcggtggtagcatcatttgagcagctatttcgcgcttgggaagaagggctggattggtgcaacgcgggctggttacaggacgctacagtgcaatatcccatcatgctaccccggcagccctgcggaggccccggcctggctccaggtgtgagatcttacgggccccggcatagaaggctgcataggtacgatgtgttttgtttcgcaactgctctgaaaggacgggtttattacctggaacatcctgaaaagctaactctcacagaggccagagaggcatgtcaagaagatgatgccacaatcgcaaaggtaggtcaactgttcgccgcttggaaattccacggactggacagatgtgacgcaggttggctggcagacggttctgttaggtatcccgttgtgcatccacaccctaattgcggcccccccgagcccggcgttagaagttttggatttcctgacccccagtctcgactgtatggggtttactgctacagacagcattag

SEQ ID NO: 13960 - RNA, 810 nt, synthetic construct
  misc_feature 1..810: note = source = /note="Description of Artificial Sequence: Synthetic coding sequence"
  source 1..810: mol_type = other RNA
atgatccgaacattactgttgagtaccctggtagcaggagccttgtcgtgtggcgatccaacctatcccccttacgtcacacgggtcgtcggaggcgaagaagcgagacctaatagctggccctggcaggtgagtctgcagtactcatcgaatggaaagtggtatcacacttgcggcgggagcctgattgcgaactcctgggtactgaccgccgctcattgtatttccagttccagaacttatcgagtgggcttgggccgacataacctttacgtggccgagagtggaagcctggccgtgtcagtgagcaagatcgtggtacacaaagattggaattcaaatcagatctcaaaaggcaatgatatcgccctgttaaaactcgcgaaccctgtgtccctcaccgacaagattcagcttgcctgtcttccacccgccggtaccattctccctaacaattatccctgctatgtaacaggttggggtcggcttcagacaaacggggcagtcccagatgtgctgcagcaaggcaggcttcttgtggtagactatgccacctgttcctccagtgcatggtggggatcttctgtcaagactagcatgatttgcgcaggtggagacggggtgatatcttcttgcaatggcgactctggcggcccactgaattgtcaagctagcgatggaagatggcaggtgcatggtattgtgtcttttggaagtaggctgggatgtaattattaccataagccttctgtgttcactcgagtgtcaaattacattgattggattaactctgtgattgctaacaattag

SEQ ID NO: 13961 - RNA, 1122 nt, synthetic construct
  misc_feature 1..1122: note = source = /note="Description of Artificial Sequence: Synthetic coding sequence"
  source 1..1122: mol_type = other RNA
atgttgccatggctgctggttttcagtgctctggggattcaagcttggggcgattcaagctggaataaaacacaggcaaagcaagtgtctgagggattgcaatacctgttcgagaatattagtcaattgactgaaaagggactgcccacagatgtttccacaaccgtgtcccgcaaggcttggggagctgaggccgtggggtgctctattcagctcaccacccctgtcaacgtcttagtgatacaccatgttccaggcctggagtgccatgaccagactgtgtgttctcagcgactgcgtgaacttcaggcgcaccatgtccacaacaatagcggatgcgatgtggcttacaattttctggtcggagatgacgggcgcgtttacgagggcgtcggttggaatatccagggtgtgcacacacaggggtataacaatattagccttggctttgctttctttgggacaaaaaaaggacactcacctagtcctgcagccctgtccgctatggaaaatctcataacctatgcagtgcagaaaggccacctctctagttcctacgtgcagccgcttctcggtaaaggcgaaaactgtctggccccacgacagaagacttcactcaaaaaagcttgtccaggggtggtcccacggtcagtctggggcgccagagaaacacattgccctaggatgacattgcccgcaaagtatggcattataattcacacagccggccggacatgcaatatcagcgatgaatgtagactgctggtaagagacattcagagtttctacatcgatagactgaagagttgcgatattgggtacaactttctggttggacaggacggcgctatctatgaaggggttggctggaacgtccagggtagttcaacaccaggctacgacgacatcgccctgggaattacctttatggggacttttaccggcattccccccaacgctgctgccctcgaggctgcccaagatctcatccagtgtgccatggtcaaaggctatctcactcctaattatctgctcgtgggtcactctgatgtcgctcggactctgtctcccggacaagctctctacaacatcatcagcacttggcctcatttcaaacattag

SEQ ID NO: 13962 - RNA, 327 nt, synthetic construct
  misc_feature 1..327: note = source = /note="Description of Artificial Sequence: Synthetic coding sequence"
  source 1..327: mol_type = other RNA
atgcggcagcgattactgcctagcgtgactagtctcctcttagttgccctcctgttcccagggtcctcccaggcaaggcatgttaaccactccgcgacagaggcccttggagaattgagagaaagagcaccaggccagggaaccaacggcttccagctcctgcggcatgctgtgaagcgagacttgcttccacccagaaccccaccttaccaaggggacgtacccccaggcatcagaaatacaatttgtcatatgcagcagggaatttgcagactttttttctgtcactcaggcacgggacaacagcatagacagaggtgtggatag

SEQ ID NO: 13963 - RNA, 708 nt, synthetic construct
  misc_feature 1..708: note = source = /note="Description of Artificial Sequence: Synthetic coding sequence"
  source 1..708: mol_type = other RNA
atgtctccccccctcctgaaacttggagccgtactgtccacaatggcaatgatttcaaactggatgtctcagaccttaccctctcttgtaggccttaacacgaccagactgtccacccctgatacccttactcaaatctcaccaaaagagggctggcaggtgtactccagcgcccaagatcccgatggacgctgtatctgtacagtagtggcgcctgaacaaaacttatgcagtagggacgcaaagagcaggcagttgcggcaactcctggagaaagtccaaaatatgagccagtccattgaggtgctcaatctccggacccaaagagactttcagtatgtgcttaagatggaaactcaaatgaagggcttaaaggcaaaatttagacagattgaggatgatcgtaaaaccctcatgaccaaacatttccaagaactgaaagaaaaaatggacgaactgctgcctctcatacctgtgctggagcagtataaaactgacgcaaaactgatcacacaattcaaggaagaaatcagaaacctatctgccgtgctgaccggtatacaggaagaaattggggcctacgattacgaggaactgcaccagagggtgctatcgctcgaaaccaggttgcgggattgtatgaaaaaactgatcgaccttaaaaagagaaaggaggaagagaaaagacaacaaaagggagaagcctag

SEQ ID NO: 13964 - RNA, 606 nt, synthetic construct
  misc_feature 1..606: note = source = /note="Description of Artificial Sequence: Synthetic coding sequence"
  source 1..606: mol_type = other RNA
atgaatctcaactgtcccccttgcgttactggactaagggtatggtcttcctgccgatccaaacctaacagccgagcgcggagctgcagatcttgtacaggagcttccagaacacttccctctcaccatatgtcgcatgtcgaatgcccgtcaggtatcgttaatgaggaaaattttaaacagatctacagccagttttttccacagggagactccagcacatatgcaaccttcttatttaacgcttttgatacgaatcatgatggctccgtgtccttcgaagactttgtcgctgggctgtccgtaatattacgagggaccgtagatgatagactgaactgggcctttaatctgtacgatctgaataaggatggatgtataacaaaagaggagatgctcgacatcatgaaaagtatatacgacatgatgggtaagtacacataccccgccctgcgcgaggaagctcctcgagaacatgtggagtctttttttcaaaaaatggacaggaataaagacggggttgtaactatcgaagaattcatagagagttgccaaaaagatgaaaacattatgagatcaatgcaactattcgacaatgtgatttag

SEQ ID NO: 13965 - RNA, 693 nt, synthetic construct
  misc_feature 1..693: note = source = /note="Description of Artificial Sequence: Synthetic coding sequence"
  source 1..693: mol_type = other RNA
atgagattggccggtcctcttagaatcgtggtccttgttgtgagcgttggcgtcacttggatcgtggtctcaatcctccttgggggacctggcagtggcttccctagaatccagcaattgttcacatctccggaaagtagtgttacggcagccccccgtgcacgcaaatacaagtgtggcctgccccagccttgccctgaggagcatcttgcattccgagtggttagcggtgccgctaatgtaattggtcctaagatctgcctggaagataaaatgctgatgagtagtgtgaaggacaacgtggggcgtggtttgaatatagctttggtgaatggagtgagtggagaactcatagaagcaagagccttcgatatgtgggcgggagatgtgaacgatctgctcaaatttataaggccactgcatgaggggacattggtcttcgtggcatcctacgatgaccctgcaaccaaaatgaatgaagagaccaggaaacttttcagcgaactcggaagccggaacgctaaggagttagcctttcgtgactcatgggtatttgttggggcaaagggagttcaaaataagtccccatttgagcaacatgtgaagaatagcaaacactcaaataagtatgaaggatggcctgaagccttggagatggagggatgtataccaagacgatccacagccagttag

SEQ ID NO: 13966 - RNA, 684 nt, synthetic construct
  misc_feature 1..684: note = source = /note="Description of Artificial Sequence: Synthetic coding sequence"
  source 1..684: mol_type = other RNA
atgagagtagccggggccgccaaacttgtggtcgcagtggctgtctttctgctcaccttttatgtaatcagccaggttttcgagatcaaaatggacgcctcgcttggaaatttgttcgcccgatcagccctggacaccgccgccagaagcaccaagccccctagatacaagtgtggtattagtaaagcctgtcccgaaaaacacttcgctttcaagatggcatctggcgccgctaacgtggtgggcccgaagatttgtttggaggataatgtgttgatgtcaggtgtgaagaataacgtgggcagaggtatcaatgtagctcttgcaaatggcaaaacaggggaggtattggacaccaagtattttgacatgtggggaggggacgtggcaccctttatcgaatttttaaaagcaatccaggacgggacaatcgtgttgatgggtacttacgacgacggcgccactaaacttaatgacgaggccagacggctaattgccgacctggggagtactagcatcaccaacttgggctttagggataattgggtgttttgcggcggaaaaggtattaagaccaaatcaccgtttgagcagcacattaaaaataataaagatacaaataagtacgagggttggccagaagtggtagaaatggagggctgcattccacagaagcaggattag

SEQ ID NO: 13967 - RNA, 1656 nt, synthetic construct
  misc_feature 1..1656: note = source = /note="Description of Artificial Sequence: Synthetic coding sequence"
  source 1..1656: mol_type = other RNA
atggaggactctgattccgcagcgaagcagctaggcctcgcagaagctgccgccgccggcggagaggcagaggaacccgtgctcagccgagatgaagattctgaggaagacgctgattccgaagctgaaagagagacaccacgtgttacggctgttgcagttatggccgcagagccaggccacatggatatgggggctgaagcccttcctggtcccgacgaggccgccgccgccgctgccttcgccgaggtgaccaccgtgactgtagcaaatgtgggagcagccgcagataacgtatttacaacctccgtggctaatgccgcgtccatcagcggccacgttctgtctggccgcaccgccctgcagattggagactcgttgaatactgaaaaggccactcttatcgtggttcacactgacggttccatagtcgagacaactggcctgaagggacctgctgccccactgactcccggaccacagagcccacctaccccactcgcccctggacaagaaaaaggcggaactaaatataactgggatccatccgtttatgattccgaactgcccgtgcgctgccgcaacatatcagggaccctgtacaaaaatcgacttggttcgggcggaagggggagatgtataaagcagggagagaactggtattcacctacagagtttgaggccatggccggaagagcctcctctaaggactggaaacgaagcatcagatacgctggaaggcccctgcagtgcctgatccaggatggaattctcaatccccacgcagcttcctgcacttgtgctgcgtgttgtgatgacatgactctcagtggcccagtacgactttttgttccatacaagcgaagaaagaaagagaatgagttaccaaccacgccagtgaaaaaagatagtccaaaaaatataactctgctcccagctacagccgccaccacctttactgtcaccccctctggacaaatcaccacgtccggcgccctgacctttgaccgcgcttctaccgttgaggccacagccgtcatatccgaatcgcctgcccaaggagatgtgttcgccggggcgaccgtacaggaagccagcgtgcagcccccatgtcgggcctcacacccagaaccccattatccaggttaccaggactcctgccaaattgccccttttccagaagccgcactgccaacatcccaccctaagatagtactgacctcgttgcccgcccttgcagtgccaccccccacccctacaaaagcagcccccccagccctagtcaacggactggaattgagtgaaccgagatcgtggctctacttggaagaaatggttaattctctccttaatactgctcaacagctcaagactctgttcgaacaggctaagcatgcatcgacttacagggaggccgccacaaatcaggctaaaattcacgcagacgccgaacggaaggaacagtcctgtgtaaactgtggccgcgaggccatgtcagagtgtaccggatgtcacaaggtgaattactgcagcacattttgtcaaagaaaagattggaaggaccatcagcacatctgtgggcagtccgccgccgtcactgttcaagccgacgaagtccacgtagccgagtccgttatggaaaaggtgacagtgtag

SEQ ID NO: 13968 - RNA, 2022 nt, synthetic construct
  misc_feature 1..2022: note = source = /note="Description of Artificial Sequence: Synthetic coding sequence"
  source 1..2022: mol_type = other RNA
atgaagcccggaggattctggctacatttaactctgttgggtgcctcactccctgcagcacttggctggatggaccccggaacttcacgcggccctgacgtgggagtcggagagtctcaagccgaggagccacgaagttttgaagtaacaaggagagagggacttagtagccacaacgagctcctggccagctgtggtaagaagttctgtagtcgcgggtctcgatgtgttctgtccctggctcctgaagatcgtgtgtcagttaccaccgtcactgtaggtctgagtaccgtgctaacatgcgccgtgcacggcgaccttcggcccccaatcatctggaaacgcaacggactgaccctgaactttctcgacctggaagacatcaacgatttcggtgaagacgacagcttgtatatcacaaaggtaaccacaatacacatgggtaactacacatgtcacgcgtctgggcacgagcagctctttcaaacacacgtactgcaggtgaatgtccctccggtgatcagggtataccccgagtctcaggcacaggagccaggcgttgccgcttcattacgttgtcacgcagaaggcatcccgatgccaagaatcacatggttaaagaacggggtggatgtaagcactcagatgtcaaagcagcttagtctgttggccaatggctccgaattgcacatttccagcgtgcgatatgaagataccggggcgtatacttgtattgctaagaacgaagtgggtgttgatgaggacataagcagtctgtttatcgaggatagtgcacgcaaaacacttgctaacattttgtggagggaggaagggctatctgtcggaaacatgttctacgtattttcggacgatgggatcatcgtaatacatccggtggactgtgaaatacaaagacatctaaagcccaccgaaaagatttttatgtcatatgaagagatttgtcctcaacgggagaagaacgcaactcagccctgccaatgggtgagcgccgtgaatgtgcggaacagatacatatatgtagcgcagccagctctgtctagagtcctagtcgtcgatatacaggcccagaaagtgctacaatccataggcgttgatcctttgcccgctaaattaagctacgataaatcccatgatcaggtttgggtcctctcttggggggacgtgcacaagtcaagaccttcactgcaggtgatcacagaagccagcaccggtcagtctcagcatctcattagaaccccattcgccggcgtcgatgattttttcatccccccgacaaatttgattattaaccacattcggttcggatttatttttaacaaatcggaccccgctgtccacaaggtagatctggaaacaatgatgcccctaaaaaccatcggattgcaccaccacggctgcgtgcctcaagcaatggcacatacacacttaggaggttacttcttcatccagtgcagacaggatagtcctgcaagtgctgcacgtcaacttctggtcgattcagtcactgatagtgtgctcggaccaaacggcgacgtcactgggaccccgcacacctccccggatgggcgtttcatcgtgagtgcagctgcagatagcccctggttgcacgtgcaggaaattactgtcagaggtgaaattcagacactctacgacttgcagattaactccggaatctccgatctggcgttccaacggtccttcaccgagtctaaccaatacaacatatatgccgccctacatactgaacccgacctgctattcctggagctgagcactggaaaggttggaatgctcaagaacttgaaggagcctcctgccggccccgcacagccatgggggggcacacatagaattatgagagactctggactctttggccagtaccttctgactcctgcaagagagagtttattccttattaatggtagacagaacacactgaggtgtgaagtaagtggtataaagggtgggaccacagtggtttgggtcggcgaggtgtag

SEQ ID NO: 13969 - RNA, 2007 nt, synthetic construct
  misc_feature 1..2007: note = source = /note="Description of Artificial Sequence: Synthetic coding sequence"
  source 1..2007: mol_type = other RNA
atggatctcgtacttaaacgatgcttgctgcatctggctgtgatcggtgccttattggcagtgggggccacaaaagtgcctcgaaatcaagattggttaggcgtgtcacgccaactgcgcaccaaagcatggaatcgtcagctttatcctgaatggaccgaagcccagaggctcgactgctggaggggtggccaagtgtccttgaaggtgtccaacgatggtcccacactgatcggcgccaacgccagttttagcattgccttaaattttcccggaagtcaaaaagtgctccccgatggccaggtaatctgggtgaacaatacaatcataaacggcgaccaagtctggggaggacagcctgtgtatcctcaggagacagatgatgcttgtatattccctgacggcggcccatgtccatcaggaagctggtctcagaagaggagctttgtatatgtgtggaaaacatgggggcagtactggcaggtcctcgggggacccgtgtccggcctgagcattggtacaggtagagccatgcttgggactcacaccatggaagtcacagtctaccatagaagaggcagccgtagctatgtaccacttgcacattcttcttcagcattcactatcacagatcaggtgcccttctccgtgtctgtgagccaacttcgggcccttgacggaggaaacaagcattttttacgcaaccagccactaacttttgccttgcaattacatgacccctctggctacctggcagaagcagatttatcatacacttgggacttcggtgactcgtccggaaccttgatctcaagggctcttgtcgtgacacatacataccttgaacccggtcccgtcacagcacaggtcgttcttcaggccgccataccgctcacctcatgcggcagttcacctgttccagggactacagacggtcacagacccacagccgaggcacctaacaccacagcaggacaggttccgaccacggaggtcgtcggcactactcccggtcaggccccaaccgcagagccctcagggactacgtcagtgcaggttccaacgaccgaagtgatttcaactgctccagtgcaaatgccaacagccgagtccaccggtatgacaccagaaaaagttcctgtaagtgaggtcatggggactacgttagccgagatgtccacccccgaggccacaggcatgacacccgcagaggtgtctatagttgtactgagtggaacgacagcagcacaggtgacgacgaccgagtgggtagaaacaacagctcgagaacttccaatcccggagccagaaggtcccgacgcatcgagcataatgagtaccgagtcgattacaggcagcctaggcccgcttctggatggaactgctactttgagattggtaaaacgtcaggtgccgctagactgcgtcctgtataggtatggctccttcagcgttacactggatatagtgcaaggcatagaatccgccgagatccttcaggccgtgccgtctggtgaaggagacgccttcgagttgacagtcagttgtcagggaggacttcctaaagaagcctgtatggagatctcctctcctggttgtcagccgcctgcgcaaagactgtgtcagcctgtactgccctctcctgcctgccagctggtgctacatcaaatccttaagggtggcagcggcacctattgcctaaatgtttctcttgccgatacgaatagtctggcagtagtctccacacagctcatcatgcctgtgccgggaatccttctcactggccaagaagccggactcggacaagtaccactgatcgttggcatcctcctagtactgatggccgtcgtcctcgcaagcctgatctataggcgtcgcttaatgaaacaggactttagcgtacctcagttgcctcacagcagctcacactggctaaggcttccacgaatcttttgttcatgtcctataggagagaattctccactattaagtggacagcaagtgtag

SEQ ID NO: 13970 - RNA, 1746 nt, synthetic construct
  misc_feature 1..1746: note = source = /note="Description of Artificial Sequence: Synthetic coding sequence"
  source 1..1746: mol_type = other RNA
atgcagcaggacggacttggagtcggcactcgcaacggttcaggaaaagggagaagcgtccatccctcttggccctggtgtgccccaagaccattgcgatacttcggccgtgatgctcgtgccaggagagcacagaccgccgcgatggctttattggctggtggcctatctagaggactgggctcccaccccgctgcagccggacgagacgcagtggtgttcgtctggcttctgctgtccacatggtgcaccgccccagcccgcgctatccaggtcaccgtgagcaatccttaccacgtcgtcatactgtttcaaccagtgacactaccatgcacctatcagatgaccagtactccaactcagcccatagttatctggaagtacaagagtttctgtagagatcgaatagccgatgcttttagcccagcctcagtggacaatcagcttaacgcccagctcgcagctggcaaccccggatacaacccctatgtggaatgccaagacagcgtgagaactgttagagtcgtggcaactaaacaaggaaatgctgtaacattaggcgattactaccaaggtcgccgcatcaccatcaccggaaacgcagacctaacatttgaccagacagcatggggagactctggtgtgtattattgctctgtcgtcagtgctcaggacctgcaggggaacaacgaagcatacgccgaactcatcgtgctggtatacgcagctggaaaggccgcaacttcaggtgtgcctagcatttatgctccttccacttacgcccacctgtctcccgccaaaacccctccaccaccagctatgataccgatgggcccagcctacaacgggtaccctggaggataccccggcgacgttgaccgcagcagctctgctggtgggcaaggctcttacgttccactgttgcgcgacacagattcaagtgtggccagtgaggtgaggagcggttatcggattcaggccagccagcaggatgactctatgcgcgtgctctactatatggaaaaagagcttgctaacttcgacccctcacgacctgggccccctagcggccgcgtagagcgagccatgtctgaggtgacttctttgcacgaggatgactggcggagtagaccttcacggggacctgcattaacccccatacgcgatgaagagtggggcggacattctcctagatctcccaggggatgggatcaggagcccgcccgagaacaggctggcggtggttggagagccagaagacctcgtgcgagatctgtcgacgctttagacgacctaactccaccttctactgccgaatcaggctcccgctccccaaccagtaatgggggccgctcaagggcgtatatgccgccacgcagtaggagccgcgacgatctctacgaccaagatgatagccgcgactttcccagatcacgcgacccacactacgacgacttccgatcaagggagagaccaccagcggatccacgaagtcaccaccatcgtacaagggatcctagggacaatggttctcgatccggcgatttgccctatgatggaaggttactggaggaagcagtgcggaaaaaaggctcagaggaaagaagacgccctcataaagaagaagaagaagaagcgtattatccgcccgcacctcccccttactctgaaaccgactcacaagccagtcgggagaggagactgaagaaaaatctggcccttagccgagaaagcctagtcgtttag

SEQ ID NO: 13971 - RNA, 1959 nt, synthetic construct
  misc_feature 1..1959: note = source = /note="Description of Artificial Sequence: Synthetic coding sequence"
  source 1..1959: mol_type = other RNA
atgccccctcctttgccactgctgctattgacggtattagtggttgccgccgctaggccgggctgtgagtttgagcggaaccctgctggtgaatgccaccgtcccccagccgccgactcggcaacttgtgttgatctgcagctccgcacttgctccgacgctgcttacaaccatactacgtttcccaaccttctccaacacagatcgtgggaagttgtagaggcctcaagtgaatacatcctgctctcggtgcttcaccaacttttagagggacagtgtaacccagacctgagactactggggtgtgctgtgttagccccaaggtgcgaaggcggttgggtgagacgaccctgtaggcatatttgcgagggcttgagagaagtttgccagcccgccttcgacgcaatagacatggcctggccctactttctggactgtcaccgctacttcacacgtgaggatgagggatgctatgacccactggaaaaattacgaggcggtttggaggccgacgaggctctaccttctggtctcccacctacattcattcgattctctcatcatagttacgcgcagatggtccgtgtccttcgacgaactgcctcacgatgcgcccatgtggcccgtacttatagcatcggacgctcttttgatggacgtgaattactcgtgattgaatttagtagtcgccctggtcagcacgagctgatggaacccgaagttaaattgattggcaacatccacggcaatgaggttgccggtcgggagatgctcatttaccttgctcaatatctgtgctcggaatacttacttggtaaccctaggatccaaaggctcctcaacactacccgcattcacttactcccatcgatgaatccagatgggtatgaagttgcggctgcggaaggagcaggatataatggatggactagcggtcggcagaacgcccagaacttagacctgaacaggaatttccccgatctgacatctgaatactatagattggccgaaacccggggagctcggagcgatcacattccaatcccccagcactactggtggggaaaggtcgctccagaaactaaagctatcatgaaatggatgcagaccataccctttgtactcagtgcctcactccatgggggagacctggtcgtctcttatccttttgattttagcaaacatccacaggaagagaaaatgttctcgcctactccagacgagaaaatgttcaaactgctttctagagcttacgccgatgttcaccctatgatgatggatagatccgaaaaccgctgtgggggaaactttctgaaacggggatccataattaatggagctgactggtatagtttcacaggcgggatgtcagattttaactacttgcatacaaactgcttcgagatcaccgtcgagctgggatgtgtcaagtttccaccagaagaggccctctacatcctctggcaacacaataaggaatccctgctgaatttcgtagagactgtgcatcgaggaataaaaggcgtggtaactgacaagttcggcaagcccgttaagaacgccagaattagcgtgaaaggcattagacatgatatcaccacagcccctgacggtgattactggagactcttaccacccggtatccacatcgtgatcgcccaagctcctggctacgctaaggtaatcaagaaggtgatcatccctgctagaatgaaacgtgccggcagggtcgactttatcctccagcccctcggcatggggccaaaaaactttatccacggtctgagaagaactgggcctcacgatccattgggtggcgcttcatccttgggcgaagccaccgagcctgaccctctgagagccaggcgccaaccatcagcagacggcagcaaaccttggtggtggagttactttacatcacttagtacacacagacctcgttggctgctaaaatattag

SEQ ID NO: 13972 - RNA, 279 nt, synthetic construct; identical to SEQ ID NO: 12333
  misc_feature 1..279: note = source = /note="Description of Artificial Sequence: Synthetic coding sequence"
  source 1..279: mol_type = other RNA

SEQ ID NO: 13973 - RNA, 249 nt, synthetic construct; identical to SEQ ID NO: 12334
  misc_feature 1..249: note = source = /note="Description of Artificial Sequence: Synthetic coding sequence"
  source 1..249: mol_type = other RNA

SEQ ID NO: 13974 - RNA, 411 nt, synthetic construct
  misc_feature 1..411: note = source = /note="Description of Artificial Sequence: Synthetic coding sequence"
  source 1..411: mol_type = other RNA
atggataatgtacaacccaagataaaacaccggcctttctgtttttctgttaaaggccacgtaaaaatgttacgcctcgccctcacggtcacgtccatgactttcttcataattgcccaggccccagaaccctatatagtcattaccggcttcgaagtgaccgtgattctatttttcatccttctctacgttctcaggctcgaccgactgatgaaatggctgttctggcccctgctggacatcattaattcccttgtgacaaccgtcttcatgttaatcgtctccgtgctggccctgatccctgaaaccaccactcttaccgtaggagggggtgtgttcgccctggtaaccgcagtgtgttgtctggccgacggagctctgatatataggaaattgctttttctccgttag

SEQ ID NO: 13975 - RNA, 1068 nt, synthetic construct
  misc_feature 1..1068: note = source = /note="Description of Artificial Sequence: Synthetic coding sequence"
  source 1..1068: mol_type = other RNA
atgcagctcactacttgcctgagagaaactctctttaccggggcatcccagaaaacaagcctttggtggctgggtatcgccagtttcggagtacctgagaaattgggatgcgctaacctcccacttaactcccgccaaaaagaactctgcaaaagaaaaccctacctcctacctagcattcgggaaggcgcccgtctcggcatccaagaatgtggcagccaattccggcatgagcggtggaattgtatgattactgcggccgctactacagctccaatgggcgcgtcaccactctttggatatgagttgtcctccggtaccaaagagaccgcctttatttacgctgttatggccgccgggcttgtgcattcagtaactagaagttgtagcgctggcaacatgaccgaatgcagctgcgatactacactgcagaatggcggctccgcgtccgaaggctggcactggggaggttgttcagacgatgtgcagtacggaatgtggttctctagaaagtttttggatttccccatcggcaacaccacaggcaaagagaataaagtattgttggccatgaatctacacaataatgaggcaggccgtcaggcagtggctaagcttatgtcagttgattgtaggtgccatggagttagcggatcgtgcgcggtgaagacatgttggaagaccatgtcctccttcgagaaaattggacatctcctgaaggataaatatgaaaattctatccaaatttccgacaagacaaaacgcaagatgagaagacgcgaaaaggaccagaggaagatacccattcataaggacgaccttctgtacgtgaataaaagtcccaactattgcgtggaggataaaaaattggggatacctggaacacagggaagagagtgtaatagaacaagcgaaggagcagacggctgtaatctcttgtgttgcggtaggggttacaacacccatgtagtgagacacgtagaaagatgcgaatgtaagtttatttggtgttgctatgtgaggtgcagaagatgtgaaagcatgacagacgtgcatacgtgtaagtag

SEQ ID NO: 13976 - RNA, 2916 nt, synthetic construct
  misc_feature 1..2916: note = source = /note="Description of Artificial Sequence: Synthetic coding sequence"
  source 1..2916: mol_type = other RNA
atgctgagaagacccgcccctgccttggcccccgccgcacggctcctccttgctgggctgctgtgtggtggcggcgtttgggcagcacgcgtaaataaacataaaccctggctggagcccacctatcacggcatcgtcaccgaaaacgataacactgtccttcttgacccacccctgattgctttggataaagacgctcctctgagatttgctggcgaaatctgcggctttaaaattcacggtcaaaatgtgccttttgacgctgtggtggttgataaaagcacaggcgagggtgttatcagaagtaaagagaagctagattgcgaacttcagaaagactacagtttcactattcaggcctacgattgcggcaagggccccgacggcacaaacgtgaaaaaaagtcacaaagcaaccgtgcacatacaagtcaatgacgtcaacgaatacgctcccgtatttaaggaaaaatcatacaaggcaaccgtcattgaaggcaaacagtacgacagcatcctcagggtcgaggctgtcgacgccgattgctccccccagttctcacaaatatgctcctatgagataatcaccccagacgtcccatttaccgttgacaaggatggctatatcaagaatacggagaaactgaattacggcaaagagcatcagtataaattaacagttacagcatatgactgtggcaagaaaagagccactgaagatgtcctcgtgaaaatctccattaaaccaacttgtacccccggttggcaaggctggaataatagaattgagtatgaacccggaacaggcgccctcgccgtcttccccaacattcacctggaaacatgcgacgaaccagtggccagtgtccaagcaacagtagaattggagacatcacacataggaaagggctgtgacagggacacatattccgaaaagagtctgcaccggttgtgcggagctgccgctggtacagctgaattgttgccctcgccttccggctctctgaattggacaatgggtttaccaacagataacgggcacgactccgaccaggtcttcgagttcaacgggacacaggcggtcagaatccccgacggcgttgtgagcgtcagcccaaaagaaccattcacaatttccgtttggatgcggcacggccccttcggaagaaagaaagaaacaatcttatgtagtagcgacaagacagatatgaaccgccatcactattccttatatgtacacggctgcagacttatattccttttccggcaggatccatctgaagaaaaaaaatacagaccggctgaatttcattggaagctaaatcaggtgtgcgacgaggaatggcatcactatgtcctgaacgtggagtttccaagcgttacgctgtacgtggacggcacaagtcatgaaccattcagtgtcaccgaagattatcccctccacccatcaaagatcgagacccagttggttgttggcgcttgttggcaggagttttctggtgttgaaaacgataatgagacagagccagtgaccgtggccagcgccggcggtgacttacatatgacacagtttttcaggggtaatctggccgggcttacactgagatctggaaaactggcagacaagaaggtaattgattgtttatacacatgcaaagaagggctggatctccaggtgctcgaagactcaggccgcggcgtgcagattcaggcgcatccatcacagttagttttgacactcgagggagaggacttgggagagctggataaagctatgcagcatataagctacctgaactcccgccagttcccaacgccagggatccgtaggctgaagataacgtcaaccataaagtgtttcaacgaggccacatgcatttctgttcctcccgtggacgggtatgtgatggtgctccagccagaagagcccaaaattagcctatcaggagttcatcattttgccagggctgcatccgagttcgaatcatctgaaggcgtgtttctgtttccagaattaagaatcatttcaactatcaccagagaggtggaaccagagggggatggagcagaagacccaacagtgcaggaatcactggtctccgaggaaatcgttcacgacctggatacttgcgaggttacagtggagggagaagagcttaatcatgagcaagagagcctcgaggtggacatggcaaggttgcaacaaaagggcattgaggtctccagcagcgagctcggaatgacatttacaggcgtggacacaatggcaagctatgaggaggttttacacctattaagatatcgaaactggcacgcccgctccctactggacaggaagttcaaactcatctgtagcgaactaaacgggaggtacatttccaatgaatttaaagtcgaagtgaacgtgatacacactgcgaatcctatggaacatgcgaaccatatggcagcccaaccgcagttcgtccatcccgagcatagatcatttgttgacctgagtggacataacctggcaaatcctcacccgttcgccgtggtgcctagcactgccaccgttgtaatcgttgtatgtgtgtctttcctggtgttcatgataatcctcggtgtcttcaggatccgggcagcacacagaaggacaatgagagatcaggataccggaaaagaaaacgaaatggactgggacgacagcgcactgaccatcaccgtaaatccaatggaaacgtatgaagaccagcacagcagcgaagaagaggaggaggaggaggaggaagaggagagcgaggatggtgaagaagaagacgatattacatctgccgagagcgagtcatcagaagaagaggaaggtgaacagggggacccccaaaacgcaacaagacaacagcagttagagtgggatgatagcaccctcagctattag

SEQ ID NO: 13977 - RNA, 564 nt, synthetic construct
  misc_feature 1..564: note = source = /note="Description of Artificial Sequence: Synthetic coding sequence"
  source 1..564: mol_type = other RNA
atggtggccgctaccgtggcagccgcctggttactcctatgggcagccgcctgcgcacaacaagagcaggatttttatgatttcaaggctgtgaatataaggggaaaacttgtcagcctagaaaagtatagaggtagcgtgagcctggtggtgaatgtcgcaagtgaatgtggttttacagaccagcattatagagcgctgcagcagcttcaaagagatctcgggccccatcactttaatgtcctcgcctttccttgcaatcaatttgggcagcaggaaccggactccaacaaagaaatagaaagcttcgctcgccgcacctacagcgtctcatttcctatgttctcaaagatagcggtcaccggcactggtgcacaccctgctttcaaatatctggcgcagacatcgggtaaggaacctacttggaatttctggaagtacctcgttgcccctgacgggaaagttgtcggcgcttgggatccaactgtcagcgtggaagaggttaggcctcaaattaccgcccttgtacgaaaattgatcttgctcaaaagagaggatctgtag

SEQ ID NO: 13978 - RNA, 303 nt, synthetic construct; identical to SEQ ID NO: 12339
  misc_feature 1..303: note = source = /note="Description of Artificial Sequence: Synthetic coding sequence"
  source 1..303: mol_type = other RNA

SEQ ID NO: 13979 - RNA, 2352 nt, synthetic construct
  misc_feature 1..2352: note = source = /note="Description of Artificial Sequence: Synthetic coding sequence"
  source 1..2352: mol_type = other RNA
atgcgatggcagtgcggaacacggtttcgaggacttagaccagcggtggcgccctggaccgctctcctcgctttgggtctgcccggatgggtgctggccgtctccgctacagcagccgccgtggtgcctgagcagcacgccagtgtcgctggacagcatcctctagactggcttctgacagatcgaggaccatttcaccgtgcccaggaatatgccgacttcatggaaagatatcgccagggattcactaccaggtacagaatctatcgtgagtttgcccgatggaaagtgaataatcttgcgctagaaagaaaagactttttctcactccctttaccgttggcaccagagttcatcagaaatattcgcctactgggacgtagacccaacctgcaacaggtgaccgaaaacttaattaagaaatacgggacccactttctcttatctgccacgctcggcggtgaagagagcctgactatattcgtcgacaagcagaaattgggaagaaaaacggaaactacaggcggtgcctccataattggcggctctggtaacagcacagcggttagtttagagactctgcaccaactcgccgcttcatacttcatcgaccgggaatccaccctcagaagactccatcacattcagatagccaccggcgcaataaaagtcacagagacacggaccggaccactgggctgctccaactacgataatctagactctgtttcaagcgtgctggtacagtcgccggagaacaaagtgcaactccttgggctgcaagtgctactccctgagtatttgagagaaaggttcgtggccgccgcactctcatatatcacctgttcttccgaaggagaactagtatgcaaggaaaacgattgctggtgcaagtgcagccccactttcccagaatgtaattgtcccgacgcagatatacaggctatggaggattctctgttgcagatacaggacagttgggccacacataacagacagttcgaagagtccgaggaatttcaagcgctactgaagaggcttccagacgaccgattcctgaacagcacagccatttcacagttctgggctatggacacctcactacaacatcgatatcagcaattgggagccgggttgaaggtgctattcaaaaagactcatcggatccttagacgtctgtttaatttatgtaagcgctgccatcgtcagcctcgttttcgccttccaaaggaacggagcctctcttactggtggaacaggattcagtctctactttactgcggagagagcacttttccgggaacattcttggaacagagtcatagctgtacatgtccatatgatcagagttcttgccagggccccatcccttgcgcgctcggcgaaggtccagcctgtgctcactgtgcccccgacaactccacacgctgcgggagctgtaatccaggctatgtgctagctcagggtctttgccgcccagaagtagctgagtctttggaaaattttttaggcctcgaaacagacttgcaggatttggaacttaaatatttactacagaagcaggattccagaatcgaagtccatagcatcttcatctcaaatgatatgcggctcggctcgtggtttgatccctcctggaggaagcggatgctgttgacgctgaagtctaacaagtacaaacccggccttgtccacgtaatgttagcgctgtccctccagatttgcttgactaaaaattctactctcgaaccagttatggccatttacgtgaacccctttggtggctcacatagcgaaagttggtttatgcccgttaatgaggggagctttcccgactgggagcgaacaaacgtggacgccgccgctcagtgccagaactggacaataactttgggtaatagatggaaaaccttctttgagaccgtacatgtctatcttagatcacgaattaagtccttggacgatagtagcaatgaaacaatatactacgagccacttgaaatgaccgatccttctaaaaatttgggctacatgaaaattaacactctccaggtcttcggatatagcctgcctttcgatccagacgcaatacgggatctcatcctgcaactggattacccttacacccagggctcacaggacagcgcactgctgcagttgatcgagcttcgtgatcgagtgaatcagctgtcaccccctggcaaagtacgcttagacttgttcagttgcctccttcgtcaccgcctgaaacttgccaataacgaagtcggacggattcagtcttcccttagggcctttaattctaaactccccaatcctgttgagtatgagaccggtaaactgtgctcttag

SEQ ID NO: 13980 - RNA, 2016 nt, synthetic construct
  misc_feature 1..2016: note = source = /note="Description of Artificial Sequence: Synthetic coding sequence"
  source 1..2016: mol_type = other RNA
atggcacaattgttcctccccctgttagctgccctggtcttagcccaggcgcccgcagccctcgccgacgttcttgaaggggattccagtgaagacagggcatttcgcgtgcggattgccggtgatgcacccctacagggagtcctgggtggggcactcaccataccatgccacgttcactatctgaggccgccgccgtctcgcagggccgtcttgggtagcccacgcgtcaaatggaccttcttgtcccgaggaagagaggcagaggtgttagtagcgagaggtgtaagagtcaaagtcaatgaggcgtataggtttcgagtcgcccttcctgcatatcccgcttccctgactgacgttagtctagccctgagtgaattgaggccgaacgattctggaatttacagatgcgaagtacaacacggcatagacgatagttccgacgcagtggaggttaaggtaaaaggtgtcgtattcctgtatagagaaggatctgcccgctacgccttctcatttagcggcgcccaagaggcttgtgctagaattggggcccatatagccaccccagaacagctttacgcagcctatttgggcggctatgagcagtgtgatgctggttggcttagcgaccagacagtgagataccccatccagacacccagagaagcatgttacggagacatggatgggtttcccggagtgcggaactatggcgtggtcgatcctgatgacctctatgacgtctattgctacgctgaggatctcaacggggagctttttttaggcgaccctccggaaaaacttacactcgaagaagcacgtgcatattgccaggagaggggagctgaaatcgccacaactggccaactttacgccgcctgggatggaggactagatcactgctccccaggatggctggccgacggcagtgtgcgctacccaatagtaacgccatcccagcgttgcggcggaggactcccaggcgtgaagactctctttttatttcctaaccagacaggattcccaaataaacacagccgatttaacgtgtactgtttccgagattcagcacaaccaagcgcgatccctgaagcttccaatcctgcaagcaatccagcttccgacggcctcgaggcgatcgtgacagtcaccgagacccttgaagaactccagcttccacaggaagcgaccgagagtgagagtcgtggcgcgatttactctatccctattatggaagacggaggaggtggaagctctacacccgaagaccccgccgaggccccacgtaccctccttgaatttgagacccagtcaatggttccccctacgggcttctctgaggaagaaggcaaagctctcgaggaagaggaaaaatatgaagacgaagaggagaaagaggaagaagaggaagaggaggaagtcgaagacgaggccttatgggcctggcctagtgaactttcctcaccgggacccgaagcgagcctacctacagaacccgcagcccaggaggagagtttgagccaggcccccgcccgcgctgtccttcaaccaggcgcatccccattacccgacggggagtcagaagcgtcccgaccacctagggtgcacgggcctcctactgagacactgccaacgcctagagagcgtaacttggcctctccatcccctagtacattagtggaagcgagggaagtgggagaagctaccggtggtcccgaactgtccggcgtacctcgtggggaatccgaagagaccggaagctcagaaggagcaccaagcttgctgccagccacacgagcacccgaaggaactagggagttggaggccccatccgaggataattccggccgaactgccccagctggcaccagcgtacaggctcagcccgtcctgccaacggatagcgcgtctcgtggtggagtcgctgtggttccagcttccggcaatagcgctcagggaagcaccgcattgtctatactgttattgttcttccccttacagttgtgggtgacttag

SEQ ID NO: 13981 - RNA, 375 nt, synthetic construct
  misc_feature 1..375: note = source = /note="Description of Artificial Sequence: Synthetic coding sequence"
  source 1..375: mol_type = other RNA
atgtataaattggcctcctgttgcctgctgtttatcggatttctcaacccccttctctctctgcccctcttagactctcgagaaatttctttccaactttctgccccacacgaagatgccaggctgactcctgaggagcttgagcgtgcgagtcttttgcaaattctgcccgaaatgttaggcgctgaaaggggcgacatcctgcgcaaagctgacagctccacaaatattttcaaccccagagggaatctacggaaatttcaggacttctctggccaggacccaaacattctcctgtctcacctcctcgctagaatttggaagccttacaagaagagagaaacaccggactgtttttggaaatactgcgtatag

SEQ ID NO: 13982 - RNA, 1326 nt, synthetic construct
  misc_feature 1..1326: note = source = /note="Description of Artificial Sequence: Synthetic coding sequence"
  source 1..1326: mol_type = other RNA
atggagttcgaatttgatcgactgcgggcctttcaggccatgcaggttcattgcaataacatgcacacgctgggcgcccggcttcctgggggagtcgaatgtaggttccgaagaggaccagctatggcatgggaaggcgagccaatgaggcacaatctggggggaaatctcggagaccctcgggcccgagcagttagtgtaccgttgggaggcagagttgctaggtttctccaatgtaggttcctctttgcaggcccttggttacttttttcagaaatcagttttattagtgacgtagttaataactctagcccagctcttggagggacattccccccggccccctggtggcctcctggtcctcccccgacaaatttctcttcgttggagctcgagcctagaggacagcaaccagtcgcaaaggccgaaggatctccaaccgcaatcctcattggctgtcttgtcgccattatcctgctgttacttctaattatagcgttgatgctatggcgtctgcattggcgcagactcttgtctaaagtactcgagagccacccacgaaccagatcacccggcctcgtaggcataagaccaactccactgcctgtgtcccccatggccctgcgctgttgcagcccaatccaaccaaccgcaagcttttggcctcttacacctgttccattggaagcacgcgcccccccccaccctcctggcccaaacccccctactcctcgcggtgtcaccggaggaaatacttatgctgtgccagctctgccccctggcgccgtgggcgacggccctcctagggttgacttcccccgctcacgattgcgatttaaggagaagcttggagaagggcaatttggagaggttcatctgtgcgaagttgacagccctcaggacctggtatccctggacttcccactgaacgttaggaaaggacatcctctgctggtggctgtgaagattctcaggccagatgctactaagaatgctaggaacgattttctgaaggaggtgaaaataatgagccgactaaaagacccaaatattataaggctgctcggagtttgcgtacaagatgaccccttgtgcatgattacagactatatggaaaacggcgacctaaaccagtttctgtccgctcatcagctggaggacaaagccgcagaaggagctcctggtgatggacaagccgcccaaggccccacaatctcttacccaatgttattgcacgtcgccgcccagattgcctccggtatgcgttatcttgcgactctgaactttgtacacttttggggagagagacaccgatttctgcactag

SEQ ID NO: 13983 - RNA, 1950 nt, synthetic construct
  misc_feature 1..1950: note = source = /note="Description of Artificial Sequence: Synthetic coding sequence"
  source 1..1950: mol_type = other RNA
atgcaacaggacggccttggcgtgggtactagaaatggatctggaaaaggtagaagtgtgcacccctcctggccttggtgcgctcctcgtccactgcgttattttggaagagatgcaagagccagacgcgcccagactgccgcaatggccctgttggccggcggattaagcagaggtctcggatcacaccccgctgctgccggtcgggacgccgtggttttcgtttggctactgctgtctacttggtgtaccgcccccgcaagagccattcaggtgaccgtgagtaatccttaccacgtggtcatattgtttcaacctgttactctcccctgtacataccagatgacatcaacccccacacaacccatcgttatttggaagtataaaagtttttgtagagaccggatcgcggatgcgttctctccagcttctgtcgataatcagctgaacgcacagctggccgccgggaacccaggatataatccctatgttgaatgccaggatagtgttcgaaccgtcagagtggtagcgactaagcaggggaatgcagttacgctgggcgattactaccagggaagacggataaccattaccggcaacgccgatctgaccttcgatcaaacagcttggggagattcaggtgtgtattactgctccgtggttagcgcccaagatctgcagggaaacaacgaggcctacgccgagctcatagtcctgggtcgtacatctggtgtagccgaattattgccgggattccaggctggacccatcgaagactggctgtttgtggtcgtggtgtgtctggcagcctttctgatcttcttgcttctcggtatttgttggtgtcaatgctgtccccacacttgttgttgctacgtacgttgcccttgttgccctgataaatgttgctgcccagaggccttatatgctgccggcaaagctgcaacctcgggagtgccctcaatctacgctccttccacctacgcccacctgtccccagctaaaacccccccaccacctgccatgatccccatgggcccagcatacaatggttacccgggcggatatcctggggatgtcgacagatcttcgtcagcaggaggtcagggttcgtacgtgccattacttcgtgatacagattcaagcgtggcttcagaagtgaggtccggctacaggattcaggccagccaacaagatgactcaatgcgcgttttgtactatatggaaaaggaactggcgaacttcgacccatctcgccccggtccacctagcggaagagtcgaaagagcaatgtctgaggtgacttcactacatgaggatgattggcgcagcagacccagtcgagggccagcattgacacccattagagacgaggagtggggaggacattcaccacgatctccaaggggctgggatcaggaacccgcccgggaacaagcgggagggggctggagagctcgcagaccccgggccagatcagtggatgccttggatgatttgacaccaccgagtacagctgaatcaggcagtagatctcctacaagcaacggcggaagatcacgggcttatatgccaccccgttctcgcagccgggacgacctgtatgaccaggacgattcacgggatttccccagatccagagacccccactatgacgacttcagaagccgggaaaggcctccggccgaccctagatcacatcaccaccgcacccgggacccgagggacaacggatcacgaagcggagacttaccgtacgacggcagacttctggaggaggctgtccgcaaaaaaggcagcgaagagcgccgaaggcctcacaaagaagaagaagaggaggcatactatccacctgctcccccaccctattctgaaaccgacagtcaagccagccgcgagcgcagattaaaaaaaaacctggccttaagtcgtgaatccctagtcgtttag

SEQ ID NO: 13984 - RNA, 402 nt, synthetic construct
  misc_feature 1..402: note = source = /note="Description of Artificial Sequence: Synthetic coding sequence"
  source 1..402: mol_type = other RNA
atgtctgaaagagtggagagaaattggtctacaggggggtggcttctggccctgtgcttagcatggctttggacacatctaacgctggccgctctccagccccctacggccacagtgctagtgcaacaggggacctgcgaggtgatagccgcacataggtgctgtaatagaaataggatcgaggagagaagtcaaactgtaaaatgttcatgctttagtggccaggtggctggtaccaccagagcaaaaccatcttgtgttgacgccagtatagtgttacaacggtggtggtgccaaatggagccgtgcttaccaggagaagagtgtaaagtgttgccagacctgtccgggtggagttgttcgagtgggcataaggtcaagactacgaaggtcaccagatag

SEQ ID NO: 13985 - RNA, 699 nt, synthetic construct
  misc_feature 1..699: note = source = /note="Description of Artificial Sequence: Synthetic coding sequence"
  source 1..699: mol_type = other RNA
atggtagccgcaaacactcgcgcacccgaagacactcgagcccctgcaggccccaaaccatcctcctgtgaatgggcagtgtgctgggcaccagcacgttgtcgcatttctgccacagcctgtggtaactcgtgggaccgccctgccggccgcacccagttactgtggacgcctgccgctccgactgctatggctgaagttggcccaggacatacccccgcacatcctagtcagggagcagtccccccctcacgagccgcggccgaaccccacctcaaaccaagccccagtgagcttcagaccgctggtccagccgccactatccctgctaggctgtgtaccagaaaacccagactggtctatactcagtgttggtacgtcaaagagccgaagcatccagaaattgtcacaccatggggtactgccgcgagacattcctggagacagcaccaaatgttgtcagcctctgagaggcgctgcctccctcgcgatgtggagcagaaactcgggccagaacatactggtccatgcctcgatgaacagggaagagaagctgagctggcacgttccggaccttcagcagccggtcccgttagactgaaacctggtcttgtgcccggactctttttgttgagctgtactacttccccctccacatgtctgcccgtcggccaagaaggggaaaggggcatgttgtag

SEQ ID NO: 13986 - RNA, 711 nt, synthetic construct
  misc_feature 1..711: note = source = /note="Description of Artificial Sequence: Synthetic coding sequence"
  source 1..711: mol_type = other RNA
atgtgcgttacttatcacaacggaaccgggtactgtaaatgcccagagggcttcctgggagaatattgtcaacacagagacccgtgcgaaaaaaatcggtgccaaaacggtggtacatgcgtggcccaagcgatgttagggaaggctacctgcagatgcgctagtggttttacaggcgaggactgtcagtattcaacctcccacccctgttttgtgtcccgcccctgtttaaacggcggaacgtgccatatgttgtctagggacacctacgaatgcacctgccaggtgggtttcacaggaaaagagtgccagtggaccgatgcctgcttgtcccacccatgcgcaaacggaagcacgtgcaccaccgtggcgaatcagttctcatgtaagtgtctgacaggttttacagggcaaaaatgcgagacagatgtgaatgagtgcgacataccggggcactgtcaacacggcggcacatgtctcaatctgccaggttcctaccagtgccaatgtcttcaaggttttaccggccaatattgtgactccctctacgtgccttgcgccccatccccctgcgtaaacggcggaacctgccgccagaccggggattttactttcgagtgtaattgtttaccagagactgtgagacgagggaccgagttatgggagcgagatagggaggtgtggaatggcaaggagcatgatgagaactag

SEQ ID NO: 13987 - RNA, 204 nt, synthetic construct; identical to SEQ ID NO: 12348
  misc_feature 1..204: note = source = /note="Description of Artificial Sequence: Synthetic coding sequence"
  source 1..204: mol_type = other RNA

SEQ ID NO: 13988 - RNA, 75 nt, synthetic construct; identical to SEQ ID NO: 12349
  misc_feature 1..75: note = source = /note="Description of Artificial Sequence: Synthetic coding sequence"
  source 1..75: mol_type = other RNA

SEQ ID NO: 13989 - RNA, 3345 nt, synthetic construct
  misc_feature 1..3345: note = source = /note="Description of Artificial Sequence: Synthetic coding sequence"
  source 1..3345: mol_type = other RNA
atgcttgcctcatctagccgtattagggccgcctggacccgcgcactgctgctgccactcctccttgccggacccgtgggatgcctcagccgccaagagctttttcccttcggcccaggacagggcgatcttgaacttgaggatggggatgattttgtgtcccccgcccttgaactcagcggcgcattgcgtttctatgaccggagtgatatcgatgcagtttacgttacaactaacggaattatagctacttctgaaccacccgcgaaggagtctcatcccggccttttcccccctactttcggggctgtggcaccattccttgcggatttagataccaccgatggacttgggaaagtttattaccgtgaagacctgtcaccttcaataactcaacgggccgctgagtgtgtgcatcgtggttttcctgaaatttctttccagcctagctccgcagtggtcgtgacatgggagtccgtcgcaccctaccagggacccagccgcgatccagaccagaagggtaagagaaacacttttcaagcagtgctcgctagttcagattcatcttcttatgccatatttctttatcctgaggacggtctccagtttcacacaacctttagcaaaaaagaaaacaatcaggtccccgccgtggtggcatttagccaaggatctgtgggatttttatggaaaagcaatggcgcttacaacatctttgctaatgatcgggaatccgtcgagaatttggcaaaaagtagcaattcgggtcaacagggcgtgtgggtgtttgagatcggatcccctgccacaactaatggggtagtacccgccgacgtaatattggggacagaggatggtgccgaatatgacgacgaagacgaagactatgacctggcaacaacccgtctcggcctcgaggatgtgggaactacccccttcagttataaggcgcttagaaggggcggagccgatacttacagcgtgccctctgtgctgtctcctagacgagcggccaccgaacgacccctgggcccccccaccgagcgcaccaggagctttcagttggcagtagagacattccaccagcaacatcctcaggtgattgacgtggacgaagtagaagagaccggcgtcgtgttctcatataacactgactctagacagacatgtgctaacaatcgtcatcagtgcagcgttcacgctgagtgccgcgactatgccactggattctgttgttcatgtgtcgccggctacaccgggaatggtagacaatgcgttgctgaaggaagtcctcagcgagtgaatggaaaggttaagggacgcatcttcgttggatcttcccaagtgccaatcgtatttgagaatacggacctccactcttacgtagtaatgaaccatggccgtagctatactgcaatctccactatccccgaaactgtgggctattcacttctacccctcgcacctgtgggcggtatcataggatggatgttcgccgtcgaacaggacggatttaagaacgggttctctattactggcggcgagtttactagacaagctgaagtcacatttgtgggacatcctggcaacctggtgataaagcaacgattcagcggcattgacgaacatggacacttgaccatagatacagaattggaaggcagggtaccccagatccccttcggctcgtcagtgcatattgagccctacaccgagttataccactactcaacatcagtcataacctcatcatcaaccagagaatacacagttacagaaccagagagagatggcgcctctccatctcgaatttacacctatcagtggagacagaccatcacttttcaagagtgtgtgcatgacgattctagacctgctctaccaagcactcaacagttgtccgtcgattctgtgttcgttctgtataaccaggaggagaagatcctgcgctacgcactgagcaatagtatcggacccgtgcgtgaaggcagcccagatgcactgcagaacccatgctacataggaacccatggctgcgataccaacgccgcgtgcaggccaggtccaagaactcagtttacttgcgagtgttcaatcggctttcgaggggacggtagaacttgttacgaggtggaaaagaccagatgccaacacgaacgggagcacatcctgggagccgctggagccacagacccacagagaccaatccccccaggccttttcgttcctgagtgtgatgcccacggtcactacgcacctacccaatgccacggatccaccggatactgctggtgtgtagaccgtgatgggagagaggttgaaggtacacggactagaccgggaatgacccccccttgccttagcactgtggccccacccattcatcagggccccgccgtaccgaccgccgtgattcccctaccacccggcacccatctcctgttcgcacagactggcaagattgaacggctcccactggagggaaatactatgagaaagacagaagccaaggcgtttctccacgtgcccgccaaagtgatcatcggtctggcattcgactgcgtagataaaatggtgtactggactgatataacagaaccgtccatcggacgagcttcactgcacgggggagagcccaccaccattatccgccaggatctcgggtctccagaaggcatcgctgtggaccaccttggcagaaatattttttggactgatagcaatctggatcgcattgaagtggcaaaactcgacggtacccaaagaagggtcctcttcgagacggacctcgtgaatcccaggggcatcgtgacggattctgtccgcggtaatctgtactggactgactggaaccgcgataatccaaaaattgagacttcctacatggacggtacaaatcggagaatcctagttcaggacgatctaggactgccaaacggactaacctttgacgcattctcgagccaactctgctgggtggacgcaggaaccaatagggcggaatgcctaaacccttctcagcccagccggagaaaggccctcgaaggcctgcaatacccttttgccgtcacctcatacgggaagaacctctattttacagactggaagatgaattccgtggttgcactcgaccttgccatctctaaagagacagacgcctttcagcctcataaacagaccagactgtatggtattactacggctctctcgcagtgcccccaaggacacaattattgttctgtcaataacggtggatgtactcatctctgccttgccacacctggaagccgaacgtgtcggtgtcctgataatacactcggcgttgattgcatcgaacaaaaatag

SEQ ID NO: 13990 - RNA, 2172 nt, synthetic construct
  misc_feature 1..2172: note = source = /note="Description of Artificial Sequence: Synthetic coding sequence"
  source 1..2172: mol_type = other RNA
atgggtagccgctgcgcattggctttggctgtgctgagcgcactgctctgccaggtttggtcatccggagtctttgaattaaagctgcaagaattcgtaaacaagaaaggtctgttaggtaatcgtaactgctgccgcgggggagccggacctcctccatgcgcttgtcggacttttttccgtgtttgcctcaaacactaccaagcatccgttagcccagagccaccgtgtacttacggcagcgctgtgacccctgtgctcggtgtagatagtttttctctccctgatggtggaggggcggacagcgccttcagtaaccctataagatttccattcggttttacatggcccggtaccttctccctcatcattgaagcacttcatacagactccccagacgatctggccaccgagaaccccgaaaggcttattagcagattagccacccagcggcacctcaccgttggtgaagaatggtcccaggatctccacagttccgggagaacggacttaaagtattcatatcgtttcgtgtgtgatgaacattattatggcgaagggtgttctgtgttctgcagaccaagagacgacgcctttggccatttcacctgcggcgaaagaggagaaaaagtatgcaacccgggctggaaaggcccatattgtaccgaaccaatttgtttaccgggttgtgacgagcagcatggcttttgcgacaaaccgggggagtgtaagtgccgcgtgggttggcaaggaagatattgcgacgaatgtatcagatatcccggatgtctccacggaacctgccaacagccgtggcaatgtaattgccaagaaggttggggcggtctgttctgtaatcaagatttgaactattgcacacaccacaagccctgcaagaatggagctacttgtacaaatacaggccaaggcagctacacttgctcttgtagacccgggtatactggcgcgacttgtgaacttggcatcgacgaatgtgatccctccccatgcaagaacggcgggagctgcacagacctcgaaaatagctactcctgtacttgtccccccgggttttacggcaaaatctgcgagttaagcgccatgacatgcgctgatggcccttgttttaacgggggacggtgctccgattccccagacggaggatacagctgtcgatgtcccgtaggctactctggtttcaactgtgagaagaagattgattattgttcctctagtccatgctcgaacggcgcaaagtgtgtggatctgggagatgcctacctgtgccgctgtcaggccggctttagcggacgccactgtgatgacaatgtggacgattgtgctagttccccttgcgccaacggcggaacttgcagagacggcgtgaacgatttttcttgcacttgcccccccggatacacaggacgaaactgttccgctcccgtgtcccgttgcgaacacgctccttgccataatggcgcgacttgtcatgaacgtggccaccgctatgtttgcgaatgcgcccgaggctatggcggccccaactgtcagtttctgcttccagaactacccccaggtccggccgtggtggaccttaccgaaaagctggaaggtcagggaggtcctttcccatgggtggccgtctgcgcaggtgttatcttggtattaatgttgttactaggctgtgccgccgttgttgtgtgcgtgcgccttcgactccagaaacaccgccctcctgccgatccctgcagaggcgaaacagagactatgaataaccttgcaaattgtcagcgcgaaaaggacatttcagtttccataataggcgccacacagatcaaaaacactaacaaaaaggccgatttccacggagatcactctgccgacaagaacgggtttaaggccaggtatccagccgtcgactacaacctagtgcaggatctcaaaggagacgatacagccgtacgggacgcacatagcaaacgagatacgaagtgtcaaccacaggggtcaagcggcgaagagaaggggacaccgacgacactgcgcggcggagaggcttcagaacggaagcgaccagactcaggatgttctaccagcaaagatacgaagtaccagtccgtttatgtaatcagcgaagaaaaagatgagtgtgtcatcgcaaccgaggtttag

SEQ ID NO: 13991 - RNA, 981 nt, synthetic construct
  misc_feature 1..981: note = source = /note="Description of Artificial Sequence: Synthetic coding sequence"
  source 1..981: mol_type = other RNA
atggctgcacccgcttctgtaatgggaccattgggcccgtccgccttgggcttactcctgcttttactggtagtggcccccccacgagttgctgccttggttcacagacaacccgaaaatcaaggaatatcattgaccgggtcagtggcctgtgggagaccctccatggaaggtaagatattagggggtgttcccgcccccgaacgcaaatggccatggcaggtgtccgtgcattacgctggtctccatgtgtgcggtggtagcattttgaatgaatactgggtcttgagcgcagcccactgttttcatagagataaaaatatcaagatttatgatatgtacgtcggcttggttaacctacgagtggcgggaaatcacactcaatggtatgaagttaaccgcgtgatcctgcaccccacatacgaaatgtaccaccccattggaggagacgtagcactagtacagctcaagacaaggattgttttttcggagtcagtgctccctgtctgcctggccactccggaggtgaatttaaccagcgctaactgctgggcaaccggatggggtttagtctccaagcaaggcgagacatcagacgagctgcaagaaatgcaactgccactgatccttgagccatggtgccacttgttgtatggacatatgagctacatcatgccagatatgctatgcgctggcgatatactgaatgctaaaactgtgtgcgaaggggatagcggagggcctttggtctgcgagttcaatcgctcctggctgcaaataggaatcgtctcgtgggggcgcgggtgttcaaatcccctctaccccggtgtttatgcctcagttagctacttttcaaaatggatctgtgataacatcgagattacgcccacaccagcccagcccgcgcccgcactctctcccgcacttggtccaacgctttctgtacttatggctatgcttgccgggtggtccgtcctgtag

SEQ ID NO: 13992 - RNA, 1596 nt, synthetic construct
  misc_feature 1..1596: note = source = /note="Description of Artificial Sequence: Synthetic coding sequence"
  source 1..1596: mol_type = other RNA
atgagcctagccgcttactgcgtgatctgttgccgcaggatagggacgagtactagcccccctaaatctggcacccactggcgggacattagaaacatcattaagtttactggaagtttgatacttggaggctctctttttcttacctacgaagtcctagcattaaagaaagccgtaactctggacacccaagtcgttgagcgggaaaagatgaaaagctacatatatgtacatacagtctcccttgacaagggagaaaatcacggaattgcatggcaggcccgcaaggagttacataaggcagtcaggaaagtgctcgcaacctctgccaaaatcctaaggaacccctttgctgatcctttttctacagttgacatcgaggaccatgaatgcgctgtgtggttactgctcagaaaatcgaagagtgatgacaagaccacccgtttggaagctgtgagggagatgagcgaaacccatcactggcacgactaccagtaccgtattatcgcccaagcatgcgaccctaagaccctcattggattggcacgcagtgaggaaagcgacctcagatttttcctcctcccacctcctcttccttctctcaaggaagattcaagtacagaagaggagctacgacagcttctagcgtcactgccccaaacagagctggacgagtgtattcagtacttcacctccttagcgctttctgagtcctcccagagcctggcggcgcagaagggtggactctggtgtttcggggggaatggcttgccttatgcggagtcctttggagaggtcccatcagccactgtcgaaatgttttgtcttgaggctattgtaaaacactctgaaattagtacacattgcgacaagattgaggccaatggcggcttgcagctgctgcagaggctctaccgacttcacaaagactgtcccaaggtccaacgaaacatcatgagagtgatcggtaatatggcgctgaacgaacaccttcattcatctattgtacgctccggttgggtttccattatggctgaggcgatgaaatctccccatatcatggaaagttcacacgcagctcggattcttgccaatttggacagagagaccgttcaagaaaagtatcaagacggcgtttacgtgctacatcctcagtaccggacgagccagcctatcaaagctgacgtgttatttattcacggcctgatgggagcagcttttaagacctggcgccaacaagattctgagcaggccgtaatcgaaaagcccatggaagacgaagacagatacacaacttgttggccgaaaacgtggctcgcaaaagactgccctgctctgcgcattatctcagttgagtacgataccagcttatctgactggcgggcaaggtgtcctatggaacgaagatccttgctgagcatcagctctggaatcgtcgaaggattagagtctcctctacatagtgaggccacgaattttttaggatcttccgaacttcttgtcttgggaattggccaatggtttggataccacattgcctgggaagtgttcctctcaaaacgttgttgctggaaacctctacgctcacagaagtag

SEQ ID NO: 13993 - RNA, 1596 nt, synthetic construct
  misc_feature 1..1596: note = source = /note="Description of Artificial Sequence: Synthetic coding sequence"
  source 1..1596: mol_type = other RNA
atgtcactagctgcctattgcgtgatttgttgccgtcgcatcggcacaagtaccagcccgcctaaaagcggaacacactggagggatattcgaaacattattaaatttactggcagtctgatcttgggggggtccctgttcctaacatatgaagtgcttgccctaaaaaaagctgtaacacttgatacccaggtcgttgagagggagaagatgaaatcatatatctacgtccacactgtttctttggacaaaggggaaaatcacggaatcgcctggcaagcgcgcaaggaactgcataaggccgttcggaaagttctggccacttccgccaaaattctacgcaatccattcgctgacccattttccacagtcgacatcgaggaccacgaatgtgcggtatggctgctcctgagaaagtccaaaagtgacgacaagacaacaaggctcgaagctgtccgcgagatgagcgaaacccaccactggcacgactaccaatacagaattatcgcccaggcttgtgaccctaaaaccctgattggactagcccgctcagaggagtctgatctgcggttctttcttctccccccgccgcttcccagcttgaaagaagactctagtaccgaggaggaattgcgacagctcctggcctcacttcctcagaccgagctcgacgaatgtatccaatattttacctcattagccctctccgagtcctcccagtccctcgctgcccaaaaagggggactgtggtgcttcggcggtaacgggctgccctacgcagaatcttttggggaagttccatcagccaccgtggagatgttttgtctggaagccattgttaagcacagcgagataagcactcattgcgataaaattgaggcgaatgggggtctgcaactgctccagcgcctgtaccggttacacaaggattgtcctaaagttcagaggaacattatgcgcgttattgggaatatggccctgaacgagcatctgcattcttcaatagtgcgctcaggttgggttagtattatggcagaggcaatgaagtctccccatataatggaatccagtcacgctgcccgcatactcgccaatctcgatagggaaacggtccaggagaaatatcaagatggggtctacgtccttcatccccagtaccgaactagccagccaatcaaagccgacgtcttatttattcatggtctgatgggcgcagcgtttaagacatggagacagcaagatagcgagcaggctgtcatagaaaaacctatggaggatgaggatcggtataccacatgttggcccaagacgtggctcgccaaggattgcccagccctgcgcattatttcagttgagtacgatactagtttgtcagattggagggccaggtgtcccatggaacgcaggagtctcctaagcatctcttctggtatcgtggaaggcctcgagtcaccattgcattcagaagctacaaattttttaggatccagcgaacttctggtgctgggaattggccagtggttcggctaccatatagcttgggaagtgttcttgtctaaacgttgttgttggaaacctcttagaagtcagaaatag

SEQ ID NO: 13994 - RNA, 1965 nt, synthetic construct
  misc_feature 1..1965: note = source = /note="Description of Artificial Sequence: Synthetic coding sequence"
  source 1..1965: mol_type = other RNA
atgtcacttgctgcctattgtgtcatttgttgtcggcggattggcacttccacatcaccccctaagtcagggacccattggagggatataagaaatattatcaagttcactgggagtctaatactaggaggttccttgttccttacttacgaggtgctcgcactcaagaaggctgtcactctcgacacacaagtggtggaaagagaaaagatgaagtcttacatttacgtgcatacggtttctttagataagggcgaaaaccatggcattgcctggcaggccagaaaagagctgcataaggcagtgcgtaaggtcctggccacatccgccaaaattctccggaaccctttcgctgatcctttttccaccgttgacatcgaagaccacgaatgcgcagtgtggctgctcctaagaaaatctaaatccgatgacaaaaccaccagactcgaggctgtgagggagatgagcgaaacccaccactggcacgactaccaatatcggatcatcgctcaagcatgcgatcccaagacactcataggcttggctcgaagcgaagaaagcgaccttcgtttttttttgttacctccgcctttgccatccctcaaagaggattcatccaccgaggaagagttgcggcagttactagcctctctgccacagaccgaactggacgaatgcatccaatatttcacttctctcgcgctcagcgaatcttctcagtccctggctgcccaaaaaggaggtctctggtgtttcgggggaaacggactgccttacgcggagtcctttggcgaggtgcccagtgccacagtagaaatgttttgtctagaggcaattgttaagcatagtgaaatctctacccactgcgacaaaatcgaagcaaacgggggtttgcagctcttacaaagactgtatcgcttgcacaaggactgtcccaaggttcagagaaatatcatgcgtgtcataggcaatatggccttaaatgaacacctccattcctccattgttcgatcaggctgggtgtcaattatggccgaagcaatgaaatcaccgcatattatggaaagtagtcatgctgcccgcattctagctaacctagatcgggaaacagtacaggaaaagtaccaggacggagtgtatgtcctgcatcctcaatatcgcaccagccagcccatcaaggcggatgtgctgttcattcacggactgatgggtgcggccttcaagacgtggcgacaacaggatagcgaacaagccgtgattgagaaaccaatggaggacgaggatagatacacaacctgttggccaaagacatggcttgctaaagattgccccgccctgcgaataatttcagttgagtacgatacttctctctccgactggcgtgctagatgtccaatggagcgaaaatccatagcatttagaagtaatgagctactgagaaagttgagagcagccggggttggagatcgtcctgtggtatggatctcccacagcatgggtggtttattggttaagaaaatgctcctggaagccagcactaagccagagatgtctacagttatcaataacacaagaggaatcatcttttactccgtccctcaccatggatctaggctcgcagagtatagcgttaatatcaggtatctgctatttccatcactggaggtcaaagaactctccaaggacagccccgcacttaaaactctacaagacgattttctcgaatttgccaaagacaagaacttccaggtcctgaacttcgttgaaacgctcccaacatatataggctccatgattaagctgcatgtagttccagtggaatctgctgacctcggaatcggagaccttatccccgtggacgtcaaccatctgaatatttgcaaacctaaaaagaaggatgcttttttataccagagaactctccaatttatacgcgaagccctggctaaagatctggaaaactag

SEQ ID NO: 13995 - RNA, 1509 nt, synthetic construct
  misc_feature 1..1509: note = source = /note="Description of Artificial Sequence: Synthetic coding sequence"
  source 1..1509: mol_type = other RNA
atggcccagcgctgcgtgtgcgtcctggctcttgtagcaatgctgctgcttgtgttccccaccgtctcaagaagtatgggtccgagatccggagaacatcaacgcgcatctcgcatccccagtcagttcagcaaggaagagcgagtagctatgaaagaggctctgaagggtgccatccagatcccaaccgtcacatttagctccgaaaaatccaacactaccgccttggcagagtttggaaagtacatacataaagtgttcccgaccgtggtgtcaacttcttttatacagcacgaagttgtcgaggagtattcccatctgtttactatccagggatctgacccctcgttacagccttacctgctaatggctcactttgatgtcgtccctgcccctgaggaaggctgggaggtgcctcccttcagtggactggaaagggatggaataatatatggcagaggcactctcgatgataaaaactcagtgatggcactgctgcaggcccttgaattgctcctcatcagaaagtacattcccaggcgcagcttttttatttcccttggccatgatgaagaatcatccggcacgggtgcacaacggattagtgccctgttacaatcccgtggtgtacaacttgcttttatcgtcgacgaggggggttttattttggatgactttatccccaactttaaaaaacccatagcactgatcgctgtcagcgagaagggtagcatgaacctgatgctgcaagtgaacatgacttctggacattcatctgccccacccaaggaaacctcgataggtatcctggcagcagcagttagccggcttgagcagactccaatgccgataatcttcggatctggcaccgtggtgaccgtactacaacagctagccaatgagttccccttccccgtcaacattattctgtcaaatccctggctattcgaaccactcattagccgttttatggagcgcaaccccctgaccaatgccattattcgaaccacaaccgctctgacgatctttaaagccggcgtaaaattcaatgttatcccaccagtagcccaggcaaccgtcaactttcggattcatcccggtcagacagtgcaggaagtccttgagctgacaaaaaacattgttgctgacaatcgcgtgcagttccatgtgctctctgccttcgatcctcttcctgttagcccaagtgacgacaaagcactcggttatcaactactacgccagaccgtccaatcagttttccctgaggtcaacatcaccgcaccagtgacgagcatcgggaatacagatagtagattttttaccaacctaactaccgggatctatagattttacccaatatatattcagccagaggattttaagcggattcacggcgtgaatgagaagattagcgtccaagcctacgagacccaagtgaagtttatattcgagctcatccagaatgccgataccgatcaagaacctgtgtcacatcttcataagttgtag

SEQ ID NO: 13996 - RNA, 999 nt, synthetic construct
  misc_feature 1..999: note = source = /note="Description of Artificial Sequence: Synthetic coding sequence"
  source 1..999: mol_type = other RNA
atgcggctgctcgcctttttatcactactggcacttgttttacaggagacgggaaccgcctcactgcccaggaaagaaaggaaacgccgggaggaacagatgcctagggagggtgattcattcgaggtactgccgctccgtaacgatgttctgaaccctgataattacggagaagtgattgacttaagcaattatgaagaactcacagactatggggaccagctcccggaagtcaaagtgacgagcctcgcacctgcaacatctatcagtccagcgaaatcgaccacagcccccggtactccaagctcaaaccctacaatgacccgccctaccactgcaggtttactcctgagcagccaacccaatcacggcctccctacttgtctcgtctgcgtctgcttgggatcgagtgtgtactgcgacgacattgacttagaagatatccctcccctgccccgtcggacggcctatctctacgccaggtttaacaggatatcccgcatcagagcagaagatttcaaaggacttaccaagttgaaacgcattgatctgtccaacaatctcatctcttccatcgacaatgatgctttccggcttctccacgctctgcaggaccttattcttcccgaaaatcagctggaagccttgcccgtattaccgagtggcattgagttcttggatgtaagactcaatcggttacaatcttcaggaatccaacccgccgccttcagggccatggagaaacttcaatttttgtacctcagtgacaatctgctagattccattcccggtcctctccccctttctttgcggagcgtacacctccaaaacaatctcatcgagacaatgcaacgcgatgtcttttgtgaccccgaagagcataagcataccagacggcagcttgaagatatccgtctcgacggtaacccaataaatttaagccttttcccctcggcctacttctgcctgcctagattacctatcggaaggtttacttag

SEQ ID NO: 13997 - RNA, 1401 nt, synthetic construct
  misc_feature 1..1401: note = source = /note="Description of Artificial Sequence: Synthetic coding sequence"
  source 1..1401: mol_type = other RNA
atggtgcgttctgtggcgtgggcaggattcatggtactgttaatgattccgtggggctcagcagccaaattggtgtgctactttacgaactgggctcagtatcgccagggcgaggctcgctttctcccaaaagaccttgatccatcactgtgtactcatctgatatacgctttcgcaggaatgaccaatcaccaactttctaccaccgaatggaatgacgaaaccctttaccaagagttcaacggattgaagaagatgaacccaaagctcaaaacacttctagcaataggagggtggaatttcggaacccagaaattcactgatatggtagctacagcaaacaataggcagaccttcgtgaacagcgcaataaggtttctcagaaaatactccttcgatggtctcgatctcgactgggaatacccagggtcacagggttccccagctgtcgacaaggaacgatttacaacactcgttcaggatctcgcgaatgccttccaacaggaggcacaaacctcagggaaggaacgactcctgctttctgccgcagtgcccgccggccagacttacgtggacgctggctacgaagttgacaaaatagcccagaacctggacttcgtaaatctgatggcctacgactttcacggatcctgggaaaaggtcacaggacacaactctcctctgtacaaaaggcaagaagaatccggagccgccgcctccctcaacgttgacgcagcagtccagcagtggcttcagaaagggacccctgcctctaagctcatcctcggtatgccaacttacggacgctcattcactctggcatccagttctgacactcgtgttggggcacccgctaccgggtcaggtactccagggcccttcacaaaagaagggggcatgcttgcgtactatgaagtctgtagttggaaaggtgctacaaaacagagaatccaagatcagaaagtcccatacattttccgtgataatcagtgggtgggcttcgacgacgtggagtcattcaagacaaaggtctcatatctgaagcaaaagggactcgggggtgcaatggtatgggcactggatttagacgatttcgccggctttagctgcaatcagggccgatatccgttgattcagactctgcgccaggagctgtcactgccttacttgccaagcgggaccccagaattggaggtgcccaaaccgggacagcctagcgagcccgaacacggacctagccccggacaggacactttttgtcagggaaaagcagatggcctttatcctaacccccgggaacgctctagtttttactcgtgtgctgcaggacgccttttccagcaatcctgtccaaccggtcttgtttttagcaactcgtgtaaatgctgcacttggaattag

SEQ ID NO: 13998 - RNA, 1596 nt, synthetic construct
  misc_feature 1..1596: note = source = /note="Description of Artificial Sequence: Synthetic coding sequence"
  source 1..1596: mol_type = other RNA
atgaggttatgtcttggaagaccccatcctcggggccattctcgagtaggaaaatccgaacgtggtcgtggagcgaggggcttggcccgacagcgcaccctggaggacgaagaggagcaggagagggaacggaggagaaggcatcggaatctttcatcaaccacggacgatgaggcccctagacttagccagaatggcgacagacaagctagcgcctctgaaagactgcccagcgtggaggaagctgaggttccaaagccattgccaccagcctccaaggacgaagatgaagatattcagagtattttacggactagacaagaacgacgacagagaaggcaggtagttgaggccgctcaggcccccatccaggagagactagaagcagaggaagggcgaaattctctcagcccagtgcaagctactcaaaaaccactggtctccaaaaaggagttagagattccgcctcgaagacgacttagtagggaacagcggggtccttgggccctcgaagaagaatcactggtcggccgtgagccagaagagaggaagaaaggtgtgccagagaaaagcccagtgctggaaaaatcgagcatgccaaagaaaacagctcccgagaagagccttgtctccgataagacatctataagtgagaaggtgctggcgtccgagaaaacatctttatccgaaaagattgcagtctccgaaaaacgcaatagcagcgagaagaagtcggttttagaaaagacaagtgttagtgaaaaaagtctcgcaccaggaatggctctggggagcggcagacggctcgtgtcagaaaaagcaagtattttcgagaaggcactagcttcagagaagtcaccgacagccgacgcgaaaccagcccctaagcgcgcaacagcttccgaacagccactagctcaagaaccacctgcaagcggcggatctcctgcaactaccaaggaacaacggggtcgcgctctccctgggaagaatctgccttctctcgcaaagcagggcgcttccgatcctccaacagtcgcctccaggttgccacccgtgactttgcaagtgaagatcccttccaaagaggaggaagccgatatgagtagtccaacacagagaacatacagcagcagcctgaagcggtctagccctaggactataagtttccgaatgaaacccaaaaaagagaacagcgagactaccttgacacggtccgcttctatgaaattgcctgacaatacggtcaaactgggcgagaagctggagagataccacaccgccatccgtcgcagcgaatctgttaaatcaaggggtttgccatgcacagaactattcgtggcacctgtcggggttgcgtccaaaagacatctattcgaaaaggaattggcaggacagagcagagctgagccagcttcaagcaggaaagaaaatctaagattgagtggggtggtcacaagccggttaaacttatggatctccagaacccaagagtctggagaccaagatcctcaggaagcacagaaagccagttcagctacggagagaacccagtggggacagaaaagcgactccagcctggatgcagaagtgtag

SEQ ID NO: 13999 - RNA, 1782 nt, synthetic construct
  misc_feature 1..1782: note = source = /note="Description of Artificial Sequence: Synthetic coding sequence"
  source 1..1782: mol_type = other RNA
atgaaagccgacctcaaacaacaccaccaccactggtccatttttagctacatccggctgcgccttccttcaatgctgctcttattttctgttatactcataagctgggtgtccaccgtggggggggaaggtactctatgcgattttcctaagattcatcacggattcttgtacgacgaggaggactataatccattctcacaggtaccaacaggcgaggtgttttactatagttgcgaatacaactttgtatccccaagcaaaagcttctggactcggatcacttgtaccgaggaaggatggtctcccacccccaaatgcctcaggatgtgtagcttcccatttgtaaaaaatggtcactcagaatccagcggtcttatacacttggagggcgacaccgtgcaaatcatctgtaacactggatactcgctccagaacaacgagaagaacatctcttgtgttgaacgcggttggtcaaccccgcccatctgtagtttcaccaaaggcgaatgccacgtcccaatactagaggctaacgtagacgctcagcctaaaaaagaatcttacaaagtaggcgatgtcctgaagttctcatgtcgaaaaaaccttatccgtgtaggcagcgacagtgtgcaatgttaccagttcggatggtcaccaaacttcccaacatgcaaaggccaggtgaggtcatgcggccctcccccacagttgagcaatggtgaggtgaaagaaattaggaaagaggagtacgggcacaacgaagtagtggagtatgactgcaatccaaacttcatcatcaacggaccgaagaaaatacagtgcgtggacggagagtggactacactacctacctgtgtggaacaagtgaagacttgcggctacataccggaactcgaatatgggtacgtccagccttcagtccctccctaccagcacggagtttctgtggaagtgaattgccgcaatgaatacgccatgatcgggaacaatatgatcacttgcatcaacggtatttggacagagctgccaatgtgtgtggccacccatcagttgaaacgttgtaaaatcgcaggagtcaacattaaaacactcttgaaactatcaggcaaggaatttaaccataatagtcgcattagatatcgctgttccgacatttttcggtatcggcactccgtatgcataaatggaaaatggaacccagaagtggattgtacagagaagagagaacagttttgccccccgcccccacagattcctaacgctcagaacatgaccacgaccgtgaactaccaggacggagagaaagtcgccgtgctgtgcaaagagaattacctgctccccgaggcgaaagagatcgtatgtaaagacggacgatggcagtcacttccaagatgtgttgaaagtacggcttactgtgggcccccaccatctatcaataatggcgatacaacaagtttcccgctgtccgtgtatcctcccgggagcaccgttacctatcgttgtcaaagtttctacaaactgcagggtagcgtcaccgtgacatgtcggaacaaacagtggtctgagccccctaggtgcctggacccttgcgtagtctcggaagagaacatgaacaaaaacaacatccagctgaagtggaggaacgacggaaaactctatgcaaaaacaggagacgccgtggaatttcagtgcaagtttccacacaaagctatgatctccagcccaccattcagggctatttgtcaggaaggaaaattcgaatatccaatctgtgaatag

SEQ ID NO: 14000 - RNA, 2301 nt, synthetic construct
  misc_feature 1..2301: note = source = /note="Description of Artificial Sequence: Synthetic coding sequence"
  source 1..2301: mol_type = other RNA
atgatctggcgatccagggcgggagctgaacttttttcgttaatggcgttgtgggaatggattgcactttctctccactgctgggtgcttgccgtggccgccgtttcagaccagcacgcgacttcccccttcgattggctcctttcagacaagggcccattccacaggtctcaggagtacacagatttcgtcgaccggtctaggcaagggttctcaaccaggtataaaatctatcgcgagtttggtcgctggaaagtgaataatctggcagttgagcgcaggaactttttgggatcacccctccccctcgctccagaatttttccgtaacatccgattattgggccgccgacctaccctgcagcagatcaccgaaaatctcataaagaaatatggaacccattttctccttagcgctaccctcggcggcgaagagagcctcactatattcgtggacaaacggaaactttcaaaacgagccgaagggtctgattcaaccactaactcaagcagcgtgacactagaaaccctgcaccagctggccgctagttatttcatagaccgcgactccacattgaggcgacttcatcatattcagatagccagcacagcaattaaagttactgagacccgaaccggtccattaggatgttccaattacgataacctggacagcgtgtcttccgttctggtacagagtcccgagaacaaaatccagttacaagggcttcaggttctgttaccggactatttgcaggaacgattcgtgcaggccgccctcagctatatagcttgtaactcagaaggtgagtttatttgtaaagagaacgattgttggtgtcattgcggtccgaaatttcccgaatgtaattgcccttctatggacatccaggcaatggaggagaatctccttaggattacagaaacatggaaggcttacaattccgatttcgaagaatccgatgagttcaagctgttcatgaaacgtctgccaatgaactactttctgaacacctctaccataatgcacctatggacgatggattccaacttccagcgcagatatgagcaattggagaattcaatgaaacagttattcctgaaagcccagaagattgtgcacaagttattctccctttccaagcgatgccacaagcaacccctcatttccttaccccgccaacgaacttcaacatactggcttacgaggatccaatccttcctatattgtaatgagaatggcctgttgggctccttcagcgaagaaactcatagctgcacctgccctaacgatcaagtagtgtgcactgccttccttccctgcactgtgggagatgcttcagcctgccttacatgcgcccccgacaacagaacccggtgtggaacttgtaatactggctacatgctttcccaaggcctctgcaagcctgaagtagctgagtccactgaccattacattggtttcgaaaccgatctgcaagatctagaaatgaagtacctgttgcagaaaacagaccgtcgcattgaagtccacgccatctttatctctaatgatatgaggctaaattcctggttcgatccaagctggcgaaagcgaatgctacttacactcaaatctaataaatacaaatcttctctggtgcatatgattctaggactgagcctgcagatatgtctcactaaaaattctaccctggaacctgtgctcgctgtgtacgtgaatccttttggcggctcacactctgagtcctggtttatgcctgtgaacgagaattcattcccagactgggagcgaaccaagctcgacctcccactgcagtgttacaactggaccctcactctaggaaataaatggaaaaccttctttgagacagtccatatctacctcagaagcagaatcaaaagcaacggcccaaacggaaacgagtccatttactacgaacctcttgagtttatcgatccttctcggaacctcggttatatgaaaataaacaacattcaagtatttggatattctatgcattttgacccagaggcaattcgggatcttatccttcagcttgactacccatatactcaagggtcacaggattcagccctgttgcaactgttggaaattcgggaccgcgtgaataaattaagcccccccggtcagcgcagactcgatctcttttcatgcttactacggcataggctaaaactttctacctcggaagtggtgcgcatacagagcgccctgcaggcattcaatgcaaaactgcctaacaccatggattacgacaccactaagctctgctcatag

SEQ ID NO: 14001 - RNA, 1815 nt, synthetic construct
  misc_feature 1..1815: note = source = /note="Description of Artificial Sequence: Synthetic coding sequence"
  source 1..1815: mol_type = other RNA
atgagaagatgtaattcagggtcaggtccacctcctagcttacttctcttgctgctgtggctcctcgccgtgcccggcgccaatgctgcgccgcggtctgccctgtactctccctcagatccgttaacccttctgcaagctgacacggtccggggagctgttttgggatctcgcagcgcctgggctgtggagttttttgcatcctggtgtggacactgcattgcattcgcccctacatggaaagcactagctgaggacgtcaaagcctggcgtcccgcgttataccttgctgcactggattgtgcggaggaaacaaattcagcagtgtgtagagacttcaatatccccgggtttccaacggtacggttcttcaaagctttcaccaagaatggcagtggcgcggtcttccctgttgcgggcgcggatgtccagaccctgcgggagcgccttatagacgcactcgaatcccatcatgatacttggccacctgcctgtcctccgcttgaaccagctaaactggaggaaattgatgggttttttgccaggaataatgaagagtaccttgcacttatttttgagaagggcgggtcttatctcggccgcgaggtagctcttgaccttagccaacacaagggtgtggctgtcagaagggtgctaaatactgaggctaacgtggtcagaaaatttggagttactgatttcccaagttgctacttattatttcggaacggcagcgtgtcccgtgtcccagttcttatggagtcgagatctttctatacagcgtatctccagcgattatccgggttgacccgcgaggccgcgcagacaactgtggccccgacaactgcaaacaaaatcgctcctaccgtttggaagctggcagacaggtcaaaaatttacatggcggatctcgaaagcgctctgcactatatcctgagaattgaagtgggacgttttccagtactggagggtcagcgcttggtggctttaaagaagttcgtggcggtcctagcgaaatacttccctggaaggcctttggtacagaatttcttacacagcgtgaacgaatggttaaaacgacagaaacgcaataagataccatattctttttttaaaacagccctagacgatcggaaggaaggagctgtcctagcaaagaaggttaattggattgggtgtcaggggagtgaaccacacttccgaggatttccctgttccttatgggtgctctttcactttttgaccgtccaggccgcccgacagaacgtcgaccacagtcaagaggctgccaaggctaaggaagtactgccagctatcagagggtacgtccattatttttttggatgcagagactgcgcaagtcatttcgaacagatggccgccgcctccatgcaccgcgtaggatctccaaatgccgccgtcctctggctttggagtagccataaccgcgtgaacgctagacttgcgggcgcccccagcgaagatccccaattccccaaggttcagtggcctccacgcgagctgtgctctgcctgccataatgaaagattagacgtgcccgtctgggatgtggaagcgactctgaatttcctgaaagcccacttctctccgtccaacattatcctcgatttccccgccgccggctcagccgcccgccgcgatgtgcagaatgtggctgccgcaccagagctagctatgggagcactggaactcgagagcagaaattccaccctggatcccgggaagcccgaaatgatgaaatctcctacaaatacaactcctcacgtccccgcggaaggtccggaactcatctag

SEQ ID NO: 14002 - RNA, 2244 nt, synthetic construct
  misc_feature 1..2244: note = source = /note="Description of Artificial Sequence: Synthetic coding sequence"
  source 1..2244: mol_type = other RNA
atgaggagatgcaattcgggtagcggccctcccccttccttactgctcctgttgttatggcttctcgcagttcctggagccaacgctgccccccgctcagcgttgtattccccatccgatcccttaaccctgttgcaggccgacacagtgcgcggtgccgtcctgggctccagatctgcttgggccgtcgagtttttcgccagttggtgcggccattgcatagccttcgctcctacttggaaggccctcgcagaagacgtcaaggcttggaggcccgccctctatttagctgcacttgattgcgcagaagagacaaactctgctgtatgcagagatttcaatatccccggctttccaaccgtccggttttttaaggcgttcaccaagaacggcagtggcgctgtattccctgtagccggagctgacgtgcagactctgcgagagaggcttatcgatgctttagaatcccaccacgatacatggccccccgcctgccctccactagaaccagctaaattagaagagatcgatgggttttttgcccggaataacgaagaatacctggctctgatttttgaaaaaggtggatcatacctgggccgtgaggtggccctggatcttagccagcacaagggcgttgcagtaagaagggtgctgaatactgaagctaatgtggtgagaaaattcggtgttactgactttcctagctgctatttattgtttcgaaatggaagtgtcagccgcgtccccgtcttaatggaatcaagatccttttacaccgcctacctgcaacgactcagcggactaacacgagaagctgcacaaaccactgtggccccaacaacagcaaataagatagctcccaccgtgtggaagctggccgataggtcaaagatctatatggcagacttagagagcgccctgcactatatcctgagaatagaagtaggacggtttccagtgctggaaggacaaagattagtcgccctaaagaagtttgtggcagtgctcgctaagtatttcccaggccgccccctggtgcagaatttcctccacagcgttaacgaatggctcaagaggcaaaagcgaaataaaataccttactcatttttcaagacagcactcgacgacagaaaggagggcgccgtacttgccaaaaaagttaattggatcggctgtcagggttccgagcctcactttagaggttttccttgctctctatgggtactttttcactttcttaccgtgcaggcagctcggcagaatgtggatcacagtcaggaagccgccaaggctaaagaggtacttccagccatccgaggctacgttcactactttttcgggtgtcgtgattgcgcctctcacttcgagcagatggccgcggcaagtatgcacagagtgggaagtccaaacgcggccgtgctctggttatggtcaagtcacaaccgagttaacgcacgcctagcgggggcaccttccgaagatccccagtttcctaaagtgcagtggccgcccagagaattgtgtagtgcatgtcacaatgagcgtcttgatgtacctgtgtgggatgtggaagccacccttaactttttaaaggcacatttcagtccctcaaatatcatcctggacttccctgccgctggatctgcggctaggcgcgatgttcagaatgtcgctgcggcaccagaacttgctatgggagcactggaactggaatctcgcaactcgacattggatcctggcaagcctgaaatgatgaaatccccgactaatacaacccctcatgtgccagccgaaggtcccgaggccagcagacctccaaaacttcatcctggattacgggctgcaccagggcaggaaccacccgagcacatggcagagttacaacggaatgagcaggagcagccattaggccagtggcacctgtctaaaagagatacaggcgctgctctgctggctgagtctagagccgagaaaaataggttgtggggtcctctggaagtccggagagtcggaaggtccagcaaacagcttgtcgacattcccgaaggccaattggaagcgcgggctgggaggggccggggacagtggctgcaggtgcttggcgggggattctcttatctggacatctcactgtgtgtcggtctgtattctctgtcttttatgggcctgctcgccatgtacacctatttccaagccaagattcgagccctgaagggacacgccggacacccagctgcctag

SEQ ID NO: 14003 - RNA, 1476 nt, synthetic construct
  misc_feature 1..1476: note = source = /note="Description of Artificial Sequence: Synthetic coding sequence"
  source 1..1476: mol_type = other RNA
atgaagaccttcacttggacacttggggtactctttttcctgttggtggacacgggtcactgcaggggcggccaattcaaaattaagaaaatcaatcagcggcgttatcctagagcaacagatggtaaagaagaagcaaaaaaatgtgcctataccttcctcgtcccagagcagagaatcactggccccatatgtgttaacaccaaagggcaagatgcaagcaccatcaaggacatgattacccgaatggatctggagaaccttaaggatgtgctcagcagacaaaagcgagagattgatgttctgcaactcgtggtggatgtcgacggaaatattgtgaatgaagtgaaacttctccggaaagaaagtcgaaatatgaatagtcgtgtgacacaactctatatgcagctattgcatgagatcattcgaaaacgcgacaatagtctggaactgtctcaattagaaaacaaaatcctaaatgtcaccacggaaatgttgaaaatggcaacaaggtaccgagaactcgaagtgaaatatgcctccttgaccgacttagtaaacaatcagtcagtcatgatcactcttctggaggagcagtgcctcagaatcttctcacggcaggatacccatgtcagccccccactcgtccaggtagtcccacaacacattcccaattcccagcaatacacgccaggcttgcttggcggaaatgagatccaacgcgatcccgggtacccaagagatttaatgccacccccagatctggccacaagccctactaaaagcccctttaagataccacctgtgacctttattaacgagggcccattcaaggactgccagcaggctaaagaggcaggacacagcgtgtccggcatctacatgatcaagcccgaaaactctaacggaccaatgcaactgtggtgtgagaatagcctggatcctggcgggtggaccgtgattcagaaacgtactgatggaagtgtgaacttttttcgaaattgggagaactataaaaagggtttcggcaatatcgatggggaatactggctggggcttgagaacatctatatgctatccaaccaagataactataagttgctgattgaattagaggactggtccgataaaaaagtgtacgcagaatacagtagctttagacttgaaccagaatcggaattttatagactgcgactgggaacctaccagggcaatgcaggagattcaatgatgtggcataacggcaagcagttcacgacattagatagagataaggatatgtatgctgggaattgcgctcactttcataagggcggctggtggtacaatgcctgtgcccactctaaccttaacggggtctggtaccgggggggacactataggagtaagcatcaggacggaatattttgggcagaatatcggggcggatcgtacagcctgagagcggtgcaaatgatgatcaagcccatcgactag

SEQ ID NO: 14004 - RNA, 2484 nt, synthetic construct
  misc_feature 1..2484: note = source = /note="Description of Artificial Sequence: Synthetic coding sequence"
  source 1..2484: mol_type = other RNA
atgatgtgccttaaaattcttcggatttcgttagccatcctcgccggctgggctttatgtagcgcaaattccgagcttggctggacaagaaagaaatcgctagttgaacgcgagcacttgaaccaagttctgctggaaggcgaacgatgttggttaggggccaaggtccgccggcccagggcttctcctcagcaccatctatttggcgtgtatccatctagagctggaaattacctgcgcccttaccccgtcggtgaacaagagatccatcacaccggcagaagcaaacccgatacagaaggcaacgcagtgtcattagtgcctcctgatttaaccgaaaatcccgctggcctgaggggcgctgtggaagagccagctgctccatgggtaggtgatagccctataggccagagcgaattgcttggcgacgacgatgcttaccttggtaaccagaggagcaaggaaagcctgggtgaggcgggaatccagaaaggctctgcaatggcggccactacaactacagccatcttcacgactctcaacgagcctaaaccagaaacccaacgcagaggatgggcaaaaagccgtcagcgacgacaggtatggaagcgtagagctgaggacgggcagggggacagcggaatctcatcacattttcagccatggcccaaacatagcctaaaacatagagtcaagaaaagtccccctgaagagagtaatcagaatggcggcgagggatcatatcgggaagctgaaacgttcaactcccaggtgggtctcccgattctttacttttccggacgcagggagaggctcctcctaagaccagaggtgctggcagaaataccccgggaggcgttcacggtcgaggcctgggtgaaaccagaagggggacagaataaccctgcaatcatcgctggcgtattcgacaattgttcccacactgtgagtgataagggatgggccttaggaatcagatccggtaaggataagggaaagagagacgcgcgattcttcttctccttatgcactgacagagtaaagaaggccaccattcttataagccactcccgataccaacccggcacttggactcacgtggccgcaacatacgacggccggcacatggcactctatgtcgacgggacacaggtcgcttcctctcttgaccaaagcggcccactgaactccccatttatggcctcttgtcgcagtctgctcctggggggcgattcatcagaggacgggcactattttcgaggccatcttgggacccttgttttctggagtacagctctgccccaatctcatttccagcattctagccagcatagctccggggaggaggaggccaccgatcttgtgttgaccgcatcttttgaacctgtgaatactgaatgggtgccattcagagatgagaaatatccacgacttgaagtgttacaggggttcgaaccagaacccgagattttgtctccactccaacctcccctttgtgggcagaccgtgtgcgataatgtcgaacttatctctcaatacaacgggtattggccactccgaggcgagaaagtgatcaggtaccaggtagtcaacatatgcgacgatgaaggcctgaatcccatcgtttccgaagaacagatccgtctccaacacgaagctcttaacgaggcttttagtcgctataatatatcatggcaattgagtgtgcaccaagtccataactccacgctgaggcacagagtcgtgctggtgaattgtgaacctagcaagattggaaacgaccactgtgaccctgaatgtgaacatccattgactggttacgacggaggcgactgtagactccaggggcgctgttacagctggaaccgccgcgacggactttgtcacgtggagtgtaacaacatgctgaatgactttgacgacggtgattgctgcgacccccaagtggcagacgtgaggaagacttgttttgatccggattctccaaaaagagcttacatgtccgtgaaggagctgaaggaggccttgcaattaaactcaacacactttttaaacatctacttcgcttccagcgttcgagaagatctcgccggagcagccacctggccatgggataaagatgcggtcactcaccttggaggcattgtgctttctccagcatactacggaatgcccggacatacagatacaatgattcacgaggtaggtcatgtgctcggtctgtatcatgtattcaagggtgtctccgagagagaatcctgtaacgacccttgtaaagaaacagtcccctcgatggagactggggacctttgtgccgacaccgccccaacccctaaatcagagctctgcagagaaccagagccaacatcagacacttgcggtttcacacggttccctggggctccattcacaaattatatgtcttataccggaatcacaaccgtgctcttctgcttccttcttcgcatccacggcggattgtag

SEQ ID NO: 14005 - RNA, 5376 nt, synthetic construct
  misc_feature 1..5376: note = source = /note="Description of Artificial Sequence: Synthetic coding sequence"
  source 1..5376: mol_type = other RNA
atgatgtgcctgaaaatcctgcgtattagtttggccattttggcagggtgggcactgtgttcggcaaatagtgaactcggttggacaagaaagaagtccctggtcgaacgagagcacctgaatcaagtcctgctggagggggagcgatgttggctcggcgcgaaggtgagaagaccgcgggcctcacctcaacatcaccttttcggggtgtatcctagccgagctggaaattacctgcggccatatcccgtgggggagcaagaaatacatcacactggaaggagcaaacccgacaccgaggggaacgccgtctccctcgtgccgcctgatctcactgaaaatccagccggcctgagaggagcggtcgaggagccagccgcaccgtgggtaggcgattccccgatcggacagagtgagctcctgggtgatgatgacgcttatcttggtaaccagcgatcaaaggaatccttaggcgaagctggaatacaaaagggctctgcaatggccgccaccaccaccaccgccattttcaccactctgaacgaacccaagccagaaacacaaagaaggggatgggcaaaaagtcgccagcgtagacaagtatggaaacgtcgggcagaggacggacaaggcgattctgggataagctcacattttcaaccttggcccaagcactcactgaagcaccgagtaaagaagtcccctccagaagaatccaatcaaaatgggggagagggaagttacagagaagcagagactttcaacagccaagtcgggctccccatcctatacttctccggcaggagagagagattgttgctgcggcctgaagtacttgcagagatacctcgggaggcattcaccgttgaggcatgggtgaaaccagagggaggacaaaataaccctgccatcatcgctggggtattcgataattgctcacacacagtatccgacaagggttgggccctaggcattcgaagcggtaaggataagggaaaacgagatgctaggtttttcttttctctttgtactgatcgcgttaagaaggctacaatcctcatctcgcattcgcgctaccaaccaggaacatggacccacgttgccgccacatacgacggccggcacatggccctgtacgttgacggaactcaggtggccagttccctcgatcaaagcggtcctttaaacagcccatttatggccagttgcagatccttgttactaggcggcgacagttccgaggacggacattattttagaggccatcttggcacattggttttttggagcactgctctaccacagtcccactttcaacatagctcacagcatagcagcggagaagaggaagcaaccgacctggtgctgacagcctctttcgaacctgttaatacggagtgggtcccatttcgtgacgaaaagtaccccagactcgaggttctgcagggtttcgaacccgagcccgagatcctgagccctttacagccccctctctgcggacagaccgtgtgtgacaacgtggaacttatctcacagtataacggatactggcctctgagaggtgaaaaagtaattagataccaagtggtgaacatatgcgacgacgaaggattgaatccgatagtatcagaggagcagattagacttcagcatgaggctctgaatgaggctttctcccgctataacatcagctggcaattatcagttcatcaggtgcacaacagcacattaagacaccgagttgtgctcgtcaactgcgaacccagtaaaatcgggaacgaccactgtgacccagaatgtgaacatccattaacagggtatgacgggggagactgtcgcttgcagggtagatgctattcctggaatagaagagacggtttgtgccacgttgaatgtaacaatatgctgaacgacttcgacgacggcgattgttgtgatccacaggtagcagatgtgcgtaagacttgctttgatccggacagtcccaaacgagcctatatgagcgtgaaagaactcaaagaggcactccagctcaattccactcactttttgaatatctatttcgcttcctcagttcgggaggatctcgctggggcagcaacatggccttgggacaaggacgcagtcacacacctgggaggaatcgtgctgagtcccgcatattatggtatgcctggtcacacagacaccatgatacacgaagtaggacatgtcctggggctgtaccacgtgtttaaaggtgtgagcgagcgagagagttgcaatgacccttgcaaggagaccgtaccatcaatggagaccggagatctgtgcgccgatactgcccctacccctaagtccgagctgtgtagagagcccgagccaactagtgacacatgcggattcactagatttccaggcgcccctttcacaaattacatgtcttacacagatgacaactgtaccgacaactttacccctaaccaggtcgccaggatgcattgttatcttgacctcgtctatcagcagtggacggaatcacgcaaacctaccccaattccaatcccacccatggttattggccagaccaataaatccctaacaattcactggctgcctccaatttcaggtgtcgtgtacgatagagcctctggctccctttgtggtgcctgcactgaggacggaacttttagacaatatgtacatacagcttcttccaggagagtgtgcgactctagtggctactggacccctgaagaagccgtgggcccccccgacgtggaccagccctgcgaacctagtcttcaagcctggtctcccgaagtgcatctgtaccatatgaacatgaccgtgccatgccctaccgaggggtgcagcctcgaactgctgttccagcacccagtgcaagccgatactctgaccttatgggtgacatcattcttcatggaaagttcacaggtacttttcgatacagaaatccttctggagaacaaagagtccgtgcaccttggccccctcgacaccttttgtgacataccacttaccattaaattacacgtcgatggtaaagtctcaggcgtgaaagtgtatacattcgacgagcgtattgagatcgacgctgccctcctgacaagtcagccccacagtccactttgttccggctgccgccccgttagataccaagtgctgcgagaccccccatttgccagcggacttcctgtggttgtgacacactctcaccggaaatttacagacgtagaagtgacccccggtcaaatgtaccagtaccaggtactagctgaagctggaggagagctgggcgaagccagtccccccctgaaccacattcacggcgccccctattgtggtgacggcaaggtcagtgagcgactgggtgaagaatgtgatgatggtgatttggtttcaggagatggctgcagcaaagtctgtgaacttgaagaaggttttaactgcgtcggagaaccaagtctctgctatatgtatgagggagatggtatttgtgaaccattcgaaagaaaaacctccatcgtcgattgtggaatctacaccccaaagggttatcttgatcaatgggcaacccgtgcctacagttcacatgaagataagaaaaagtgccccgtcagtcttgtgacaggagaacctcatagtctaatttgtacctcctaccaccccgacctgccaaaccatcgccctctgaccggctggtttccttgtgtcgccagcgagaatgagacccaggatgataggtctgaacagccagaaggttctctcaaaaaagaagacgaggtgtggcttaaagtttgcttcaatcgccccggtgaggctcgagctatcttcattttcctgacaaccgacggactggtccccggcgagcaccaacaacccaccgtcaccctctacttgaccgatgtgcgtggttcaaatcactcgctgggcacatatggcctttcatgtcagcataatccattgatcattaatgttacccaccaccagaacgtcctctttcaccacactacatctgttctgctgaacttttcatcccctcgagtcggtatctccgccgtcgccctacgaacttcctccagaattggtctttcagcaccatcaaactgcatatctgaggatgagggacagaatcaccagggtcagtcatgcatacacagaccctgtggcaagcaagactcttgtccaagcctcctgcttgaccatgccgacgttgttaattgtacttccatcggtccaggacttatgaaatgcgcaatcacatgccagaggggatttgcgcttcaggccagttctggccagtatatccgccctatgcaaaaagaaatccttctcacctgcagctccggacactgggaccagaatgtgagttgcctccctgtcgactgcggagttcccgacccaagtttggtaaactacgcgaacttcagctgctccgagggaactaagtttctgaagcgatgctcaatttcctgcgtacctcccgccaagctgcagggcttgtccccgtggctcacgtgcctggaggacggcttgtggagcctgccagaagtgtactgcaaactcgaatgtgatgcaccgcctatcatcctgaatgctaatcttctgttaccccattgcctgcaggacaatcatgacgttgggactatatgcaaatacgagtgcaagccaggttattatgtcgccgaatccgctgaaggtaaagtccgcaataaactcctgaaaatccagtgtttagaagggggtatatgggaacaagggagctgtatacccgttgtgtgcgaacctcctccacccgttttcgaaggcatgtatgagtgtaccaatggcttctccctcgatagccagtgcgttttgaactgcaaccaggagcgcgaaaaattacctattctatgcaccaaagagggactctggacgcaagagttcaagctgtgtgagaatctgcagggagagtgtcctcctcctccctctgaactgaattctgtggagtacaagtgtgagcaggggtacggaataggcgcagtctgctcccccttgtgtgttattcctccaagtgaccccgtaatgttacctgaaaatatcaccgccgatacactggagcactggatggagcctgtcaaagtacagtctatagtgtgtacaggcaggagacaatggcacccggatccggttctcgtccactgtattcaaagctgcgagccattccaagccgacggatggtgcgatacaatcaataaccgggcatactgccattacgacggtggggactgttgcagctcgaccctcagttcaaaaaaggtgataccctttgccgcagactgcgatcttgacgaatgtacgtgtagagaccctaaggcagaagagaaccaatag

SEQ ID NO: 14006 - RNA, 702 nt, synthetic construct
  misc_feature 1..702: note = source = /note="Description of Artificial Sequence: Synthetic coding sequence"
  source 1..702: mol_type = other RNA
atgaaagatccactggcaaaagacgaacgcatttacgtcacaaactactattacgggaatacactggttgagtttcggaatctggagaattttaaacagggtaggtggtcaaactcgtacaagttaccttacagctggattggaaccgggcacgtggtttacaacggggccttctactacaaccgcgccttcacacgaaacataattaaatacgacttaaagcagcgctatgttgccgcatgggctatgctccatgatgtggcctacgaggaagcgacaccctggcgttggcaggggcacagcgacgtggattttgctgttgacgaaaatggactctggctaatttacccagcactggacgacgaaggattcagccaagaggtaattgtgctgagcaaattaaacgctgctgacctatctacacagaaggagaccacatggaggactggcttgcgtagaaatttctatgggaattgcttcgtgatttgcggtgtcctgtatgccgtagattcttataaccagcgaaacgctaatatttcttatgcattcgatacacatacaaacactcagattgtcccccgcctgctgtttgagaacgagtatagctataccacacaaatcgactataatccaaaagacagactattgtacgcctgggataacggccaccaagtcacataccatgtcatctttgcatattag

SEQ ID NO: 14007 - RNA, 579 nt, synthetic construct
  misc_feature 1..579: note = source = /note="Description of Artificial Sequence: Synthetic coding sequence"
  source 1..579: mol_type = other RNA
atgctaaaaaaaatcagtgtcggagttgctggagacctcaacaccgttacaatgaagctagggtgtgtattgatggcatgggccctgtacctgtctttaggcgtattgtgggtcgctcagatgcttctcgccgccagtttcgaaacccttcaatgtgagggtcccgtgtgcaccgaagagtcttcttgccatacagaggatgaccttacggacgccagagaggctggctttcaggttaaagcgtatacttttagcgaaccttttcatctcatagtttcttacggagcaagtagtagtgcagcacctccaactctcaaccccgcgcctcaaaaatctgcggcccccggaaccgccccagaagaagctccgggccccctaccaccccctcccactccatctagtgaagatcccgggttttcatctccactcggcatgcccgatcctcacctgtatcaccagatgggcttactgctgaagcacatgcaagatgtcagagtcctgcttggacacctgctgatggagttaagagaattatcgggacatcggaaacctggtaccacaaaggcgacagccgaatag

SEQ ID NO: 14008 - RNA, 459 nt, synthetic construct
  misc_feature 1..459: note = source = /note="Description of Artificial Sequence: Synthetic coding sequence"
  source 1..459: mol_type = other RNA
atgctgcttgccgctagcttcgaaacactgcaatgcgagggtccagtctgcaccgaagagtcctcatgtcacaccgaagacgacttgaccgacgcaagagaggcaggctttcaggttaaagcgtacaccttctccgagccttttcatcttatcgtatcctacggagccagcagtagtgcagcacctccaactctcaatcccgctccccagaagagcgcagcaccaggcaccgcccccgaagaagccccaggaccccttccgccccctccaactccaagttccgaagatccaggattttcctcaccactgggcatgccagatcctcacttataccaccagatggggctgctgctgaaacacatgcaagacgttagggtgcttctaggacatctgctcatggagttgagagagcttagtggccacagaaaaccaggcactactaaggccacggcagaatag

SEQ ID NO: 14009 - RNA, 1098 nt, synthetic construct
  misc_feature 1..1098: note = source = /note="Description of Artificial Sequence: Synthetic coding sequence"
  source 1..1098: mol_type = other RNA
atgaagcttggatgcgtactcatggcctgggctctttacttgtcactcggtgtcctctgggttgcacagatgttactggccgcaggatgccatgccgccgcctcttttgagacactccagtgtgaaggccccgtgtgtaccgaggaaagttcatgccataccgaagacgatctaactgacgcacgagaggccggcttccaagtgaaggcctacactttcagtgagcctttccaccttattgtgagttatgattggctgatactgcagggacctgcgaaacctgtgttcgaaggcgacctgctggttctgaggtgtcaggcctggcaggattggccccttacacaagtcaccttctatcgggacggtagcgcacttggtccccctgggccgaatcgggagtttagtatcacggtagtccagaaagctgactcaggacactaccactgcagtggcatcttccagagccccggacccggaatccctgaaaccgccagtgtcgtagccattacagtccaggaactgtttccagcacccattttacgtgctgtgccaagcgccgaaccacaggccgggagcccaatgacgctgagttgtcagacaaaattacctttacagagatctgccgccagactcctgttctctttttacaaagacggaaggattgtacagtcacgcggcctgagctccgaattccagatccctacagccagcgaagaccacagtggaagctactggtgcgaagcagcaaccgaggataatcaggtgtggaaacagagcccacaactagagattcgggtccagggcgccagcagctccgcagccccccccaccctaaatcccgccccccagaaatcggcagcaccaggcacagctcctgaggaggccccaggacctctccctccacccccaactccatcctcagaagatcccggattttcttcccctctgggcatgcctgaccctcatctttaccaccaaatggggctgttgctgaaacacatgcaggacgttagagtccttctgggtcacctcctcatggagttacgagaactatctggacacagaaagcccggaaccaccaaggccaccgcagagtag

SEQ ID NO: 14010 - RNA, 711 nt, synthetic construct
  misc_feature 1..711: note = source = /note="Description of Artificial Sequence: Synthetic coding sequence"
  source 1..711: mol_type = other RNA
atgcttaaaaagatctctgtcggagttgccggggatctcaacaccgtgactatgaaacttggatgcgttcttatggcctgggccttgtatctgtctcttggggtactgtgggtcgcccagatgttgttagagctgttccctgcccccatacttcgcgccgtcccgtccgccgagcctcaagcagggagtcccatgactctttcatgtcagaccaaactgcccctccaacgctctgccgcacggctgctgttctccttctataaagacggacgcatcgtccaatcaagaggacttagctcagaatttcaaattcctactgccagtgaggaccattcagggagttactggtgcgaggccgcaactgaagataatcaggtgtggaaacagtcccctcagctcgaaatcagagtgcaaggcgcgtcatccagcgccgctccacctactctcaaccccgccccccaaaaaagcgctgccccgggaacagctccagaggaagcccccggtccacttccccccccacctacaccatcatcagaggatccaggattctctagccctcttggaatgcccgacccacatttataccatcagatgggcctgcttttgaaacatatgcaagacgttagggtcctattgggacaccttctgatggaactgcgcgagttgagcggtcataggaaaccaggaactacaaaggccactgcggagtag

SEQ ID NO: 14011 - RNA, 1149 nt, synthetic construct
  misc_feature 1..1149: note = source = /note="Description of Artificial Sequence: Synthetic coding sequence"
  source 1..1149: mol_type = other RNA
atgcttaagaaaatctccgtaggagtggccggggatctgaacactgtgacaatgaagctgggctgcgtcctgatggcatgggcactttatttgtcccttggcgtgctgtgggtagctcagatgctactcgctgcgggatgtcacgctgctgcctcattcgagactctgcagtgtgaaggacccgtatgtaccgaagaaagttcctgtcataccgaagatgacttgaccgacgctagagaagccggtttccaggttaaagcttacacgttctccgaaccctttcatttaatcgtcagttatgattggctcatactccagggtcccgcaaaacccgtgtttgagggcgacctgcttgtgctgcggtgccaggcttggcaggactggcccttaacccaggtgacattctacagagacggaagtgcactcgggccaccaggcccaaatcgcgaattctctatcacagtagtacagaaggccgattcaggccactaccattgttccggaatatttcagagcccaggacccggcataccagaaaccgcatctgttgtcgctatcacagtccaggagctgtttcctgctccaatccttcgcgctgtcccctctgcagaaccccaagctggaagtccaatgaccttaagctgccaaacaaaactgccactgcaaaggtccgctgcccgcctgctgttttcgttttataaggatggtcgcattgtccagtctcggggactctcatcagaatttcagataccaacagcctctgaggatcattccgggagttattggtgcgaggccgcaacagaggacaaccaagtctggaaacagagtccccaactagagatacgcgttcaaggcgccagtagttcagcggcccctcctacactcaacccagccccacagaagagcgcagcacctggcactgcacctgaagaagcccctggcccccttccacccccacccacaccctcgtctgaagatccaggattttcgagccctctcggtatgccagacccgcacctttaccaccaaatgggtttgctgctgaaacacatgcaagatgttagggtgcttctgggccacctgcttatggagttacgagaactgtctggtcacaggaagcctggtaccactaaagcaaccgcggaatag

SEQ ID NO: 14012 - RNA, 738 nt, synthetic construct
  misc_feature 1..738: note = source = /note="Description of Artificial Sequence: Synthetic coding sequence"
  source 1..738: mol_type = other RNA
atgtcgcgactccgcgccttgctgggcttgggcctattagtcgctgggtcccgggtcccgaggattaaaagtcagacgatcgcctgtaggtccggccccacatggtggggaccccagagactgaatagcgggggcagatgggattccgaggtcatggcatctacagtggtgaaatacttgtcacaagaagaggctcaagcggtcgatcaagagttgtttaacgagtaccagttttcggtggatcagctgatggaattggcaggattgtcttgtgctaccgccatagccaaagcttacccccctacatctatgagtaggagtcctccaactgtcctagtgatatgcggtcccggcaacaatggaggtgacggcctggtgtgcgctagacacctcaagctgttcggatatgaacctacaatatattaccccaagagacccaacaagcccctgtttaccgcactagttactcaatgtcagaagatggatattcccttcctcggcgaaatgcccgctgaacctatgaccatcgatgaactctacgaactcgtggttgatgcaatctttggattttccttcaagggggatgtgagagagcccttccacagtattttatctgtgcttaaaggccttactgtacctatagcttctatcgacattccaagtggtgccggaatccagaaggtaggttggggtagactgggaccatatccgccagactcttgtcctcatcaagtctag

SEQ ID NO: 14013 - RNA, 783 nt, synthetic construct
  misc_feature 1..783: note = source = /note="Description of Artificial Sequence: Synthetic coding sequence"
  source 1..783: mol_type = other RNA
atgagccgcctgagagccctattaggactaggcctgttagtggctggaagcagagtgcccagaattaagtcacagactattgcatgtcgaagtgggcctacctggtggggaccccaacgacttaattcagggggaagatgggatagtgaggttatggcatcaacagtcgtgaaatatctctcgcaggaagaggcccaggcagtggaccaggaactgtttaatgagtaccagttcagtgttgatcaattgatggaactggccggcttgagttgcgcgacagcaatcgctaaagcttatcctcctacaagcatgtctaggtcccccccaactgtccttgtcatatgtggtcccggtaacaatggaggagatggcctcgtgtgcgcccggcatcttaaattattcggctatgaacccacgatttattacccaaagcggcccaacaagccattgttcacagcccttgtgacccagtgccaaaaaatggatataccttttctgggagaaatgccagccgagctgcaaggcagatgtagcgggacagttcctcagcatcccgagtgtcccgagggaacccattgcgcacattgccagcacagacacagtttgcgcatgggacgaggcgaagggaaatgttggcgcgacccggcccgccttgcacacatcccccactctccccagaaaatctgcaatcccgtgtaccgaagcctgccactgcctgggggctctttttgtgctacatgctccggtgaagaagttcctgccgaacctgcaacccttccttag

SEQ ID NO: 14014 - RNA, 867 nt, synthetic construct
  misc_feature 1..867: note = source = /note="Description of Artificial Sequence: Synthetic coding sequence"
  source 1..867: mol_type = other RNA
atgtccagactgagggctttgctcgggctgggccttcttgtggcaggctcccgcgtcccacgcatcaaaagccaaaccatagcatgcaggtcaggtcccacctggtgggggccacaacgtctcaactccggcggacgatgggacagcgaagtaatggcctcaacggttgtaaagtacctaagtcaggaagaagcccaggctgttgatcaggaactgtttaatgagtaccagtttagtgtcgatcaactgatggaactggctggcttgtcatgtgcaactgctatagcgaaagcataccctccaacatctatgtcaagatctccacccaccgtcctagtgatctgtggccctggtaataatggaggcgatggcttggtctgcgcaaggcacctgaaactgttcggatatgaaccaacgatctattatcctaaaagaccaaacaaaccactcttcaccgcgctggtgactcaatgtcagaagatggatatcccgtttctgggcgaaatgcccgccgaacctatgaccatcgacgagctttacgaattggtagtcgatgcaatattcggattctctttcaaaggcgacgttagggaaccattccatagtattctgtccgtgctcaaaggactgacggtcccaatagcgtccattgacatcccttcggggtgggatgttgaaaaaggtaacgcaggagggatacagcctgatctgctgatttcacttacagctcctaagaaaagcgctacccagtttacaggccgctatcattacctgggaggacgtttcgtgcccccagctttagaaaagaaatatcaattaaacctgcccccctacccagataccgaatgtgtataccgcctacaatag

SEQ ID NO: 14015 - RNA, 879 nt, synthetic construct
  misc_feature 1..879: note = source = /note="Description of Artificial Sequence: Synthetic coding sequence"
  source 1..879: mol_type = other RNA
atgcacctgcggttaatatcctggctgttcatcatcttgaactttatggagtacattgggagccaaaatgcaagtaggggtagacgtcagagacgcatgcacccaaacgtttcccagggctgccaaggcggatgtgcaacctgtagcgactataatggctgtctgtcgtgcaaaccaagattgttcttcgcccttgaaagaataggcatgaaacagataggtgtgtgcctgagcagttgcccgtcgggttattacggaaccagataccctgatatcaataagtgtacaaaatgtaaagccgactgtgatacctgcttcaacaaaaatttctgtacgaaatgtaagtctgggttttatctgcatttaggtaagtgcttagataattgtccggagggactggaggctaacaaccatactatggagtgcgtcagcatcgtgcattgcgaagtgagcgaatggaatccttggagcccatgcactaagaaaggtaagacatgtggatttaaaagaggtaccgagacacgcgttagggaaattattcaacatccatccgctaaggggaatctatgtccccctaccaacgagaccaggaaatgtaccgttcagcggaaaaagtgtcagaaaggagagcgcggtaagaaaggccgagagagaaagaggaagaaacctaataaaggggaatccaaggaggccatcccggactctaaatcactggaaagcagcaaagaaatcccagagcaaagagaaaacaagcaacagcaaaaaaagcgaaaggtccaagacaagcagaagtctggcatagaggtaaccctggccgaagggttaacatctgttagtcaacgcacacagcctacaccctgccggcgcagatacctatag

SEQ ID NO: 14016 - RNA, 2871 nt, synthetic construct
  misc_feature 1..2871: note = source = /note="Description of Artificial Sequence: Synthetic coding sequence"
  source 1..2871: mol_type = other RNA
atggagactcaggaactacggggcgcactggctctcttgctcctctgctttttcacctccgcctctcaagacttgcaagttatcgaccttcttacagtgggagaaagcaggcagatggtagccgtcgccgagaaaatcagaaccgccttgctcacagccggggatatatatctgttaagcacctttagactgccccccaagcagggcggcgtgttattcgggctgtactctaggcaggataatactaggtggttagaggcgagcgtagtgggcaaaatcaataaagttctagtgcggtatcagagggaagacggaaaagtacacgcagtcaatctccagcaggcaggccttgctgacggccgtacgcacactgtactgttgaggcttagaggtccatcacggcctagcccagctcttcacctgtatgtggactgcaaactaggcgatcaacacgccggtcttcctgctctggcccctatcccacccgccgaagtagatggattagaaattagaacgggacaaaaagcatacctccggatgcagggcttcgtggagagcatgaaaattattctaggcggcagtatggctcgagtgggagcattaagcgaatgccctttccaaggtgacgaatcaatacacagcgccgttactaacgcacttcattcaatcctgggcgagcaaaccaaggccctcgtaacccagttgacgctctttaaccaaatcctcgtggagctgagagacgatatccgagatcaagttaaagagatgagcttgatacggaacacaattatggaatgtcaggtttgcgggttccatgagcagaggagccactgttcaccaaatccatgcttcagaggtgtagattgtatggaagtttacgagtacccaggctacaggtgcgggccctgtccccctggccttcaaggaaatggtactcactgcagtgatattaacgaatgcgcccacgccgatccatgctttccaggtagtagttgtatcaacaccatgcctggtttccattgcgaagcttgtccgcgaggctacaagggcacacaagtctccggggtggggattgactacgcgagagcatcaaagcaggtctgcaatgatatcgatgagtgtaatgacggtaacaatggcggttgcgatcccaatagcatatgcaccaacacagtcggctcctttaaatgtggaccatgtcgactggggtttcttggcaatcagtcgcaaggttgcctgcccgcccgcacctgtcactcaccagctcactctccttgtcacatccacgcccattgtctctttgagagaaacggtgccgtttcctgccaatgtaacgtcggatgggccgggaatgggaacgtgtgcggtacagacacagatatcgacggttaccccgaccaagccttaccttgcatggacaacaataagcattgcaaacaggataattgtctgctcactccgaactctggccaggaagacgccgataatgatggtgtaggtgaccaatgcgacgatgacgctgacggcgatgggataaagaacgtagaagataactgccgattgtttccaaataaagaccagcagaattcggacactgacagctttggcgatgcctgcgacaactgccctaacgttccaaacaacgatcagaaagatactgatgggaacggagaaggagatgcgtgcgacaacgatgtggatggtgacggtattcccaatggtctggataactgcccgaaggtaccgaacccactacagacagaccgtgacgaggacggggtgggcgatgcgtgtgattcgtgccccgaaatgagcaacccgactcagacagacgccgactcggacctcgtgggcgacgtttgcgatacgaatgaagacagcgacggcgatggccaccaggatactaaagacaactgccctcagctgcccaactcaagccaactcgacagtgataatgacggactgggtgacgaatgtgacggtgatgatgataatgatggaattccagactacgtgccgccaggacccgataactgtcgactagtaccaaaccctaatcagaaagatagtgatggcaacggagtgggagatgtgtgcgaagacgattttgataacgatgccgtagttgatccactggatgtttgtcccgagagtgcagaagttactcttacagacttccgggcctatcagacagtcgtattggatccagagggggatgcacaaattgatcccaactgggtcgttttgaatcagggaatggaaatcgtgcagactatgaacagtgacccaggacttgcagtaggttacactgcttttaatggcgttgactttgagggcacatttcatgtgaacaccgttacagacgatgactacgccggttttttgtttagctaccaggattcaggtagattttacgttgtgatgtggaaacagactgaacagacgtattggcaggcgacccctttcagagcagtggcccagccagggttgcagttgaaagccgtgactagcgtaagtggccctggggagcacctaagaaatgctctgtggcatactggacacacccctgatcaggtaagactcctgtggacagaccctcgtaatgtcgggtggagggataagacctcttatcgatggcaactccttcatagaccccaggtagggtacattagggtgaagctttacgaaggaccccaactcgtggctgattcgggtgtaatcattgatacgagcatgcggggtggccgacttggagttttttgcttctctcaggaaaacatcatatggtccaatcttcagtaccgctgcaatgacaccgtgccagaagatttcgagcctttcaggcgccaactactgcagggaagagtttag

SEQ ID NO: 14017 - RNA, 1110 nt, synthetic construct
  misc_feature 1..1110: note = source = /note="Description of Artificial Sequence: Synthetic coding sequence"
  source 1..1110: mol_type = other RNA
atgctgccatggctcctcgttttctcagcactcgggatacaggcctggggtgacagtagctggaataagacacaggcaaaacaggtatccgaaggcctgcagtacctgttcgaaaatatctctcagttaaccgagaaggacgtatcaaccactgtcagtagaaaggcctggggtgccgaggccgtgggatgctctatacagttaacaaccccagtcaacgtattagtaattcatcacgtacccggattagaatgccatgaccaaacagtgtgttcccagagactcagggaactgcaggcccatcacgtgcacaacaactccggatgcgatgttgcttataatttcctcgtgggagacgacggcagagtttatgagggcgtaggatggaatattcagggcgtgcacacacagggctacaacaacatttcactggggttcgcattctttggaactaaaaaggggcatagccctagtcccgccgcattaagcgccatggaaaacctgataacctatgctgtacagaagggacatctttcctcttcctacgttcagccgctcctgggcaaaggagaaaactgtctagcccccagacaaaaaacttcactcaagaaagcctgtcctggtgtggtgccacgctcggtttggggagcaagagagacacactgcccgcggatgacactccccgcaaaatatggcattataattcacacagcggggcgaacctgtaatatctctgatgagtgtcgcctgcttgtccgtgacattcaaagtttttacatagaccgactgaaatcctgcgatattggctataattttctggtgggacaggatggtgccatttacgaaggagtgggctggaacgtccaaggctctagtacacccggctacgacgatatagcacttgggataaccttcatgggaaccttcacaggaatccctcccaacgccgctgcactggaagctgctcaagatctgattcagtgcgccatggttaagggctatctgaccccgaattatttactggtcggccactccgatgtcgcccggactctgtcacccggccaggccttgtataacataatctccacctggccccatttcaaacattag

SEQ ID NO: 14018 - RNA, 675 nt, synthetic construct
  misc_feature 1..675: note = source = /note="Description of Artificial Sequence: Synthetic coding sequence"
  source 1..675: mol_type = other RNA
atggagaaaatacctttcgtcttaggaggcaacctgcagggcggagaactagtggtggcttatccctacgatcttgtacgaagcccctggaaaactcaagagcatacacctacccccgatgaccacgtgttccgatggctagcctactcctatgccagcacccatcgcctcatgacagacgcccggagaagagtttgccatactgaggactttcagaaagaggaagggactgtgaatggcgccagctggcacacagtggccggatctctgaatgattttagctatctgcatactaattgctttgagttatctatttacgtcggatgtgataaatacccacacgagtcacagcttcctgaagaatgggaaaataatagagagagcctgatcgtgtttatggaacaggtccaccgtgggatcaaaggcttggttcgtgactcacacgggaaggggatacctaacgctatcatcagcgtcgagggaattaaccacgatatcaggaccggcagagtcagcctgcaaaaattatcactggcatgtcgccgcgtaagatgcgcttttgcccttagcagtagtagcaccatgatcgtacgacccccgcagccctacggcacagtccctcactcatcacccgacccagttacaaccaagatttctcctctgcgcaacttctag

SEQ ID NO: 14019 - RNA, 285 nt, synthetic construct; identical to SEQ ID NO: 12380
  misc_feature 1..285: note = source = /note="Description of Artificial Sequence: Synthetic coding sequence"
  source 1..285: mol_type = other RNA

SEQ ID NO: 14020 - RNA, 285 nt, synthetic construct; identical to SEQ ID NO: 12381
  misc_feature 1..285: note = source = /note="Description of Artificial Sequence: Synthetic coding sequence"
  source 1..285: mol_type = other RNA

SEQ ID NO: 14021 - RNA, 1026 nt, synthetic construct
  misc_feature 1..1026: note = source = /note="Description of Artificial Sequence: Synthetic coding sequence"
  source 1..1026: mol_type = other RNA
atggttccagccgccggggccctgctgtgggttctgctcctcaatttgggcccccgcgcggctggcgctcagggtcttacacagactcccaccgagatgcagagagtatcgctcaggtttgggggccctatgacccgatcgtaccgctcaaccgcccgtacaggcctgccaagaaaaactagaattatcttagaagacgagaacgacgctatggccgacgcagatcgcctggccggaccagccgccgccgaattgctagctgctacagtcagtaccgggttcagtcgttcatctgctattaatgaagaagacggaagtagcgaagaaggtgtggtgatcaacgcaggtaaagactcaacctctagggaattgccttcagccacacctaatactgcgggcagctcttccaccagatttattgcaaatagccaagaacccgaaatccgtctgacaagcagcttgcccaggagccccgggagatccactgaggacttgcccggaagccaggccactctatcacaatggagcacccccggttctacacccagccgttggccatctcccagccccacagcaatgccttcgcccgaagatctaagacttgtacttatgccttggggtccttggcattgccattgtaaatccggaacgatgtcacggtcccggtctggaaagctccacgggctgtcaggtagactacgcgtgggagccctgagtcaactgagaacagaacacaagccatgtacctaccagcaatgtccgtgcaaccgactgagagaggaatgcccgctggacacctcactgtgtacggataccaactgtgcgtcacagtcaaccacctcaacccgtactacaactactccttttcctacaattcatctgcgcagtagcccttctttgcctccggccagcccctgccctgctcttgccttttggaagcgtgtaagaatcggcttggaggacatttggaatagtctgtcgtctgtgttcaccgaaatgcaacccatcgatcgtaatcaacgctag

SEQ ID NO: 14022 - RNA, 366 nt, synthetic construct
  misc_feature 1..366: note = source = /note="Description of Artificial Sequence: Synthetic coding sequence"
  source 1..366: mol_type = other RNA
atggatgtcttgtttgtagccatatttgctgtaccattgatcctgggacaagagtatgaggatgaggaaagactcggagaggatgaatactaccaggtagtgtactattacaccgtaacacctagctatgacgatttttccgccgacttcacaatcgattatagcatttttgaatctgaggacagattgaacagactagataaggacatcaccgaagcgattgaaaccactatatccctggaaacggcccgggccgaccacccaaagcctgtcactgttaagcccgttaccaccgaaccagtggaggaaggatgttacgattctttggatggctcattggcgcgcggaaactggaaaattaaatag

SEQ ID NO: 14023 - RNA, 396 nt, synthetic construct
  misc_feature 1..396: note = source = /note="Description of Artificial Sequence: Synthetic coding sequence"
  source 1..396: mol_type = other RNA
atggatgtgttgttcgttgctatttttgccgtgccattaattttagggcaggagtatgaagacgaagaaagacttggcgaggacgaatattatcaagttgtctactactacaccgtcactccttcatacgacgatttcagtgccgatttcaccatagactactcaatcttcgagagtgaggatcgcctcaaccggttggacaaggacattaccgaagcaattgaaactactatcagtttggaaacagctagagcggatcaccccaaaccagttactgtcaaacccgtgacaaccgaacctagtcccgacctgaatgacgctgtatcatccttacgttcccccattcctctcttgctgtcttgcgcttttgttcaagtgggcatgtactttatgtag

SEQ ID NO: 14024 - RNA, 396 nt, synthetic construct
  misc_feature 1..396: note = source = /note="Description of Artificial Sequence: Synthetic coding sequence"
  source 1..396: mol_type = other RNA
atggacgttttatttgtggctattttcgctgtgcctttaatactaggacaggagtacgaggatgaggaaagactgggtgaggatgagtactaccaggtcgtgtattactatactgtgaccccctcctacgatgatttctccgccgattttactatcgactactctatattcgaaagcgaggatcgcctaaatcgtcttgacaaggatattactgaagccatcgaaacaacaatttctctcgagaccgcacgcgccgatcatcctaagcctgtgactgtcaagccagtgaccacggagccgtccccggatctaaatgatgctgtctcaagcctccgctctcccattcctctcctactgtcatgtgccttcgttcaggttggaatgtactttatgtag

SEQ ID NO: 14025 - RNA, 312 nt, synthetic construct
  misc_feature 1..312: note = source = /note="Description of Artificial Sequence: Synthetic coding sequence"
  source 1..312: mol_type = other RNA
atgagtgggagagggaagggagggaagggtcttggaaagggaggagctaaacggcataggaaggtactgcgggataatatacaaggaataaccaagcctgccatacgtagacttgcgcggcggggaggcgtcaagcggataagtggcctgatttacgaggagactaggggcgtgctgaaagtgttcctcgagaacgtcattagggacgcagtaacatacacggagcacgccaagagaaagactgtcactgctatggacgtagtgtacgctctgaaaagacagggtagaactttgtacggcttcggggggtag

SEQ ID NO: 14026 - RNA, 312 nt, synthetic construct
  misc_feature 1..312: note = source = /note="Description of Artificial Sequence: Synthetic coding sequence"
  source 1..312: mol_type = other RNA
atgtctggtaggggcaaggggggaaaagggctgggaaagggaggagccaagaggcaccggaaagtgctgagagacaacattcaagggattaccaaaccagccattcgcagactcgcgcgccgcggaggagtaaagagaattagcggactcatctacgaggaaacaaggggggtgctcaaggtgttcctcgaaaatgtcattcgggatgctgtcacatatacagagcatgcaaaaagaaaaaccgttacagccatggacgtggtctatgcactcaagagacagggacgaacactgtacggattcggtgggtag

SEQ ID NO: 14027 - RNA, 1404 nt, synthetic construct
  misc_feature 1..1404: note = source = /note="Description of Artificial Sequence: Synthetic coding sequence"
  source 1..1404: mol_type = other RNA
atgttaggtatatggatcgttgctttcctgttcttcggtacctcccgcgggaaagaggtatgttatgaacgcctaggatgctttaaagacggactgccctggaccaggacattctccaccgaactcgtgggcttgccttggagccctgaaaagattaacacccggtttctgctatacacgatacataaccccaatgcataccaggagatctccgctgtgaatagttcaaccatacaggctagctacttcggcactgataaaatcacgcgtattaacattgcaggatggaaaacagatgggaagtggcagagagatatgtgtaatgtgctgttacaactcgaggacatcaactgtattaacctcgattggattaatggcagccgagaatacatccatgccgtaaataatctccgcgtagtgggtgctgaggtggcttacttcatcgatgtactgatgaagaaattcgaatacagtccaagcaaggtgcacctgatcggacactcccttggagctcatttggcaggtgaagctggaagccggatacccgggttaggtagaataaccggattggaccccgctggacccttttttcataatacacctaaggaagtgcgactagacccatccgatgccaattttgtcgatgttattcatacaaacgcagcccgcatcttatttgaattaggcgtcggaactatcgacgcgtgtggacatctggatttctacccgaatggcggcaagcatatgcccggatgtgaagatctaatcaccccattattaaagtttaattttaacgcgtacaaaaaagagatggcttcattttttgactgcaatcatgctcgctcttaccagttctatgccgaatcgatcctcaaccccgatgcttttatcgcttacccgtgcagatcttatacaagtttcaaagccggtaactgctttttttgttcaaaagagggttgtcccacaatgggccatttcgctgataggtttcattttaagaacatgaaaactaatggcagccattatttcctcaacactggttctcttagcccttttgcacggtggcgccataaactgagcgtcaagttgtcgggcagcgaagttacacaggggacagttttcctgagagtggggggggctgtgcgaaaaactggtgaattcgctattgtttccggcaagctcgagcccggaatgacctatactaaactcatcgacgccgacgtaaatgtaggcaacatcacgagtgtccagttcatttggaaaaagcatctcttcgaagatagtcagaacaaacttggagcggaaatggtcatcaatacctccggtaaatatggatataagtccactttctgtagccaggacattatgggccctaacattctccagaacctgaaaccctgctag

SEQ ID NO: 14028 - RNA, 1287 nt, synthetic construct
  misc_feature 1..1287: note = source = /note="Description of Artificial Sequence: Synthetic coding sequence"
  source 1..1287: mol_type = other RNA
atgattaccggtgttttcagcatgagattatggactcccgtgggcgtactaacttcacttgcctattgccttcatcaaagaagagtagctctagcagagcttcaggaagctgacggacagtgccctgtcgatcgtagtctactgaaattaaagatggtgcaggtggtgtttaggcacggggcgaggagtcccctgaaaccgctccccctcgaagagcaagtagagtggaacccgcagctgctggaagtgcccccacagacgcagtttgattacacagtgacaaacctggcaggcggccctaaaccctactccccatacgacagccaataccatgagacaactctcaaaggaggaatgttcgccggccaactcactaaagtcggaatgcagcagatgttcgcccttggagaacggctgaggaagaattacgtcgaggatattccatttctgtctcctaccttcaatcctcaagaagtttttattagatccacaaacattttccggaatttagaatcaacccggtgcctcctagcagggttgttccagtgtcaaaaagaaggtcctatcattatccataccgatgaagccgactccgaagtcctctatccaaactaccagtcttgctggagtctaagacaaagaactaggggtcgcaggcaaactgcaagccttcagcccggcatttccgaggatctcaaaaaggtgaaggataggatggggatagatagctcggacaaggtcgactttttcatactgttggacaacgttgctgcggaacaagcccataaccttccctcctgccccatgctgaagcgattcgcgcgaatgattgaacaacgagctgtggatacatccttgtatatccttccaaaagaagaccgcgagtctctgcaaatggcggtcgggccttttctccatatactcgaatctaatctcctgaaggctgtggactcggctaccgcaccagataaaatcagaaaactatacctttacgctgctcacgacgttacctttatccccctcctcatgaccttgggtatttttgaccataagtggccacctttcgcggtcgatttgacaatggaactctaccaacatcttgagtcaaaagaatggttcgtacaactgtattaccacggtaaggaacaggtcccccgcggatgtcccgacggactatgccccctggatatgtttctgaatgccatgagcgtatacacactttcgccagagaaataccacgccctgtgttcccaaactcaagtgatggaagtcggaaatgaggaatag

SEQ ID NO: 14029 - RNA, 711 nt, synthetic construct
  misc_feature 1..711: note = source = /note="Description of Artificial Sequence: Synthetic coding sequence"
  source 1..711: mol_type = other RNA
atgtgcgtaacataccacaatggaactggatactgcaagtgccccgaaggatttctcggcgaatattgtcagcatagagacccgtgcgagaaaaatagatgtcagaatggcgggacctgcgtggctcaggcaatgcttgggaaagccacttgtaggtgtgcttccgggttcacaggggaagattgccagtactctacttcacacccatgttttgtctctagaccctgtctgaatggaggaacctgccacatgctctcgcgagacacatacgaatgcacatgccaggttggattcaccggaaaggagtgtcagtggacagatgcatgtctaagccacccttgcgccaatggctccacctgtacaaccgttgcgaatcaattctcttgtaaatgcctcaccgggttcacaggccaaaaatgcgaaaccgatgtgaatgagtgcgatatcccaggacattgtcagcatggcggaacctgtttaaacctccctggatcatatcagtgtcagtgcctccaaggattcactggtcaatactgcgacagtctgtacgtgccatgtgcaccgagtccctgcgtgaacggcggtacatgcagacagacgggagatttcacttttgaatgtaattgtttgcctgaaacagttaggcggggaacagagctgtgggaaagggatagggaagtgtggaacggaaaagaacatgatgaaaactag

SEQ ID NO: 14030 - RNA, 990 nt, synthetic construct
  misc_feature 1..990: note = source = /note="Description of Artificial Sequence: Synthetic coding sequence"
  source 1..990: mol_type = other RNA
atggtgaccaaagcatttgtgctcctcgcaatatttgcagaagcctcagctaaatcatgcgccccaaataaagccgatgttattcttgtgttttgttaccctaagacaatcatcaccaaaattccggagtgtccatacggctgggaagtccaccagttggccctcggcggattgtgttataacggagttcacgaaggcggctattaccagttcgtgatcccggatctgtctccaaagaataagtcatactgtgggactcagtctgagtataagcctccaatttaccatttttactcacatatagtgagtaacgataccacagtcatagtgaaaaaccagcccgttaactactctttctcctgtacttatcattcgacatacttggtaaatcaagctgcctttgatcagagagttgctactgtgcacgtgaagaatgggagcatggggacctttgaatctcaactcagcctgaatttctacacaaacgcaaagttctccatcaaaaaggaagcccctttcgtactagaggcctcagaaatcggttcggacctattcgccggcgtggaagccaagggactgagcattcgtttcaaagtagtattgaattcctgctgggccacaccctctgctgatttcatgtacccactgcagtggcagctaattaacaaaggatgtcctacagacgagaccgtgctggtacacgagaatgggagagaccatagagccacctttcagttcaatgctttcagattccagaacatcccgaaactttctaaggtttggctgcattgtgaaaccttcatctgtgatagcgaaaaactttcgtgccccgtgacatgcgataaaaggaagcggcttcttagagatcaaactggaggagttttggtcgtcgagctttccctcagatcccgaggtttttcttcgctgtattctttttccgatgtgctacaccaccttatcatgatgctgggcatctgcgctgtcctctag

SEQ ID NO: 14031 - RNA, 1161 nt, synthetic construct
  misc_feature 1..1161: note = source = /note="Description of Artificial Sequence: Synthetic coding sequence"
  source 1..1161: mol_type = other RNA
atggcacaatggcactgttcgcagcgaacccaagctgggggccacggagtcggagagagactggcgcaatgccaagatcagtcctccaggcacgccgcagaactgcgggactttaaaaataaaatgttgcccctgctggaggtggccgaaaaggaacgtgaagcgctgaggaccgaggctgatacaatttccggtagagtggataggctggaacgggaggtggactatctagagacacagaaccctgctctaccatgcgttgaatttgatgaaaaggttaccggcgggcccggaactaagggcaagggaagacgcaacgagaaatacgatatggttaccgattgtggctacactatttcccaagttagatctatgaaaatattgaaaaggtttggcggacctgccggcctgtggacaaaagacccgctcggccagaccgagaagatctacgtcctggatggcacacaaaacgatacagctttcgtgtttccaagactacgcgatttcactctggccatggcagcgagaaaagcaagcagagttcgggtaccatttccttgggtggggactggccagctggtgtacggcggcttcctctattttgcacgccggcccccaggcagacccggaggaggcggagagatggaaaataccctgcagctaatcaaattccacctggccaatcggacagttgtcgattcgtctgtgtttcccgcagagggcttaataccaccatacggactgacggccgatacatatatagacttagccgcggatgaggaaggactgtgggccgtttacgctaccagggaggacgatagacatctatgcctcgccaaattggacccacagaccctggataccgagcagcaatgggacacaccctgtccgcgggaaaacgcagaagccgcatttgttatctgcggtaccctgtatgtcgtgtacaacacccgccccgctagtcgggccagaatacaatgttcctttgatgcttccggcacccttacacccgagcgggccgcccttccctatttcccccgaagatatggagcgcacgcttcattaagatataacccccgtgaaagacagctgtatgcatgggacgacggataccagatcgtgtacaagctagaaatgagaaagaaagaagaggaggtgtag

SEQ ID NO: 14032 - RNA, 510 nt, synthetic construct
  misc_feature 1..510: note = source = /note="Description of Artificial Sequence: Synthetic coding sequence"
  source 1..510: mol_type = other RNA
atgtccgaacgcgtggaaagaaactggtccacaggaggctggcttctcgcgctgtgcctggcctggctgtggactcacctgacactggccgccctccagccaccgacagccaccgtattggtccagcaaggaacctgtgaagttattgccgctcaccgttgttgtaaccggaatcgaattgaggagagatcccagaccgtgaaatgtagttgcttcagcggtcaggttgctggtacaactcgcgctaagcccagttgtgtggatgacctgctgttggccgcccattgcgctaggagagaccctcgggctgccttaaggctcctgctcccacaacccccctcctcttgccgcgacggaggtgtgaggtggtctcctgcttgccgcggcagatcggtacgctgctcaaggacatgtagagacggagccgccgctgttgatacaaaatccaaaccccccagatcacacgattccagttggggctctagacctggccaggaaaggctggattag

SEQ ID NO: 14033 - RNA, 693 nt, synthetic construct
  misc_feature 1..693: note = source = /note="Description of Artificial Sequence: Synthetic coding sequence"
  source 1..693: mol_type = other RNA
atgcgtttggctggtccactacgtatagtggttctcgtagttagtgtaggtgttacgtggatcgttgtcagtatcctgcttggtggacccggtagcggattccctcggatccaacagttgttcacctctccagagtcaagcgtgacggcagcgcccagagctagaaaatataaatgtggcctgccacagccttgcccagaagaacatcttgctttcagagtggtttccggagcagctaatgtcatcgggccgaagatttgtttggaggataaaatgctcatgagctcagttaaggacaatgtaggaagaggactcaacattgctttggtgaatggtgtatcaggtgagttgatagaggcaagagcctttgatatgtgggcaggagacgttaacgatctgcttaaatttattaggccactgcatgaaggcacactggtctttgttgcgagctacgatgacccagcaactaagatgaatgaagaaacgagaaagctgtttagcgaactcgggagcagaaacgccaaagagctggcatttagggactcatgggtttttgttggagccaaaggtgtgcagaacaagtcaccgttcgaacagcacgtgaagaattcgaaacactcaaacaagtatgagggctggccagaggctctggaaatggaaggatgcataccaagacgatctaccgctagttag

SEQ ID NO: 14034 - RNA, 1176 nt, synthetic construct
  misc_feature 1..1176: note = source = /note="Description of Artificial Sequence: Synthetic coding sequence"
  source 1..1176: mol_type = other RNA
atgcttcggcccggtggagccgaggaggccgcccagcttcctctgcgaagggcctccgctccagtgccagtgcctagtccggccgcaccagacggatccagagcctccgctagacttggactcgcttgcttgctgttactccttttgctaacgctgcctgcacgagtcgatacttcttggtggtatatcggcgccttaggagctcgtgtgatctgcgacaacatccctggattagtgagtcgtcagcgccagctgtgtcagcgttacccagacattatgcgctctgtcggcgaaggagccagggaatggatccgggaatgccagcaccagtttagacaccaccgatggaattgcaccacactagacagggaccacaccgtttttgggcgcgtaatgctgagaagttctcgggaagctgctttcgtgtatgcaatcagttcagctggcgtcgtgcatgctatcacccgagcttgcagccagggcgaattatctgtttgctcctgtgatccctacactagaggaagacaccacgaccagagaggagacttcgattggggaggctgcagtgacaacatccactacggcgttcgctttgccaaagcgttcgtagatgccaaggagaaaagactaaaagacgccagagccttgatgaatctacacaataacagatgcgggaggacagcagttaggagatttctgaagttggaatgcaaatgccacggcgtcagtgggtcttgcaccctgagaacttgttggcgagctctcagcgactttcgtagaactggtgattatcttagaagacgttacgatggagctgtgcaggtcatggctacccaagatggtgcaaattttacagccgctagacagggctaccggcgcgctacaagaaccgacctggtgtatttcgacaactcccctgactattgcgtactagataaggctgctggctctctgggtacggctggcagagtgtgttccaagacctctaagggcacagacggatgtgagatcatgtgttgcggacggggctatgacactactagagtgactcgtgtgacccaatgcgagtgcaagttccattggtgttgtgctgtgaggtgtaaggaatgtaggaacacagtagacgtgcacacctgcaaggcgccgaagaaggctgaatggcttgatcagacctag

SEQ ID NO: 14035 - RNA, 1119 nt, synthetic construct
  misc_feature 1..1119: note = source = /note="Description of Artificial Sequence: Synthetic coding sequence"
  source 1..1119: mol_type = other RNA
atgctcgatgggctcggtgttgtggctatttcaatttttggtattcaattaaagacggagggatccttgagaactgctgtcccaggtattccaactcagtctgcctttaataagtgtctacagagatacattggcgccctaggagctcgagtcatctgtgataatattcctggccttgtgtctcgccaacgccaactgtgccaacgttatccagatattatgagatcagtcggcgaaggagcaagggaatggatcagagagtgtcagcatcaatttcgtcatcatcgctggaattgcaccacacttgacagggaccacaccgttttcggccgtgtgatgctgcgcagctcacgagaagccgcgttcgtgtacgcaatttcctctgccggagtggtacacgcgataacccgcgcctgttcccaaggagaactcagtgtctgctcatgtgatccctacactcgggggcgacatcacgatcagcgtggggactttgactggggaggttgttctgacaacatccactacggagtgcgattcgccaaagcattcgtggacgccaaggagaagcgactgaaagatgcacgcgctcttatgaatctgcataacaacagatgcggaaggacggctgtgcgtcgtttcctgaaactggagtgcaagtgccacggagtctcaggatcttgtactctacggacttgctggagagccctgtcagacttcagacgcacgggggactacttacgtagacgatatgatggcgcagttcaggtgatggccacacaagacggagctaactttaccgctgccaggcaaggctatcgcagagctactcgcaccgacttagtatacttcgataactctcctgactactgcgtgctggataaggcagcaggctcactgggaaccgcagggagggtttgtagtaaaactagcaaaggtaccgatggatgcgaaatcatgtgctgcggaagaggatatgacactactagagtaactcgggtgacgcaatgcgagtgcaagttccactggtgctgcgcagtgagatgcaaggaatgtagaaacaccgtggatgtgcatacttgtaaagcacctaagaaagccgagtggctggatcaaacatag

SEQ ID NO: 14036 - RNA, 1242 nt, synthetic construct
  misc_feature 1..1242: note = source = /note="Description of Artificial Sequence: Synthetic coding sequence"
  source 1..1242: mol_type = other RNA
atggaaaatatgctattgtggctgatcttctttacccctggttggacgctgatcgacggctctgaaatggaatgggatttcatgtggcacctgaggaaagtgcctaggatcgtttcagagcgaacgtttcatctcacctctcctgctttcgaagccgacgctaaaatgatggtcaatacagtctgtgggatagaatgccaaaaggagttacccaccccaagtctctcggagcttgaggactatctttcgtacgagacagtattcgagaatggaacccgaactcttaccagagtcaaagtgcaagacctcgtgctggagccaacccagaacattacaaccaaaggagttagcgtgagacgcaagaggcaagtgtatggaacagactcacgattttctatccttgacaaacgattcctgacgaattttccgttttctactgctgtgaaactttcaaccggctgctccggtattcttatatcaccccagcacgtgttgaccgccgcccactgcgttcacgacggcaaagattatgttaaagggtcaaaaaagctgcgcgtgggactgctgaagatgaggaacaaatctggtggcaaaaagagaaggggcagtaaacggtcccgtcgggaagcaagcggaggcgatcaaagagaaggaaccagagaacatttacgagagcgggcaaagggggggcggaggaggaaaaaatccggacgaggccagagaattgcagaaggacgccctagcttccagtggactcgggtgaagaacacacatattccaaagggatgggcccgtgggggaatgggcgatgcgacccttgattatgattatgcactgttggaactaaaacgggcacataagaaaaagtatatggaactgggcatcagtcccactatcaaaaaaatgcctggtggaatgatacacttcagcggtttcgataacgacagggctgatcagctagtgtataggttttgctccgtttccgatgagtctaacgatctcctgtaccaatattgtgatgccgagtcgggctcaactggcagtggcgtctacctacgcctcaaggatccagacaaaaaaaattggaagagaaaaataatagcagtgtatagcgggcaccagtgggttgatgtacatggagtgcaaaaagactacaacgtcgcggtgaggatcacccccctgaagtatgcccaaatttgtctctggatccatggtaacgacgccaattgtgcttacggctag

SEQ ID NO: 14037 - RNA, 1143 nt, synthetic construct
  misc_feature 1..1143: note = source = /note="Description of Artificial Sequence: Synthetic coding sequence"
  source 1..1143: mol_type = other RNA
atgggcgccaccactatggatcagaaatcactctgggctggaagtgcctacaaactcgtatgctattttactaactggtcacaagatcgacaggaacccggcaagtttacacccgagaacatcgaccctttcttatgctcccacctgatctacagctttgcttccatagaaaacaataaggtgattattaaagacaagtcagaagtaatgctctaccagactattaatagccttaaaactaagaatccaaaactcaaaattctcctgtcaattggaggatacctattcgggagtaagggatttcaccctatggtggactcaagtacaagtcgcctcgagtttattaacagcatcatactttttctgcgcaatcacaatttcgatggtttagacgtgtcctggatctatcctgaccaaaaggagaatacccatttcacagtccttattcatgaattagctgaagcattccagaaggatttcactaagagcacaaaggaacgcctcttattaactgctggagtatccgccgggcggcagatgatcgataacagctaccaggtggagaaattggcaaaagatttagacttcattaacttactgagtttcgatttccacggctcatgggaaaaacctctgattacgggacataattctccccttagcaaaggatggcaagaccgcggaccctcttcatattataatgttgagtacgctgttggctactggatacataagggcatgccatctgagaaggtcgtcatggggatcccaacctatggtcactcattcaccctggcgtctgcagaaactactgtgggggctccagcaagtggaccaggcgctgcgggaccaatcacggagtcgtctgggttcttggcctactacgaaatatgtcagttcctgaagggcgctaaaatcaccagactacaagatcagcaagtgccttatgctgttaaagggaatcagtgggtcggatacgacgatgtgaagagcatggagacaaaagtccaatttctcaagaatctgaatctgggaggagctatgatctggtccatcgacatggacgacttcacaggaaagtcatgcaaccagggcccttatcctctcgttcaagccgtcaagcgcagcctgggttcactgtag

SEQ ID NO: 14038 - RNA, 1173 nt, synthetic construct
  misc_feature 1..1173: note = source = /note="Description of Artificial Sequence: Synthetic coding sequence"
  source 1..1173: mol_type = other RNA
atgggagccaccaccatggaccagaagtcactgtgggccggggttgttgttctcttattgcttcagggaggaagtgcttacaaactggtttgttatttcactaattggtcacaggatagacaggaaccaggaaagttcaccccagaaaacatcgatccatttctgtgtagccatctgatctatagctttgcaagcatcgaaaacaacaaggtaatcatcaaggacaaaagcgaggttatgctgtatcagaccatcaactcattaaaaactaagaatcctaagcttaaaatacttctgagtataggcggctatctgttcggatccaagggcttccaccccatggtcgattcatccaccagcagactagaattcatcaactctattatcctcttcctccgcaatcataatttcgacggacttgatgtgagctggatttatccggaccagaaggagaacacacactttactgttctgatccacgaacttgctgaagctttccagaaggactttacgaagagcactaaagagcgccttctgctaacagccggggtgtcagcgggaaggcagatgatcgacaattcctaccaggtcgaaaaactcgccaaagatctcgactttataaacctactcagtttcgatttccacggctcatgggagaagccgctgattacaggtcacaacagccccctgagtaaaggttggcaagatcggggtccatctagctactataacgtcgagtacgccgttgggtactggattcataagggaatgccctctgagaaggtagtaatgggtatcccaacctacggacattcttttaccctagcatctgctgagactaccgttggagcccctgcctctggccctggcgccgctgggcctatcactgaaagttcaggattccttgcttactatgaaatatgtcagttccttaaaggcgccaagattacacgccttcaagatcaacaggtgccatatgctgtgaaaggtaatcagtgggtgggatacgatgacgtcaagagtatggaaacgaaagtgcagtttctgaagaacctgaatcttggaggggccatgatttggagcatcgatatggacgacttcaccggaaaaagctgtaatcaaggcccttaccccctcgtccaggccgtaaagcgaagcttaggtagtctctag

SEQ ID NO: 14039 - RNA, 2202 nt, synthetic construct
  misc_feature 1..2202: note = source = /note="Description of Artificial Sequence: Synthetic coding sequence"
  source 1..2202: mol_type = other RNA
atggcgggcggaagagaaacgtgtctcccactcatcggctttatcctaatttgtctgaagatggtcgcctccgctaagagcgcacccgaaatccctacgatcgatcaggcttactctaagctctccaactccattactgtagaatgggccaccgtgcctggtgcaacgtcatatttgcttaccgcagaagacggcgatacggtcatcgagacaacagttgcaaattcccccggtaccgtgaccggactgaaggcggccacatggtacgaaatcactatcagatccatctcggccgctgggagatcacaagcgagcccccctaagcaagcgaagaccgtgttggctgcgcccattctggaagttagcagcccctcctctgacagcatcctggtccagtgggaagccgtgtatatggcaatcgccttctcagtgagtattatgcgcgccaatggactcggcagtatttggaaggaaaacaccactaatacctcccttacattcacatccctggaagctggaactctgtatacaattaaagcatacgcctggaacgctaaccggataccaggagatgattcaacctgcaaccaaagaacgtccccccgcgccccagctaacatacaagtctctttcgattccggtgccctcaaggctagtttcagttgggccagagcggaaggggcattcaattataccgtcatggctcttagcgattcatcagagctcacctgttcaacaacattttccagctgcactatctcgtccctgcagtgcggcaccgaatacttaatcagcgtgttggcgagtaacgacgccgggtccagtaagtcaagctcagcaatgacactgaaaacagtcgcgtgtgcacccggaagagtgactatccaagaagacccgccaggacacctcagcgttgcctggagttccgtcgatcttggggattattacgttgtgttcgtcaaatccgacgacggcctggaggtacactgcaacacctccttgacccagtgcaactttcttagcgaatgcggttttacttactttatcagcgtatttgtgtacaacaaagcgggtcagtcccctttaggtgacatttttaactatactacggcgccttgctgtccttccgatataaatccagtccttgtgtcctcagatcgcgtagagattgtgtggtccccggtgagaggggcagaactctatgaaactaaggcagtagacggttacaacatggtcgaatgtaatgacaccacacccgcatgcaccctctcagcactcgagtgtgatactaaatataatataacagtatacagcttcaacgaagttcgaggcagcaatatgtcgtgcacccctcagtttatcaccaccgcaccatgctccccagaaattaaaaacgtgtccagagacgcatttagcatgattaacgtgcattggagatcgacaaacgatgacgcaacctacacggttaccgcacagggtgagaaaggactttaccagtgcagttctaccggggagagctgcaccatgaggggcctcccatgcggtagcgtgtttagcgtgacagcagttgccgaaacccaagctggtaggtccctgccttcatactcggtgccattagagacagtcccatgctgtcctactggactcactgtgacccaaatcacccaatccgttatcaacgtctcatggactatcggccgtgtggcacaaactcacgtagctgtcttagaatcccataccggccaatcaaaatgccacacccaccagaatcactgcttgcttggctgtatcacttgcggaatcaactacactgtcactctgaaagccatctctgctaccggtctcaccgctgattgcagctaccaatcttacttcagcggagcctgctgtccactaggggtcaaactgtacagacttggccccaacggaatacgcatatactggcaagcttcacgagggtctgctaattactcaaccgacctctacggctccaaagggatttttacctgtaccccatctgctggcttgtcgttctgcgatgtgaccgaaatcccatgcggcgacgtgtataccgtcatggtctctcctgttgccaaaacaggcctcaaactgactttttgccctaaaaaaatttactctgtgacatgttctggtagcacactcggaatggtgatttatcggggtaagcggaacgaagaatag

SEQ ID NO: 14040 - RNA, 555 nt, synthetic construct
  misc_feature 1..555: note = source = /note="Description of Artificial Sequence: Synthetic coding sequence"
  source 1..555: mol_type = other RNA
atgagaggccaggggcgtaaagaatccctgagcgattcacgcgatctagatgggtcttacgatcaactgacagattctgtggatgacgaatttgagctctcaacagtgtgccataggccagaaggactcgaacagctgcaggaacagactaagttcaccagaaaggagctgcaggtgctatatcgcgggtttaagaacgaatgcccgagcggcattgtgaatgaggaaaacttcaaacaaatatacagccagtttttccctcaaggcgactcatcaacctacgctacatttttgtttaacgcattcgacaccaaccatgacggctccgtttcctttgaggaaatgctggacatcatgaagtctatttacgatatgatgggcaagtacacctaccctgcactgcgcgaagaggcccctcgagaacacgtcgagagtttttttcaaaaaatggatcgtaataaggacggcgtagtaactattgaagaatttatcgagtcttgtcagaaagatgagaacatcatgagatcaatgcagctctttgataacgtgatctag

SEQ ID NO: 14041 - RNA, 759 nt, synthetic construct
  misc_feature 1..759: note = source = /note="Description of Artificial Sequence: Synthetic coding sequence"
  source 1..759: mol_type = other RNA
atgcgtgggcagggaagaaaggagagtctgagcgattcccgagacctggatggatcttacgaccagctcactggacacccaccaggccccactaagaaggctcttaagcaaagattcctcaaactgctcccgtgttgcggtccacaggctctcccctcggtttcagaaagcaatgtggacgacgaattcgagctaagtactgtgtgccacaggccggaagggctggaacagctgcaggaacagactaagtttaccaggaaagagttacaagtgctgtatcgtggctttaaaaatgaatgtccaagcggcatcgtgaatgaagaaaactttaaacagatttattcccaatttttcccacagggagacagttccacatatgcaacatttttgttcaacgcgttcgatacaaatcacgacggaagcgtcagctttgaagattttgtggctggtctcagcgtaattctccgcggcacagtcgacgaccgtttgaattgggctttcaacctgtatgacttaaacaaggacggttgcattactaaagaagaaatgcttgatattatgaaatcaatttacgacatgatggggaagtatacatacccagcactcagagaagaggctcccagagaacacgtggaatcattttttcagaagatggatcggaataaagatggcgtggtgaccattgaagaatttatcgaatcctgccagaaggacgagaacattatgagaagtatgcagctgtttgacaacgtcatctag

SEQ ID NO: 14042 - RNA, 1377 nt, synthetic construct
  misc_feature 1..1377: note = source = /note="Description of Artificial Sequence: Synthetic coding sequence"
  source 1..1377: mol_type = other RNA
atgcaggctacctccaatttgctgaaccttcttctcctttccctcttcgcgggcctcgacccttctaagacacagatcagtccaaaagaaggctggcaagtgtactcaagcgcccaggacccagatggcaggtgtatatgcactgtcgttgctcccgagcagaatctgtgcagcagggacgccaaatcccgccagcttagacagttactagagaaagtacagaacatgtctcagtccatagaagttttgaatcttagaactcagcgtgacttccagtatgtgttaaaaatggaaactcagatgaagggattaaaggcaaaattcagacaaatagaagatgaccgtaagaccttaatgaccaagcacttccaggaattgaaagaaaagatggatgagctgctgcccctgattcctgtgctagaacagtacaagaccgatgcaaagttaattacacaatttaaagaggagatacggaacttaagcgcagttctgacaggcattcaggaggaaatcggtgcgtacgactacgaggaactacatcagagggttctgtcgctggaaacacggcttcgagactgcatgaaaaaactgacttgcggcaagttgatgaagataactggtccagtcactgtgaagactagcgggacaaggttcggagcctggatgaccgacccactcgcatcagaaaaaaacaatagagtctggtacatggacagctacacaaacaataaaatcgttcgggaatacaaaagtatcgcagattttgtgtccggcgcagagagcaggacgtacaatcttcctttcaaatgggcgggtaccaaccacgtagtttacaacggtagcctctactttaacaagtaccaatcaaacatcatcataaaatacagctttgacatgggcagagtccttgcacagcgctctttagaatatgccgggtttcacaacgtgtatccatacacatggggcggcttctctgacatcgacttaatggcagacgagatagggctgtgggctgtatacgccaccaaccaaaatgccggtaacatcgtaatatcacaactcaaccaagatacactggaagtcatgaaaagctggtccacgggatatcctaagaggtcagccggcgaatctttcatgatatgtggaaccctgtacgtaaccaacagtcacctcaccggagctaaagtttattattcatattctacaaaaacctccacttatgaatatacagacatcccctttcacaatcagtatttccatattagtatgttggattataatgcccgcgatcgagctttatatgcatggaacaacggccaccaggttctgtttaatgtcactttgttccacatcattaagaccgaagacgatacatag

SEQ ID NO: 14043 - RNA, 915 nt, synthetic construct
  misc_feature 1..915: note = source = /note="Description of Artificial Sequence: Synthetic coding sequence"
  source 1..915: mol_type = other RNA
atgctgcctcctcctcgtcctgccgccgcgctggcactacccgtgctactgttgctgttggtagttctcactccccctcctacaggcgctcggccaagtcctggccccgattatttgagacgcggatggatgcgcctgctagccgaaggcgaaggatgcgccccctgccgtccagaagagtgtgccgcaccacgtggatgtctcgcaggccgggttagagatgcgtgcggctgctgttgggaatgcgccaatctcgagggtcagctctgtgacctagatccctctgctcacttttatggccactgcggggagcagctggaatgccgcctggacaccggaggcgacctatcgcgaggagaagtaccagagccgctttgcgcatgtagaagtcagagtcctctgtgtggatctgatggacacacctactcccagatttgtcgactgcaggaagccgctagagcaaggcccgacgcaaacttaacggtcgcacatcccggtccatgcgagtccggtcctcagatagtcagtcatccgtacgacacttggaacgtgaccggccaggatgtgattttcgggtgcgaggtttttgcctatcccatggcgtcgatcgaatggagaaaagacggacttgatatccagctccccggtgatgatccccatataagtgtgcaattcagaggaggaccacaaaggttcgaggtgaccggctggctgcagattcaggctgtgagaccaagcgatgaaggaacctatagatgtctggggaggaacgccctgggccaggtggaggcccccgccagtctgactgttctgacacccgaccagctgaacagcaccgggatcccccagttgcgctccctgaacctggtgccagaagaagaagcagagtccgaagagaatgatgattattactag

SEQ ID NO: 14044 - RNA, 327 nt, synthetic construct
  misc_feature 1..327: note = source = /note="Description of Artificial Sequence: Synthetic coding sequence"
  source 1..327: mol_type = other RNA
atgactccttcaaggctgccctggctgctatcttgggtgtcagcaacagcatggcgcgctgccagatccccactgttgtgccatagcctacgaaagacaagctcttcccagggaggcaagagcgaactggtaaagcagagcctgaagaaaccaaaacttccagagggtaggtttgacgcaccagaggactctcacctcgaaaaggagcccctcgagaaattcccggatgacgtgaaccctgtaacaaaggaaaaaggaggtccccgtggcccagagcccactagatacggcgattgggaaagaaagggccgatgtattgatttttag

SEQ ID NO: 14045 - RNA, 663 nt, synthetic construct
  misc_feature 1..663: note = source = /note="Description of Artificial Sequence: Synthetic coding sequence"
  source 1..663: mol_type = other RNA
atggctgggctttcacgcggttctgcccgcgcattactggccgccctactggcgtcaacattactggctctgttagtgtcgcccgctcgtggacgtgggggccgtgaccacggggattgggacgaggccagcaggcttccacctcttccacccagggaagacgctgctcgtgttgcacgcttcgtaacacacgtctctgactggggagcattggctaccataagcacactggaggctgttagaggcaggccctttgcagacgtattatccctctccgatggccctcctggggcaggctctggcgtcccgtatttctacctgtccccgctccagctttccgtgtccaatttgcaagagaacccttatgccacattaacaatgacattggcgcagaccaatttctgcaaaaaacacggcttcgatcctcagtcccctctgtgcgtccatatcatgctttctggcactgtgaccaaggtgaacgaaaccgagatggatattgcaaagcattctctgttcattcgacatccggagatgaaaacatggccaagctctcacaactggtttttcgcgaaactgaatatcacgaacatttgggttctggattactttggcggccccaagatcgtgactcctgaggaatactataacgtgaccgttcaatag

SEQ ID NO: 14046 - RNA, 2760 nt, synthetic construct
  misc_feature 1..2760: note = source = /note="Description of Artificial Sequence: Synthetic coding sequence"
  source 1..2760: mol_type = other RNA
atgggtctgttccgcggatttgtctttctgctagtcctgtgcctgctccatcagagtaatacctcattcataaaactgaataataacggatttgaggacatcgtgatcgtgatcgacccttccgtccccgaggatgaaaaaataatcgaacaaatcgaagatatggtgaccacagccagcacatacttatttgaagccactgaaaaaagatttttttttaaaaatgtaagcatcctaatcccagagaattggaaggagaacccacagtacaaacgtcccaaacatgagaaccataagcacgcagacgttattgtggctccaccaactctccctggacgggacgagccttataccaaacagtttaccgaatgtggtgaaaagggcgagtacatacatttcacccctgatctattactgggaaagaagcagaacgaatatggaccacctgggaagctgttcgtgcatgaatgggcgcacctgcgatggggagtgttcgatgaatacaacgaggaccaacccttttaccgagctaaatcgaagaaaatcgaagcaacaagatgcagtgctggaatttcgggcagaaatcgcgtttataaatgccaggggggatcctgtcttagccgcgcctgccgcatcgattccaccacgaagctttatggaaaggactgccagtttttccctgacaaagtacagactgaaaaggcttccattatgtttatgcaatctattgactctgtagtagagttctgcaacgagaaaacccataaccaagaggctccctccctgcaaaacatcaagtgtaacttccggagtacatgggaagtaatcagcaattccgaagatttcaaaaataccattcctatggtgaccccacctccccctcctgttttctcactacttaaaattagtcagcgaatagtgtgcctcgtgctcgataaatcagggtcaatgggcgggaaggacaggttaaacaggatgaaccaggcagcgaaacattttctgctgcagaccgtggaaaatggatcttgggtagggatggtacactttgattccaccgcaaccatcgtcaacaaacttatccagattaaaagctcagacgagaggaacaccttaatggccggactcccaacgtatcccctcggcggcacctctatctgcagcggcattaaatatgcattccaggtgattggggagttacactcccagctcgatggaagtgaggtacttctcttaaccgacggcgaggataatacagcaagcagttgcattgatgaagtgaaacaatctggtgccattgtgcactttattgcactgggaagagctgctgatgaggccgtgatcgagatgagcaaaattacaggcggttcccacttttatgtgagtgacgaagcccagaacaacggcctgattgatgcattcggagcactcacctcaggcaatactgacctgtcgcaaaaatctctccagctggaaagtaaaggattaactctcaattccaacgcctggatgaatgacactgtaatcattgattccacagtaggcaaagatactttttttctcatcacatggaactctctccccccctccatttctctttgggatccatcgggaacaattatggaaaacttcactgtggacgccacttccaaaatggcctacctgtccatacccggtaccgctaaggtgggtacatgggcctacaacttacaggctaaagccaaccctgaaacactgactattactgtaactagcagggccgctaacagttccgtaccccccattacagttaacgctaaaatgaacaaagatgttaacagcttcccttcgcctatgatcgtctacgccgagattctccaagggtacgtgcccgtgttgggcgcaaacgttaccgccttcattgaatcacagaatggccatacagaggtcctggagctccttgataacggtgccggagcagattcttttaagaatgacggagtgtactcacggtatttcacagcctacaccgagaacggccggtattcattgaaagttagagcccacggaggagccaacaccgccagactcaaattaaggcctccactgaacagggctgcctacatccccggatgggtggtgaatggggaaatcgaagctaatccaccaagacccgaaattgacgaagatacacaaacaacactagaggatttcagccggaccgccagcggcggagcttttgtcgtatcacaagtgcccagcctgccccttcctgaccagtatcctccctctcaaattacagacttagatgccactgttcacgaggacaagattattctgacgtggaccgctccgggcgacaacttcgacgtcggtaaggtgcagcgctacatcattaggatatctgccagcatactagatctgagagacagtttcgacgatgccctccaagtaaacaccactgatctctctccaaaagaagccaactctaaggaatcctttgctttcaagccagaaaacatttctgaagaaaacgctacccacatttttattgccatcaaatcgatagataagagcaacctaacttccaaagtcagcaacatcgctcaggtgacactcttcattccccaagctaaccctgatgacatcgaccctactccaaccccgaccccgacacccacacccgataaaagccacaatagtggggtaaacatttctaccctcgtattgtctgtgattggatcagtcgttatcgtaaatttcatactctctacaactatctag

SEQ ID NO: 14047 - RNA, 1938 nt, synthetic construct
  misc_feature 1..1938: note = source = /note="Description of Artificial Sequence: Synthetic coding sequence"
  source 1..1938: mol_type = other RNA
atggccccatctgccgaccccggaatgtcacgtatgctgccatttctgctgctcctctggtttctacctatcacggaaggctctcagcgcgccgagccaatgtttactgccgtcacaaattccgtactacctcctgattacgactcaaatcccacacaactgaactacggcgtggctgtcacagatgtcgaccacgatggcgactttgagatcgtggttgctggatataacggtccaaatctggtgctcaaatatgaccgcgcccaaaaaagattggtgaatatagctgtggatgaaaggtccagtccctattatgccttaagggatcgacaggggaatgctatcggagtcaccgcctgcgatatagacggagatggaagagaagaaatttacttcctcaacacgaacaacgcttttagcggtgtggcaacatatactgataaattattcaaatttaggaacaaccgatgggaggatattctaagcgatgaggttaacgtcgcacgaggagtcgcgagcttattcgcaggccggagcgttgcctgcgtagatagaaaagggagcggcagatattctatctatatcgccaattacgcatatggaaacgtaggaccagacgccctgatcgaaatggatccagaagcaagtgacctgtcacgaggcattctcgccctgcgtgatgtggcagcagaagcaggcgtgtcaaagtacacggggggccgtggcgtttccgtgggacctattctgagtagcagcgctagtgacattttttgcgacaacgagaacgggccgaactttttatttcacaataggggtgatggcacattcgttgacgccgccgcttcagctggtgtggatgatccacatcaacacgggagaggagtggcattagctgattttaatcgcgacgggaaagtcgacatcgtgtacggtaactggaacggaccacatcgcctatatctgcagatgtcaactcacggaaaagtccgatttagagacatcgctagcccaaagttttcaatgccatctccagtcaggaccgtgattaccgctgactttgataatgatcaggagcttgagatctttttcaacaatatagcctacagaagtagtagtgccaatcgactgtttagagtgatcagaagggagcacggagacccccttatagaggaactgaatcccggcgacgctctcgaacccgagggaagagggacaggaggtgtcgttaccgatttcgacggggatgggatgctggatttaattttatcacatggagagtcgatggcgcagcccctcagcgtcttccgcggcaatcagggatttaacaacaattggttgcgggtcgtgcctagaaccagattcggggcatttgctcggggtgcgaaggtcgtgctgtacactaaaaagtccggagcacacctaagaattatcgatggggggtcggggtacctgtgcgagatggagcctgtcgcccactttggcctgggaaaagacgaagcatcaagtgttgaagtgacttggcccgacggcaagatggtcagcagaaatgtcgcgtccggtgaaatgaactctgttctggagatcttatacccccgagatgaggacactttgcaggaccctgcacccttagagtgtggacaaggttttagtcagcaggagaatggtcactgcatggatacaaacgaatgtattcagtttcccttcgtgtgtcctagggacaagcccgtatgtgtgaatacctatggcagctaccggtgcagaaccaacaaaaagtgctctcgaggttacgaacccaatgaggacgggaccgcctgtgtagcccaggtcgcatttctcggcggatattcttctgcagcctcccggatttcagagccactgtcccgcgcctcatatctatctcttggtcttgggctctgtctgcagctctacgcactgtag

SEQ ID NO: 14048 - RNA, 1986 nt, synthetic construct
  misc_feature 1..1986: note = source = /note="Description of Artificial Sequence: Synthetic coding sequence"
  source 1..1986: mol_type = other RNA
atggctccctccgccgaccctgggatgtcaagaatgctgccattcctgctgttgctctggttcttacccattaccgagggttcccaaagggccgaacctatgtttacagcggttaccaatagtgtgcttcctcctgactacgactctaaccctacccagctaaattacggagttgccgttaccgacgtagaccacgacggagattttgaaatcgtggtggctggatacaatggacccaatctcgttctgaaatatgaccgcgcccagaagaggttagttaatatcgcggttgatgaaagatcttccccttactacgcactccgggaccgtcaggggaatgccattggagtgaccgcatgcgatatcgatggagacggaagggaggagatctattttctcaatactaataatgcattttcaggcgtcgcaacttataccgacaaactattcaagttccgaaacaatagatgggaagacattctgtctgacgaggtgaacgtggcacgaggggttgctagcctctttgctggaagatccgtggcttgcgtggacagaaaggggagcggtaggtattctatttacattgcaaattacgcgtacggaaacgtaggacccgatgcactcatcgaaatggacccagaagcctcagacctatcacgcggtattctggcgttaagagacgtggctgccgaagccggtgtgagcaagtatacgggaggccggggcgtttctgtggggcccattctcagctcctccgcctccgatattttctgcgataacgagaacgggccaaatttcctatttcacaacagaggggacggaacattcgtcgatgcagccgccagcgctggggttgacgatcctcatcagcacggaaggggtgtcgcgctcgccgacttcaacagagacggtaaggtagacattgtctatgggaactggaatggtccgcatagattgtatttacaaatgtccacccatgggaaagtccgcttccgggacatcgccagccctaaattcagcatgccctcccctgttcgaactgtaataacggccgatttcgataatgatcaagaactcgagattttctttaacaatatcgcatatcgatcttcttctgctaatcgactttttcgcgtgattcggcgcgaacatggcgaccctctgatcgaagagctgaatccaggcgacgcactggaacccgagggcagaggaactggaggcgtggtcaccgattttgatggcgatggcatgctggaccttatattgtctcatggcgagagcatggctcagccattatccgtttttagaggcaaccagggttttaacaacaactggttacgagtcgttcctagaacgagattcggggctttcgccagaggtgccaaggtcgttctgtacaccaaaaagagcggggcccatctgagaatcattgacggcggcagcggctacttatgcgagatggaacccgtggctcacttcggcttagggaaggatgaggcttccagcgtcgaggtgacctggccagacggaaagatggtcagccggaacgtggcatccggggaaatgaacagcgtactcgaaatcctgtatccaagggatgaggacacgctccaagaccccgctccccttgaatgtggacagggcttttctcagcaagagaacggacactgtatggatactaatgaatgcattcaattcccttttgtttgcccgagagacaagcctgtgtgtgtgaatacttatggatcttataggtgtaggactaacaaaaagtgctccagagggtatgagccaaacgaagacggtaccgcgtgtgtaggaaccctcggacagtcaccaggtccccggcccactacccccactgctgccgccgccactgccgccgctgctgccgccgccggagccgcgactgctgcccctgtgttggtggacggagacttaaatcttggaagtgtggttaaagaaagctgcgagccaagttgctag

SEQ ID NO: 14049 - RNA, 1230 nt, synthetic construct
  misc_feature 1..1230: note = source = /note="Description of Artificial Sequence: Synthetic coding sequence"
  source 1..1230: mol_type = other RNA
atggcactgacccccggctggggatcctctgcgggtcccgtccggcctgaactttggttgctgttgtgggccgccgcttggagattaggtgcatctgcttgccccgccctgtgtacttgtaccggcaccactgtagactgccacggcactggccttcaggcgatccctaaaaacatcccgcgcaatacggaaagattggaactcaacggtaataacatcacaaggatccataagaatgacttcgctggactcaagcagctcagggttctgcagttaatggaaaaccaaatcggggccgtggaacggggcgcattcgacgacatgaaggaacttgaacgattaagattaaaccgcaaccagctgcatatgctaccagaactgctctttcagaacaaccaagcccttagccggttagatctgtccgagaacgcaatccaggctataccgcgaaaggctttcaggggcgccaccgaccttaaaaatctgcagctggacaagaatcagatttcctgtattgaggaaggcgcatttagagcactcagggggctggaggtgctaactctcaacaacaacaatatcacaactattcctgtgtctagttttaatcacatgcctaagctcaggacttttagacttcacagcaatcatctattctgcgactgtcacctggcttggctctcccagtggcttcggcagaggcccactattggtcttttcacacagtgctcaggccccgccagtcttagaggcttaaatgttgccgaggtgcagaagtcagaattcagttgttccggtcagggcgaagcaggacgggtgcccacctgtaccctaagctccggatcctgtcccgccatgtgtacatgttccaacggtattgtggattgtcgaggaaagggactgacagctattcccgccaaccttcccgagaccatgacagagataagattggagttaaatggaatcaaaagcattcctccaggtgcattctcaccctaccggaaactgcggagaatcgacctgagcaataaccagatcgctgaaatcgctcccgacgcattccagggacttaggagcttaaattctctgcacactggccctgtgacatgtccacatacaaccggcacacattcttctcactgtagagcatttgccgtcgcagtaccacacagtaggaacgacctcgaggctatgtttgaagaggaggtcccacgcatcttttattcagcttag

SEQ ID NO: 14050 - RNA, 1143 nt, synthetic construct
  misc_feature 1..1143: note = source = /note="Description of Artificial Sequence: Synthetic coding sequence"
  source 1..1143: mol_type = other RNA
atggcattaacacctggatgggggtcaagtgcaggccctgttcgccctgagctgtggttattgctgtgggccgctgcttggcgcctgggtgcatcagcatgtcccgcactttgcacgtgtaccggcaccacggtagattgccacggtaccggtctgcaggccatccctaaaaacatccccaggaacaccgaacggctggagctcaacggaaataacattacacggatacataaaaacgactttgccggattaaaacaactaagggtgcttcagcttatggagaatcaaatcggggctgtggagagaggcgcgttcgacgatatgaaagagctcgagcgcctggacctaagtgagaatgccattcaagccatcccccggaaagcatttagaggcgcaaccgacctgaagaatttacagttagacaaaaatcaaatctcatgcatcgaggagggcgcatttcgagccctgcggggacttgaggtgctgaccctgaataataataatatcactacaatccccgttagttccttcaaccacatgccgaaactgaggacatttcgcctgcactccaatcacctattctgcgactgtcacttggcttggctatcacagtggctcagacagcgccccactataggattgtttacacaatgttctggccctgccagcctgagaggcctaaatgtggcggaggtgcagaaatccgaattctcttgctcaggacagggggaagctggccgggtgccgacctgtaccctctcttcaggaagctgtcccgctatgtgcacatgttctaatggtattgttgattgccgtggtaaaggactaaccgccatccccgctaacctcccggagacaatgaccgaaattaggcttgagctcaacgggatcaaatccatccccccaggcgctttcagcccctaccgaaaattgaggcgtattgatctgagtaacaaccaaatcgccgaaattgcccccgatgccttccaaggacttcgatctctgaattctcttgtgttgtacggtaataaaattaccgatctgccaagaggggtttttggcggcctctacaccttgcagctccttctcctgaatgccaacaaaatcaactgcatacgaccagatgcctttcaagacctctag

SEQ ID NO: 14051 - RNA, 2448 nt, synthetic construct
  misc_feature 1..2448: note = source = /note="Description of Artificial Sequence: Synthetic coding sequence"
  source 1..2448: mol_type = other RNA
atggccctgacacctggctggggaagctcagcagggcccgtgaggccagaactgtggctattgctttgggccgctgcgtggcgattgggcgcaagcgcatgccccgcactttgtacttgcacagggactactgttgattgtcacgggaccggactccaagcaatccccaaaaatatcccacgtaataccgaaaggcttgagctcaatggaaacaatatcactcgcatacacaaaaacgacttcgccggcctgaaacaattaagggtcctgcagttgatggagaaccaaattggcgctgtagaacgtggtgccttcgacgatatgaaagaacttgaacgactgcgactcaaccgaaatcagctccacatgttacccgaactgctgttccagaataaccaggcactcagccgtctagacctatctgagaacgctatccaggccataccacgcaaagcattccggggggcgacagacctgaaaaatctccaattggacaagaatcagattagctgtatcgaggagggcgctttcagggccctcaggggcttggaggttttaaccctaaataataacaacatcactacaatccctgtgagctcattcaaccacatgccgaagctgcgcacttttagattacactccaaccacctgttctgcgactgtcacctcgcctggctttcacaatggttacgacagcggcctacaatcggtctatttactcagtgtagtggccctgcttcactaaggggcctgaatgtcgccgaggtacagaagtctgaattctcctgttctggacagggcgaagcgggccgtgttccaacttgcactctatcatccggaagctgccccgccatgtgcacatgcagcaatggaatagtcgactgcagggggaagggtctgactgcaattcctgccaatttgccagaaactatgaccgaaattcgccttgagctgaatgggattaaatcgatccctcctggtgcattttctccttaccgcaaactccgaagaatctgccccctttcgttttgcagcccttgtcgtgacttgtcgaataaccaaatagctgagattgctcccgatgcctttcaaggcctgcgcagcctcaattccctcgtgctctacggaaacaaaataaccgatctcccgcgcggagtgttcgggggcctgtacacgcttcagttgctgttgttgaatgcaaacaagataaattgcatacgccccgacgctttccaggatttgcaaaacctctctctcttatctctgtacgataataagattcagtccctggcaaagggaaccttcacttctctaagagccattcagaccctccatcttgcccagaacccatttatctgcgactgtaacctgaagtggttggctgactttctcaggacaaatcctatcgagacttccggagctagatgtgcatccccacgacgcctcgccaataaaagaatagggcagattaagtccaaaaagtttcgctgttctgcaaaagaacaatatttcatcccgggcaccgaggattaccaactgaattctgaatgtaactctgacgtcgtgtgcccccataaatgccgttgtgaagccaatgtggtagaatgcagcagcctcaaactgacaaaaatacccgagagaatcccccagagtactgctgaattgagactaaataacaacgagatttcaattctcgaagctaccggcatgtttaaaaaactaacgcatctgaagaagatcaacctatcaaataacaaagtcagtgaaatcgaggacggagccttcgaaggggccgccagcgtgagcgaactacacctgactgcaaatcagctagagagtataagaagcggcatgttccgcggactcgacggccttcgtacgctcatgctgcggaataacaggatatcatgtatccataatgattcatttacggggctcaggaatgtgcgcctgctgagcctttacgacaatcagattactaccgtgtctcccggagcttttgatacactgcaatccctttcaacattgaatctgcttgcgaatccctttaattgtaactgccaacttgcttggttaggaggctggttgagaaagcgcaaaatcgttacgggaaatccaaggtgccagaaccctgactttctgcgacagattccgttacaggacgtggcattccccgatttcaggtgcgaagaaggtcaagaggaggggggttgcttaccgcggccacagtgtccacaggagtgtgcatgcctagacaccgttgttcgttgctctaataaacacctgagggccttgcctaaggggatccctaaaaacgttaccgagctctatttagatggcaatcagtttacattggtccccggacagttgtctacttttaaatatctccaactggttattctcagttacaacgctttgcaatgtatcccacctctagctttccagtag

SEQ ID NO: 14052 - RNA, 4386 nt, synthetic construct
  misc_feature 1..4386: note = source = /note="Description of Artificial Sequence: Synthetic coding sequence"
  source 1..4386: mol_type = other RNA
atggccttgacacctgggtggggaagtagtgccggccccgtgcgacctgaattgtggctactactgtgggctgctgcctggagattgggcgcatctgcatgtccagccctctgcacatgcaccgggacaaccgttgactgccacgggacgggcttgcaggccatcccaaagaatattccaagaaacacagaaaggctcgagctgaacggcaacaatattactcggatccataagaatgatttcgccggacttaagcaactgagagtgctccagctcatggaaaaccaaattggagcggtggaaaggggcgcttttgacgatatgaaggaattagagagactcagactgaacagaaatcaactgcatatgctcccagagctgttgtttcaaaacaatcaggccttgtctcgattagacttatctgagaacgctatccaggccattccacgcaaggcgtttcgtggtgccaccgaccttaagaacctgcagttagacaagaaccaaatatcgtgcattgaggagggcgctttccgcgcgttgagggggctagaggtgttaaccctcaataacaacaatattacaactattcccgtttcctcctttaatcacatgccaaagctgcgtaccttcagactacattccaaccacctgttttgtgactgccatcttgcatggctgtcccagtggcttagacaacggcctacaatcggcttattcacacagtgttccggcccggcatctcttcggggtcttaacgtcgcagaagtacagaaaagcgaattttcctgcagcgggcagggcgaggctggcagagttcctacctgcacactcagctctgggtcttgtcccgctatgtgcacgtgtagcaacgggatcgttgattgcagaggaaagggcttaacagcaatcccagctaatcttccagaaactatgaccgagatccgtcttgaactgaacgggattaagtccatccccccaggcgccttcagcccataccgcaaacttagaagaattgatctgtccaacaaccagattgccgagatcgcccctgatgcctttcaaggtctgcgctctttgaacagcctcgtcttgtacggcaacaaaataacagatcttccacgcggcgtattcggcggcttgtataccctacaactgttactgctgaacgctaataaaatcaactgtatccgcccggatgcttttcaggacctgcaaaacctctccctactcagcttgtacgacaataaaatccagagccttgctaaagggaccttcactagtctcagagctattcaaacactgcatctggcccaaaacccattcatctgtgactgtaacttgaagtggctcgccgactttctgagaaccaacccaatagaaacatcaggcgcacgctgtgcatcccccaggagacttgccaacaaaaggattggccagattaagtctaaaaaatttcgttgctctgcaaaagagcaatactttataccaggtacagaggactatcagttaaatagcgagtgcaactcagacgtggtgtgcccccataagtgtagatgtgaggccaacgttgtagaatgctcctctctaaagctcacaaagataccggagcggatacctcaaagtactgctgagctgcggctgaataataacgagataagtatacttgaagccaccgggatgtttaaaaagctgacccacctgaagaaaataaatttatccaataacaaagtctccgaaatagaagatggcgcttttgaaggcgcagcctccgtaagtgaactgcatctcaccgccaatcagctagaaagcataagatcaggtatgtttagaggcctggatggactacgaaccctcatgttaaggaacaatagaatatcttgtattcataacgattcgtttacgggccttagaaatgtcaggctcctctccctgtacgacaatcagatcaccaccgtgtcacctggcgcttttgacaccttgcagtcccttagtaccttgaacctgctcgcaaacccatttaattgcaattgtcagctcgcatggctgggaggatggcttcgcaaacgcaagatagtgaccgggaatccacgctgccagaatcctgattttttgcgccaaattccacttcaagacgttgcctttcctgacttccgatgcgaggagggacaggaggaaggggggtgcctacctcgccctcaatgccctcaggaatgcgcctgcctggacacagtcgtcagatgttccaacaaacacctaagagcacttcccaaaggcataccaaaaaatgtcactgaactatacctggacggaaatcagttcaccctcgttcccggtcagttgtctacattcaaatacttgcaactcgtcgacctgtccaataataaaatttctagtctgagcaattcttcctttacaaatatgagccagctgacaacccttatccttagttacaacgcactgcagtgtatcccaccattagcgttccagggcctgaggtctctccgcctgctctccctgcacgggaacgatatctccaccttgcaagaaggaatttttgctgatgttacaagcctatcccatttggccattggcgccaaccctttatattgtgactgtcatcttaggtggctgtcctcctgggttaagaccggctataaagagccaggcatcgccaggtgtgcgggtcctcaagacatggaagggaaactcctgctcacaactcctgcaaaaaaattcgagtgccaaggcccacctacactggccgttcaagcaaaatgtgacctatgtttatcgtccccctgtcagaaccaaggcacttgccacaacgaccccttagaggtataccggtgcgcttgccctagcggctataaagggagagactgtgaggtttcgctcgacagttgtagctctggcccttgcgagaatggaggaacatgccacgcacaagaaggggaggatgccccgtttacgtgtagctgtcctacagggtttgaaggcccgacatgcggtgtgaacaccgatgactgcgtggatcatgcatgtgcaaacggcggcgtctgcgtggatggggtgggaaattacacatgtcagtgtcccttgcaatatgaaggcaaagcatgcgaacaactggtagatctgtgttctcccgatctaaacccttgccagcatgaggctcagtgtgtgggaacccctgatggaccaagatgcgaatgtatgccaggatacgcaggagacaattgcagcgagaaccaggacgactgcagggaccaccgttgccagaatggagctcagtgcatggatgaagtaaattcgtactcctgtctctgcgcagagggatatagcggccagttatgcgagatcccaccacacctccccgcaccaaaaagcccatgcgagggcaccgaatgtcaaaacggcgctaattgcgttgatcagggtaaccgcccagtctgtcaatgcctgcccgggtttggaggaccagaatgcgagaaactcctctctgttaatttcgttgatcgagacacctatctacagtttaccgaccttcaaaattggccccgcgctaacattactcttcaggtgtctaccgccgaagacaatggcatattactatacaatggagataatgatcacattgccgtcgaactataccaaggacacgttagagttagctatgatcccggttcctatccctccagtgcaatatattcagccgagactattaatgacggtcagtttcacacagttgagctggtggcctttgatcaaatggtgaatttgagtatagacggcggcagtccgatgaccatggacaacttcggcaaacattatacactgaactctgaagcacccctgtacgttggaggaatgcctgtagatgttaacagcgcagcctttcgtttgtggcaaatactgaacggtacaggatttcacgggtgtatcagaaacttatatataaacaacgagctgcaggatttcaccaaaacgcagatgaaaccaggagtcgtgccgggatgtgaaccgtgcagaaagctgtactgcctgcatggcatctgtcaaccaaacgccacaccgggccccatgtgccactgcgaagccgggtgggtgggactacattgcgatcaacctgctgatggcccttgccacggtcacaaatgcgtacacggccagtgcgtccctctggacgctttgagttatagctgtcaatgtcaagacgggtattctggtgcactgtgcaatcagtccccatctgcaggcggcactctgagcggtactttcacaagatcaaggggagctatgccaagcgcacgtcctagggcaccctgtcatggatggtccgccggcgcccgagcgcaggctcgtgccgccgctagagctttcgggtag

SEQ ID NO: 14053 - RNA, 570 nt, synthetic construct
  misc_feature 1..570: note = source = /note="Description of Artificial Sequence: Synthetic coding sequence"
  source 1..570: mol_type = other RNA
atggaggctactggaaccgatgaggtcgataaattgaaaacaaaatttatttcagcgtggaacaacatgaagtattcatgggtgctcaagactaaaacttacttttccagaaactcaccggtgttactgttaggaaaatgttaccactttaagtacgaagacgaggataagacactgcctgccgagagtggctgcactatcgaggatcatgtaattgcgggaaacgtggaagagttcaggaaggatttcatcagtcgcatctggctcacctatcgggaggaattcccacagattgagggtagcgcacttaccaccgactgtgggtggggctgcaccttacgaacagggcagatgttgttggcccaagggcttattcttcatttcttaggacgagcctggacatggccggacgccctgaatatcgagaattccgactcagaaagctggacttcacacaccgtcaaaaaatttactgcgtcctttgaagcaagtctctccggggaacgagagtttaaaacacctaccatctcactgaaggaaaccatcggcaaatatagtgatgaccactag

SEQ ID NO: 14054 - RNA, 1377 nt, synthetic construct
  misc_feature 1..1377: note = source = /note="Description of Artificial Sequence: Synthetic coding sequence"
  source 1..1377: mol_type = other RNA
atggaggcaaccgggaccgacgaggttgataagctgaaaaccaaatttatatccgcctggaacaacatgaaatacagctgggtgctcaagaccaagacatacttctccagaaattctcccgtgcttcttttggggaagtgctatcactttaaatatgaggacgaagacaaaacgctacccgccgaaagtggatgcactattgaggatcatgtgattgccggtaatgttgaagaatttagaaaggactttatatcacggatctggctgacatatagagaggaatttccccagatcgaaggttctgctcttacaactgactgcggatggggctgcacactgcgtaccggccagatgctgcttgcacaagggctaatcttgcatttcctgggcagagcatggacttggcctgatgcactcaacattgaaaatagtgattctgaatcctggacgtcacacacggtcaaaaaatttactgctagtttcgaagcctcccttagcggagaaagggagttcaaaacaccgacgatcagcctgaaagagaccataggaaagtactccgacgaccatgagatgagaaacgaagtctatcatcggaagatcatttcttggtttggtgatagcccattagccttgttcggcctgcaccagctgattgagtatgggaaaaaaagcggcaagaaagccggtgactggtacggccccgcagtggtggcacacattcttcgtaaggcggttgaagaagccagacatcctgacctccaaggcatcaccatttacgtcgcccaggattgtaccgtgtataactcagatgtgattgataagcaatccgcatccatgacatcagacaacgcagacgataaggccgttattattttagtgcccgttagacttgggggcgaacgaaccaataccgattacttggaattcgtgaaaggcattctcagtctggaatactgcgtgggcatcatcggcggaaagccaaagcaatcttattactttgcagggtttcaggatgacagccttatttacatggacccccactattgtcaatctttcgtggatgtctcgataaaagattttcctttggaaactttccactgcccctctcctaaaaaaatgtcattccgcaagatggatccttcctgcacaattggattttattgtagaaatgtccaagatttcaaacgtgcctcagaggaaatcaccaaaatgttgaagttcagttctaaagagaagtatccactattcaccttcgtcaatgggcatagccgagattatgattttactagtacgaccacaaacgaagaagacttattttccgaagatgaaaaaaaacagttgaaaaggttttccacagaagaatttgttctgctctag

SEQ ID NO: 14055 - RNA, 8178 nt, synthetic construct
  misc_feature 1..8178: note = source = /note="Description of Artificial Sequence: Synthetic coding sequence"
  source 1..8178: mol_type = other RNA
atggagcagacagattgcaaaccatatcaacccctccctaaagtcaagcacgaaatggacttagcttacacaagttcctccgacgagagtgaggacggaaggaaacctcgccagtcctataatagccgggaaacactccacgaatacaaccaagaacttcggatgaactataattcccagtctcgaaaaaggaaggaggtcgagaaatccacccaagagatggaattctgcgaaactagccacaccttatgctcaggctatcaaacagacatgcattccgttagcagacacggatatcaactcgagatggggagcgatgtagatactgagaccgagggcgcagcgtcccctgatcacgctcttaggatgtggattcgcggcatgaaatctgagcattcctcctgtctttccagtcgtgctaacagcgccctctcccttacagacaccgaccatgagcggaagagtgatggagaaaatggattcaagttcagtccagtatgctgtgacatggaagcacaagcgggtagcactcaagatgttcagtcctcgccccataaccagttcacattcagaccacttccccccccaccaccacctcctcacgcatgtacatgtgcccgcaaaccccctcccgcagccgatagcttgcagcgccgctccatgacgacacgaagccaaccaagccccgcagcccctgcacccccaacatccacccaagactccgtacacttacataacagttgggttttgaacagtaatatccccctcgaaaccaggcattttcttttcaaacatggcagtggaagttccgctatcttctctgcagcctcccagaactacccactcacaagtaacaccgtttattcccctccaccccgaccattgcccaggagcactttttcccgtcctgcatttacattcaacaaaccatatcggtgctgtaattggaagtgcaccgccttgagcgctacagcaatcacagtcaccctggccttgttattagcatacgtgattgccgtgcatctgttcggcttgacatggcagctacagcccgtagaaggagaactgtatgccaatggcgtttccaaaggaaacaggggtacagaatcaatggacacgacctactcaccgatcgggggtaaagtgagtgataaatcagaaaaaaaagtattccaaaagggccgcgccatagacactggagaagtcgatattggtgcccaagtgatgcagactattccaccgggtctcttctggaggttccagatcaccattcatcatccaatatatcttaagttcaatatatctctggccaaagacagtctgctcgggatttacggcagaagaaacattccccctacccacactcaattcgatttcgttaagcttatggatggaaaacagctcgtgaaacaggatagcaaaggttcggacgacacacagcacagcccccgtaatcttatcctcacctccctccaggagacaggctttattgaatatatggatcaaggaccctggtacctggctttttacaacgacggaaagaaaatggagcaagtgtttgtgctaaccacagcaatcgagatcatggacgattgttccaccaactgcaatggaaatggagaatgcatcagcggacattgtcactgcttccccggcttcctcggaccagactgtgctcgggatagttgcccagttttatgtggaggaaatggtgagtacgagaagggacactgcgtttgcaggcacggctggaaaggaccagagtgcgacgtgccagaggagcaatgtattgaccctacatgttttggacatggcacctgtatcatgggagtctgtatctgtgtgccgggctataaaggagaaatttgtgaggaggaggattgcttggacccgatgtgctctaatcacgggatttgcgtgaagggagaatgtcactgtagtacaggttggggcggagtcaattgtgagacacccctgcccgtgtgccaggagcagtgctcagggcatggaaccttcctcttagatgctggggtctgttcttgtgatcccaaatggacagggagcgactgcagtaccgaactgtgtacaatggaatgtgggtcgcacggtgtatgttcaagaggtatctgccagtgcgaggaagggtgggtggggcccacctgcgaggagcgctcctgtcatagtcattgcacagaacacgggcagtgtaaagacggtaaatgtgaatgttcaccaggatgggagggagatcactgtacaattgcacactatttagacgctgtgcgcgacggctgtcctggactatgtttcggtaatggccgctgtactttagatcaaaatggttggcactgtgtgtgtcaggtaggatggtccggtactggatgcaacgtagtaatggagatgctgtgcggggacaacctcgacaacgacggagacggcttaacggactgtgtggaccccgattgctgccaacagagtaattgttatatatcacccctctgtcagggaagcccggaccctctcgatttaatccagcaaagtcagaccttgttcagccagcacaccagccggttgttctatgatagaatcaagttcctaataggcaaagattccacccacgttatcccaccggaagtttctttcgatagcaggagggcttgcgtaattagaggacaagtcgtggctatagatgggacccccctcgtcggtgtgaacgtatccttcctccaccacagtgactacggctttaccatctctcgacaggacggtagttttgacctagtggccattggcggaatttctgtgatcctcatcttcgatcggtccccattcttaccagagaagagaaccttgtggctgccctggaatcagtttatcgtggttgaaaaagtgaccatgcagcgggttgtgtcagatcccccttcctgcgatattagcaactttatctcgcccaatcctattgttctgccctctccactcaccagcttcggtggctcctgccctgagcgcgggacaatcgtaccagaactccaggtggtccaagaagagataccgatcccttcctcatttgttcgacttagctatttatctagtagaactcctgggtacaagaccttgttgagaatccttcttactcattctaccattcctgtgggtatgattaaggtgcacctcaccgtggctgtggagggacgcctgacccaaaagtggtttccggccgccatcaatttagtgtatacgtttgcttggaataaaactgatatctacgggcaaaaagtctgggggctcgctgaagcactagtgtcagtaggttacgaatacgaaacttgccctgatttcatactgtgggagcagaggactgtggtgctgcaaggttttgaaatggatgcttccaacctgggggggtggagtctgaataagcaccatatactgaacccccaatctggcataattcataaaggcaacggcgagaacatgtttattagccagcaacctccagttatttcaaccatcatgggtaacggacaccagcgtagcgtcgcctgcaccaactgtaacggaccagcccacaacaacaaattattcgctccggtcgccttggctagcggacctgacggcagcgtctacgtcggcgacttcaatttcgttcggcggatctttccatctggtaactccgtgtctatcctcgagctgtctacatcccctgcacacaagtactaccttgccatggacccggtgtccgaaagtctatacctgtcggatacgaatacccgaaaagtatacaaactaaaatcattggttgaaacaaaagacctctctaaaaattttgaagtggtggctgggactggggaccagtgtctaccttttgaccagagccactgcggcgacggtggtcgtgcctcagaagccagtttgaactctcctcgtggtatcactgtggatcgccatggcttcatatattttgtagacgggactatgataagaaagattgatgagaatgcagttatcaccactgttattggctccaatggtttaacctcgactcagcctttgtcctgtgatagcggaatggatattacgcaggtgagattagaatggccaacagacctcgccgtaaacccaatggacaatagtctatatgttctggacaacaacattgtgctgcagatatctgaaaaccgcagagtgcgcattatcgctggaaggccaatccactgccaggtcccaggtatagatcacttcctcgtgtccaaagtcgcaatacattccacactcgagtctgctagagccattagtgtgtcccactcaggactcctctttattgctgaaacggatgagagaaaagtgaatcggattcaacaagttactactaatggtgaaatttatatcattgctggggcccctactgattgtgactgtaagatcgaccccaactgcgattgcttttctggagacgggggctacgcaaaagatgctaagatgaaagctcccagtagtttggccgtttcgcctgatggcacactgtatgtggcagacttaggaaacgtcaggatccggacaattagcagaaatcaagcccatctgaacgatatgaacatttatgaaatcgcatctcccgccgatcaggaattgtatcagttcaccgtgaatggcactcatctgcacaccttgaatctcattacaagagactacgtatataattttacttataatagcgagggcgatttaggagcaatcacatcatcaaatggcaatagtgtgcacattcgcagggatgctggaggtatgcccctatggctggtggtaccaggcggacaggtgtactggttgacaatttcatccaacggggttctaaaacgggtttcagctcagggatataacctcgccctcatgacctaccctggaaacacaggactgctagctacgaaatccaacgagaacggatggactactgtatatgaatatgaccccgaagggcacctgacaaacgcaacttttcccacgggtgaggtctcttccttccactctgacctggaaaaacttacgaaggtcgaacttgatacctccaatcgcgaaaatgtactcatgagcacgaaccttaccgccactagcacaatatacattctgaagcaagaaaatacccagagtacctatagggttaatcccgacggcagccttagagttacattcgcctctggcatggaaattggactaagcagtgaacctcacatactggccggcgccgtgaatccaacgttgggaaaatgtaacatcagcctgccaggcgaacataatgcgaacctcatcgagtggcgtcaacgcaaagaacaaaataaagggaacgtttctgcctttgagcgtcggttgagagcacataataggaacctgttgtctattgatttcgatcacataacccgcaccggtaaaatctacgatgatcaccgcaaatttacactgagaatcttatatgaccaaacaggtagacccatactgtggagccccgtctctagatataacgaagtcaacattacctacagcccttccggcctcgtcacctttattcagaggggtacctggaatgaaaagatggaatatgatcaaagcggaaaaatcatctctcggacatgggcagacggaaaaatttggagttacacatacctggagaaatctgtgatgcttctgctgcattcacagagaaggtacatatttgaatacgatcagccagattgcctcctgagcgtgaccatgccctccatggtgcgccacagtttacagacaatgctgagtgtcggctactatcgcaatatctatactccaccagattccagcacgagcttcatccaggactattcgagagatggaagactcctccagaccctgcatctgggtactggtcgccgcgtgctatacaaatatactaaacaggccagattgtcggaggtgctgtacgataccacccaagtaaccctaacttatgaagaatcatccggcgtcataaagacgatccacctcatgcacgatggctttatttgcacaattagatacaggcagaccggccccctgatcgggcgccaaatttttagattctcagaagagggccttgtcaacgctagattcgactactcctataacaatttccgagtaactagtatgcaggcagtgattaatgagacacctctcccaattgatttataccgatatgtggatgtgtccggccgcaccgagcagtttgggaaattcagcgttatcaactatgacctaaaccaggttatcacaaccacagtgatgaaacatacaaagatattctcagcaaacggacaggtaattgaagtccaatacgaaattttgaaagcgattgcctactggatgactatccaatatgacaacgttggccgaatggtcatctgtgacatcagagttggtgttgatgcaaacataactcgctatttttatgaatatgacgctgacggacagcttcagacagtgagcgtgaatgacaagacacaatggagatatagctacgacctaaacggcaacattaacctcctctcacatggaaagtccgcccgacttacgccccttcgctacgatctccgagatcgcatcacgaggctgggcgaaattcaatacaaaatggacgaagatggattcctcagacaacgcggaaatgacatattcgagtacaattctaacgggctccttcagaaggcgtataataaggcatccggctggaccgttcaatactactatgacggattgggtcgtcgggtcgcgagcaaaagctcactaggacaacatctgcaattcttttatgctgatcttaccaaccctatacgcgtgacccacctctacaaccacactagttccgagattacatcattatactacgatctgcaaggtcatttgatcgctatggagttgagcagcggcgaagagtattacgttgcatgcgacaacactggaacgcccctggctgtcttttcttctcgaggacaggtgattaaagagatcctgtacacgccatacggggacatatatcacgacacttatcctgacttccaggtgataatcgggttccacggaggactttacgacttcctaacaaagctggtgcacttgggccaacgcgattacgacgtagtagcagggagatggacaacccctaaccaccatatctggaagcaactgaatcttttaccaaaaccttttaatctctatagcttcgaaaataactaccccgtcggtaagattcaagatgtggcaaagtacacgacagacattcgcagctggctcgagctttttggatttcaactccacaatgttctgcccgggtttcccaagccagagttagagaatctcgagctaacttacgaactgctgcggttgcaaactaaaacccaggaatgggatcctggcaaaacgatacttggcattcagtgcgaactccagaaacagctacgcaattttatatccctagaccagctacccatgaccccacgttacaacgacggacgctgtctggagggcggaaagcagccacgcttcgccgcagtgccttcggttttcgggaagggaattaaattcgccataaaagacggtattgtgactgctgatatcataggtgtggccaacgaagacagtcgccgactggccgcgatactcaacaatgctcactatctggaaaacctgcactttacgattgaggggagagatacacactattttattaaacttgggagcctggaggaggacctcgtgctaataggcaataccggtggcagaaggatcttggagaatggggtgaacgtgactgtgagccagatgactagcgtcttgaacggcaggacccggagatttgcggacatacagctgcagcacggagcgctgtgctttaatatacgttacggaactacagtggaggaagagaagaatcacgttttggagatcgccagacagagagctgtggctcaagcttggactaaggaacagagacgactgcaagagggggaggaaggcattagggcttggaccgaaggggaaaagcaacagttgctgagcactggaagagttcagggttacgacggttatttcgtattatcagtggaacagtatcttgaattatccgactccgccaacaatattcactttatgagacagtcagaaatcggtaggcgctag

SEQ ID NO: 14056 - RNA, 204 nt, synthetic construct; identical to SEQ ID NO: 12417
  misc_feature 1..204: note = source = /note="Description of Artificial Sequence: Synthetic coding sequence"
  source 1..204: mol_type = other RNA

SEQ ID NO: 14057 - RNA, 831 nt, synthetic construct
  misc_feature 1..831: note = source = /note="Description of Artificial Sequence: Synthetic coding sequence"
  source 1..831: mol_type = other RNA
atgaagcaaatactacacccagcactcgagaccacagcttgcaccaatcactttaacgcggacccttgctccacaggcttcgtcttcccagctatgacactgttccctgtgctgttattcctagtggctggactcctgccttcttttcccgccaacgaagacaaagaccctgccttcaccgccctgctgactactcagacgcaggtgcagagagagatcgttaacaaacacaatgaacttcgtcgggccgtttctccacccgccaggaacatgctcaagatggaatggaataaagaggcagctgcaaatgctcagaaatgggccaatcagtgtaattacagacattctaatccaaaggacaggatgacatccctgaagtgcggtgagaatttatatatgagttcagcctcatcctcatggtcacaagcaattcagtcctggttcgacgaatataatgatttcgatttcggagtcggaccaaaaacccctaatgccgtggtgggacactatacccaggttgtgtggtactcatcttatcttgtcggctgtgggaatgcttactgcccaaatcaaaaggtgctgaagtactattacgtgtgccagtattgtccagcaggcaattgggctaatagactatatgtaccctacgaacagggcgcaccatgcgcctcctgtccagataattgtgatgatggcttgtgcacgaacggatgcaaatacgaggacctgtattctaactgtaaaagtttgaagctgaccctgacatgcaaacatcaacttgtaagagactcttgcaaagcctcctgtaattgcagcaattcaatttactag

SEQ ID NO: 14058 - RNA, 1350 nt, synthetic construct
  misc_feature 1..1350: note = source = /note="Description of Artificial Sequence: Synthetic coding sequence"
  source 1..1350: mol_type = other RNA
atgctggcagagtggggagcttgtctcctgttggcagtcgcattactaggacccggcctgcaagcccaggctatggaaggtgtcaagtgcggaggtgtgctgtctgctccctcgggtaacttttcctctccaaacttcccccgactttacccctataataccgaatgttcctggctgatcgtcgttgcagaaggttcctctgtgcttctgacgttccatgcatttgacctcgaatatcacgatacttgctcctttgatttcctggaaatctataatggagcttctcctgacaaagggaacctcctggggcgattttgcggtaaggtcccaccaccccccttcacaagctcttggcatgtcatgagtgtgatctttcactccgataaacatgtggccagtcacggatttagcgccggatatcaaaaagatgtgtgcggaggtgtgctcacaggcttgagcggtgtgctgacctctcccgaatatcccaacaactacccgaattcgatggagtgtcactgggtaatcagagccgccggacctgcccatgtgaaacttgtgtttgtagactttcaagttgagggcaacgaagaatgcacttacgattatgttgccgtgttgggcggtccgggtccaacaagaggtcaccattactgcggttcaactagacccccaactctggtctctctcggccacgaactgcaagtggtatttaaatcagattttaatatcggcggccgcggctttaaggcatactacttttccggcgagtgtcaagaagtctatatggccatgcgcggcaatttttcttccccgcagtacccttctagttatcccaacaatattcgatgtcattggaccatacgcctccccccgggctaccaggtcaaggtattttttcttgatttagacctggaagaaccgaactctctgacaaaaacatgtgatttcgatcatttggcggcattcgatggagctagtgaagaagcccctctgctgggcaactggtgtggacaccatctcccaccgccagtcacgtcatcgcacaatcagctcttattactgctacataccgacagatctacaactcgcagaggtttcagcgtggcatacattggggggcaactcggctgcggatccgggtcaaccgaaggtgagggagaagccctccagcctcagtctcttcagagcccttctagcattccacccgtttgccccgccccacctatgaatggcttgctgcaactgctgctccactggctgcacccttgccctctgtctggccctttgagattggacgggaccgctcccgcttgctttcactactgtcgcgcctcctttcctagtttctag

SEQ ID NO: 14059 - RNA, 1434 nt, synthetic construct
  misc_feature 1..1434: note = source = /note="Description of Artificial Sequence: Synthetic coding sequence"
  source 1..1434: mol_type = other RNA
atgacctctaaattccttctggtgtcgttcattttagcagctctttctctctcaactacatttagtttacagcccgaccagcagaaagtgttacttgtctcctttgatgggttcagatgggattacttatataaggtgccaacgccacacttccactatataatgaagtacggagttcacgtgaaacaggtcactaacgtgttcataactaaaacctatccaaatcattacaccctagtcacaggtctgttcgcggagaaccacgggatagtcgcgaacgatatgttcgaccccattcggaacaaatcattcagcctcgaccacatgaacatatatgattccaaattttgggaggaggccactcccatctggattaccaaccagcgcgcaggtcatacgtcaggtgccgcaatgtggccaggcacggatgtaaaaatacataagcgctttcccacccattatatgccttacaacgagtcagtaagctttgaagacagggtcgccaaaatcatagaatggtttacttccaaagagcctataaatctggggttgctttactgggaggatcctgacgacatgggtcatcacttaggacccgactcacctctcatgggccctgttattagtgatattgacaagaaactgggctatttgattcagatgttgaagaaagctaaactctggaatacactgaaccttattatcacaagcgaccatggtatgacccagtgcagcgaagaacgtttaatcgagctggaccagtacctcgataaggaccattataccctaatcgatcaatcacctgttgccgcgatccttcccaaggaggggaagtttgacgaagtctatgaagccctgacacacgcacacccaaatctcactgtttacaaaaaagaagacgtgcctgaacgctggcattataaatataattctcgaatacaacccataatcgccgtggccgacgaaggttggcacatcctgcagaacaagtctgatgactttctgttaggaaatcatggatacgacaacgctctcgctgacatgcaccccattttcttagcccacggacctgccttccgaaagaattttagtaaggaagccatgaactcaacagacttataccctttactgtgccaccttttaaatatcactgcaatgcctcataatggttcattctggaacgtgcaggacttgctgaactctgcaatgccgcgggtcgtgccttacacacagtctacaattttacttcccgggagcgtaaaaccggcagagtacgaccaggaaggctcatatccatactttatcggtgtcagtctggggagtatcatcgtcattgttttttttgtaatttttattaagcacctcattcactctcaaatccccgctcttcaagacatgcatgctgagattgcacaacctctgcttcaagcctag

SEQ ID NO: 14060 - RNA, 1479 nt, synthetic construct
  misc_feature 1..1479: note = source = /note="Description of Artificial Sequence: Synthetic coding sequence"
  source 1..1479: mol_type = other RNA
atgggcagcgctccctgggcacctgtattactgttggctctgggcctgcgaggactacaggcaggcgcccgacgggccccagacccaggatttcaagaaaggttctttcagcagcgtctggaccacttcaattttgagagatttgggaacaagactttccctcaacgatttttagtgagcgatagattttgggtcagaggggagggtccaatattcttctacaccggcaatgaaggggatgtttgggctttcgcaaataacagtgccttcgtcgctgagcttgccgcggagcggggtgcgctgctggtgttcgctgagcatagatactatggtaagtcacttccttttggcgcccagtcaacccagaggggacacactgaactactcactgtcgaacaggccctggcggactttgccgagcttttgagggccctaagacgagatttgggagctcaggatgcccccgcaattgctttcggcggatcatatggagggatgctttctgcctatctgcggatgaaatacccgcacttggtggcgggcgcattagcagcatccgcaccagttcttgcggtggccggtttgggcgactccaaccagttcttccgggatgtgactgccgatttcgaaggccagagccctaaatgcactcagggagtcagagaggctttccgccagataaaggacttgttcttgcagggcgcttacgataccgttcgatgggagttcgggacctgtcaacctctgagtgacgagaaagacctgactcaactatttatgtttgcccgtaatgctttcactgtgcttgccatgatggactacccttatcctactgacttccttggacctctgcccgccaatcccgtgaaagttggatgtgaccgcctgctctccgaggcccagcgtattaccggtttgcgcgctttggcaggactggtctacaacgccagtggaagcgagcactgctatgatatttataggctgtaccattcttgcgctgatcctacaggctgtggcacaggacccgatgcaagagcatgggactatcaggcttgcactgaaatcaatttgactttcgccagtaataatgtgaccgacatgtttccagatctgccgtttaccgacgagctccgacagcgatattgtttagatacttggggagtatggccaagacccgactggttgctgacaagtttttggggcggcgatctcagggcggcatcaaacattatcttctcaaacgggaacctagacccatgggctgggggaggaattcgcagaaacctgtcagctagcgtcattgcagtaactattcagggaggtgcacaccatctggatctacgagcctcccaccccgaggaccctgccagtgtcgtggaagcccggaaacttgaagctacaattataggagaatgggtgaaagctgcacgtcgggagcaacagcctgctcttcgcgggggacccagactgagtttatag

SEQ ID NO: 14061 - RNA, 2850 nt, synthetic construct
  misc_feature 1..2850: note = source = /note="Description of Artificial Sequence: Synthetic coding sequence"
  source 1..2850: mol_type = other RNA
atgatcctgtccctcctattttccctcggcggccctcttggttggggcctgctaggcgcctgggcccaggcctcatctacctcactgtcagatttacaatcaagtcgcacacctggagtttggaaggcagaggcggaggatactggcaaagatccagtgggtcgcaactggtgcccctacccaatgtctaaactggtcacccttttagccctgtgcaagacagaaaaatttttgattcactcccaacaaccttgtccgcagggagcccctgattgccagaaagtaaaggtgatgtatagaatggcccataagcctgtctaccaagtgaagcaaaaggttcttactagcctcgcctggcgttgttgtcccggttataccggccccaattgtgaacaccatgattccatggcaattcccgagcccgccgatcccggagattctcaccaggagccccaggacggacccgtgtcattcaagcccggacacttagctgcagtgatcaacgaggtcgaggtacaacaggaacagcaggagcacctgctgggggatttgcagaacgatgtccatagggttgcagattcactccctggactctggaaagcgctgccggggaatcttaccgctgcagtgatggaagccaaccagacaggtcacgagttcccggatagatcgttagaacaggtcctgttgccccacgtagataccttcctgcaagttcacttttcaccaatatggcggagcttcaatcaatccctgcacagcttaactcaggccattcggaatctttccttggatgtggaggctaatcgtcaggctatatcacgtgtccaagatagcgcagttgccagggctgacttccaggagttgggagctaaatttgaagccaaagtccaggaaaatacacagcgtgtgggacagctacgacaggatgtggaggatcgtctccacgctcagcactttacattacaccgatccattagtgaactccaagcagatgtggacacaaagctcaagcggctacacaaggcacaggaggcccctgggacaaatggttctctagtgctcgcgaccccaggagccggggcaaggcccgaacccgactctctccaggcccgcttaggacaacttcagagaaatctgtccgaattacacatgaccaccgcgcggcgtgaggaagagcttcaatacaccttagaagacatgagagctacactgaccaggcacgtggacgagataaaggagctttactccgaatctgacgaaactttcgatcaaattagcaaggtcgagcgacaggtggaagagctccaggtcaaccataccgcacttcgcgagctgagagtaatcctgatggaaaagagcctgataatggaagagaacaaagaggaagtagaacgtcaactgctggaactgaacctgaccttacagcacttacagggcggtcatgccgatctgataaagtacgttaaagattgcaattgccagaaactgtacctggacctcgatgtgatcagggaaggacagagagacgctacccgggccctcgaggaaacccaagtctcacttgatgagagacgccaacttgatggttcctctttgcaggccctccaaaacgctgtcgatgcagttagcctggctgttgatgcccataaagcagagggtgagagagctcgggccgccacatcaagactccgctctcaagtccaggctcttgatgacgaagtgggggcgctgaaagcagcagccgccgaggcacgccacgaagtccgccaactccattcagcgtttgccgccttactcgaagacgcactgcgccacgaagcggtgttggcagccctctttggcgaagaagtgctcgaagagatgagcgagcagacacccggacctttacctttaagctatgaacagatcagggtcgcactccaagatgccgcgtctggtttgcaagagcaggcactcggctgggatgaactggccgctcgcgtaacggcgttggagcaggcatcagagcccccccgtccggccgaacacctcgaaccttcacacgatgcaggtagagaagaggcagcaaccaccgcactggctggcctggcgagagagctacagtctctatccaacgatgtgaaaaatgtgggccgctgctgtgaggcagaagccggagccggggccgccagcctcaacgctagcttgcacggactccataatgcattattcgcaacacagcgctcactggagcaacaccagagacttttccactcactcttcggtaactttcaagggctgatggaggcgaacgtgtctttagacctaggtaaacttcagacaatgttaagcagaaaagggaagaagcagcagaaggatttagaagccccccgtaagcgggacaaaaaggaagcggagcccttggttgacatccgcgttacaggcccggtgccgggcgcccttggtgctgcactctgggaagctggcagtccagtcgcattctacgcctcattttctgagggaacggcagccctccagacagtgaaatttaacaccacatatatcaacataggatctagttacttccctgagcatggatattttcgtgcccctgagcgtggcgtttatctgtttgcagtgtcagttgaattcggccccggcccaggaaccggacagctggtgtttggtgggcaccacagaactcccgtatgcaccaccgggcaaggcagcgggagtacagcaaccgtcttcgctatggctgaattacagaagggagaaagagtatggttcgagctcactcagggatctataactaaacggtctttgtccggcacagcttttggtggctttcttatgttcaagacctag

SEQ ID NO: 14062 - RNA, 246 nt, synthetic construct; identical to SEQ ID NO: 12423
  misc_feature 1..246: note = source = /note="Description of Artificial Sequence: Synthetic coding sequence"
  source 1..246: mol_type = other RNA

SEQ ID NO: 14063 - RNA, 690 nt, synthetic construct
  misc_feature 1..690: note = source = /note="Description of Artificial Sequence: Synthetic coding sequence"
  source 1..690: mol_type = other RNA
atgagctttctacaggacccgtctttcttcacgatgggcatgtggagtatcggtgcaggagctttaggtgccgccgctctggctctgctgttggcaaataccgatgtgttcctgtctaaaccccaaaaggccgctctagaatacttagaggatattgaccttaaaacacttgaaaaggagccacgcacgttcaaggctaaagagttgtgggagaagaatggagctgtaatcatggccgtgagacgccccggatgctttctctgccgcgaggaagctgccgacctgtccagtctgaaatccatgctcgatcagctgggcgtcccactgtatgcagtagtgaaggaacacattagaacagaagttaaagattttcaaccttacttcaaaggagaaatatttctcgacgaaaagaagaaattttacggccctcaaaggagaaaaatgatgtttatgggatttattcgtttaggggtgtggtacaacttcttccgagcctggaacggcggcttctctggcaacctggagggagaaggattcatcttaggcggggtgtttgtcgtaggtagtggaaagcagggcattttgctcgagcaccgagagaaagaatttggcgacaaagtgaatttattatcagtgctcgaggccgctaaaatgatcaaaccccagacgctcgccagtgaaaagaaatag

SEQ ID NO: 14064 - RNA, 657 nt, synthetic construct
  misc_feature 1..657: note = source = /note="Description of Artificial Sequence: Synthetic coding sequence"
  source 1..657: mol_type = other RNA
atgggtatgtggtcaattggtgccggcgccctcggagccgccgccctggcattgctgctcgcaaacaccgacgtgttcttatctaaaccacaaaaggctgcacttgaatatcttgaagatattgatctgaagactttggaaaaagaacctcgaacatttaaagcgaaagagctgtgggagaagaacggggctgtgatcatggcagtcagaaggccagggtgttttctgtgcagagaggaagccgctgatcttagctcactaaagtccatgttagaccaactgggggtcccgttgtacgcagttgttaaggagcacatcaggacagaggttaaagacttccagccttactttaaaggcgagatcttcctggacgagaagaagaagttttacggtccccagcggagaaaaatgatgtttatgggttttatacggctgggcgtttggtataacttttttagggcatggaatggagggttcagtggcaacctggagggggaggggtttatcctaggaggggtgtttgttgtgggaagtggtaaacaggggatattgctggaacatagagagaaggaattcggtgacaaagtgaatctgttaagcgtgctggaagccgctaagatgatcaaaccacaaacacttgcctcagaaaaaaaatag

SEQ ID NO: 14065 - RNA, 690 nt, synthetic construct
  misc_feature 1..690: note = source = /note="Description of Artificial Sequence: Synthetic coding sequence"
  source 1..690: mol_type = other RNA
atgtcctttctccaggaccccagtttcttcacaatgggtatgtggtcaatcggagccggtgccctaggcgctgcagcactggcgctgctattagctaataccgacgtgttcctctccaaaccacaaaaggccgcactcgagtatctcgaagatattgatctcaagacgctggaaaaagaaccgaggactttcaaagctaaggagttatgggaaaagaatggagccgtcatcatggccgtgcgaagacctggctgttttctgtgtagagaggaagcggccgatctctcctccttaaaaagtatgctggaccagctcggtgtacctctatacgcagtagtgaaggagcacatcagaacagaggtcaaagatttccagccctacttcaagggagagattttcctggatgaaaaaaaaaaattttacgggcctcagagacgaaagatgatgttcatgggattcatcagactaggagtttggtacaacttttttcgcgcctggaacggcggttttagtggtaatttagaaggtgagggattcattcttggaggggtcttcgtagtggggtctggaaaacaagggattctcttagagcatcgcgagaaggaattcggggacaaagtgaatcttcttagcgtattagaagcggccaaaatgataaagcctcaaactctggccagcgagaaaaagtag

SEQ ID NO: 14066 - RNA, 690 nt, synthetic construct
  misc_feature 1..690: note = source = /note="Description of Artificial Sequence: Synthetic coding sequence"
  source 1..690: mol_type = other RNA
atgtcatttcttcaggatccttcattttttactatgggcatgtggtcaattggagccggggccctgggcgccgctgcactggctctgctcttggccaatactgacgtctttctgtccaagccgcagaaggccgccctggaatacctcgaagatatcgatctaaagactctggaaaaagaacctagaacattcaaggctaaagaactttgggaaaaaaacggcgccgttatcatggccgtgagaagacccggatgcttcctgtgccgggaagaagcagccgacctctctagtctcaagagcatgcttgatcaattgggcgtgcctttatacgctgtcgtgaaagaacacatcagaacggaagtcaaggattttcagccctactttaaaggcgagatttttctggacgaaaaaaaaaaattttacggccctcagagaagaaagatgatgtttatggggtttattaggttgggggtgtggtacaatttcttcagggcctggaatggggggttctccggtaacctggaaggggagggatttatcctcgggggcgtattcgtggttggctctggaaaacaaggcattctgctcgaacatagagagaaggaatttggtgacaaggttaatctgttaagtgtgttagaagccgccaaaatgatcaagccccagacattggccagcgaaaagaagtag

SEQ ID NO: 14067 - RNA, 1248 nt, synthetic construct
  misc_feature 1..1248: note = source = /note="Description of Artificial Sequence: Synthetic coding sequence"
  source 1..1248: mol_type = other RNA
atgtctcccttcctataccttgtgctgctggtgttaggactccatgcaaccatacattgcgcatcccccgagggaaaggttacggcctgccacagctctcaacccaacgccactctttataagatgtcttccatcaatgcggatttcgcgtttaatctctatcgccgcttcaccgttgaaacccctgataaaaacatatttttttctcctgtcagcatcagcgccgccctggttatgttgtcgtttggagcctgttgttccactcagaccgaaatagtagaaactctcggatttaatctgactgacacaccaatggtcgaaattcaacacggattccaacacctcatttgttctctgaattttccaaaaaaagaactcgagttgcagatcggaaatgccctttttatcggtaagcacttaaagccattagccaaattcctcaatgatgtgaagaccctctacgagacagaagtcttcagcaccgacttctccaacatttccgccgctaaacaggagatcaatagccacgtagagatgcagacaaaaggcaaggtggttggcctaatccaggacctcaagccaaacacaattatggtcttggttaattatatccacttcaaagcccagtgggcaaacccttttgacccttctaaaacagaagatagctcaagtttcctcattgataaaactaccacggtccaagtgcctatgatgcaccagatggagcagtattaccacctcgtcgacatggagctgaactgtactgtgctacagatggactacagtaagaatgccctagcattgttcgttctgcccaaggaaggccaaatggagtctgtggaggcagctatgtcatctaagacacttaagaaatggaatcgactcctgcagaaaggatgggttgatctcttcgtccccaaattttctattagcgctacatatgacctgggggccacgcttctgaaaatgggcatccaacatgcgtattcagaaaacgctgacttctctgggctaacagaggataacggattgaagctgtccaatgccgcccacaaagctgtgctacacatcggcgaaaagggcaccgaagccgctgctgtgccagaggtcgagttgtccgatcaaccagaaaacacctttctccatccaatcattcagatagaccggtcctttatgctgctcatactggaacgctccacccgttccattctgttcctgggcaaggttgtcaaccccactgaagcatag

SEQ ID NO: 14068 - RNA, 240 nt, synthetic construct; identical to SEQ ID NO: 12429
  misc_feature 1..240: note = source = /note="Description of Artificial Sequence: Synthetic coding sequence"
  source 1..240: mol_type = other RNA

SEQ ID NO: 14069 - RNA, 486 nt, synthetic construct
  misc_feature 1..486: note = source = /note="Description of Artificial Sequence: Synthetic coding sequence"
  source 1..486: mol_type = other RNA
atgggtctctcaggtttactgcctatattagtgcctttcattctcctcggagatattcaggaaccaggtcacgctgagggaatcctcgggaaaccttgccccaaaattaaggtagagtgcgaagtagaagaaatcgaccagtgcacaaaacctcgagactgccccgaaaacatgaaatgttgcccattctctagaggtaaaaaatgtctggacttccgcaaaatctatgcagtctgtcacagaagattagctcctgcctggccgccgtatcatacaggtggaaccatcaaaaaaaccaaaatctgttcagagttcatttacggtggctcccaggggaataataacaactttcaaaccgaagctatctgcctcgtgacctgcaaaaagtatcataagtccgctttactctacacaataaggaggagccttaacaatcttcaggatctagcacacaatcccggcctctcaccccgcgtccctgactag

SEQ ID NO: 14070 - RNA, 261 nt, synthetic construct; identical to SEQ ID NO: 12431
  misc_feature 1..261: note = source = /note="Description of Artificial Sequence: Synthetic coding sequence"
  source 1..261: mol_type = other RNA

SEQ ID NO: 14071 - RNA, 375 nt, synthetic construct
  misc_feature 1..375: note = source = /note="Description of Artificial Sequence: Synthetic coding sequence"
  source 1..375: mol_type = other RNA
atgccagcttgtagattaggacctctggctgcagctttactgctctccctgctcttattcggcttcaccctcgtgtcaggaaccggtgcggaaaaaaccggggtgtgtccagaattacaggctgaccagaactgcacacaggaatgcgtgtcggatagtgagtgcgccgacaacttgaagtgctgctcagcaggatgtgccaccttttgctctctgcccaatgataaggaaggtagctgtcctcaagtaaatattaatttcccacagctcggcttgtgccgtgatcagtgccaggtggattcccaatgccctggccagatgaagtgttgccggaacggatgtggtaaggtctcttgtgtaactcctaatttttag

SEQ ID NO: 14072 - RNA, 1428 nt, synthetic construct
  misc_feature 1..1428: note = source = /note="Description of Artificial Sequence: Synthetic coding sequence"
  source 1..1428: mol_type = other RNA
atggcagatatgcagaaccttgtcgagagacttgagcgcgctgttggccgcctagaagctgtctctcatacatcagacatgcaccgtggttatgccgactctcccagcaaggccggcgccgcaccctatgtacaagcctttgacagtctcctggctggcccagtcgctgagtatctgaaaatcagtaaggaaattgggggcgacgtacaaaagcacgccgagatggtgcacacaggactaaagttagagagagccctgttggtcactgccagtcaatgtcagcaacctgccgagaataaactctccgacctgttagcgccaatttccgagcaaattaaagaagttattacatttagagagaaaaaccgggggtccaagctcttcaaccacctaagtgcagtttccgagagtattcaagccttggggtgggttgctatggcaccaaagcctggcccgtacgtcaaggagatgaatgacgccgcaatgttttatacgaatagagttctgaaagaatacaaggatgtagataagaagcacgtagactgggtgaaggcatacctttcaatctggacagaactgcaggcatatattaaagaatttcatactactggacttgcgtggtccaagacagggcccgtggcaaaagaactgtccggactgccttccggcccctccgctgggagttgtccccctccaccaccaccatgccctccgccccccccagtctccaccatatcttgttcatatgaatccgcctctcgatcttctctgttcgcccaaattaaccagggcgagtccataacgcacgccctaaaacatgtctcagacgacatgaaaacccacaaaaacccagcattaaaagctcagtcaggccccgtccgctctggccccaaaccgttctcagcccctaagccacagacctccccaagtccaaagagagcaacaaagaaggagcccgcggtcctggagttagaaggcaagaagtggcgggtggagaatcaggaaaacgtctcaaatttggttatcgaggacacagagctcaaacaggtcgcttacatttataagtgcgtcaatacaaccctccaaataaaaggtaagatcaacagcataaccgtcgacaactgcaagaaattgggacttgtgtttgatgacgtggttggtatcgtagagatcattaacagcaaagacgtcaaagtgcaggttatgggcaaggttccaactatttccattaacaagactgacgggtgtcacgcttacttgtccaaaaactctcttgattgcgaaattgtgagcgcaaagagttctgagatgaacgttttaatcccaacggagggcggggattttaatgaatttccggtaccagaacagtttaagacactgtggaacggccaaaaacttgtcactaccgttactgaaattgccggctag

SEQ ID NO: 14073 - RNA, 438 nt, synthetic construct
  misc_feature 1..438: note = source = /note="Description of Artificial Sequence: Synthetic coding sequence"
  source 1..438: mol_type = other RNA
atggctgacatgcagaatctggtcgagcgactagaacgcgctgttggccgccttgaggctgtatctcacacttctgacatgcacagaggatatgccgactccccctccaaggccggagccgccccatacgtccaagcctacattaaggaattccatacaacaggcttagcttggagtaagaccggtcccgtagccaaggaactttctggactaccttcaggcccctcagcaggttcatgtccccctcccccgcccccttgcccccctccccccccagtttctacgatcagctgcagctacgagagcgcttcccgcagcagcttattcgctcagattaaccaaggtgaaagcatcacacatgccttgaaacatgtatccgatgacatgaaaacacataaaaatccagcactcaaagcacaaagtggacccgtccggtag

SEQ ID NO: 14074 - RNA, 1428 nt, synthetic construct
  misc_feature 1..1428: note = source = /note="Description of Artificial Sequence: Synthetic coding sequence"
  source 1..1428: mol_type = other RNA
atggccgatatgcagaatctcgtggagaggttggaaagggcggtaggaaggcttgaggcagtatcgcatacatcagacatgcacagaggttatgctgactctccgagtaaagcgggtgctgccccttacgtccaggccttcgattctctgctggccggacctgtggctgagtatttgaaaatatctaaagagataggcggcgatgtacagaagcacgccgagatggtgcataccggactgaaattagaaagagccctactcgtgactgccagtcagtgtcaacagcctgctgaaaacaagctgtcagacctacttgctccaatttctgagcagattaaagaagtgattacctttcgtgaaaaaaacagagggtctaaattgttcaatcatttatcagccgtatcagagagcattcaggcactcggctgggtagctatggccccaaagcctggaccctacgtcaaggaaatgaatgatgccgcgatgttctatactaaccgagtgctgaaagagtacaaagatgtggacaagaaacatgttgattgggtaaaggcatacttatctatctggaccgaattgcaggcctacattaaagagttccacacgactggactggcctggtcaaagaccggacccgtggccaaagaactcagtggacttccctccggacccagcgccggctcatgtcctcctcctccacccccctgcccacctccccctccagtgtcgaccatctcatgctcttacgaatccgcttcgaggtctagcctgttcgcccagataaatcaaggagagtccataacccacgccttgaagcacgtgagcgatgatatgaaaactcataagaaccccgccttaaaagcacaatccgggcccgtacgctccggtcctaagccattttccgctcccaagccccagacttcaccatcgcctaagcgggcaacaaaaaaggaacctgctgtcctggaattagagggaaaaaaatggagagtagagaatcaagaaaacgtatcaaatcttgtgatagaagataccgaattaaagcaggtagcttatatatacaagtgtgtgaacacaaccctgcagattaaaggcaagattaattccataaccgtggacaattgcaaaaagctgggcctggtgtttgatgatgtagtgggaatcgtagagattattaacagcaaggatgtcaaagtgcaagtgatgggcaaagtccccacgatatctataaataaaactgatggatgccacgcctacctatccaaaaactcattagattgcgaaatcgtctcagccaaatcctccgaaatgaacgtgctgattccaaccgagggtggcgactttaatgaatttcccgtgcctgagcaatttaaaacgctgtggaacggccagaagctggtgactaccgtgacggagatagccggatag

SEQ ID NO: 14075 - RNA, 1425 nt, synthetic construct
  misc_feature 1..1425: note = source = /note="Description of Artificial Sequence: Synthetic coding sequence"
  source 1..1425: mol_type = other RNA
atggcggatatgcagaaccttgtcgaacgtttagagcgcgctgtgggtagattagaagcagtgtcccacacctctgacatgcaccgtggctatgccgattcccccagtaaaggcgcagctccatacgtacaggcatttgactctcttctggccggaccggtggcagagtacctaaaaattagtaaagaaatcggtggagacgtgcagaagcacgccgagatggtacacactgggctcaaactggaaagggcactgcttgtaaccgccagtcaatgccagcaaccagctgagaataagctctccgatctcttggctcccattagtgaacagatcaaagaagtgattacctttcgtgaaaagaacagaggaagcaaacttttcaaccatttatcagcagtctccgagtccatacaagcccttggatgggtggccatggcacctaaaccaggaccttacgtcaaggaaatgaacgacgcagctatgttctacactaatagggtactaaaggagtacaaagatgtggacaagaagcacgtagattgggtcaaagcttatttgagcatctggaccgaacttcaggcctatattaaggagttccacactactggactcgcctggtctaaaaccggcccagtggctaaagaactgtctggcttaccatccggtccaagcgcaggttcatgtcctcccccacctcctccctgccccccccccccccccgtctccaccatcagttgctcatatgaaagtgcaagtcggagctccttatttgcccagattaaccaaggagagtccattacccacgctttgaagcatgtttctgacgatatgaaaacacataaaaaccctgcactaaaggctcagtctggccccgttagaagtgggcctaaaccatttagcgcccctaaaccccagacatcaccttcccccaaacgcgcgacaaagaaggaacccgcagtgctggaacttgagggcaagaagtggcgagtcgagaaccaggagaacgttagcaacctagtgatcgaagatacggaactcaaacaagtagcctacatttataaatgcgtgaacacgacgcttcagataaagggaaagatcaacagcataacagtcgataattgcaaaaagcttggtttagtgtttgatgacgtcgttggtattgtggaaatcatcaactctaaggacgttaaagtgcaggtaatgggaaaagtgccgactatctctatcaataaaacagacgggtgtcatgcctacctttccaaaaatagtctggattgtgaaattgtgagcgccaagtcttccgaaatgaatgttctaattccaactgaagggggagatttcaatgagttcccggtgccagaacaatttaaaacgctgtggaatggtcagaaactagtcactactgtcacggagattgcagggtag

SEQ ID NO: 14076 - RNA, 1425 nt, synthetic construct
  misc_feature 1..1425: note = source = /note="Description of Artificial Sequence: Synthetic coding sequence"
  source 1..1425: mol_type = other RNA
atggctgacatgcaaaatttggtggaacgactggagagagccgtaggcaggttggaagccgtttcccacacttccgacatgcacaggggatatgctgattccccctctaagggtgccgccccttacgtacaagcttttgactccctcctggcaggaccagttgcagagtacttgaagatctccaaagaaatcggcggtgatgtgcagaaacatgccgagatggtgcatacaggccttaagctagagcgcgccttgctggtgactgcaagccaatgccagcaacccgcagagaacaaactctctgacttgttagctcccatctctgaacagatcaaggaggttataacctttagagagaagaaccgcggttccaagctgtttaaccacctgtctgccgtttctgagtccatccaagccttgggttgggtcgctatggcaccaaaacccggaccatacgtaaaggagatgaatgacgccgcaatgttttataccaatagagtcctcaaggaatacaaggatgtggacaaaaagcacgtggactgggtgaaagcatatctatcgatctggactgaactccaggcctatattaaggaattccacaccacaggcctagcttggtctaaaaccggaccagtcgcaaaagagttgtcgggactccccagcggcccttccgccggaagctgcccaccgcccccaccaccgtgccctccaccaccacccgtgtctacaatctcttgttcttatgaaagtgcctccaggtcctccctgtttgcccagattaaccagggcgagtcaatcactcacgctcttaaacatgtgtcagacgatatgaagacccacaagaaccccgcactgaaggcccagtccggccccgtgcggtctggcccaaaacccttctcggcacctaagccccagacttcaccttctcccaagcgtgccaccaagaaagaacctgccgtcctggagcttgaaggaaagaaatggcgcgtggaaaaccaagaaaacgtctcaaacctcgtgatcgaagacactgaactgaaacaagttgcctatatttataaatgcgtaaacaccacgcttcaaattaagggcaagatcaactccatcacagtcgataactgcaagaagcttggactggtgtttgacgacgtggtaggcatcgtggaaatcataaattcaaaagacgtgaaagtacaagttatgggaaaggtccccactatcagcattaacaagactgacggatgccacgcatacctttctaagaactccctcgactgtgaaatcgtgagtgcaaaatcttctgagatgaatgtcctgattccgaccgaaggtggcgacttcaatgagttccccgtgcccgagcagttcaagactctgtggaacggacagaaactggtaacgactgtgacggagatcgctggctag

SEQ ID NO: 14077 - RNA, 1428 nt, synthetic construct
  misc_feature 1..1428: note = source = /note="Description of Artificial Sequence: Synthetic coding sequence"
  source 1..1428: mol_type = other RNA
atggccgatatgcagaacctggtggagcgactggagagggcggtgggcaggttggaggctgtgagccacacaagcgatatgcacagaggatatgcagattcgccaagtaaagccggtgccgcaccctacgtccaggcttttgattcactcctcgccggaccagtggccgaatacctgaaaatcagcaaggagatagggggggatgtacagaaacatgcagagatggtgcatacggggctgaagctagagagggcccttttggtgaccgccagtcagtgccagcagcccgcagagaacaagttgtctgacctgttggccccaatctccgagcagatcaaggaggttatcacctttcgcgaaaaaaacaggggaagcaaactgtttaaccatctatccgccgtttctgagtcaattcaagctttgggttgggttgctatggccccgaaacccggaccttacgtgaaagagatgaatgacgcagccatgttctacaccaacagagttctgaaagaatacaaggatgtcgataagaaacatgttgattgggtgaaggcatacctctccatctggaccgaactgcaagcctatattaaagagtttcatacaacaggtttagcatggagtaaaaccggccctgtcgccaaagagttaagcggtctccccagcggtccatcagccggtagctgtccacctcctcctccaccctgtcccccaccaccccccgtgagtacaatctcatgcagctacgagtcagcttcacgtagcagcctctttgcccagattaatcagggtgaaagcatcactcatgcccttaaacatgtaagcgacgacatgaaaacccacaagaatccggccttgaaggcacagagtggccccgtccgatctggtccaaagccattttcagctcctaaaccccagacctctccctctcctaagcgcgcaaccaaaaaagagccagctgtgcttgaactggaaggaaagaagtggcgggtggagaatcaagagaacgtctctaaccttgtgatcgaggatacagagctcaagcaggtagcctatatttataaatgtgtcaacactacgctgcaaataaaaggcaagattaattcaataacagtagacaattgcaagaaactcggtctcgttttcgacgatgtcgtaggtattgtagagattattaactctaaggatgtcaaagtgcaagtcatgggtaaagtgcccacaatctcgattaataaaacagatggatgccacgcctacctcagtaagaacagtttggactgtgaaatcgtctctgcaaagtcaagtgagatgaatgtcctcatcccaaccgagggcggtgattttaacgagtttcccgttcccgagcaattcaagaccctatggaatggccaaaaattagtaaccaccgtgaccgaaatcgccggctag

SEQ ID NO: 14078 - RNA, 1209 nt, synthetic construct
  misc_feature 1..1209: note = source = /note="Description of Artificial Sequence: Synthetic coding sequence"
  source 1..1209: mol_type = other RNA
atgaccgcactgcctggcccgctctggctgcttggactcgcattgtgtgcactgggcggcggtggtccaggccttagacccccacctggatgcccacagaggcgtctcggcgctcgggaacgtagagatgtgcaacgggagattttggctgtgctcggacttcctggtagacctcgcccaagggctcctccagccgcttccagactacctgccagcgcccccctcttcatgctggatctgtatcatgcaatggcaggagatgatgacgaagacggggctcccgctgaacgcagattgggaagggccgatcttgtgatgagtttcgttaacatggtggaacgagatcgggcacttggacaccaggagccccactggaaagaatttagattcgacctgacacagattccagccggggaggccgtaaccgctgccgaatttcgtatctataaagtcccttcaatccatttgctcaaccggaccctgcacgtaagcatgtttcaagtggtacaggaacagagtaatcgagaatcagatcttttctttttagatctgcagaccctcagagccggagacgaaggctggctcgttctggacgttaccgccgcttcggactgctggcttctgaaaaggcataaagacctaggtttgcggctgtatgtggagacggaagatggtcacagtgtcgaccccggtcttgctggcctgctgggtcagcgcgcccccagatcgcaacaacccttcgtcgtgacttttttcagagcatccccatctcctattagaacgccaagagctgttaggcccttgcgccgtcgccagcccaagaaatctaatgaattaccacaggcaaacaggttaccagggattttcgatgatgtccatggatctcacgggagacaagtgtgtcgaagacacgagctgtatgtcagttttcaagacctgggctggctggattgggtcattgctccacagggttattcagcctattattgtgaaggtgaatgttccttccccctcgactcctgtatgaacgcgacaaaccatgcaattcttcaaagccttgtccacctcatgatgcccgatgccgtgcccaaggcctgctgcgccccgacaaaattgtctgccacttccgtactctattatgactcaagcaataacgtgattctgcggaagcacaggaatatggtcgtcaaagcctgtggctgccactag

SEQ ID NO: 14079 - RNA, 804 nt, synthetic construct
  misc_feature 1..804: note = source = /note="Description of Artificial Sequence: Synthetic coding sequence"
  source 1..804: mol_type = other RNA
atggccgctattcgtatgggtaagctgaccacgatgcccgcaggcctaatatacgcatcggtgagcgtgcatgccgcaaaacaggaagaatctaagaaacagctggttaagcccgaacaactgccaatatacaccgcccccccattgcagtcaaaatatgttgaagaacaacccggccatctgcagatgggatttgcctctattaggaccgcgacaggatgttatatcggttggtgcaagggtgtctacgtcttcgttaaaaacggcattatggacacagtacagttcggcaaggacgcttatgtttacctgaaaaaccctccgagagatttcctgccaaagatgggcgtgattactgttagtggactggccggccttgtgtccgcccgcaaaggatcaaagttcaaaaaaattacttatcccctgggactggccaccctaggtgccaccgtatgttatccagttcagagtgttataattgccaaggtgacagccaagagatatatgctgcaggcttctaagttcctggaacaattaaaccattgtggacagaaagcggccaaaaagtcacacagcctgaacttgaagaagaccaaattgggatcatcatccgaaatcgaagttccagcaaagactacacacgtactcaaacacagcgtcccgcttcccacagaactgtctagtgaagctaagacaaagtccgaaagcacatccggcgctactcagttcatgcccgatcctaaattgatggatcacggccaatcccacccagaagatatcgatatgtacagcactcgttcctag

SEQ ID NO: 14080 - RNA, 807 nt, synthetic construct
  misc_feature 1..807: note = source = /note="Description of Artificial Sequence: Synthetic coding sequence"
  source 1..807: mol_type = other RNA
atggcagctatcaggatgggcaagctaacaactatgcccgcagggctgatctacgcctctgtctctgtgcacgctgctaaacaagaggaatcgaagaagcaactcgtcaaaccggaacagctcccaatttatacagctcctccattgcagagcaaatatgttgaagagcagccaggccatctgcagatggggttcgcctccataagaactgctacagggtgctatataggatggtgtaagggcgtgtatgttttcgtcaagaacggcattatggatacagtgcaattcgggaaagatgcatacgtgtacctgaagaatcccccccgagactttttacccaagatgggcgttataactgtgagtggactcgccggcctcgtgtcagccaggaaaggcagtaagttcaagaagatcacgtaccccctgggtctcgccacactaggcgcaacagtgtgttatcccgtccagagcgttattatagctaaagtaactgctaagaaggtgtatgctactagccaacagatatttggggccgttaaaagcctgtggacaaagtcatccaaagaagagtccctccccaagcctaaggaaaaaaccaagctggggtccagctcagaaatcgaagttccagccaagactacccacgtcttgaagcacagcgttccacttccaacagaacttagtagcgaggccaagacaaagagcgaatcgaccagcggtgccacacaatttatgcccgatccaaaactgatggaccacggacagtcccatcctgaagacattgacatgtactccactaggtcgtag

SEQ ID NO: 14081 - RNA, 3672 nt, synthetic construct
  misc_feature 1..3672: note = source = /note="Description of Artificial Sequence: Synthetic coding sequence"
  source 1..3672: mol_type = other RNA
atggccccactccgcgccctgctttcttacctgctccctctccattgcgccttgtgtgcagcagctggatcacgtactcccgagcttcatctatccggcaagttgagcgactacggggtaacagtgccatgttccaccgattttaggggacgctttctgtcacacgttgtatccggtcctgcggccgcctctgctggatccatggtagtcgacaccccgccaacgctaccaagacatagttcgcatctgagggtggcccgctccccgctccatccgggcggaaccttgtggcccgggagggtaggcagacattcactgtacttcaacgtaacggtgttcgggaaggagctacatttacgtttaagacctaataggcggttggtagtgcccgggagtagtgtggagtggcaagaagatttccgagaactattcagacagcctctgcgtcaggaatgtgtgtacaccggaggagtgacaggcatgcctggtgccgccgtggcgatcagtaactgcgatggattggccggcctcattcgcaccgactcaacagacttcttcattgagccattagagcgagggcaacaggaaaaggaagcatcagggagaacacatgtggtctaccgtcgagaggccgtgcaacaagagtgggctgagccagatggagacctgcacaatgaagcctttgggctcggcgatttaccaaacctcctcggcttggtcggtgatcagttaggagatactgagagaaagaggcgccacgctaagcctgggtcatacagtatcgaagtccttctggtggtggatgattcagtggtaaggttccacggaaaagaacacgtgcaaaattatgtcctgacccttatgaacattgtagacgaaatttaccatgatgagtcactcggggtgcacataaatatcgcacttgtgcgcctaataatggtgggatacagacagtcactctcccttatcgaacgcgggaacccttcaagaagtctggagcaagtttgccggtgggctcacagtcagcagcgacaggacccaagccacgccgagcaccatgaccacgtcgtattcctgacaagacaggactttggaccatccggttacgcccctgttactggaatgtgtcaccccttgagatcgtgcgctctcaatcacgaagatggcttctctagcgcattcgtcattgcccatgaaacaggtcacgtgctggggatggaacatgacggacaagggaatggttgtgctgatgaaacgtctttaggctccgtcatggcaccattggtgcaggccgcttttcatagattccactggtcccgctgcagtaaactcgagctcagccgctacctgccctcttatgattgtctcttggatgatcctttcgatccagcttggccccaacctccggaactcccagggattaactattctatggatgaacagtgccggttcgattttggatcaggctatcagacttgcttagctttcaggaccttcgaaccctgtaagcaactttggtgctcacacccggacaacccctacttttgcaaaactaaaaaaggaccccctctcgacggtaccgagtgtgcccctggaaagtggtgcttcaaagggcattgtatctggaaatctcctgagcaaacatatgggcaggatggaggttggtcttcgtggacgaagttcggaagctgttctcgttcctgtgggggcggagtgcggagcaggtcaagatcatgcaacaaccctagcccggcttatggaggccgtctttgtctcggccctatgttcgaataccaagtgtgcaactccgaggaatgccccggaacatacgaagacttccgtgctcagcaatgtgctaaacgtaacagttattacgtgcatcagaatgccaagcacagctgggttccttatgaaccagatgatgatgctcaaaagtgcgaactgatctgccagtcagccgacacaggtgatgtcgtgttcatgaatcaagtcgtccatgacggcactagatgctcttatagagacccttattcagtgtgtgcaagaggagaatgtgtgcctgtcggatgtgacaaagaggtgggtagcatgaaggctgacgataaatgcggagtgtgtggcggggataactcacattgcaggaccgttaaaggcaccctcggaaaggcgtccaagcaggcaggcgctctgaaactcgtgcagatccccgctggagccagacacattcagatagaagctctggagaaatcgccccaccgcatcgtggttaagaaccaggtcaccggatcatttatactgaaccctaaaggaaaggaggctacatcaaggacattcacagcaatggggctggaatgggaggacgctgtggaagatgcaaaagaaagtcttaaaacctcagggcctctgcctgaagccatagccattctggctctcccacccaccgaaggggggcctcggagttcactcgcctacaaatatgtgattcacgaggatcttctgcccttgatcgggtctaataatgtgttattggaggaaatggatacttatgaatgggctcttaaaagttgggctccatgcagtaaagcttgcggaggcgggatccagtttacgaaatatggatgcaggaggcggcgggatcatcacatggtgcagagacatttgtgcgatcataagaaaagacctaagccaatccgtagacgctgtaaccaacacccatgctcccaacctgtatgggtgaccgaggagtggggggcttgttcccgatcttgcggtaagcttggggtccagacgagaggtatccaatgcctgctgcctctctccaatggaacacataaggtaatgcctgccaaagcctgcgcgggagatagaccagaagcaagaaggccttgcctgcgcgtgccatgtcccgcccaatggaggctcggtgcctggagccagtgtagcgccacttgcggtgaaggtatccaacagagacaggttgtttgcagaacaaacgccaactcactggggcactgcgaaggcgaccgccccgatacagttcaggtgtgtagcttacctgcctgcggcggtaaccatcagaatagtaccgtgagggccgacgtttgggagttgggaaccccagaaggacaatgggttccacaatcagagcccctgcatcctattaacaagatcagtagcacagagccatgcactggcgatagatccgtattttgtcagatggaagtgttagatcgttattgttcaattccgggatatcatcgactatgttgtgtctcctgcatcaaaaaggcctccggacctaaccctggcccagaccccggtcccacatcattgccccccttctcaacacccggtagtccgctcccaggaccccaagacccagccgacgccgccgaacctcccggcaagcctacagggagtgaagaccaccagcacgggcgcgccacacaactgccgggcgccttggataccagtagcccgggcactcaacaccctttcgctcccgaaacgcctatacccggtgcctcttggtcaattagtccaacgactcccggcggcctcccttggggctggacacagactcccacacccgtccctgaggataaaggtcaacctggagaagatctccgtcatcccggcaccagtctgcccgcagcatccccagtcacatag

SEQ ID NO: 14082 - RNA, 3681 nt, synthetic construct
  misc_feature 1..3681: note = source = /note="Description of Artificial Sequence: Synthetic coding sequence"
  source 1..3681: mol_type = other RNA
atggcaccgctgagagccctgctttcatacctactcccattgcattgcgccttatgtgccgctgctggctcccgcactcccgagttgcacctctctggcaaactctcggactacggtgtaaccgtaccttgtagtactgatttcagaggaaggttcttgtcccacgttgtgtccggtcccgctgccgcatcagcgggctccatggttgtggacaccccccccaccctccccagacatagttcacacctccgagtcgcacggtctccgctccaccccggcggaacgttgtggccaggccgggtgggacgccatagcttatactttaacgtaaccgtgtttggaaaggagctgcacctccgtcttagacctaaccgaaggttagttgtgccgggtagcagtgtcgagtggcaagaggattttcgggagttgtttcggcagcccctgaggcaggagtgcgtgtacacaggaggcgtaactggaatgcctggtgccgcggttgcaatctcaaactgtgatggactggccggcctaatccgcactgacagcaccgacttttttatcgagcctttagagcgtggacagcaggagaaggaagcgtcgggccggacccacgtggtttaccgccgcgaagctgtgcagcaagaatgggctgaaccagatggagaccttcacaatgaggcattcggactcggggatcttcctaatctgctaggattggtgggcgatcagctcggcgacacagaacgtaaaagaagacacgcaaagccaggctcctacagcatcgaagtattattagtggtggatgattccgtcgtgaggtttcatgggaaagagcatgtccagaactacgttttaactctgatgaacatagtggatgagatataccacgacgagagcctgggcgtgcatatcaatatagcgctcgttaggctgataatggtgggctatcggcaatctttgtcattaatcgaacgtggtaatccctccagaagcttagaacaggtgtgtaggtgggcacattctcaacagagacaggaccctagccatgcagagcaccacgaccacgtcgtttttttaacaaggcaggacttcggaccgagcggaatgcagggttacgctccggtgactgggatgtgccacccgctgcgctcttgtgctttgaatcatgaagatggttttagttcagccttcgttatcgctcatgagaccggccacgtgctcgggatggaacatgatggccagggcaacggatgtgcagatgagacgtctcttggttcagtgatggcaccccttgttcaagcggctttccatagatttcattggtcacgatgttccaaactggagctttctagatacctcccctcttacgactgtctgttagatgacccattcgacccagcatggccacagcctcctgagctcccaggaataaactactcaatggacgaacagtgtcgcttcgacttcggatctggataccagacctgcttggcattccgcacttttgagccgtgtaaacaactttggtgttcacatcccgataatccttatttctgtaagaccaagaaaggccctcccctggacggcacagaatgcgcacctggtaagtggtgtttcaaagggcattgtatctggaaatctcccgaacagacgtatggccaggatgggggctggtctagctggactaaatttggttcttgttcaagaagttgtggagggggcgttcgatctaggagcaggtcttgcaacaatccctctccagcctacggcgggcgtctgtgcttgggacccatgtttgagtaccaagtttgcaattctgaagaatgtcctggcacttatgaagattttagggcccaacagtgtgccaaaaggaactcttattatgttcaccagaacgccaaacactcatgggtaccctatgagccagacgatgacgctcaaaaatgtgaactaatttgtcaatcggccgacactggtgatgtggtgtttatgaatcaggtggtgcacgacggcacccgctgcagctaccgcgacccttactcagtatgtgcccgcggagaatgtgtgcccgtcggatgcgacaaagaagtcggttctatgaaagccgatgataaatgcggtgtgtgcggcggcgacaacagtcattgcagaactgtgaaaggaacactggggaaggcatctaagcaagccggagctcttaaactcgtgcaaattccggccggggcacggcatatacaaatcgaggctctcgaaaagtcccctcataggattgtggtaaagaatcaggttaccgggagctttattctgaacccgaagggcaaagaagcaacatccagaacattcaccgctatgggcctcgagtgggaggacgccgtggaggacgcaaaggaaagcctgaaaacgtcaggccctttacccgaagctatcgctatcctggcactccccccaacagagggaggcccaagaagcagccttgcatataagtacgttatccacgaagatcttttgcccttgataggctccaataacgtactcttggaggaaatggacacttatgaatgggctctcaagagttgggctccttgctctaaggcctgtggaggcggcatccaattcacgaagtatggttgtcgtagacggcgcgatcaccacatggtgcagagacatctctgtgatcacaagaagcgtcctaaaccaatcaggagaagatgcaatcaacacccttgttcccaaccagtgtgggttaccgaagaatggggagcctgctcaagaagctgcggtaagcttggagtgcagacacgcggaatccagtgcctcttacccttatcaaacgggactcataaagttatgcccgctaaggcctgtgcgggagataggcccgaggcacggaggccgtgccttcgagtcccatgcccggctcagtggagactaggtgcgtggtcccaatgctctgccacttgcggtgaagggattcagcaaagacaggtcgtatgtcgcacaaatgcgaattcgctcggacactgcgaaggcgaccgacctgataccgtccaagtttgctcactacccgcctgcggaggcaaccaccagaactctaccgtacgagcagacgtgtgggagctgggcacacccgagggtcaatgggtgccccagtctgaaccgttacaccccattaacaagatttcatccaccgagccctgcacaggcgacagatccgtgttttgtcaaatggaagttttggaccggtactgcagcataccaggctatcatcgactctgctgcgtgtcatgtatcaagaaagccagtgggcccaatcctggacctgaccccggccccaccagcctgcctcctttctcgactccgggctctcccctcccaggacctcaagatcccgctgatgccgcagagcctccaggaaagccaacaggatcagaagaccatcagcatggcagggcaacacaactgccaggagccctggatacctcatctccggggacccagcaccctttcgcccccgaaactccaatccccggtgcctcctggtccatttcccctacaacacctggcggactcccctggggatggacacagacaccaactcctgtacccgaggataagggccaacccggtgaagatctccgacacccaggaacctctctgcctgccgctagccccgtaacatag

SEQ ID NO: 14083 - RNA, 762 nt, synthetic construct
  misc_feature 1..762: note = source = /note="Description of Artificial Sequence: Synthetic coding sequence"
  source 1..762: mol_type = other RNA
atggctgcagcaactagaggttgtaggccgtggggctctctcctgggactactggggctggtatctgctgctgccgctgcatgggacttagcttcactccgctgtacgctcggggccttttgtgaatgtgactttcgccctgatcttccaggcctggaatgtgatcttgcacagcatttagcgggacagcatcttgctaaggcactggtggttaaagcgttgaaagctttcgtcagggaccctgcgcccacgaagcccctagttttatcacttcacggttggacaggaacaggtaagagctatgtcagctctttattggcccactacttgttccaaggcggattgaggtctccccgagtgcaccatttctcccctgttctccatttccctcacccctcacatattgagcgatataagaaagacctaaaatcttgggtgcaaggtaacctgaccgcctgtggccgctctttgtttctgtttgacgagatggataagatgccccctgggctgatggaagtgctacgtccgtttttggggtcatcctgggtcgtgtatgggactaactatcgcaaggcaatattcattttcattcgttggggtcctgctctccagtgggcacagtggggagggcacttcagcgaagttcagttatattccctaagtttatgctcccagcaaaaccctgtgcctcacggcctttcctgggctttccccgttccatcagcaactctgcgcgacgacatagtgattcctccaggctag

SEQ ID NO: 14084 - RNA, 966 nt, synthetic construct
  misc_feature 1..966: note = source = /note="Description of Artificial Sequence: Synthetic coding sequence"
  source 1..966: mol_type = other RNA
atggctgccgctacacgcggatgtcgaccgtggggttccctcttgggtctgctgggacttgtgtcagctgccgctgccgcctgggacctggcttctcttagatgtacccttggggctttttgcgaatgcgattttagacccgacctgcctgggttagaatgcgaccttgcccaacatcttgccggtcagcacctcgctaaagccctcgtcgtcaaggccctcaaggcgtttgtccgcgaccccgccccaaccaagccccttgtgctgagcctgcacggatggacgggaacagggaaatcatacgtgtcttctcttcttgctcattacctcttccaaggtggcttaagatcacccagagtacaccatttctctccagtgctgcatttcccacacccttcccatatagaaaggtacaagaaggatcttaagtcgtgggtacaaggcaacttaaccgcctgtggtcgatcacttttcttatttgatgaaatggacaaaatgcctcccggcttgatggaggtgttgcgtccgttcctgggcagctcctgggtagtgtacggcacaaattatcggaaggccatcttcatctttatatccaataccggtggcaaacagatcaaccaggtggcactggaggcttggaggtcaagaagggacagagaggagattctgcttcaggagctagaaccagttattagcagggcagtattagataacccccatcacggattttccaactcgggcatcatggaagagcggctgctggatgctgttgtgcctttcctgcccctacaaagacatcatgtgcggcattgtgttctcaatgagctcgcacagctcgggttagagcccagagacgaagtggtacaggctgtcctggattcgactacatttttccctgaagatgaacagctattcagttctaatggatgtaaaacagtggcctcccgaatcgccttttttttgtag

SEQ ID NO: 14085 - RNA, 576 nt, synthetic construct
  misc_feature 1..576: note = source = /note="Description of Artificial Sequence: Synthetic coding sequence"
  source 1..576: mol_type = other RNA
atgcaagtctggtgcgaccagcgtcatgaccccggtggctggaccgtgatccaacgcagactggacggcagcgtgaatttctttcggaactgggagacttacaagcagggctttggaaatattgatggcgagtactggctaggacttgaaaatatttattggttgacaaatcaaggaaattacaaactgctagtgacgatggaggactggagcggcagaaaagtctttgccgagtacgcaagtttccggcttgaacccgaatctgagtattacaaattacgtctgggccgataccacgggaatgcaggcgacagtttcacctggcataacgggaaacagtttacgaccctggacagggatcacgacgtttacaccgggaactgcgcgcactaccaaaaaggcggctggtggtataacgcttgcgcccacagcaacctgaacggggtatggtatcggggcggccattatcgaagtaggtatcaggatggcgtatattgggcagaatttagaggaggctcatattccctcaaaaaagtagtaatgatgatcagaccaaatccaaacacatttcactag

SEQ ID NO: 14086 - RNA, 1482 nt, synthetic construct
  misc_feature 1..1482: note = source = /note="Description of Artificial Sequence: Synthetic coding sequence"
  source 1..1482: mol_type = other RNA
atgcgaccattatgcgtgacctgctggtggctgggcttgctggcagcaatgggcgctgttgctggacaggaggatggttttgagggtacagaagaaggcagcccccgcgaatttatctatttgaatcggtataaacgtgctggcgagtcccaggacaaatgtacatacaccttcatcgtcccccaacagagagtgacgggagctatttgtgtgaattctaaagaacctgaagtgctgttagaaaatcgcgtccataagcaagaactagagctgctaaataacgagcttcttaagcagaagagacaaatagaaactctccagcagctggtagaagtagatggtggaatcgtcagcgaagttaagttgttacgaaaagaatcaagaaatatgaacagccgagtgacacaattatacatgcagctcctccacgagattattcggaagcgggacaacgctctagagctgtcccagttagagaatcgtatcctcaaccaaaccgctgatatgttacagctcgcctcaaaatataaggacttggaacacaaatatcaacaccttgcaacccttgctcacaatcagtcagaaatcatagctcagctcgaagaacactgccaaagagttccaagcgccagacctgtcccccagccacctcccgccgcgcctccgagagtctatcagccacccacatacaatcgcatcatcaaccaaatttccactaacgaaattcagtccgatcagaacctaaaagtgctccctccccccctccccaccatgcctaccctgacaagtctgcctagtagtaccgataagcctagcggaccgtggagagattgtctgcaagccctcgaagatggacacgatacatcaagcatttacctagttaagccggagaatactaatagactgatgcaggtctggtgtgatcaaagacacgatccaggtggttggacagtgatccaacggagactggatgggtctgttaatttctttagaaactgggaaacgtataagcagggatttggcaacatcgacggggagtactggctgggtctcgaaaatatttattggctcactaaccagggtaactacaaactgctggtgacaatggaagactggagcggcagaaaagtgttcgcggaatatgcatcgtttaggttggaaccagagagtgaatattataaactgcgcttggggaggtatcacggcaacgccggggactcctttacatggcataatggcaagcagttcactactttggatcgagaccacgacgtgtataccggcaattgtgcccattaccagaaaggagggtggtggtataacgcttgtgcccacagtaacttgaatggagtttggtaccgaggaggtcactataggagtaggtatcaggatggcgtgtattgggccgagttcagaggaggaagctattctctaaaaaaagttgtgatgatgattcgccccaaccctaacacattccattag

SEQ ID NO: 14087 - RNA, 1959 nt, synthetic construct
  misc_feature 1..1959: note = source = /note="Description of Artificial Sequence: Synthetic coding sequence"
  source 1..1959: mol_type = other RNA
atggctgctgcagcgttgccccctagacccctcctgttacttcccttagtgctgctattatcaggtcggcccaccagagcagatagcaaagtttttggggatctcgaccaagtacggatgacatcagaaggatccgactgtcggtgtaaatgcataatgaggccactcagcaaagacgcctgcagccgggtgcggagtggcagagctcgtgtggaagatttttacaccgtagagacagtgtcgtctggtacagactgtagatgcagttgtacggcccccccctcctcccttaatccatgcgagaacgagtggaagatggaaaaattaaagaaacaggctccagagctgttgaagctgcaatcaatggtagacctcctagaagggacactgtattctatggacttgatgaaagtccatgcttacgtacacaaggtggcttcgcagatgaataccctggaagagtcgataaaggctaatttaagccgtgagaacgaggtggtaaaagattctgtgagacacttatctgagcaattgagacactacgaaaatcactccgcaatcatgcttggcattaagaaagagctttctcgcctgggtttgcagctgttacagaaggacgccgccgctgctcccgccaccccagcaactggtaccggatccaaggcccaggacaccgcacggggcaaaggtaaggatatatctaagtatgggagcgtacagaaaagtttcgctgatcgcgggctgcctaaaccacccaaagaaaagttgctgcaagtcgagaaattacgaaaggagagcggcaagggaagcttcctccagccaacagctaagccccgggcactggctcagcaacaggcggttatcagagggttcacatactacaaggctggtaaacaagaggtcactgaggcggtcgcagataacacattacaggggactagctggctggaacaattgcctcccaaggtggaaggccgcagtaatagcgccgagcctaacagtgctgaacaagacgaagcagaaccacgctcatccgagagagttgacttggcgtccggcaccccaacatcaatcccagccactaccaccaccgccaccactactccaactccaacaacttcactccttcccaccgagcccccgtccggcccagaagtcagcagccaagggagagaggcttcttgcgaggggaccctgcgcgccgtcgatccaccggtgcgtcatcatagctacggtcggcacgagggcgcttggatgaaagacccagccgctagagatgatagaatctatgtgaccaactactattacggcaactcactggtcgagttcagaaacttagaaaattttaaacaagggcgctggagcaatatgtacaaactcccctacaattggataggtaccggccacgtagtctatcaaggggcattctattacaatcgcgcatttaccaagaatattatcaagtatgatcttcggcagaggttcgtggccagttgggccctgttgcccgatgtggtgtacgaagacacaaccccctggaagtggagaggacactctgatatcgattttgcagtggacgaatctgggctttgggtgatttatcccgccgtcgatgaccgcgacgaggcacaacctgaggtcattgttttgtcccgcttggacccaggcgatctcagcgtacacagggaaacaacttggaaaacccgacttagacggaactcctatggaaactgcttcttggtatgcgggattctctatgctgtcgacacttataatcagcaagagggacaagtagcatacgccttcgatacccatacaggaactgacgcgcgtccacaactcccttttctgaatgaacacgcttacacaacccagattgattacaatccaaaagaacgagttctctacgcttgggacaacggacatcagcttacatacacactgcattttgtggtctag

SEQ ID NO: 14088 - RNA, 1641 nt, synthetic construct
  misc_feature 1..1641: note = source = /note="Description of Artificial Sequence: Synthetic coding sequence"
  source 1..1641: mol_type = other RNA
atgaaaaatcaggacaagaagaacggagcagcaaagcagtctaacccaaagtcctcgcctggacagcccgaagcaggccctgaaggcgcccaggaacgcccgagccaagcagcccccgctgttgaagccgaaggaccgggatccagtcaggcaccacgaaagcccgaaggagcgcaagcaaggacagcccagagtggtgctcttagagatgtatcagaggaactatctcgacagcttgaggatatcctgtctacctactgtgtcgacaacaaccagggtggtcccggcgaagatggggctcagggggagccagccgagccagaggatgctgaaaagagccgtacatatgtcgcccgtaacggtgagcctgaaccaacaccagtcgtgaacggggaaaaagaaccctctaaaggggacccaaacactgaggaaataaggcagagtgacgaagtcggagatagagaccacagaagaccacaagagaaaaagaaagccaaaggtctgggcaaagaaattaccctgctaatgcaaactttgaacacactttctacacctgaggaaaaactggcggccttgtgcaagaaatatgccgaactgctggaagaacacagaaactcacagaaacagatgaaactcttacaaaagaagcaaagccaactggttcaggagaaagaccatcttagaggtgagcacagcaaagctgtcctcgcaaggagcaagttagaatccctctgtcgcgagttgcagagacacaaccgatcgctcaaagaagagggcgtccagcgagcgcgcgaggaagaagaaaaaagaaaggaggttacgtcacattttcaagtgactctgaatgatatacaactccagatggagcagcataatgagcgtaacagcaaactaaggcaggagaatatggaactagccgaacgcctcaagaagcttattgagcagtatgaactgcgggaagaacatatcgacaaagtcttcaagcacaaggacctgcagcaacagctggtcgacgccaaactgcaacaggctcaggaaatgttaaaggaggctgaagagcgccaccaaagggaaaaagattttttgttgaaagaagcagttgagtctcaaagaatgtgcgaacttatgaaacagcaggagacccacctcaagcaacagcttgccctgtacacggaaaagtttgaagaattccagaatacactttctaagtcatctgaggtttttacaacattcaaacaagagatggaaaaaatgacaaagaagataaagaaattagaaaaagagaccactatgtaccgcagtaggtgggaatcatcgaataaggcccttctggaaatggctgaggagaagacagtgagagacaaggaattagaagggttgcaggttaagatccagaggttagaaaagctgtgccgagcccttcaaactgagagaaacgacttgaacaagagggtgcaggatctgagtgcaggaggtcagggaagtctcacggactccggaccagaacgaagacctgagggaccaggcgcacaagcacccagctcgcctagagtcaccgaagcaccatgttatcctggtgccccatctaccgaggccagcggccaaaccggtccccaagagccaaccagcgctagagcctag

SEQ ID NO: 14089 - RNA, 1641 nt, synthetic construct
  misc_feature 1..1641: note = source = /note="Description of Artificial Sequence: Synthetic coding sequence"
  source 1..1641: mol_type = other RNA
atgaagaatcaggacaagaaaaacggagctgccaagcagtccaaccctaagagcagcccaggacagccagaagccggaccggagggcgcacaggagagaccatcccaagctgctcccgctgtagaggccgagggacccgggtcctcacaggctccaagaaagccagaaggcgcccaggctcggacagcacagagtggcgcgctccgcgatgtatctgaagagctatctcgccaactggaagatatattatctacttattgcgtggacaacaaccaaggagggcccggcgaggacggagctcaaggagagcctgccgagcccgaggatgcagaaaaatcaagaacttacgttgcgagaaacggcgagcctgagccgacccctgttgtcaatggtgaaaaggaacctagtaaaggagaccctaacactgaggaaatccgtcaaagcgatgaggtgggagaccgggaccatcgaagaccccaggaaaaaaaaaaagcaaagggattgggaaaagagattacgctcctgatgcagaccttgaacacgctaagtacccccgaagagaagttggctgcactgtgtaagaagtatgctgaattgcttgaagagcaccgaaatagccagaagcaaatgaaactactgcaaaagaaacaatcgcagttggtccaggaaaaagatcacttacgaggagaacattccaaggctgtgcttgcccgatccaaactcgaatccttatgtcgcgagctgcaacgccataatagaagtcttaaagaggagggcgtccaaagagcgcgtgaggaggaagagaaaaggaaggaagtaacgtcacattttcaggttactcttaacgacatccagctgcagatggagcaacacaatgaaaggaacagcaaactaaggcaggaaaatatggaactcgccgagcggctgaagaaactaattgaacagtacgagctgcgggaggagcacattgataaggtgtttaaacacaaggacctacaacaacagctggtggacgctaagctgcagcaagcacaggagatgttgaaggaggctgaggaaagacaccagagggaaaaagactttttattaaaggaagccgtggaatcacagcgcatgtgtgagttgatgaaacagcaggagacacatctgaaacagcagctggccctatacaccgaaaaatttgaagagtttcagaatactctgtcaaagagtagcgaagtgttcacaacgtttaaacaggaaatggagaagatgacgaaaaaaattaaaaagctggaaaaagaaactactatgtaccgctccaggtgggaaagctcgaacaaagctttgctggaaatggctgaggaaaaaacggtgcgggataaagagctcgaaggactccaggtgaaaattcaacggctggaaaaattgtgtagagctcttcaaaccgaaaggaacgacttgaacaaaagggtgcaggatctgagtgctggcggacaggggagtttgaccgacagcggtcccgaacgacgtccggagggtccaggggctcaggcaccttcatcaccccgcgtcaccgaagccccatgctatcccggagccccctccaccgaagccagcggtcagactggcccccaagagcctacctcagctagagcctag

SEQ ID NO: 14090 - RNA, 1392 nt, synthetic construct
  misc_feature 1..1392: note = source = /note="Description of Artificial Sequence: Synthetic coding sequence"
  source 1..1392: mol_type = other RNA
atgcacgggtcatgcagcttcctgatgcttcttctgcccttactgctgttactggtggctacgacgggcccagttggcgccttgactgatgaggagaaaaggctcatggtggaactacacaatctgtaccgcgcccaagtttctcccactgcatccgatatgctgcacatgagatgggatgaggaactggccgcctttgctaaagcctacgcccgacagtgtgtttggggacacaacaaggaaagaggtaggcggggagagaatctgtttgctatcaccgatgaaggaatggatgtgcccctagccatggaggagtggcaccatgaacgtgaacattacaatctgtccgccgctacctgttcacctggacagatgtgtggtcattatacccaggtcgtgtgggccaagacagagagaatcggatgtggcagtcatttttgcgagaaacttcagggagtagaagagaccaatatcgaactgctggtctgtaactacgaaccaccgggaaacgtgaaaggcaaacggccttatcaggagggaacaccttgcagccagtgcccgagcggctaccactgcaaaaacagtctgtgtgagccaataggcagcccagaggatgcacaagacctcccttatttagtgactgaagctccctcctttagggccaccgaagcgtctgatagtagaaaaatgggtactccctcatctttggccacgggtatccccgctttccttgttaccgaagtttctggctcactggcaactaaagctctgcccgcagtggagactcaagcgcccacttcccttgcgactaaagaccccccctccatggccactgaggccccaccgtgtgtgacaaccgaagtgccctccatcctcgccgcgcactctctcccgagccttgacgaggaacctgttacgtttcctaaatctacccatgttccaattcccaaatctgccgacaaggtgactgacaagaccaaggtgccaagcagaagcccggaaaactctctcgatcccaaaatgtctctgaccggtgcacgagagctgcttccgcatgcccaggaagaggccgaagcagaagctgagctgcctccatcttctgaagtgctcgctagcgtcttcccggcacaggacaaaccaggggagctgcaggccactctagatcatactggtcacacaagttccaaatctcttccgaactttcccaacacatccgcgacggctaatgcaaccggaggcagagcacttgcactgcaaagttcactcccgggtgctgagggtccagataaaccaagtgtagtgtccggcctgaattctgggccaggccatgtctgggggccactgctgggcttgctcctgctcccaccacttgtcctggcaggtatcttctag

SEQ ID NO: 14091 - RNA, 459 nt, synthetic construct
  misc_feature 1..459: note = source = /note="Description of Artificial Sequence: Synthetic coding sequence"
  source 1..459: mol_type = other RNA
atgatgttgcctcagtggctgctccttttgttcctgctgttttttttcttattcttgttgacacgcggtagtctgtcgcctaccaaatataacttactcgagctcaaggagtcctgcattagaaatcaagactgtgagaccggatgttgtcaacgcgcccctgataattgtgagagtcactgtgctgaaaaaggaagtgaaggctcactgtgccagacccaagtcttttttggccagtatcgcgcatgtccttgtttacggaatctgacatgtatctattctaaaaacgaaaagtggctgagtatcgcttacggaaggtgtcaaaagattggtcgtcaaaagctcgccaaaaagatgtttctcgtcctgccacccagttgttgcctgctacttctccacttattaagcagtctgcccagagccctgtgctctccatgctcgccagaaccacctccttag

SEQ ID NO: 14092 - RNA, 366 nt, synthetic construct
  misc_feature 1..366: note = source = /note="Description of Artificial Sequence: Synthetic coding sequence"
  source 1..366: mol_type = other RNA
atgatgctgcctcagtggctactgctgttatttcttttgtttttttttttattcctgttgactcgtggaagtctgtctcccacaaagtataacctgctagaattgaaagagagttgcatacgtaaccaagactgtgaaaccggctgttgtcaacgcgcacccgacaactgcgagagtcactgcgcagaaaaaggaagtgaagggtcactctgccagacacaggttttcttcggccagtatcgtgcgtgcccttgtctgagaaaccttacatgcatttattccaaaaacgagaagtggctttctattgcatacggacgttgccagaagatcgggaggcagaaactcgcaaaaaagatgtttttctag

SEQ ID NO: 14093 - RNA, 1122 nt, synthetic construct
  misc_feature 1..1122: note = source = /note="Description of Artificial Sequence: Synthetic coding sequence"
  source 1..1122: mol_type = other RNA
atgcgccttctcgcgtggctgattttccttgcaaattggggcggagctcgggctgaaccaggcaagttttggcacattgccgacctgcatttggaccccgattacaaagtgagtaaggacccgtttcaggtctgtccctccgcaggaagtcaaccagtgcccgatgccggtccctggggagattatctgtgcgattcaccgtgggcattgataaacagctcaatctatgctatgaaagaaatagagcccgagccggactttattctgtggaccggagatgacacccctcacgtccccgacgaaaaattaggcgaggccgctgtcttggaaatcgtagagcgactgacaaaactgattcgcgaagtgtttccagacaccaaagtatacgccgccttaggtaaccacgatttccatcctaaaaatcagtttccagcgggcagcaataatatttataatcagattgccgagctctggaagccttggttatccaatgagtcaatagcacttttcaagaagggggccttttactgcgagaagctgccaggaccaagcggggcaggtcgaatagttgtgctaaacactaatttatactataccagcaatgccttgaccgccgacatggccgaccccggacaacagttccagtggcttgaggacgtcctgaccgacgcgtcaaaagcaggggacatggtatacattgtaggacacgtacccccagggttctttgaaaagacacaaaacaaggcttggttcagggaggggtttaacgagaaatatctcaaagtcgttcgcaaacatcacagggtcatcgctggacagttcttcggacatcaccacacagattctttccgaatgttatacgacgacgcaggggtgcccatcagcgccatgtttattacccccggagttactccctggaagaccactctgccaggcgtagtgaacggtgctaacaatccggctattagagtatttgagtatgatcgcgctactttgagtttaaaagtgagatcccccgcagaggctcgtggaggcggctgggaagggcttaaatgcattaccactttcccacatagccaactcatccacctgccactcaccaccgaaccccaagaaggatag

SEQ ID NO: 14094 - RNA, 810 nt, synthetic construct
  misc_feature 1..810: note = source = /note="Description of Artificial Sequence: Synthetic coding sequence"
  source 1..810: mol_type = other RNA
atgaggctgttggcttggctcatctttttggctaattggggcggtgcacgagcagaacctgaagaagcccaaggaccttgcgcccaggaaaaaggaaaggggcccccccccacatcaatcctagcctccctagccccaggtctcgaagctgggaaattttggcacattgcagacctacatttagatccggattacaaggtgtccaaggaccctttccaggtgtgtccctctgcaggcagtcagcctgtaccagacgcgggcccctggggggactacctgtgtgattccccgtgggcgctgatcaattcttcaatttacgccatgaaggagattgaaccagagcccgacttcatcctgtggaccggtgacgatactccccatgtgcccgatgagaaactcggtgaagcagcagtccttgagatcgtggagcgcttaacaaaactcatccgcgaggtgttcccagatactaaagtgtacgccgccctaggtaatcatgatttccatcctaagaatcagttcccagcagggtccaacaatatttataatcagatcgcagagctctggaagccatggttatcaaacgaaagcattgccctgttcaagaaaggcgccttctattgcgaaaaactacctgggcccagcggagcaggcaggatcgttgtgctaaacacaaatttgtattatacttcgaatgcactgacagccgatatggctgatcctggtcagcagtttcaatggctagaagatgtcctgaccgatgctagtaaagcgggcgatatggtttacattgtgggtcacgtgcccccatag

SEQ ID NO: 14095 - RNA, 1368 nt, synthetic construct
  misc_feature 1..1368: note = source = /note="Description of Artificial Sequence: Synthetic coding sequence"
  source 1..1368: mol_type = other RNA
atgagattgctagcctggctgattttcctggccaactggggaggagctagagccgagcctgggaaattctggcatattgcggacctgcatctggatcccgactacaaagtgagcaaagaccctttccaggtttgcccatccgctggaagccagccagtccctgatgctggtccctggggtgattatctgtgtgacagcccctgggcgcttatcaactcgtcgatctacgcaatgaaagaaattgaaccagagccagactttattctttggaccggggatgacacaccacatgtaccagatgaaaaactcggcgaagctgcagtgttagagatcgtagaaagattgaccaaattgattcgtgaagtgtttccagacaccaaagtctatgccgcactgggaaatcatgactttcaccctaaaaatcagtttcccgctggatctaacaatatctataatcagatcgctgagctctggaagccatggttgtccaacgagagtattgctctgttcaagaaaggcgcattctactgtgagaagctgccaggaccaagcggggcaggcagaattgtggtattgaatacgaacttgtattacacctctaacgcactcaccgccgacatggccgacccaggtcagcagttccagtggttggaagatgtgctaactgacgccagcaaagccggcgatatggtgtatatagtggggcatgtgccaccaggtttcttcgaaaaaacgcagaacaaggcttggtttagggaagggtttaacgaaaagtatttgaaagtcgtgagaaaacatcacagagttattgcaggtcagttcttcgggcaccaccacacagatagcttccggatgctctatgatgacgcaggcgtcccgatatccgccatgttcataaccccaggggtaaccccatggaagaccaccctccccggcgtggttaacggagcaaacaaccctgcaattcgcgtttttgaatatgacagagccaccctatcgcttaaggatatggtaacatacttcatgaatctctctcaggcaaatgcccagggcacccctcgatgggagttagaataccaattaacagaggcttatggtgtgccagatgccagcgcccacagtatgcacactgttctggatcgcatagccggagatcagtcaactctgcagagatactatgtatacaacagcgtcagctactccgcaggagtttgtgacgaggcttgttctatgcagcacgtctgcgcgatgcgtcaggtggatatcgacgcctacacaacctgcctgtatgcgtctggtacaacacccgtcccccagctcccactactcctcatggctttacttggactgtgcaccctagtactttag

SEQ ID NO: 14096 - RNA, 867 nt, synthetic construct
  misc_feature 1..867: note = source = /note="Description of Artificial Sequence: Synthetic coding sequence"
  source 1..867: mol_type = other RNA
atggccttagcacctccgcctagaggcctctggcaggccaaagacatttctcccatcgtgaaggccgctcgtcgagatggagagcttttgctgtctgcccaactcgattccgaagaaagggacccaggtgtcccaagaccttccccctacgcaccctacattttggtttatgcaaacgacctggccatttccgaaccaaatagcgtagcagtgacattacaaaggtacgaccccttccctgcaggcgatcctgaaccacgtgcagcaccaaacaactccgccgaccctagggttagacgcgccgcccaggccacaggacccctacaagacaatgaactccctggtctcgacgagcgccctccccgcgcacatgctcagcatttccacaaacatcagctttggccaagcccctttcgagctctgaagccaaggcctggccggaaggatcgtcggaagaaaggacaagaagtgtttatggccgctagccaagtactggacttcgatgaaaaaacaatgcagaaagcacggcggaagcagtgggatgaacctagagtgtgtagtaggaggtatctaaaagttgacttcgcggatatcggatggaacgagtggataatctctcccaaaagttttgatgcctactactgcgccggagcttgcgagttcccaatgcccaagatcgtgcgcccctccaaccacgccaccatacaatccatcgtcagagcagttgggattatacctgggataccagagccctgttgtgttcccgataaaatgaatagccttggcgtgctctttttggatgaaaaccgaaatgtggtccttaaagtgtacccaaacatgtctgttgatacctgtgcctgtcgctag

SEQ ID NO: 14097 - RNA, 1626 nt, synthetic construct
  misc_feature 1..1626: note = source = /note="Description of Artificial Sequence: Synthetic coding sequence"
  source 1..1626: mol_type = other RNA
atgccgtttcggctgctgattcctctgggcttgctatgcgctttattacctcagcaccatggggctcctggccctgacggctctgcgcctgaccctgcccactattctttttccctgacccttattgacgcccttgacaccctgctgatacttggaaatgtgtctgaattccaacgcgtggtagaggttctccaggattccgtagactttgatatcgatgtaaacgcttcagtcttcgaaactaatattcgggtcgtcgggggcctgcttagtgcgcacctcctgtccaaaaaggccggggtggaagtcgaagcaggctggccatgctcaggacccctgctgcggatggcggaagaggccgcgcgaaaattgctgccggcatttcagaccccgaccggaatgccatatggcaccgtgaatctgttgcacggcgtgaatcccggagaaaccccagtgacttgtactgccggaattgggacatttattgttgaatttgccaccctctccagtttaactggtgaccctgtcttcgaagatgttgctagggtggcattgatgcgtctgtgggagtctagatctgacattggcctcgtcggtaaccatatagacgttcttacagggaaatgggtggcccaggacgctggaatcggagccggggtggactcctattttgagtacctagttaagggcgcaatcctactgcaagacaaaaagttgatggcaatgttcctcgagtataataaggcaatccgcaactacacccgattcgacgattggtatctgtgggtgcagatgtataaagggactgtatcaatgccggtgttccagtccttagaagcctactggcccggattacaatctctgattggtgatatcgataatgcaatgcgcactttcttgaactattataccgtctggaagcagtttggcggactgcctgaattttacaatatccctcaaggctacacggttgagaagcgtgaaggctacccgttgcgacccgaactgattgagtctgctatgtacctgtatagagcaacaggtgatccaaccctccttgagctggggagggacgccgtagagagcatcgagaagatctccaaggttgaatgcggatttgcaactattaaggacctgagagaccacaaacttgataatagaatggaatctttttttctggccgaaacagtaaaatatctctatctgctatttgatccaacaaatttcattcacaataacgggagtaccttcgacgctgtgattacaccgtatggcgagtgcatactgggagcagggggatacatttttaataccgaagcacaccctattgatccagcagcgcttcactgctgccagcgccttaaggaagagcagtgggaggtcgaagatttgatgagggagttttattcactgaagagatcaagaagcaagtttcaaaagaacaccgtgtcttctggcccttgggagcctccggctaggcctggaaccctgtttagtccagaaaatcacgaccaagccagagagcgaaagcctgccaagcaaaaagtgccacttttatcatgtccgtcacaaccctttacaagtaagctggccctgctcggacaagtgttcctcgactcaagctag

SEQ ID NO: 14098 - RNA, 1737 nt, synthetic construct
  misc_feature 1..1737: note = source = /note="Description of Artificial Sequence: Synthetic coding sequence"
  source 1..1737: mol_type = other RNA
atgccatttcgtttgctcatacctttagggctcctctgcgctctcctgcctcaacatcatggagcacctggacccgacggcagtgcaccagatccagcccactatagagagagagtgaaggcaatgttttaccacgcttacgacagctatctggaaaatgccttcccattcgacgagcttagaccactgacttgcgatgggcatgacacctggggaagcttctcgttaacactaattgacgcactggacaccctgctgattctgggtaacgttagtgagttccaaagagtcgtggaggtgcttcaggattcagtagacttcgacattgacgtcaacgcctctgttttcgagacgaatattagagtggtcggaggcttgctttccgcacacctgttaagcaagaaggctggagtagaggtagaggcaggatggccatgcagtggtccacttctgaggatggcagaggaggcggcaaggaagctcttacctgcctttcagacgcctacaggcatgccttacgggactgtcaacctactgcatggtgtgaatcccggcgagacacccgtgacatgcaccgcaggaatcggtacatttattgtagagtttgcgaccttgtcctccctcacaggagatccagtcttcgaggatgtggcccgggtcgccttaatgcgtctgtgggaatctagatctgacattggactagtgggaaatcatatagacgtgctcacagggaaatgggtagctcaggacgcgggtatcggggctggagtagacagctactttgagtatttggtgaagggcgcgatcctcttgcaggataagaaactgatggctatgttcctggaatacaataaggcaattagaaactatacacggttcgacgattggtacctctgggtgcagatgtataaggggaccgtgagcatgcctgttttccaaagcttagaagcttattggcctggactgcaatcattgatcggcgacatcgacaacgccatgcgcacatttctgaattactacacagtttggaaacagtttggcggactgcccgagttttataatattccacaaggctacaccgtcgagaaaagggaaggctatcctctaaggcctgagctgatagagagtgccatgtacctttatagagccactggtgatcctaccttattagaattaggacgagacgcggtcgagtccattgaaaaaatttccaaggttgagtgcggattcgctacaataaaggatttgagggaccacaagctagacaaccgcatggaatcattctttctcgccgaaaccgtcaaatacctgtacctcttgttcgatcccaccaactttatccacaataatggatcaaccttcgatgcagtgatcactccgtacggtgagtgtattttaggggctgggggttacatctttaatactgaagcgcatccaatcgaccccgctgcattacactgttgccagaggcttaaagaggaacaatgggaagtggaagacttaatgcgcgaattctattctttaaagcggagccggagtaagtttcagaaaaacaccgtaagttcgggaccatgggaacctcctgctcgacctggcaccctgttttctcctgaaaatcacgaccaagctcgcgagcgcaaacccgccaagcaaaaagtacctctactcagctgtccaagtcagccctttacttccaagctcgccctgctcggacaagtattcctggattcgtcttag

SEQ ID NO: 14099 - RNA, 495 nt, synthetic construct
  misc_feature 1..495: note = source = /note="Description of Artificial Sequence: Synthetic coding sequence"
  source 1..495: mol_type = other RNA
atgcgttcctgttatgtagcccaagccggcttgaaactgcctgggagtagtgatcccccagccagcgctagccagtcaacccgcattacagctagtggatacggccctccatcgtccagaccatccagtagagtggtgaacggcgaagatgccgtgccttactcatggccatggcaagtatcactgcaatatgagaaaagcgggtctttctaccacacgtgtggtggttccctgattgcacctgattgggtggttactgcaggccactgtatctcgagttcaagaacctatcaggttgttctgggcgaatatgatcgggccgttaaggaaggtccagaacaggttattcctattaattctggcgatctcttcgttcacccgctgtggaatagatcatgtgtggcatgcggaaatgacatcgcgctcatcaagctttccagatccgctcaactaggggatgccgttcagctagcttcccttcctcccgctggctag

SEQ ID NO: 14100 - RNA, 3663 nt, synthetic construct
  misc_feature 1..3663: note = source = /note="Description of Artificial Sequence: Synthetic coding sequence"
  source 1..3663: mol_type = other RNA
atgccaggtttgctgaattggattaccggcgctgccctacccctgactgcttctgatgtcacgtcatgtgtttcaggatatgccttaggcctcacagcgagcttgacttatggcaacctggaagctcaaccattccaaggacttttcgtgtaccccctcgacgaatgcactaccgtcatcggcttcgaagccgtgatcgctgatcgcgttgtgacggtgcagattaaggacaaggctaagttagagtcgggccacttcgacgcctcccacgttcgatcccccactgtaactggcaatatcctgcaagatggcgtgagcattgctccacactcttgtacccccggtaaagtcacactggacgaggaccttgagcgaatcttatttgttgctaatctcggcacgatcgctcccatggagaacgttacgattttcatatcaaccagcagcgaactgcccactctgccaagtggcgccgtaagggttctgctccccgccgtctgcgctcctaccgtccctcaattttgcactaaatcaacaggcactagtaatcagcaagcgcaaggaaaagacagacactgcttcggcgcctgggcaccaggttcttggaataaactgtgcctcgcaaccctacttaacacagaggtgtctaatcccatggagtatgagtttaatttccagctggagatcagaggaccttgtctcctggcaggagtagaatcgcccactcacgaaatccgggctgatgcagcaccctcggccagatccgctaaatctatcatcataaccttagccaacaaacacacttttgacaggcccgtagagatattaatacacccttctgagccacatatgccacatgtattgattgagaaaggggacatgaccctaggagagtttgaccagcatctcaaaggtcgcacagatttcatcaaagggatgaaaaaaaagtccagagctgaaagaaaaaccgaaatcatacggaaaagactccataaggatatcccccatcactccgtaattatgcttaacttctgtcctgacctgcagagtgttcaaccctgtctcagaaaggcacacggagaatttatatttctgatagatcggtcgtcatctatgtcaggtatttcaatgcaccgggtaaaggacgccatgctcgtagctctgaaatcgcttatgccagcttgtttattcaacattatcggatttggttccacgtttaagagcttatttccatctagccagacatactctgaagactccctggcgatggcatgcgacgacatccagcgaatgaaggctgacatgggaggtactaacatcctcagtccactgaaatgggtcattagacagccggtgcatagagggcacccaagacttctatttgtaatcaccgacggggcagtgaataacacaggaaaagttttagagttggttcgaaaccacgcattctctacccgatgctattctttcggcataggacccaacgtctgtcacaggctggtgaaggggttggcttctgtgtcagaagggagtgccgagcttcttatggaaggagagcgcttgcagcccaagatggttaagtccctgaaaaaagcgatggctccagtgctgagcgatgtgactgttgaatggatttttcccgagacgaccgaggtgcttgtttccccagtctctgcctcatctttgttccccggcgagaggttagtgggctatggaatcgtgtgtgatgctagcctccatatcagcaacccgagaagtgacaagaggcgacgctattctatgttgcatagtcaggagagtggaagcagtgttttctatcattcccaagacgatggacctgggctggaaggtggcgattgtgctaagaatagcggggcaccctttatcctgggtcaagccaagaacgctagactggcaagcggagactctactactaaacatgatctaaacctgtctcagcgtcgtcgcgcatactcaactaatcagattacaaatcacaaaccattgccgagagcaaccatggcctctgatcctatgcctgccgccaaaagataccctctgcgtaaagccagactccaggatttaacaaatcagacaagcctggatgtgcagcggtggcagatcgaccttcagcccctgctaaattccggacaggatttaaatcagggaccaaagttgcggggaccaggcgcaaggagaccatcactcctgcctcaagggtgtcagcctttcctcccatgggggcaagaaactcaggcctggtcaccagttcgcgaacgcaccagtgacagccgctctcctggagacctggaaccatctcatcatccctcagccttcgaaacagaaacttcttctgactgggatccacccgccgaaagccaagagcgagcaagcccatctcgccctgctaccccagctcccgttctgggcaaagccctggtgaaaggactccatgatagccagcgactccagtgggaagtgtcattcgaactcggtacgcctggaccagagcggggaggtgcacaagacgctgatttgtggagcgagacttttcatcacctcgctgccagagcaatcatccgggacttcgagcagctggccgagagagaaggcgaaattgaacagggcagcaacagaagatatcaagtgagtgcgttacataccagcaaagcctgtaacattattagtaagtacaccgcctttgttcccgtcgatgtgagtaaatctcgttatcttcctaccgtcgttgaatatcctaactcagccgcccttagaatgctcgggtcacgggccttggctcagcagtggcggggtacatcgagtggcttcggccggcctcagactatgctgggggaagatagtgctcctggcaacggaaaatttcaagccctcaatatggaagctagtcctactgcccttttcagtgaagcccgcagccccggacgagagaaacatggcgccagtgagggcccacagcgctctctagctactaacactttaagcagcatgaaagccagtgaaaatctattcggctcgtggcttaatctgaacaagtcaagactgttgaccagggccgcaaagggctttctaagcaagcctttgattaaagcagtagagtcgacttccggcaaccaatccttcgattacatcccactagtatcattgcagttagcatccggcgcctttctgttgaacgaagccttctgcgaggccacccacatcccaatggagaagctgaaatggacttctcccttcacctgccatagagtatccctaacgaccagacccagtgaatcaaaaaccccttctcctcagctttgcacctcctcacctccacgccacccatcttgcgactcattctcccttgagcctctcgccaagggcaagctgggacttgaaccacgagctgtagtagagcacactggaaaactgtgggccaccgttgtgggcctcgcctggttggagcactcatcagctagctactttactgagtgggaactggtggccgcgaaggctaattcatggttggaacaacaggaggtccccgaaggacgaactcagggcacactcaaggcagcggcaagacagctgttcgtcctgctgagacactgggacgaaaatctcgagtttaatatgttgtgctataatcctaactacgtttag

SEQ ID NO: 14101 - RNA, 3051 nt, synthetic construct
  misc_feature 1..3051: note = source = /note="Description of Artificial Sequence: Synthetic coding sequence"
  source 1..3051: mol_type = other RNA
atgcctgggttattgaactggataacaggcgcagcccttccattaaccgcgtcagacgtgactagctgcgtgtcgggctacgccctggggctcaccgcaagtcttacctacggcaacctcgaagcccagcctttccaaggactctttgtatacccgctcgatgaatgcaccaccgtaattggatttgaagccgttattgccgatagagtggttacagtccagattaaggataaagccaagcttgaatccggccactttgacgcgtctcacgtgcgctccccaacggtcacggggaacattctgcaggacggtgtttcaattgccccccactcatgcacacccggaaaagtgaccctggacgaggatcttgagcgaattttatttgtcgcaaatttgggcacgatcgcgccaatggaaaatgtcactatctttatctcaacttcctcagagttgcccactcttccttcaggcgcagttagagtgctcctccctgccgtctgcgcccctaccgtcccccagttctgcacaaaatcaactggaacttccaatcagcaggctcaagggaaggatcggcactgctttggcgcatgggccccagggtcatggaataagctgtgcttagcaacccttttaaacaccgaagtaagtaatccaatggaatatgagtttaactttcagcttgagattcggggaccttgtctcctggccggggtcgaaagtcccacccacgaaatccgggccgatgccgcaccttccgccagaagtgccaagtccatcattattaccctcgcaaacaaacatacatttgaccgccccgtcgaaatacttatccatcccagtgagcctcatatgcctcacgttcttatcgagaagggggacatgactctcggcgagttcgaccagcacctgaaaggacgtactgattttatcaaaggaatgaagaagaaaagtcgcgctgaacgcaagacggagatcatccgcaagaggctccacaaagatatcccccaccattccgtcatcatgctgaacttttgccctgacttacaaagtgtgcagccctgcctaaggaaagcccacggggaatttatctttttgatagacagatcctcaagcatgtccgggatctcaatgcacagggtcaaggacgccatgctggtagctctgaagtctttaatgccagcctgcctcttcaatatcatcggctttgggtctacattcaaatctctctttccttcatctcagacttacagcgaagacagcctcgcgatggcctgcgacgacatccaacgtatgaaggcggatatgggcggtactaacatcctttcccctcttaagtgggttatccggcagcctgtgcatcgcggacaccctagacttcttttcgtgattaccgatggtgccgtgaataatactggaaaggtactcgagctggtccgaaatcacgcattcagcaccagatgctattctttcggtatcggaccaaatgtctgtcatagacttgtgaaaggccttgcctctgtctcagaaggctctgctgaattacttatggaaggcgagaggcttcagcctaagatggttaaaagtctcaaaaaagcgatggcacctgttctgtcagacgttactgtggaatggatttttcccgaaacgactgaagtgcttgtctcacctgtgtccgcttcatcactgtttccgggcgaacgcctggtgggctatgggattgtctgcgatgcaagtcttcacatatctaaccctcggtcagacaaaagaagacgttattcaatgctccattctcaggagagtggatcttctgtgttctaccattcacaagatgacgggccaggactggagggtggagattgtgcaaagaattcaggagccccttttatcctcgggcaggccaagaatgcccgccttgccagtggggacagcactactaaacacgatctgaacctgtctcaaaggagaagagcatactccactaaccaaatcaccaatcataaaccgttgccacgcgctaccatggcaagcgatcccatgccagcagccaagcgctatccattgcggaaggccagactccaggacctcacaaatcaaaccagcctagatgtccagcgatggcaaatcgacttacagccactcctgaactccggacaagatctgaatcagggtccgaaactaagaggaccgggagcccggcgcccatcgctgctgcctcagggctgtcagcccttcttgccttggggacaggaaacacaagcctggtcaccagttcgggaaaggacttccgatagccgcagtccgggcgatctggagcctagccaccatccctctgcctttgaaacagaaacgtcaagcgattgggatcctcctgcagaaagtcaagaacgcgcaagccctagcaggcctgcgaccccagctcccgtcctaggtaaagccctggttaagggtctgcacgattctcaaaggttacagtgggaggtaagttttgagctgggaactccaggaccagaacggggcggagcacaagacgccgatttgtggtccgagaccttccatcacttggccgcacgggcaatcatcagggatttcgaacaactcgccgaacgcgagggagagatagagcagggttcaaaccgccggtatcaagtgtccgcactacatacatctaaagcatgcaatataattagtaagtataccgcattcgtcccagtcgatgtcagcaaatcgagatatcttccgacagtggtggagtatccgaattcagccgccttaagaatgttagggtcacgagcactcgcccaacaatggagaggcacatcatccggcttcgggagacctcaaaccatgttaggtgaagactcagcacctggcaatggcccacgaaagtgcagtcaaactttgatggggtttaagacaaaaacagagactgaacactccgtaagggggtggaaaccacgaggcgccttacaaaatcaatctgtgctctctacctcctggtcccactggccccccaagccccgtagaacgtcctcgacccctgaaccctcctag

SEQ ID NO: 14102 - RNA, 3663 nt, synthetic construct
  misc_feature 1..3663: note = source = /note="Description of Artificial Sequence: Synthetic coding sequence"
  source 1..3663: mol_type = other RNA
atgccgggcctgctgaattggataaccggagctgctctgccattgacggcatccgacgtcacgtcctgcgtctcgggctacgccttagggcttactgcttcactaacatacggtaatttggaagcccagcctttccagggattattcgtgtaccccctggatgaatgcactacagttattggttttgaagccgttatagccgacagagtggtgaccgtacagatcaaggacaaagccaaacttgaaagcggacatttcgatgcttctcacgttcgctcgccaacggtgactgggaatattttgcaggacggtgttagtattgctccccactcctgtacccctgggaaggttactcttgacgaggacctggaaagaattctgtttgttgccaatttagggactattgcccccatggaaaatgtgacaatcttcattagcactagtagcgaactcccaacactgccaagcggcgcagtgcgagtcttgctgccagccgtctgcgccccaaccgttccacagttctgcactaaaagtaccggcaccagcaatcagcaggcacagggcaaagacaggcattgctttggcgcatgggcacccggctcatggaacaaactgtgcttagccacactcttgaataccgaagtttctaatcccatggagtacgaatttaattttcagctggaaatccgaggaccatgcctactggcaggcgtggagtcacccacacacgagatacgagccgacgcagctccttctgccaggtccgccaaaagcataatcattactttggccaataaacacacctttgataggccggtcgagatccttatccacccatctgagccacacatgccacacgtattgattgaaaagggagatatgacattgggagagtttgatcagcatttgaaaggcaggactgactttattaaagggatgaagaagaaatccagagccgagcggaagacagaaatcataaggaaaagactgcacaaggacataccccaccactctgtgattatgctaaatttctgccccgacctacaaagtgtacagccatgcctccgaaaggcccacggagagttcattttcctgattgaccgtagttcctcaatgtcagggatctcaatgcacagagtgaaagacgcaatgcttgtggccctcaagagtctgatgccagcttgcctattcaatatcattggcttcggtagcacattcaagagcctgtttccaagctctcagacatattctgaagatagcctggcaatggcttgcgacgacatacagcggatgaaggcggatatgggcggcacaaatatactaagtcctttgaagtgggtgatcaggcaacccgtccaccgcggacatcctcggttactcttcgtgatcacagatggagcggttaacaataccgggaaggtcctcgagcttgtaagaaaccacgcattctcgacgcggtgctactctttcgggattgggccaaacgtttgtcataggcttgtaaagggcctcgcgtcagtatccgagggatccgcagagctgctaatggagggagagcgcttgcagcccaaaatggttaagtccttgaaaaaagccatggcaccagtgctaagtgatgtcaccgtagagtggattttccctgagaccacagaagtgctagtgtcccccgtgtcggctagtagtttgtttcccggagaaagactggttggttacggaatcgtttgtgatgcatctctgcacatctctaaccccagaagcgataaacgaaggcgatattcgatgctgcactcacaagagtccggaagttcagttttttaccattcccaggatgatggcccaggcctcgaaggaggtgactgtgccaaaaactccggagctccattcatcctcggccaagccaagaacgccagactcgcctcaggagacagcactacaaagcatgacctcaacctcagccaaaggagacgagcgtattcaactaaccagattactaatcataagccactaccacgcgccacaatggcttccgatcccatgcctgccgccaaacgttatcctctgaggaaggcaagactccaggatcttaccaaccagacaagcctcgacgtccagcgctggcaaatagacttgcaaccacttctcaactcaggccaagacctgaaccagggacctaagctccggggacctggggctagaagaccgtcattactgccacagggctgtcaaccttttcttccctgggggcaagaaacacaggcatggagtcccgtgagggagaggacctccgactcccgatctccaggagacctcgagccgtcgcaccacccgtccgcctttgagacagagacctcctccgattgggacccccctgcagagtcacaagagagagccagccctagtcgaccagctactcccgcccccgtgctgggtaaagccctagtcaagggcctgcacgatagccaacgattacaatgggaagtttctttcgagctaggcacacctggccctgaacgaggcggcgcacaggatgcagatttgtggagcgagacctttcatcacttggcagctcgcgccatcatcagggattttgagcagctcgccgaaagagagggcgaaattgagcaaggcagcaacagaagatatcaggtcagcgccctgcacacatctaaggcttgtaacatcattagcaaatacaccgccttcgttcctgttgatgtgtccaagagccgctatcttcctacagtcgtggaataccccaactccgccgctttgagaatgctgggttcgagagctcttgctcaacaatggcggggcactagctccggatttggaaggcctcagacaatgttaggcgaagattctgcccctggcaatggcaagttccaagcacttaacatggaagctagcccaaccgccttgttttcagaagccagaagccccggcagggaaaagcatggagccagtgaaggtcctcagaggtctctggccaccaacacactgagtagtatgaaagcctctgagaatctgttcggatcgtggctgaacctgaacaaatccagattgctgacccgggctgcaaaagggtttcttagtaaacctctgatcaaagccgtggaatccacctctggtaatcagtcttttgactacatcccgctagtctccctacagctggccagtggggcatttctgttgaacgaagctttttgtgaagccactcatatccctatggaaaaactgaaatggacaagccctttcacatgccatcgagtgtcacttacaacccgaccctccgagtcaaaaactccctccccgcagctctgtacatcctccccccctagacatccatcttgtgactcatttagcctggaacctcttgcaaaaggcaaattgggcctggagccaagagccgttgtggagcacacaggaaaattgtgggcaacagtagttgggcttgcctggctcgaacattccagtgcctcatactttactgaatgggaattggtcgccgccaaggccaactcctggctcgagcagcaagaggtgccggaaggacggacacaaggtacactaaaggctgctgctagacaactattcgtgctgcttagacattgggatgaaaacctagaatttaacatgctctgctacaaccctaattacgtatag

SEQ ID NO: 14103 - RNA, 5235 nt, synthetic construct
  misc_feature 1..5235: note = source = /note="Description of Artificial Sequence: Synthetic coding sequence"
  source 1..5235: mol_type = other RNA
atgcggctgctatggggactaatctgggcctctagtttttttacattatcactgcaaaagccgagactcttgctcttttcaccgtcggttgtgcatctgggtgtccctctgtcagtgggggttcaactgcaggacgtacctaggggccaggtggttaaggggagcgtgtttctgcgcaacccctcccgcaataacgtgccatgctctccaaaagtagattttacgctctctagcgaaagggactttgcattgctctccctacaagtgccattaaaagatgccaagtcttgtgggctccatcaacttttgcgcggccccgaggtacagttggttgcccatagtccgtggctgaaggactccctatccagaaccacgaacattcaggggataaatttgctattttcaagcagacgcggacatctattcctacagacagaccagcccatctataatcctggccagagggtccggtaccgagtgtttgccctcgatcagaaaatgcgtccttccacagataccatcaccgtgatggttgagaactcccacggcttaagagtccgcaagaaagaagtgtacatgcctagtagcattttccaggatgactttgtgatcccggacatatctgagcccgggacctggaagatatcagcccggttttctgacggtctcgaatcaaactcctccacacaattcgaagtaaaaaaatatgttctgcctaactttgaagtgaagattacccctggtaaaccttacatactgacagtcccaggacaccttgatgagatgcaactggacatccaggccagatacatttacggaaagcctgtacagggagtggcgtatgtgcgcttcggcctcctggacgaagacggaaaaaaaacattcttccgcgggttagagtcccagacgaaactcgtgaacggccaatctcacatctccctttccaaggcagaatttcaggatgcattagagaaactaaatatgggaattactgatctacagggcctccgcctttatgtagctgctgccataattgagtatcccggaggagagatggaggaagctgaactcacttcctggtatttcgtctcctctcccttcagtttggatttatctaaaacaaagcgccaccttgtccctggggcgcctttccttcttcaagcactggtccgagaaatgtccggctccccagcctccgggattcctgtgaaagtaagcgcgaccgtcagttcccctggctcggttccagaggtgcaggacattcagcaaaacacagatggatcaggacaggtctcaatccccatcattattccacaaacaataagtgagctgcagctttccgtttctgcaggatccccgcaccctgcgattgcacgtttgactgtggcagcaccgcccagtgggggacccggatttctctctattgaacgtcccgattccaggccgccccgtgttggcgacacactgaatctcaacctgcgggcagtcggttctggtgccacattcagccattattactatatgattttaagccgcgggcaaatcgtattcatgaatcgagaaccaaaacgaacccttacttcagtgtcagtatttgtcgatcatcacttagccccttccttttatttcgtcgccttttactaccatggggaccatcctgtcgccaactcactgcgcgtagatgtgcaagcaggggcctgcgaaggcaaattagagctgtctgtcgatggtgccaaacaatatagaaacggcgaaagcgtgaaacttcaccttgagacggatagcctggcactcgtagcacttggtgctcttgataccgcgctgtatgcagctggcagtaaaagccacaagccattaaatatgggaaaagtatttgaggctatgaacagttatgacttaggatgcggacccggggggggcgattccgctctacaggtgttccaggctgccggactggcattctccgatggtgatcagtggactctgtccaggaaacgactaagctgccctaaagaaaagaccacaagaaaaaagagaaatgttaactttcagaaggcaatcaacgagaagctggggcaatacgcttcccctaccgctaaacgatgttgtcaagacggagttaccaggttgcctatgatgagatcctgcgagcagagagcagcaagagtgcagcagcccgattgcagagagccttttctgtcctgttgccagtttgctgagagtctacgtaagaagtccagagacaagggacaggctgggttacaacgagctctcgagattttgcaggaagaggacctcattgatgaggacgatataccggttcgatctttctttcctgagaactggctgtggcgtgtggaaacagtggatagatttcagatcctgacactgtggctgcccgatagtttaacaacttgggaaatacatggactgtcgctgagtaaaacaaagggactgtgcgttgcgaccccagtccaactccgagttttcagagaattccatctacaccttcgattgcccatgtcagtgaggcgctttgagcagctcgagctgagacccgtgctctacaactacctggataagaacctgactgtgtccgtgcacgtctcaccagtggagggtttatgtctcgccgggggcggaggcctggcccaacaggtgctggtccctgctgggtctgcaagacccgtggcctttagcgtggtgccgacagctgcggcggcagtctcccttaaagtagtagcccgagggtcctttgaattcccagtcggtgatgccgtgtcaaaggtgctgcaaatcgagaaagaaggagcaatccaccgtgaagaacttgtctatgaactgaacccacttgaccatcgcgggcggacgctggaaatcccaggcaattccgacccaaatatgatacccgacggcgactttaacagttatgtcagagttactgcatccgacccactcgatactttgggaagcgagggtgccctttcacctggaggggtcgccagtttgctgaggcttcccagaggttgtggggaacagacaatgatctatttggctccaacactcgccgctagccgttacttagataagacagagcaatggtcaacgttaccaccagaaactaaggatcatgccgtcgacctcatccagaagggctatatgagaatacaacaatttaggaaagcagacgggagctacgctgcatggctctcgcgggggagtagtacctggctgacagcctttgtccttaaagtcctttctctcgcccaggagcaggtgggtggctctcccgagaaacttcaagagacctctaactggttgctgagccagcagcaggctgacggatcctttcaggacctgagtcccgtgatccaccgcagcatgcaggggggactggtgggtaacgacgaaactgtggcattaacagcatttgtgaccatagcactgcatcatggcctggccgtgtttcaggatgaaggagctgagcctttgaagcaaagagtggaggcatctatctcgaaagcgtcctcctttttgggtgaaaaggcaagtgccggcttattgggtgcgcatgccgccgcaataactgcttatgcattgacgcttactaaagctccagccgacctgcgcggggtagctcacaacaacctgatggcgatggcacaggagaccggagacaatctctattggggctcggtgacaggaagccaatccaatgcagtgtcaccaaccccagctcctagaaatccgtccgaccctatgccccaagccccagctctttggatagagactacagcatacgccctcctccacctgcttctccacgagggaaaagccgaaatggccgatcaggcagctgcttggcttacacgacagggctcttttcaaggcggctttaggagtacacaagataccgtcatagctttagatgccctgtctgcctattggatcgcatcacacacaactgaagaacggggcttaaatgtaaccctgtctagcactggccgcaatggctttaaatcccacgccctgcaactgaacaacagacagatacggggcctagaagaggagctacaattcagcctcggctccaaaatcaatgtcaaagtcggggggaactccaaggggactctgaaagtactacgaacttacaacgtacttgacatgaaaaacaccacctgccaggatctgcagatcgaagtgaccgtcaagggccacgtggaatacactatggaagctaacgaggactatgaggattacgaatacgacgagttacctgccaaagacgatccagatgctccccttcagccagtcactcctttgcaactgtttgaagggagaaggaatcgaagacgtagggaagcgcctaaagtcgtggaggaacaagagtcaagagtgcactataccgtgtgtatatggagaaacggcaaagttgggttgtccggaatggccattgctgatgtcacccttctcagtgggttccatgcattacgagccgatctcgagaagttaacttcactaagcgatcgatacgtatcacatttcgagaccgaaggaccacatgtacttctctacttcgattctgtccctacttcaagagaatgcgtggggtttgaggcagtccaggaagtccctgtgggcctggtgcagcctgcctctgccacactgtacgactactataacccagaacgccggtgttcagttttttatggcgctccctcaaaatctaggttactcgccacgttatgcagcgccgaagtctgtcaatgtgcagaaggaaagtgccccaggcaaaggcgcgccttggagcgtgggcttcaggatgaggacggctacagaatgaaattcgcttgctactacccacgggttgaatatggcttccaggtcaaagtactcagggaggatagtagagccgcctttcgcttattcgagactaagatcacacaggtgcttcactttaccaaagacgttaaagccgccgccaaccagatgagaaacttcctagtcagagctagctgccgattacgccttgaaccggggaaggaatatttgattatggggctggatggcgccacatatgaccttgaagggcatccccaatatttgctggactccaattcctggattgaagagatgcctagcgaacggttatgtcgatccactcgtcaaagagcagcctgcgcacaactaaacgactttctgcaagaatacggaacacaaggttgtcaggtttag

SEQ ID NO: 14104 - RNA, 1242 nt, synthetic construct
  misc_feature 1..1242: note = source = /note="Description of Artificial Sequence: Synthetic coding sequence"
  source 1..1242: mol_type = other RNA
atgaaaggagcgctgggctcacctgtcgcagcagcaggcgccgcaatgcaggagtccttcggctgtgttgtggctaatcgattccaccagctcttggatgatgagtcagacccattcgatattttgagagaagccgaaagacggagacagcagcagctgcagaggaaacggcgagatgaggctgcagccgcagcaggggctggaccacggggtggaagaagccccgcgggggcctctggacaccgggccggagcaggaggtagaagggaatcccagaaagaacggaaatcactgccagcccctgtagctcaaagacctgattcaccggggggaggattacaagctccaggtcagaagaggacaccacggcgaggcgaacaacagggctggaacgacagtaggggtccagagggtatgcttgaaagagcggagaggcgaagttatcgcgagtaccgcccctacgaaaccgagcgccaagcagacttcacggccgagaagttcccagacgagaaaccaggcgatagatttgatagggaccggccgttgcgtggccgaggaggacccaggggtgggatgagaggcagggggaggggggggcccgggaatagggtttttgatgcatttgaccagcgaggcaagagagagtttgaaagatatggaggtaatgataagatcgccgtgaggaccgaagataatatggggggctgcggggtccgtacttggggctctggaaaagacacatccgacgttgaacctactgcaccaatggaagagcctaccgtcgtggaagagagccagggcacccctgaagaagaaagcccagctaaggtaccagagcttgaagtcgaggaagagacgcaggtacaggagatgactttggatgaatggaagaatctgcaggaacagactagaccgaaacccgagtttaatatcaggaagcctgagtctacagtaccatctaaagccgttgtgatccataaatcgaaatatcgcgacgacatggtgaaggacgattacgaggacgattcacatgtatttcggaaacctgctaatgatatcactagccaattggagatcaatttcggtaatttgcccaggccaggcaggggcgcaagaggtggcaccagaggaggccggggaagaatacgtcgagccgaaaattatggacctagagccgaagtcgtgatgcaggacgtggcgcccaacccagatgaccccgaagatttccctgctctatcctag

SEQ ID NO: 14105 - RNA, 927 nt, synthetic construct
  misc_feature 1..927: note = source = /note="Description of Artificial Sequence: Synthetic coding sequence"
  source 1..927: mol_type = other RNA
atgaaaggtgcactcgggtctccagtagctgcagccggcgccgcaatgcaggaatccttcggatgcgtggtggccaatagatttcaccagttgctggacgacgagtcagatccattcgatattctgagagaggcggagagaagaagacagcagcagctgcagagaaagcgcagagatgaagccgcagcggccgcgggcgcaggaccacgcggggggcgatctccagccggggcatccggccaccgtgccggcgccggtggccggcgtgagtctcaaaaagaaagaaaaagccttccagccccagtggctcaaagacccgactctcctggaggaggccttcaagcgccaggccagaagagaactccaaggagaggagaacagcaaggatggaatgacagtagaggacccgaaggaatgttagagcgagcggaacgcaggtcatatagagaatacagaccttatgaaaccgagagacaggctgatttcactgccgaaaaattcccagatgagaaagttccggaattggaagttgaggaggaaacacaggttcaggagatgactttggacgaatggaaaaatctgcaggagcagacgcgcccaaagccagaatttaacattagaaaacccgaatcaacggttccaagcaaagctgtggttattcataaatccaagtatcgcgatgatatggtgaaagatgactatgaggatgatagccacgtgttccggaaacctgccaatgatatcacgtcccagttggagattaatttcggtaacctgccgcgcccagggaggggcgcacggggaggtacaagaggcggcagaggtagaatcagacgagccgagaactacggaccaagggcagaagtggtcatgcaggatgtggctcccaacccagatgatcctgaagattttccagccctgagttag

SEQ ID NO: 14106 - RNA, 1437 nt, synthetic construct
  misc_feature 1..1437: note = source = /note="Description of Artificial Sequence: Synthetic coding sequence"
  source 1..1437: mol_type = other RNA
atgccccggaggggatattctaagccggggtcatggggatccttctgggctatgctgactctggtaggcttggttactcatgctgctcaaagggccgacgttgggggagaagccgctgggacgtcaataaaccacagtcaggccgttttgcaaagactgcaagagctgttaagacaggggaatgcatccgatgtggtgctgcgcgtccaggcagcaggaactgatgaggtgcgcgtgttccacgctcaccgtttgctcctgggacttcactctgagttgtttttagaactgttaagtaatcaatccgaagctgtgctgcaggaaccccaggactgcgccgctgtgttcgacaagtttatcagatatttgtattgtggagagttgactgtgctcctgacccaagctattcccctgcatcggttagctactaaatacggagtctccagcctccagcggggcgtcgccgattacatgcgagcccacttagccgggggtgctggtcccgctgtaggatggtaccactacgctgtgggtaccggggacgaagcactcagagagtcatgccttcaattcttagcttggaacctctctgctgtcgccgcatctacagaatggggggccgtcagtcccgaattactctggcagctgctacagcgctcagatcttgtgttgcaggatgaactcgaattattccacgcactagaggcttggctgggcagggctagacccccaccagctgttgctgagcgcgctctgagggcaatccggtaccctatgatccctcccgcccaactgtttcaacttcaggcccgatctgcagccctagctagacatggccctgccgtggccgatttactgctgcaggcttatcaatttcacgccgcttcacctcttcactatgctaagttctttgacgtcaacgggtcagctttcctccccagaaactacttagctcccgcctggggcgccccttgggttattaacaatccggctagggacgaccgcagcacttcttttcagacacaattgggaccttcaggccatgacgctgggcgtcgtgtgacctggaatgtactgttctcaccaagatggttgccagttagcctacgacctgtgtatgccgacgccgctggtaccgctctgccagcagctaggccagaagatggtcgaccaagactggtcgtgactccggcctcctctggaggcgacgcggccggggtctccttccaaaagacagttctagtaggcgctaggcaacaaggcaggctcctagtgcgacacgcatattctttccatcagtcctccgaagaagccggagacttcctcgcccacgctgaccttcagagaagaaattccgagtatctcgttgaaaatgccctgcatctgcatctcattgtgaagccagtctaccacaccctcattagaacgccaaagtag

SEQ ID NO: 14107 - RNA, 477 nt, synthetic construct
  misc_feature 1..477: note = source = /note="Description of Artificial Sequence: Synthetic coding sequence"
  source 1..477: mol_type = other RNA
atgtgttgtccaggcggccattataccttgatcctgagaaggggaaatagatttagacgagagaagcgccctgccaaggtcactggagctcaaaccgaggtgcagctcgctcctcccctgccccgcggccgtgccagacgaagcccttggtcagtcccaatcagcttaagcatcgaccggctggagtttgatctactgtatcccgctatcaagggggacacaattcagttatacctgggggcaaagcttttggattcgcagggcaaggtcacgaagtggtttaacaactctgctgcatcactcaccatgcccaccttggacaatatacccttttctcttattgtgagtcaagatgtagttaaagctgcggtcgccgctgttctgagtcccgaagaattcatggtgctactagacagtgtccttcccgaatccgcccatagattaaaatcatcaataggactgataaatgagaaatag

SEQ ID NO: 14108 - RNA, 771 nt, synthetic construct
  misc_feature 1..771: note = source = /note="Description of Artificial Sequence: Synthetic coding sequence"
  source 1..771: mol_type = other RNA
atgttccagactgggggcctgatcgttttttatggccttcttgcgcaaaccatggcgcagttcggaggcttgcccgtgcctctggatcaaaccctgcccctgaatgtcaatcccgcacttccgctgtcacctactggcttagcagggtcattaactaatgccttatcgaacgggttactaagcggcggcctcttaggtatactggaaaacctacctctcctggacatcctgaaaccgggaggcggaacctcagggggcttgctgggcggtttattggggaaagttacatcagttatcccagggttaaataacattattgacattaaggtaactgacccacagttgctagaattagggctggttcagtctccagacggccacagactgtatgttaccattccactaggtatcaagcttcaagtgaacacgcctctagtgggcgcctctttgttgcgcctcgccgttaaactagacatcacagcagaaatcctagccgttcgggacaaacaggaacgtattcacctggttctcggtgactgcacccactctccagggtctctgcagatttcactcttggacggcctcggcccgctgccaatacaagggctcctcgactcgctcactggaatactcaacaaggtcctgcctgagctggtgcagggaaatgtgtgtcctctcgttaatgaagtgttgcgcggattggatattaccctggtgcacgatattgttaatatgctaattcacggattgcagtttgtcataaaggtatag

SEQ ID NO: 14109 - RNA, 771 nt, synthetic construct
  misc_feature 1..771: note = source = /note="Description of Artificial Sequence: Synthetic coding sequence"
  source 1..771: mol_type = other RNA
atgttccaaacaggagggctcatcgtgttctatgggctcctggcccagactatggctcaatttggagggctgcccgtacccttagaccagacgctcccacttaatgtcaacccagcgctaccactgtccccaaccggacttgctggatctctgaccaacgccctgtccaacggcctgctgtcggggggtcttcttggtattctggaaaatttaccactgctggacattttaaagccaggcgggggaacatctggcggcctgctcggcgggttactcggaaaagttaccagtgtaattcctggattaaacaacatcattgacattaaagtaactgaccctcaattactggagctgggacttgttcaatctcctgacggacacagactttacgttaccatccccctgggaatcaagctccaggtaaacacccccctcgtcggcgcaagtttgcttcgcctggccgttaaactggatatcaccgccgaaatccttgcagtgcgtgataagcaagagaggatacacttggtacttggagattgtactcactctcctggatctctgcagatctctcttttagatgggctggggcctctgcctatccagggattgctggattctctgacaggtatcctaaacaaagtgctgcctgagctcgtgcaaggaaacgtctgccccctggttaatgaagtcttgaggggtctggacataacattagtacacgatattgtcaatatgctcatccatggactacagtttgtcattaaagtgtag

SEQ ID NO: 14110 - RNA, 657 nt, synthetic construct
  misc_feature 1..657: note = source = /note="Description of Artificial Sequence: Synthetic coding sequence"
  source 1..657: mol_type = other RNA
atgatgtgtcctctgtggcgtcttctcatttttctcggtcttctggctttgcccctcgccccacataaacagccctggcccgggttggcccaggcccatcgcgacaataagtctactctagcccgaataattgcccagggattgattaaacacaatgccgaatctagaatacaaaatattcactttggagatcggcttaatgcatccgcccaggtggcaccaggcctcgtgggttggctaatcagtggacgaaagcaccagcagcagcaagaaagcagatccttcgacaataatatagtgaaaatgtgtgcccatatgtcaattgtcgtagagttctggctggagaaggacgaattcggacgccgcgacctagtgatcggaaaatgtgatgctgagccctcaagtgtacacgtggccatcctgactgaggcaatcccaccaaaaatgaaccagtttttatataacctcaaggagaacttacagaaggttttacctcacatggtcgagagccaggtttgcccccttataggcgaaatcctgggccagttggacgtgaagctgctgaagtccctgatagagcaagaagccgcccatgaaccaacacaccatgaaacctctcaacccagtgcttgtcaagccggcgaatctccatcctag

SEQ ID NO: 14111 - RNA, 765 nt, synthetic construct
  misc_feature 1..765: note = source = /note="Description of Artificial Sequence: Synthetic coding sequence"
  source 1..765: mol_type = other RNA
atgatgtgtcccctttggcgactgctcatttttttaggccttctggcactgccccttgctccccataaacaaccttggccggggctcgcccaagctcatagagataacaaatcgaccctagcgcgcatcattgcacagggcctgatcaagcataacgcagaaagtcgaattcagaatatacacttcggcgacaggttaaacgcatcagcacaagtagcccccggcctggtgggctggctgataagcggccgaaaacaccagcagcaacaagagtcctctatcaacatcactaacatccaacttgattgtggcggcattcaaatatccttccacaaagagtggtttagcgccaatatcagtttagaatttgaccttgaacttcgaccaagctttgataacaatatagttaaaatgtgtgctcacatgtcaattgttgtggaattctggctagagaaagacgagtttgggcgccgagacttggtgataggcaaatgcgacgctgaacccagttctgtgcatgtcgctatcctgacagaagcaatcccccccaagatgaatcagttcctgtataacctgaaggagaacctgcaaaaagtactgccacacatggtcgagtcacaggtgtgccctcttattggcgagatcttaggccagctggacgttaagttattgaagagccttatcgagcaggaggccgctcacgaacctacccatcacgagacttcacagcccagtgcgtgtcaagcaggggagagcccatcctag

SEQ ID NO: 14112 - RNA, 1635 nt, synthetic construct
  misc_feature 1..1635: note = source = /note="Description of Artificial Sequence: Synthetic coding sequence"
  source 1..1635: mol_type = other RNA
atgaaaatcagtatgattaactataagtccctcctggccctcctcttcattctggcatcatggatcattttcaccgtgttccagaactcaactaaagtgtggtcggctctcaacctcagcatttccctccattactggaacaattcaacaaaatctttattccccaaaacacctctgatttctctgaaaccattaacagagactgaactcagaataaaggagattatcgaaaaactagaccaacagattccacctcgtccatttacccatgtcaacactacaacatcagctacccacagtactgctaccattctgaaccctagagacacctactgccggggcgatcaactccatatattgctagaagtgcgggatcatctcggtagaagaaagcaatatggtggcgattttcttcgcgctcggatgagttctcccgctctaatggcaggcgccagcggcaaagtcactgactttaataatgggacttatttggtttccttcacgcttttctgggaagggcaggtttccctgagcctgttgctcatacacccatccgaaggtgttagcgcgctttggagtgccagaaatcaaggctacgacagagtgatcttcactggacagttcgtcaacggtacgtctcaggtccacagcgaatgcgggcttatactgaatacgaatgcagaactgtgtcagtacttggacaaccgggaccaggaaggtttctactgcgtgcgacctcaacacatgccatgtgctgcccttacacacatgtacagcaaaaataaaaaagtttcgtaccttagtaagcaggaaaagtcattgttcgagcgatccaatgtgggcgtagaaattatggaaaagtttaacacgatctccgtctctaagtgcaataaggaaactgtggctatgaaagagaagtgtaaatttgggatgacatccactatcccatctggacatgtgtggcgaaacacctggaatcccgtctcctgctccctggcgaccgtcaaaatgaaagagtgtttgaggggcaaactgatatatcttatgggcgatagcacaatcagacagtggatggaatacttcaaagcctccatcaatacattaaaatcagtggatctgcatgaatctgggaaactccagcaccagctcgcagttgatttagatcggaatattaatatccaatggcaaaagtactgttaccctttaatcggatctatgacttattcagtgaaagaaatggagtaccttacccgggccatagatagaacaggcggggagaaaaataccgttatcgtgatttccctgggtcagcactttcgcccctttcccatcgacgtatttataagacgtgccctaaacgtgcataaggccatccagcacctcctgttgagaagtccagatacaatggtgatcattaagactgagaatatccgcgagatgtacaacgacgctgaacgcttttccgacttccatggctacatccagtacctgattataaaggacatttttcaggacttatcagtcagtattatcgacgcctgggatatcaccatcgcctacggtactaataacgttcaccccccccaacacgtcgtcggcaaccagatcaacatcctgctaaactatatttgttag

SEQ ID NO: 14113 - RNA, 1845 nt, synthetic construct
  misc_feature 1..1845: note = source = /note="Description of Artificial Sequence: Synthetic coding sequence"
  source 1..1845: mol_type = other RNA
atgtggatggcatggtgtgttgccgccctgtctgttgttgcagtatgcgggacttcacatgagaccaatactgttctgagggtgaccaaagatgtcttatcaaatgccatctcaggaatgcttcagcagtccgacgccctgcactcagctttacgtgaagtaccactcggtgtaggtgacattccctacaacgacttccacgtgaggggaccacctccagtctacactaacgggaaaaaactcgatggcatctaccagtatggccatatcgaaaccaatgacaataccgctcaactgggcggaaagtaccgatatggggagatcctggagtccgaaggttctataagagacttaagaaacagtgggtatcgttcagccgagaatgcgtatggcggacaccgtggcctgggaaggtatagggctgcacctgtgggaagactccacagaagagagcttcagcctggagagattcctcctggagtcgccactggcgcggtggggcctgggggactgttggggaccggcggcatgttggccgcagacggaatcttggccggtcaggggggcctattagggggcggtggtcttctgggtgatgggggtcttcttgggggaggaggggtcctcggagtcctgggcgaggggggtattctgtctactgtccaaggcattaccggcctacgtatcgttgaattaaccctgccgagagtgtcagttaggcttctgcctggggttggcgtctacctgtccctatacactagagtcgccatcaatgggaaaagcttaatcggattcctggatatagccgttgaggtcaacatcactgctaaggtacgcctgacaatggatagaaccggctaccccaggctggttatagagagatgtgatacattgctaggaggcatcaaagtgaaattactcagaggactgctgcccaacctggtcgacaatctggttaatcgcgtcctggccgatgtgttacctgacctgctgtgcccgatcgtcgacgtcgtgcttggcctggtgaatgaccagctcgggctagttgatagcttaattccacttggcattctcggctccgtgcaatatacttttagtagtctgcctctcgtaaccggagaatttttggaattggacctcaatacactggtgggagaagccggcgggggactgattgactaccctctcggatggccggctgtgagcccaaaacccatgcccgagctgccacccatgggagacaacactaagtcccaattggctatgtctgctaattttctcggctccgtgctcaccctccttcaaaaacaacatgcactggacctcgatataactaatggcatgtttgaagaacttccaccactgaccactgccaccctcggtgctcttatacccaaagtttttcagcaatatccggaatcttgcccactgatcatccgtattcaggttctcaacccgccctcagtgatgctccagaaagacaaggccctggtcaaggttttggctaccgctgaggtgatggtgtcacagccaaaggacctggagacaacaatttgtctgatcgacgtggacacagaattcctagccagcttctcgacagagggtgataaacttatgatagatgctaagttggagaaaacctcattgaatctaaggacctccaacgttggaaatttcgatattggtctgatggaagttctcgtggaaaaaattttcgatctcgcgtttatgcctgctatgaatgccgttttagggtcaggcgtgccactcccgaaaatccttaacattgacttctccaatgctgatattgacgtactggaagatctgcttgttctgagcgcttag

SEQ ID NO: 14114 - RNA, 1431 nt, synthetic construct
  misc_feature 1..1431: note = source = /note="Description of Artificial Sequence: Synthetic coding sequence"
  source 1..1431: mol_type = other RNA
atgcagcctgttatgctcgccttgtggtctttgctgctgctttggggcctcgcaactccttgtcaggaactgcttgaaaccgtagggaccctcgctcgaatagacaaagacgaacttggtaaagctatacagaactcactcgtaggagagcccatcctacagaatgtactgggatccgtgactgcagtaaatcgtggattactgggatccggcgggctgctcggcggcggggggctattaggccacggaggagtgtttggggtggtggaggagctgtccggcctcaaaatcgaggaattaaccctgcctaaagtcctcctcaaattattgccgggattcggtgtccagctcagtctgcatactaaagttggaatgcattgcagtgggcctttgggcggtctgctgcagctggccgccgaagtcaacgtgacatcaagggtcgcattagccgtcagtagccggggtacacctatccttattttgaaaagatgtagcacacttttaggtcatataagcctcttctcaggacttctccccactcctctgtttggtgttgtagagcagatgttgtttaaggtgcttcctggcctgctctgtccagtcgtcgatagcgtgctgggggtagtgaacgaactccttggagctgtgttgggactagttagtctcggtgccctgggatccgtggaattttctcttgccaccttaccccttatttccaaccaatatatcgagctggacataaatccaatagtgaaatctgtggctggcgacattatagactttccaaaatcaagggctcctgccaaggtccctccaaagaaagaccatacatcccaggtaatggttccactctacctcttcaataccaccttcggtctgttacaaactaatggtgcactggacatggatatcacacctgaactggtcccttctgacgtacccttgactaccaccgacctcgctgccctattacctgaagccttgggaaagctgcccttgcatcagcaactattattgtttcttcgcgtgcgcgaggcccctaccgttaccttacacaataaaaaagccctcgtgtctctgcccgccaacattcatgtccttttctatgtccccaagggcactcccgagtccttgttcgaactgaattcagtgatgaccgtccgcgcccagcttgccccctccgccacaaagctccacatcagcttatcattggaaagactgtcggtgaaggtggcaagctccttcactcatgctttcgacgggtctaggttagaggaatggttgtcccatgttgtcggcgcagtatacgctccgaaactaaatgtagctctggacgtcggcattcccctcccaaaagtgcttaatattaacttttctaattcggtgctcgagatcgtggagaacgccgtggtactcacagttgcctcatag

SEQ ID NO: 14115 - RNA, 585 nt, synthetic construct
  misc_feature 1..585: note = source = /note="Description of Artificial Sequence: Synthetic coding sequence"
  source 1..585: mol_type = other RNA
atgcaagacgcacccttgtcatgtttgagtccaactaaatggtcatctgtcagctccgcggactctactgaaaagtccgcaagtggcgctggaactcggaacctgcccttccagttttgcctccgtcaagcgttacgaatgaaagccgcaggtatcctcactcttattggttgtcttgtgaccggagccgagtcaaaaatctatacaagatgtaagctagcaaaaatcttctctcgagccggtctggacaattactggggcttttccctgggaaattggatttgtatggcgtactacgaaagtggttacaacacaacagctcaaactgtactcgacgacggcagcatagactacggcatctttcagattaatagctttgcctggtgccgacgcgggaaactgaaagaaaataatcactgtcatgtggcttgttcggcgctgattacagatgacctgacagacgctataatctgcgcaagaaaaattgtgaaggaaacacaaggtatgaactattggcagggatggaaaaagcattgcgaaggaagagacttgtccgaatggaaaaaaggatgcgaggtgagctag

SEQ ID NO: 14116 - RNA, 1266 nt, synthetic construct
  misc_feature 1..1266: note = source = /note="Description of Artificial Sequence: Synthetic coding sequence"
  source 1..1266: mol_type = other RNA
atgggattcttgtcacccatttatgtcatcttctttttcttcggagtcaaagtacactgtcagtacgaaacttaccaatgggacgaggactacgatcaagagccggacgacgattaccaaacaggatttcccttcagacagaacgttgactatggagtgccatttcatcagtacaccctcggctgcgtaagcgaatgcttttgccctactaacttcccgtcttccatgtactgcgacaacagaaagctgaagacaattccaaatattcctatgcacatccagcagctgtacctccagtttaatgaaattgaggccgtgacggcgaattccttcatcaatgctactcacctgaaggagatcaacctttcgcataacaagattaaatcccaaaaaattgactatggcgtgtttgccaaattacccaatctgttacaactgcaccttgaacataacaacctggaggaatttccattccccctacccaaaagcttagagcgacttctactagggtataatgaaatctcaaagcttcagactaacgcaatggatggactcgttaatctcacaatgctcgacctatgctataattacctccacgactccctcctaaaggacaaaatcttcgccaagatggaaaaactgatgcaactaaatttatgcagcaataggctggaatcgatgccacccggactgccttcctccctcatgtatctctcacttgaaaacaactctatctcatctataccagaaaaatatttcgataagctgccaaaactgcacacattgagaatgagccacaataagctgcaagatatcccgtataacatatttaacctcccaaacatcgtcgagttgagtgttggccataataagctgaagcaagccttctatattcctagaaatctggaacatctttaccttcagaacaacgagatcgaaaagatgaatcttactgttatgtgcccgtcaatcgatcccttgcactaccatcacctaacatacattcgggttgatcagaacaaacttaaggaacctatttcttcatacatctttttctgctttcctcacatccatacgatctactacggggaacagcgctcgacaaacggccaaactattcaactcaagacacaggtatttaggcgttttccagacgatgacgatgagtctgaagaccatgacgaccctgacaatgctcacgaatcacccgaacaggagggagccgagggccattttgatctgcactattatgaaaaccaggagtag

SEQ ID NO: 14117 - RNA, 252 nt, synthetic construct; identical to SEQ ID NO: 12478
  misc_feature 1..252: note = source = /note="Description of Artificial Sequence: Synthetic coding sequence"
  source 1..252: mol_type = other RNA

SEQ ID NO: 14118 - RNA, 2559 nt, synthetic construct
  misc_feature 1..2559: note = source = /note="Description of Artificial Sequence: Synthetic coding sequence"
  source 1..2559: mol_type = other RNA
atgctccctacggaagttccccagtcccatcccgggccaagcgcactgttattattacagcttcttctccctcctactagcgcctttttcccgaacatttggtctctcctggcagccccagggtcaattacacatcaggacctcactgaggaagccgcactgaatgtgacgctacaactgttcctggagcagcctccaccaggccgccccccactcagactcgaagattttcttggacggactctactggccgacgacctgtttgctgcatactttggtcccggatcatctcgtcgcttccgggccgccctcggggaagtttcccgcgccaatgctgcacaggactttctgccaaccagtcgtaacgaccccgatctgcattttgacgccgaaagactgggtcaaggccgagcccgtctggtcggagctctccgcgagactgttgtcgccgcgcgtgcactggatcatacactagctcgccagcgcctgggcgccgccctacatgccctgcaagacttttattcccactctaattgggttgagttgggtgaacagcagccacaccctcaccttttgtggcctcgccaagaacttcagaatttagcccaggtggctgaccctacttgctcagattgcgaagaacttagttgcccacgaaattggttaggcttcactttgttaacatctgggtactttggaacacatcccccaaaaccccctggaaagtgcagccatggcggccattttgacaggagttcgtctcagccccctaggggtggcattaataaagattctacatcacccggcttctccccccatcacatgctgcaccttcaagctgctaaattggctttattggcatccatccaggctttcagcttgctacgatctcgtctcggggaccgagacttctcacggttactagacattactcccgcttcgagtttaagcttcgtgctggatacaaccggatctatgggagaagaaatcaacgccgccaaaatccaggctaggcacctcgtcgagcagcgccggggctcgccaatggaacctgtccattatgttctcgtcccatttcacgatcctggtttcggacccgtgtttacgacttctgaccctgactcattctggcagcagctgaacgagatccatgccttaggtggaggagatgagccagaaatgtgcctgtctgcgctgcaattagccttgcttcatacaccacccctgtccgatatttttgtcttcactgacgctagcccaaaagatgccttcttaaccaaccaagtggaatctttgacacaggaacggcgatgtcgggtgacatttctggttactgaggatacgtcaagagttcaaggacgcgcaaggagggaaatcttatccccattaaggttcgaaccttacaaagcagtcgcactggcgagcggaggcgaggtgatatttacgaaggaccagcacattagagacgtcgctgctatcgtcggtgagtcaatggccgctctcgtaacactaccactcgatcctccggtggtcgttcccgggcagcccctagtgttttcagtagacggtcttcttcaaaagatcactgtacgcattcatggggatataagttcgttctggataaaaaacccggctggagtgagtcaaggacaggaggaaggaggcgggccactggggcacacacgacgcttcggacagttttggatggtgaccatggatgacccccctcaaacaggtacatgggagattcaggtaacggccgaagatacacccggcgttagagtgcaagcccagacaagcttagacttcttattccacttcggcatacccatggaggacgggcctcaccccggcttgtatccactcacccagccagttgccggtctacaaacccaactcctggtcgaggtcaccgggcttggatcgcgcgcgaatcctggggacccccagcctcacttcagccacgtaatacttaggggcgtccctgaaggagctgaactaggccaggtcccgctcgagccagttggaccccctgaaagaggcctcctagccgcttccttgtctccaactctccttagtactcctaggccattctctcttgagctgatcggtcaagatgccgccgggagaagactgcatcgcgccgcacctcagcccagtaccgttgtgcctgtgctgcttgagctctccggtcctagtggctttttagctcctggaagtaaagtccctctctcccttagaattgccagtttttccgggccccaggatttggacttgcgaacgtttgtcaacccttccttctccttgacctctaatttgagtagggcccatttagagctaaatgagagcgcctggggacgcctttggctcgaagtgcccgattctgccgcgcccgactccgtggtcatggtgaccgtcactgcaggtggccgcgaagccaatccagttccacctacccatgctttccttagactgctcgtcagtgctccagctccacaagtacgtaatcattatttcccttcccagggccctgctcaccatccctacaggttgatatag

SEQ ID NO: 14119 - RNA, 2676 nt, synthetic construct
  misc_feature 1..2676: note = source = /note="Description of Artificial Sequence: Synthetic coding sequence"
  source 1..2676: mol_type = other RNA
atgttgccaaccgaggttccccaaagtcatccaggaccttctgccttgctgcttctccagctgctgttgcccccaacctccgcgttctttccaaacatttggtcgctccttgctgcacccggaagtatcacgcaccaagaccttacggaagaagctgccctgaacgttacacttcaactctttctagagcagcctcctcctggacgtcctccgctcagactcgaggattttctcggcaggacacttctcgccgacgatttatttgcagcctacttcggccccggatcaagccgccggttcagagctgccttgggtgaagtctccagggctaacgccgcccaggatttcctacctacctcaagaaatgaccccgatctccactttgacgccgagaggctcggccaaggtcgtgcaagactcgttggggccttgagggagacggtcgtagcagcgcgggcattagatcatacactcgcacgtcaaagactgggcgcagcattacacgctctgcaggatttctactctcattcaaattgggttgaacttggagagcagcagccacacccacacctgctttggccaagacaggagttacagaacttagcacaagtggctgatcctacttgcagtgattgcgaggaattgtcctgcccacgaaactggctcggctttactctcctaacatccggatattttggaactcaccccccaaaaccacctggcaaatgtagccatggcggacattttgatagaagttcatcccagcctccaaggggagggatcaataaagactccacctcccccggctttagcccacaccacatgcttcacctccaggccgctaagctcgctctgttagcctccattcaggccttctccctgctccgcagcagactcggagaccgggatttctctaggcttcttgatataaccccagcatcctccttaagcttcgtcctggacacaaccggtagtatgggagaagaaattaatgccgcaaaaatccaggcgagacatctggttgaacagagacgcggtagtcccatggaaccagtccattacgtgctagtgccttttcatgaccctggcttcgggcctgtgttcactacctccgatcccgacagcttctggcagcaactcaatgaaatacatgcactgggagggggcgacgagcccgaaatgtgtctgtctgctctgcagctggctctgcttcatactccacctctttccgatattttcgttttcactgacgctagccccaaagatgcttttctcacaaatcaagtcgagagcctgacccaggaacgccgctgcagagtgaccttccttgtcaccgaagatacttcaagagttcagggacgcgcgaggcgcgaaattctgtctcccctaagatttgagccttacaaagccgtcgccctggcctcaggcggagaggtaatattcaccaaagatcaacatatacgggacgtggcagccatcgttggcgaatctatggccgccctcgtcactcttccgttagatcctccagttgtcgtgcccggacagcctctggtgttctccgtggatggactccttcaaaaaataacagtgagaatacatggggatatttcgagcttttggattaagaatcccgccggcgtttctcaaggccaagaagaaggtgggggaccactcggccacactcgtagatttggccagttctggatggtaacaatggacgatcctccccaaactgggacctgggaaatccaggtaaccgcagaggacacaccaggagttcgcgtgcaggctcagactagcctagatttcttattccattttggcatcccgatggaggatgggcctcatcctggactttaccctctcactcagcccgtcgctggactgcagactcaactcctggtggaggtcaccggtctggggtcgcgggctaacccaggcgatcctcagccccatttttcccacgttatactccgcggagtacccgaaggagccgaactgggccaggtacctctcgaaccagtcggtccccccgagagaggattgctagcagctagcctaagtcccaccctactctctaccccacgaccgttctctctggagttgatcggtcaggatgcggcaggcagaaggttacatcgggcagcaccgcaaccttcaaccgtcgtccctgtgttgttagagttatccggcccctccggtttcctggccccgggcagcaaagttcccttatccctaagaatagctagtttctccgggccccaagacttagacctcagaactttcgtgaacccctcatttagtctgacatccaatctctctcgcgcccatttggaattgaatgaatcagcatggggtcggctgtggttagaagttcccgatagcgcggccccggactcagttgtgatggtcacggtcaccgcaggtgggcgagaagctaatcccgtaccacccactcacgcatttctgcggttactggtttcagctcccgctccccaagaccgacatacgacccccactggctcatctgatccaatactgaccactgctacacctgccttttctccttttaccctggtcacacagggtagagccggagccggattagccgccggatcaccctggtggggaacagtaggaggtgttctactcttgcttgggctggcctcttggtag

SEQ ID NO: 14120 - RNA, 552 nt, synthetic construct
  misc_feature 1..552: note = source = /note="Description of Artificial Sequence: Synthetic coding sequence"
  source 1..552: mol_type = other RNA
atggtccgaatctggactacaataatgattgttttaattctcctactgcgaattggaccaaacaagcccagtctgtcaggtcgccaggctccagctcaggctcaaacatcagatctcgtgccttccctgtttcctttagggctgtgggcccccgggttttgcacctggagctcacctgatgaagacaaacgtccacgaaaacctgttcctggcacaggcaatcgggactccgggacacgtagaagacttcaggatgctaccgaacaagaccctcgacctgggaatgacgttgcctcagctgaaacagcaggccccccttcgccctctggaattagagcgcaagacagagcaccccgccatcgaagagccccacctgccaggatgccagttgccccagcacccagcgccgatggggagccgctacaagaacagggaggcggactgtttcatcgaactagatctgtgtacaatggcttggagttgaatacttggatgaaagtggagagactgttcgtcgaaaagtttcatcagagtttttcactggacaactag

SEQ ID NO: 14121 - RNA, 444 nt, synthetic construct
  misc_feature 1..444: note = source = /note="Description of Artificial Sequence: Synthetic coding sequence"
  source 1..444: mol_type = other RNA
atggcaggccccgccggcagccaatctctgggcccattatgctttcacagctccccgcaagccctatacacagttctcctgattgtgctggtgatgatgagcttggtgtttggaaaattcgtccctgtgaactgggaacccccccagcccctgccctttcctaaatacttgagatgctacagatgcctactcgaaacaaaagagctcggctgtttactaggctctgacatatgtctgacacccgccggttcctcttgcatcacactacacaagaagaattcatccgggtctgatgtgatggtgtcagactgccgaagcaaagagcaaatgtccgactgtagtaacactcgtacctccccagtgtccggattttggatttttagtcagtattgtttcttagacttttgcaatgacccccaaaaccgcggcctgtatacaccttag

SEQ ID NO: 14122 - RNA, 447 nt, synthetic construct
  misc_feature 1..447: note = source = /note="Description of Artificial Sequence: Synthetic coding sequence"
  source 1..447: mol_type = other RNA
atgcaaaccttccctgtggctggagcacttgaccccgctatcctggacacaagtagtccccaagcactgtacactgtcctcctgattgtgctagtgatgatgtccctagttttcggaaagttcgtgcccgtcaattgggagccccctcagcccctgccatttcctaagtatcttcgatgttatcgctgccttctagagaccaaagagctgggctgtctgctgggttccgacatctgtctgacacctgccgggtcatcgtgtattactctccacaaaaagaactcgagcgggtctgacgtcatggtcagcgactgtcgctcgaaggaacagatgagcgactgttcaaacacaaggacttctcctgtaagcggattttggatatttagccaatattgctttttagacttttgtaatgatccccaaaaccgaggactgtataccccctag

SEQ ID NO: 14123 - RNA, 606 nt, synthetic construct
  misc_feature 1..606: note = source = /note="Description of Artificial Sequence: Synthetic coding sequence"
  source 1..606: mol_type = other RNA
atgaaggtgcacatgcttgttggggttttggttatggtgggcttcacagttggtaaggtgccagtgccagatattaggacatgtcacttctgcttagttgaggacccctctgtgggatgcatctccggaagcgaaaagtgcacgatttcctcatccagtctgtgtatggtgatcacaatttattatgacgtcaaagtccgcttcatcgtgaggggatgcggccagtacatctcttaccgatgtcaggaaaaaagaaatacttacttcgccgaatactggtatcaggctcaatgttgtcagtatgactactgcaattcttggagttctccacagttgcaaagctccctccctgagccccatgaccgcccactggccctacctctatccgactcccagatccaatggttctatcaagcgctgaacctgtccttacctctacccaacttccacgccggcacagagcctgacggtctcgaccccatggtcacactctcacttaacctggggctgtccttcgccgaactcagacgcatgtatctctttctgaattcctctggtctcctcgtgcttccacaggcaggcctgttaactccacaccccagctag

SEQ ID NO: 14124 - RNA, 345 nt, synthetic construct
  misc_feature 1..345: note = source = /note="Description of Artificial Sequence: Synthetic coding sequence"
  source 1..345: mol_type = other RNA
atgcttgggggtgaagaggcccggcccaattcatggccgtggcaggtgtcgttacaatatagctccaatggacagtggtaccacacttgtggaggaagtttaattgctaatagctgggtcttgacagctgcgcattgcatacggcaaataatcaaagcacataaagtcctccagcgctgctctcttatcctgttctttgtccgcgatctttgctcaagtcaattagaattaaccggtgtgtctgcaggctcatcagggatctatagagtgatgcttggtcagcataatctgtatgttgccgaatccgggtcgttggccgtgtctgtgtctaaaatcgtcgtttag

SEQ ID NO: 14125 - RNA, 810 nt, synthetic construct
  misc_feature 1..810: note = source = /note="Description of Artificial Sequence: Synthetic coding sequence"
  source 1..810: mol_type = other RNA
atgataagaacactgttattgagtaccctagtagcgggtgctttgtcctgcggggttagtacgtatgcacctgatatgtcccggatgctcggaggcgaagaagcgagacctaactcttggccatggcaggtctctcttcagtatagttccaatgggcagtggtaccacacatgtggtggatctcttatagcaaattcgtgggtgcttactgcagctcattgcatctcatcatcgggcatatatcgcgtgatgcttggacagcacaacctctatgtggcggaaagcggatctctcgctgtgtcagtgagcaaaatagtagtccataaggactggaatagcgaccaggtgtcaaaaggcaatgatatcgctctgttgaaacttgctaatcccgtgagcctaaccgataaaatccaactcgcttgtctccctccggccggaaccatccttcctaacaattacccctgctatgttaccggatggggtaggttacaaacaaatggggccctgcccgacgacctgaaacagggtcagctccttgtggtggattatgcaacttgttccagttcaggatggtgggggtccactgtgaagacaaacatgatctgtgccggcggtgacggggtaatttgtacatgtaacggggattcaggagggcccttaaactgtcaggcctcagacggccggtgggaagttcacggcattgggtcgttaacatcagtcctggggtgtaactattactacaagccctctatttttacacgcgtctcaaactataatgattggattaatagcgtcattgctaataactag

SEQ ID NO: 14126 - RNA, 567 nt, synthetic construct
  misc_feature 1..567: note = source = /note="Description of Artificial Sequence: Synthetic coding sequence"
  source 1..567: mol_type = other RNA
atgtttcaccagatttgggcagccctactgtacttttacggaattatcctgaactccatttatcagtgtcccgaacattcccaactaacaacgctgggcgtggacggcaaagagtttcccgaggttcacttaggccaatggtacttcattgccggagctgccccaaccaaagaggagttagcgacattcgatccggtggacaacattgtgttcaatatggctgcaggctccgcacctatgcagttgcatctaagggcaaccatcagaatgaaagatggactttgcgtacctcgtaagtggatatatcacctgaccgaaggatcaacagacttgcgaaccgagggccgcccagacatgaaaaccgaactgttctcctcctcctgtcccggaggcataatgctcaatgagactggccaaggttatcagcgcttcctcttgtataacaggtcaccccacccccccgaaaagtgcgtggaggaatttaaatctctgaccagctgcctggactccaaggccttcctgttaacccccagaaaccaggaagcatgtgagctcagcaataactag

SEQ ID NO: 14127 - RNA, 390 nt, synthetic construct
  misc_feature 1..390: note = source = /note="Description of Artificial Sequence: Synthetic coding sequence"
  source 1..390: mol_type = other RNA
atggctgccggatccgcacccatgcagttgcacttacgggctactattagaatgaaagacggcctttgtgtcccgagaaagtggatctatcatttgactgaggggtctacagatctcagaacagaagggagaccagatatgaagacggaactattctccagttcttgtccaggcggaattatgctgaatgagaccggacaagggtaccaacgattcttactgtacaacaggtcaccgcaccccccggaaaaatgcgtagaagagttcaagtcattgacttcgtgcctggattccaaagctttcttactgacaccaagaaaccagggcaaggggcttaagtcacacaagaccggactcgggttaacaaagagctcaggcgtgaccggatag

SEQ ID NO: 14128 - RNA, 351 nt, synthetic construct
  misc_feature 1..351: note = source = /note="Description of Artificial Sequence: Synthetic coding sequence"
  source 1..351: mol_type = other RNA
atggctgccggatccgcaccaatgcaactacacttgcgcgctacaattcggatgaaagacggtctttgcgtgcctagaaaatggatctaccatctcacagagggaagtaccgatttacgaacagaaggccgacctgacatgaagaccgaactattttcctcatcatgccccggagggattatgctaaatgagaccggtcagggctaccagcgcttcctcctgtataaccgctctcctcaccctcctgaaaagtgcgtagaggaatttaagtccctcacatcttgcctcgatagcaaggcttttcttctaacaccccggaatcaggaagcctgcgaactctcaaataattag

SEQ ID NO: 14129 - RNA, 435 nt, synthetic construct
  misc_feature 1..435: note = source = /note="Description of Artificial Sequence: Synthetic coding sequence"
  source 1..435: mol_type = other RNA
atgattagaacgcttctgctcagtactctcgtggctggcgctttgagctgcggcgacccaacataccctccatatgtgacccgggtggtaggcggtgaggaagctagacccaattcttggccatggcaagtgtccctccagtactcttctaacggcaaatggtatcatacctgcggaggcagcttaatcgcaaactcgtgggtcttgaccgcggcacactgcatatcacagagcatggtccagtgtgctcacaaggtgcttcaaagatgtagcctaatcctgttttttgtaagggacctgtgttcatctcaactggaacttacaggggtgtcagctggctcatcacgtacctacagagtaggcctgggtaggcacaacctttatgtggcagaatcgggctccttggccgtgagcgtttctaaaatcgttgtttag

SEQ ID NO: 14130 - RNA, 204 nt, synthetic construct; identical to SEQ ID NO: 12491
  misc_feature 1..204: note = source = /note="Description of Artificial Sequence: Synthetic coding sequence"
  source 1..204: mol_type = other RNA

SEQ ID NO: 14131 - RNA, 231 nt, synthetic construct; identical to SEQ ID NO: 12492
  misc_feature 1..231: note = source = /note="Description of Artificial Sequence: Synthetic coding sequence"
  source 1..231: mol_type = other RNA

SEQ ID NO: 14132 - RNA, 267 nt, synthetic construct; identical to SEQ ID NO: 12493
  misc_feature 1..267: note = source = /note="Description of Artificial Sequence: Synthetic coding sequence"
  source 1..267: mol_type = other RNA

SEQ ID NO: 14133 - RNA, 255 nt, synthetic construct; identical to SEQ ID NO: 12494
  misc_feature 1..255: note = source = /note="Description of Artificial Sequence: Synthetic coding sequence"
  source 1..255: mol_type = other RNA

SEQ ID NO: 14134 - RNA, 2631 nt, synthetic construct
  misc_feature 1..2631: note = source = /note="Description of Artificial Sequence: Synthetic coding sequence"
  source 1..2631: mol_type = other RNA
atgggacccgaagcactgtcttccctcctactgcttttgttagtagcttccggcgacgcagacatgaagggtcatttcgacccagccaaatgcaggtacgccttgggcatgcaggatcgcacgatcccagatagcgacatttcagcaagtagcagctggtctgattccacagccgcccgacactcgagactggagtcgtcagacggcgatggagcttggtgcccagctggatccgtgtttccaaaagaggaagagtaccttcaagtcgacctgcaacgattgcacctggtggctctcgttgggacccaaggcagacatgctggcggactaggtaaggaattttcacgaagttatagactgaggtatagtcgggatggcagacggtggatgggatggaaagatcggtggggccaggaagtgatctccggtaacgaagaccctgaaggagtggtcttgaaggacctgggcccacctatggtggcccggcttgtcagattctatccaagagcggacagggtgatgagcgtgtgcctacgagtcgagctctatggctgtctttggcgagacggacttctaagctatactgcgcctgtcggacagaccatgtatctatcggaggcagtttatctcaacgatagtacatatgatggtcataccgtgggtggattgcaatacggcggtttgggacagttggccgacggcgtggtaggtctagatgacttcagaaaaagccaagagttacgcgtttggcccggctatgattatgttggttggtcaaatcacagcttctcatcagggtacgtggagatggagttcgagtttgataggctccgcgctttccaggccatgcaggtgcactgcaataacatgcatactcttggggcccgactgccagggggcgtggaatgcaggtttagacgcggtcccgccatggcctgggagggcgaacctatgcggcataacctgggcggcaatttgggcgatcctcgggcccgggctgtaagtgtgcccctaggaggacgtgtggctcggtttctgcagtgccggtttctttttgctggcccttggctcctcttctccgaaatctctttcatctccgatgtcgtcaataactcctccccagccctcggaggtacgtttccacccgcaccttggtggccccccggcccaccccccacaaacttcagtagtttggaactcgaaccgagaggccaacagcctgtagcaaaggccgagggcagtcctacagctattctgatcgggtgtcttgttgccatcatcttgctcttgctgctgattattgctttgatgctctggcgcctgcactggaggagacttctgagcaaagcagaaaggagagtgctcgaggaggaattgaccgtgcacctcagtgtgccaggtgacactatcctgataaacaaccgtcctggccccagagagcccccgccctaccaggaaccacgacctagaggcaacccaccccactccgcaccatgtgtccccaatggctctgcgtactctggcgactatatggaacctgagaagcccggcgcccctttgttaccccccccaccacagaattctgtcccgcattacgcagaggccgacattgtgacccttcagggagttaccggtgggaacacctatgccgtaccagccttaccaccaggagccgttggggacgggccgcctcgtgtggacttccccagaagccgactgcgtttcaaagaaaaacttggcgaaggacagtttggcgaagtgcatctttgtgaagttgatagcccgcaagacctggtgagccttgacttcccccttaacgttcggaaaggtcaccctctcctggtcgccgtgaaaattttacgccccgatgccacaaaaaacgccagaaacgatttcctaaaagaagtgaaaataatgtccagactgaaagaccccaatatcatccgattgttgggtgtgtgtgtgcaggatgaccctttgtgtatgattaccgattatatggagaatggcgatctgaatcagtttctttccgcccatcagctggaggacaaagcggccgaaggagccccgggagatgggcaagctgctcagggcccaacaatttcatatccgatgctactgcatgtagcggcccaaattgcctctggcatgaggtatctagcaacactgaacttcgttcatcgggatctggccaccagaaattgtctcgtgggtgagaacttcactatcaaaatcgcagacttcggaatgtccagaaacttatatgcaggagattactacagagtgcaaggaagagcggttctgccgataagatggatggcatgggagtgtatactcatgggaaaatttactactgctagcgacgtgtgggcttttggagttaccctgtgggaggtattaatgctctgtcgcgctcagccttttgggcagctcaccgacgagcaagttatcgagaacgctggagaattttttagagaccagggcagacaggtctatttatcacgtccacccgcctgtcctcagggcctgtacgagctcatgctccgctgttggtcgagggaaagcgaacagaggccaccattttcccaactgcacagattcctcgccgaggacgcgctgaacactgtttag

SEQ ID NO: 14135 - RNA, 2742 nt, synthetic construct
  misc_feature 1..2742: note = source = /note="Description of Artificial Sequence: Synthetic coding sequence"
  source 1..2742: mol_type = other RNA
atgggacccgaagccttaagctcccttctcttgctcctgttagtcgcttccggcgatgcggacatgaagggacacttcgaccccgctaaatgtagatacgcattgggtatgcaggatcgtactattccagattccgacatctccgccagtagtagttggtcagattcaaccgcagctcgacattcccgactcgaaagtagcgacggtgatggagcctggtgtcccgcaggaagtgttttccctaaggaagaagagtacctgcaggtggacctgcagagactccacctggtggcattagtgggaacacaggggagacatgcgggaggcttgggtaaagagttttctcgcagttatcggctgagatattccagggacggccggaggtggatgggatggaaggataggtggggtcaggaagttatttctgggaatgaagaccctgagggtgtggtgctcaaggatctggggcccccaatggtcgcgagacttgtaaggttttatcccagagccgatcgtgtaatgtcagtctgcctccgcgttgagctatatggttgcctttggcgagacggactgctatcttacactgcaccagttggccagacgatgtacttgagtgaggccgtctatttaaacgatagcacttatgacggacacacagtgggaggtctacagtatggtggtctggggcagttggcagacggcgtggtgggactggatgattttcgaaaaagtcaggaattgcgggtgtggcctgggtacgattacgtaggttggtctaaccactccttcagcagcggttacgtggaaatggaatttgagttcgatcgacttagagcctttcaggcgatgcaggtccattgtaacaatatgcatacgctgggagctcgcctgcctggaggcgtggagtgtagattcagaagaggccctgctatggcgtgggaaggcgaacccatgaggcataatctgggcggtaatctcggagacccccgggctagggcggtgagcgtgccccttggaggtcgtgtagctcgattcctgcaatgtcggttccttttcgccggaccatggcttttgttcagcgaaatctcgtttatcagcgacgtagtcaataattccagcccggcactcggcggcacattcccccctgctccctggtggcccccggggccaccaccgacaaacttttccagcctcgagctagagcctcgcggacaacagcccgtggccaaagctgagggttcaccaacagctatcctgattggctgtctagtggccataattctgctgctcctattaataatagccctgatgctgtggagacttcactggcgcaggctgctgtctaaagccgaacgaagggtgttggaagaggagctaactgtgcacctcagcgttcccggagatactatacttattaataatcgccccggccctcgcgagccaccaccataccaagagccccgaccaagaggaaacccccctcattctgctccatgcgtgccaaatggatccgcactcttattgtctaatcctgcttaccgcctgcttctggccacttacgctcgaccaccacggggacccggaccaccaactccagcttgggcaaagccaaccaacacacaggcatattccggagattatatggaaccggaaaagcccggcgcacctttgcttccacctccacctcagaactctgtcccacattacgccgaagccgatatcgtgactctgcagggagtgacgggaggcaatacctatgccgtgcctgccttgccacccggcgcagtcggagatgggccgccccgtgtggactttcccagaagtcgattgcgatttaaagagaagcttggagagggccaatttggagaggtacatctgtgtgaagtggattcaccccaggaccttgtaagcctggatttccctctgaatgtccgtaaggggcatccgttgctggtggccgtaaagattcttagaccggatgcaacaaagaacgcccgtaatgatttcctaaaagaagttaagattatgtcaagattaaaagatccaaatatcattcggctgctgggcgtgtgtgtccaggatgatccactgtgcatgattaccgattacatggaaaacggcgatctaaatcaatttctgtctgctcatcagctggaagacaaagccgccgagggggctcctggggatggccaggccgcacagggtcctaccatctcttatccaatgctcctgcatgtcgctgcacaaattgcctccggaatgcggtatctcgctacccttaacttcgtccatcgggacctggcgactcgtaattgtcttgtaggggagaatttcacgatcaaaatcgccgacttcggaatgtcccgaaatctgtatgccggcgactactatagagttcaaggtagagcagttctgcctatccgctggatggcgtgggaatgtatactcatgggaaaattcactacggccagtgatgtctgggcctttggagtgaccctgtgggaagtgctgatgttatgcagggctcaaccttttggacagctgaccgacgagcaagtgatcgagaatgccggagaattttttcgagaccagggacggcaggtgtacctctcaagaccccctgcgtgtcctcagggcctgtacgagctgatgctgaggtgttggtcccgtgaatcagagcagagaccccccttttcacaacttcatcgatttctagccgaggatgccttaaacaccgtgtag

SEQ ID NO: 14136 - RNA, 2631 nt, synthetic construct
  misc_feature 1..2631: note = source = /note="Description of Artificial Sequence: Synthetic coding sequence"
  source 1..2631: mol_type = other RNA
atgggacctgaggccctcagttctctcctgctgcttctgctggttgcctcaggtgacgccgatatgaaaggccattttgatcccgccaaatgtaggtacgcattggggatgcaagaccgaacaatccctgattctgatatttctgccagtagctcttggagtgacagcactgctgcccgccacagtcggctggagtcttcagatggtgacggcgcctggtgccccgcaggtagcgtgtttccaaaggaagaggaatacctgcaagttgatctgcagaggctacatcttgttgcactcgtggggacccagggacgtcacgcaggcggactaggaaaggagttttctcgcagctataggctgcggtatagtagggacggcagacgatggatgggctggaaagataggtgggggcaggaagtgatttcggggaacgaggatcctgaaggcgtggtgctaaaagatctgggacctcctatggtggctagactggttcggttctatccaagagccgaccgggtgatgtcagtgtgtcttcgcgtagagctgtatggatgtctgtggagagatgggttactctcatatacagctcctgtcggtcagacgatgtatctctcagaggctgtgtacttgaacgactcaacctacgacggccacaccgttggaggcttacaatatggcggtctgggacagctggccgacggcgtggtcggacttgatgactttaggaagagccaggagctgcgtgtttggcccggatacgattacgtaggatggagcaaccattcattcagcagtggctatgttgagatggaatttgagttcgatcgtcttagagcatttcaagcgatgcaggtccactgtaataacatgcatacccttggcgcgcgcttaccaggaggggttgaatgtcgatttagacgcggtcctgcaatggcctgggaaggtgagccaatgcggcataatttggggggtaacttgggcgaccctcgggctcgcgcagtaagcgttccgctgggtggcagggtagcccggttcttgcagtgcaggttcctgtttgctggtccctggctcctattcagtgaaatctctttcatctcagatgtggtcaataactctagccccgctcttggtggcacatttcctccagctccatggtggcccccgggccccccccctactaacttctcatccttagagctcgaacctcgcgggcagcagccagtggcaaaggccgaaggcagccccacagcgattctaatcggatgtctggtcgcaatcatcctcctgcttctccttatcattgccctcatgttatggagactccactggcgaaggctactgtccaaggcagagcgaagagtccttgaagaagaactaacagtacacctgagcgtgcccggtgatactatactcataaacaaccgccctggcccccgggaaccccccccttaccaagaaccgcgccctcggggaaatcctccacacagcgctccgtgcgtgcctaacggctctgcttattcaggcgactacatggaacccgaaaagccaggcgcccccctcctacccccaccaccgcaaaactctgtcccccactacgccgaggccgacattgtgacgttacagggtgtgaccggaggcaatacctatgccgttccagccttgccaccaggggccgtgggagacgggccacccagggtggactttcctcgctctagactgcgctttaaggagaagctgggagaaggtcaattcggagaagtccacctctgcgaagtggacagccctcaggatctggtcagtctggattttcccctcaacgtgagaaagggccacccactgctggtcgctgtaaaaatactgcgccctgatgctacaaaaaacgcccggaacgacttcctgaaagaagtaaagatcatgtcccgcctgaaagacccaaatatcatccgactcttaggcgtgtgtgtccaggacgaccctttatgcatgatcacagattatatggaaaacggcgacttgaaccagtttttgtccgcacatcagttagaagataaggctgctgaaggcgcccccggcgatggacaggctgcacaagggcctactatatcgtatcctatgttactacacgtggccgctcagatcgcctccggaatgcggtatctggctaccttgaattttgttcatcgggacctggcaactcggaactgccttgttggagaaaattttactataaaaattgctgacttcgggatgtcacggaacctctacgctggagattactatagagttcagggccgcgcagtcctgcccattcgctggatggcttgggagtgcattctgatgggaaagtttacaacagcgtcagacgtttgggcctttggcgtgacactctgggaggtgttaatgctgtgtagagcccagccttttggccagctgacggatgagcaagtcatcgaaaatgctggagaatttttccgagatcaaggacgccaggtatatctatcaaggccgccagcctgtccacagggactgtatgagcttatgctccggtgttggtccagagagtctgagcaacgtcctcctttttcccagctacaccgctttctcgccgaagacgccctaaataccgtatag

SEQ ID NO: 14137 - RNA, 2631 nt, synthetic construct
  misc_feature 1..2631: note = source = /note="Description of Artificial Sequence: Synthetic coding sequence"
  source 1..2631: mol_type = other RNA
atggggccggaagctttgtcctctctactgctcttactactcgtggcgtctggtgatgccgacatgaagggacattttgaccctgcaaaatgtagatatgccctgggaatgcaggaccgaacgattccagactctgatatctcagcgtccagctcttggtctgattccactgccgcgcgacatagtcgcttggaaagctcagacggggacggcgcatggtgccccgccggatcagtctttccaaaggaggaagagtatctgcaggtagaccttcaacgccttcatttagtggccttagtggggactcaaggaaggcacgcaggaggtctaggcaaggaatttagtagatcatacaggttgaggtactcccgggatggtcgacgatggatgggttggaaagatcgatggggccaggaagtgatttccggcaacgaggatcccgaaggtgtggtgctgaaagatttgggaccccctatggtcgcccgcttagtgaggttctacccacgagccgatcgggtgatgtctgtctgcttgcgcgtggagttgtatggatgtttatggcgggatggtctcctttcttacacggcccccgtgggacagactatgtacttgagcgaggcagtatacctgaacgatagtacatacgacggccatacagtaggcggactgcaatatgggggcttgggccaactggcggatggcgtagtcggactggacgactttagaaaatcccaggaactccgggtttggccgggatacgattacgtgggatggagcaatcattccttcagttctggttacgttgaaatggaattcgagttcgacagactcagagccttccaagcgatgcaggtgcactgcaataacatgcacacacttggggcaagactaccaggcggcgtggaatgtagattccgaagaggtccggcaatggcctgggaaggggaacccatgagacacaatctcggaggaaatcttggggatcctagagcgcgggctgtgagcgtccctctgggcggccgcgtggcacgctttctgcagtgtcggtttttgttcgctggtccctggctcctgtttagtgaaatttcttttataagtgatgtggtgaacaatagcagccctgctcttggcggcacatttcctcctgcaccctggtggcccccaggtcccccccctaccaacttttctagtcttgagctagagccgagaggtcagcagccagtggcaaaggcagaaggaagccccacagccatcttaatcgggtgcctcgtcgccattattttgttgcttctcctgattattgccttgatgctctggcgcctacactggaggaggcttctgtccaaagctgagcgacgcgtgctagaggaagaactcacagtgcatcttagcgtgcccggcgacacaatcctgatcaataatcgtccaggcccacgcgaaccaccgccgtaccaggaaccccgtcctcgagggaacccacctcatagcgctccatgcgtgcccaatggcagtgcttactcaggggattatatggagcccgaaaagccaggggcccccctgcttccgcccccgcctcaaaactcagtcccccattatgcagaggccgatatcgtgacattacagggcgtcaccggtgggaatacgtatgcggtgcccgcgttacctccgggggcagtgggcgatggaccgccaagagtggactttcctaggtcaaggttgcgattcaaagagaagctcggagaaggtcaattcggcgaagtgcacctgtgtgaagtagattccccccaggatttggtgagtctcgatttcccactgaacgtcaggaaggggcacccattactggttgctgtgaagatactgagacctgacgccactaagaatgctcgcaatgactttttgaaagaggtaaaaatcatgtctaggctaaaagaccccaacatcatccgactcctcggtgtgtgtgtacaagatgatcccctctgcatgattaccgactatatggaaaacggcgacctcaaccaatttctgagtgctcaccagctggaggataaggctgctgagggggcaccaggggacggtcaagctgctcaaggccctacgatcagctatccaatgcttttacacgttgccgcccagattgcaagtggaatgagatacctggcaaccctaaactttgtgcaccgcgacttggctaccagaaactgcctggtgggagaaaactttaccatcaagatcgctgacttcggtatgtctaggaatttgtatgccggcgactactacagagtgcagggtagggctgtccttccgatcagatggatggcctgggagtgtattttgatgggcaaattcaccacggctagtgacgtatgggcctttggcgtcacgttatgggaggtcctgatgctttgcagagcccagccctttggacagttaaccgatgagcaagtaatagaaaatgctggcgagttctttcgagaccagggccggcaggtgtatctgagtcggccgcccgcctgccctcaaggcctgtacgagttaatgctgagatgttggtcgagggaatcagagcaacgcccccctttctcccagctccatcgcttcctcgcagaagacgcactgaatacagtgtag

SEQ ID NO: 14138 - RNA, 2760 nt, synthetic construct
  misc_feature 1..2760: note = source = /note="Description of Artificial Sequence: Synthetic coding sequence"
  source 1..2760: mol_type = other RNA
atgggtcccgaagccctgtcctctttgcttctgctcctgctggtagcctctggcgacgccgatatgaagggtcacttcgatccagcaaagtgtagatacgccctgggtatgcaagaccgcacaatcccagattccgacatttccgcaagctcaagttggtccgactcaactgctgctcggcattctcgtttagagtcctctgatggtgatggcgcttggtgtccagctggttccgtgtttcccaaagaagaggagtacctgcaagttgacttgcagcgattacacctggtcgccctcgtgggaactcagggcaggcacgcggggggactgggaaaagaattttctcgaagctatcggttgagatatagcagggatggccgtagatggatgggctggaaggatcggtgggggcaagaagtgattagcgggaatgaggatcctgaaggggtggtgctgaaggacctggggcctcccatggtcgcacggttggtaagattttatcccagagcagacagagtcatgagtgtttgcctgcgcgtcgagttatacggttgtctgtggcgggatggactcctgagttacacagccccagtcggacagaccatgtatctatcagaagctgtgtaccttaatgacagcacctacgatggtcatactgtgggcggcctgcagtacggcggactcggacaattggcggacggagtggtgggtcttgatgatttccgcaaatctcaggagctgcgcgtgtggcccggatacgactacgtaggttggagtaaccattctttcagttcaggttacgtggagatggagttcgagttcgacaggttaagggcctttcaagccatgcaagttcactgtaacaacatgcatacccttggcgctcggctccctggaggcgtggagtgccggtttcgaagaggccccgcaatggcttgggaaggagagcctatgcgccacaacctcgggggtaatctaggagatccccgggctcgagcggtcagtgtcccactcggtgggcgggttgcgcgtttcctccaatgtagattcctatttgcaggaccgtggcttctatttagcgaaatctcttttatctcagacgtggtgaataactcttcgcccgcccttggtggaacctttcctcctgccccgtggtggcccccgggcccccctcccaccaatttctcgtccttggaacttgaacctaggggccaacagccggtggccaaggctgagggctctccaaccgcaatcctgattggctgtctggtcgctattatccttctgctgcttctaataattgctctcatgctatggcgcctccattggcgcagacttttgtccaaagctgaaaggcgggtcctcgaagaagagttaaccgtgcatctgagcgtgcctggggatacaattttgatcaacaaccggccaggcccccgcgaaccacctccataccaagaaccaagacctagagggaatcctccccacagcgctccttgcgtgcccaatggatctgcactgcttttgtccaacccagcctatagactcttgctagccacatacgctcgacccccacggggccccggcccaccaacccccgcttgggccaaaccgacaaatacccaggcctactcaggggactatatggaacctgagaagcccggcgcacccttgctgccgccgcctccccaaaactccgtcccgcactacgctgaagccgatatcgtgactttacagggcgttactggaggtaacacctacgcggtccccgccttgcctcccggggccgttggggacggacctccacgggtcgatttccctagatcacggctccgatttaaggagaagctgggcgaaggacagttcggtgaagttcacttgtgtgaggtcgacagcccccaagatctagtctccttagatttcccattgaacgtgaggaagggacatccactccttgtggcggtgaagatcttgaggccagacgccactaagaatgcaagcttcagtctctttagccgtaacgactttctgaaagaagttaagataatgagcagactcaaggacccaaacataattcggttgttgggcgtgtgtgtgcaggacgatcccctgtgcatgattacagattacatggagaatggcgacctgaaccaattcctttccgcacatcaattagaggacaaagctgctgaaggggcacctggagatggacaagccgcacagggacccacaatctcttaccccatgcttcttcatgtcgctgcacagatcgctagcggcatgcggtacttggctacccttaacttcgtgcaccgcgatctggctacaagaaactgtctcgtgggggaaaacttcactatcaagattgcagatttcggcatgagtaggaacctgtacgccggtgattactacagggtccaaggtcgggcggtactgcccatacgctggatggcttgggagtgtatactaatgggcaaatttaccactgcgagtgatgtttgggcttttggcgttacgctttgggaagttctgatgctgtgccgcgcgcagccatttggccaactgacagatgaacaggtaatcgaaaacgctggtgaatttttccgcgaccagggcagacaggtctatttgtcaaggcctccagcttgtccacagggcctatacgaactcatgttgagatgttggagccgcgaatctgagcaacgcccacccttttcacaacttcaccgcttcctcgctgaagatgctttaaacactgtttag

SEQ ID NO: 14139 - RNA, 1041 nt, synthetic construct
  misc_feature 1..1041: note = source = /note="Description of Artificial Sequence: Synthetic coding sequence"
  source 1..1041: mol_type = other RNA
atgctaaagaaacccctatccgccgttacctggttatgtattttcatcgttgcgtttgtatcccatcccgcctggctccagaagcttagcaaacacaaaacaccagcacagccccaactcaaagcagcgaactgctgtgaggaagtgaaagagctgaaggctcaggtcgccaacctatcctcactgctgtcagaacttaataaaaagcaggaacgtgattgggtgagcgtcgttatgcaagtgatggaattggaatctaatagcaagaggatggaatcgaggttaaccgatgcagagtcaaaatattcggaaatgaataatcagattgatatcatgcagcttcaagcagcccagaccgtcacgcagacttccgcggacgcaatttatgactgttctagcttgtaccagaaaaattatagaatttcgggcgtctacaaactccccccagatgactttctcggatccccagagttagaggtgttctgcgatatggaaacaagcggtggcgggtggacaattatccagcgtagaaaatctgggctagtgtctttttacagggactggaaacaatacaaacagggatttgggtccatcaggggcgacttctggctgggtaacgaacacattcacagattgtctagacaaccgacacgcctcagagtagaaatggaggactgggaaggaaatttgcgctacgcagagtatagccactttgtcttaggcaacgaattaaattcctatcggctgtttctcgggaactacactggcaatgtaggtaacgacgccttgcagtatcacaataacaccgcttttagtaccaaagataaggacaatgataattgtctcgataaatgtgctcagctgcggaaaggaggctattggtataactgttgcacggattcaaacctgaacggcgtatactatcggttaggagaacataataaacacttggacggaattacatggtacggatggcatggcagcacatattcactgaaacgggtcgagatgaaaattcgaccagaagactttaaaccttag

SEQ ID NO: 14140 - RNA, 1056 nt, synthetic construct
  misc_feature 1..1056: note = source = /note="Description of Artificial Sequence: Synthetic coding sequence"
  source 1..1056: mol_type = other RNA
atgaaaggcagggctgtgtcctttgacccccttgcctgccagggcctaaacgcttctccaggatccctgacttctccgctccgtcgtattaggtcactgaccggacgggaagttttgactcctttcccaggactaggcaccgcggctgcccctgctcagggtggcgcacatctcaaaccccacagtctggtgctcccaattactgctttacctccccctccactggccctcagaggccgccaggctacatccaagctcccacctttcctgtcctccccattccctcccagcctgtgtccctgggtgcctgaccctggtttcaaggagacggctttcttgtacgctgtgagcagcgccgcgctgacacatacattagcccgcgcctgctctgccggacggatggagcgatgtacttgtgatgactcgccaggactcgaaagcaggcaggcttggcagtggggggtatgcggcgataacctgaaatatagtaccaaatttcttagcaatttcctcggtagtaaaagagggaacaaagatctgagagctagagccgacgcacataacacccatgttggaatcaaggccgtgaagagcggacttcgaaccacctgtaaatgtcacggcgtatccggctcttgcgccgtccgtacctgctggaagcagcttagtccgtttagggaaaccggtcaagtgctgaaactccgttacgatagtgccgtcaaggtcagttctgccacaaatgaagctctgggacgcctagaactgtgggcaccagcgcggcaaggttcactaaccaaggggctggcccctcgctccggcgatctggtgtacatggaagactctccctctttttgtagaccttcaaaatattcccctggaacagctgggagagtttgctctagggaagcctcatgcagttcactgtgttgtgggcggggatatgatacccaatctagactagttgcattttcctgccactgccaggttcagtggtgttgctacgttgagtgccagcaatgcgtccaggaagagttggtctacacttgtaaacactag

SEQ ID NO: 14141 - RNA, 462 nt, synthetic construct
  misc_feature 1..462: note = source = /note="Description of Artificial Sequence: Synthetic coding sequence"
  source 1..462: mol_type = other RNA
atgaagcacctgagaccccagttcccactgatcctggcgatttattgtttctgtatgctgcaaatccccagttccggattcccccaaccgctcgccgatccttccgacggtcttgatattgtccaactcgaacaactcgcttattgcttgtcccagtgggcgcctctctcacgtcagcctaaggataaccaagacatatacaagagattcctgttccattattctcgcacccaagaagcgactcacccggtcaaaacaggctttcctccagtgcacccgttgatgcatttggctgccaaattagccaatcgccgcatgaaaaggatactgcagagaggatccgggactgccgccgtcgattttactaagaaagaccatactgccacctggggccgccccttctttcttttccgtccacgcaatggtcgcaatattgaagatgaagcccagattcagtggtag

SEQ ID NO: 14142 - RNA, 765 nt, synthetic construct
  misc_feature 1..765: note = source = /note="Description of Artificial Sequence: Synthetic coding sequence"
  source 1..765: mol_type = other RNA
atggcagcagcatccgccggagccacaagactgttactccttctgttaatggctgtagcagccccttctcgggccagaggctctggatgcagagcgggtacgggcgccagaggcgcgggagcagaggggagagaaggtgaggcatgtggcacagtaggtttactgcttgaacacagtttcgaaattgatgattctgcaaattttaggaagcgcgggtctctcctgtggaatcaacaagacgggacactcagcctgagtcaacggcagctctcagaagaagaacgtggccggcttcgcgatgtagcagctctcaacggcctgtaccgagtgcgaattcccaggcgccctggtgccctggacggcttggaagcaggaggatatgtgagctcattcgtgcctgcatgtagccttgtcgagagccacctaagcgaccagcttactctccatgtcgatgtggccggcaacgtcgtcggggtcagcgttgtcacacatccaggcggatgccgagggcacgaagttgaggatgtcgacttagagttattcaataccagtgttcagctccaaccaccgacaacggctcccggccctgaaacagcagcttttattgagaggttggaaatggaacaggcccagaaagcaaaaaacccacaggaacagaagagcttcttcgcaaagtattggcatatcatccttggcggggcagttctcctgactgcattaagacccgcagcacccggcccagccccacccccccaggaagcttag

SEQ ID NO: 14143 - RNA, 810 nt, synthetic construct
  misc_feature 1..810: note = source = /note="Description of Artificial Sequence: Synthetic coding sequence"
  source 1..810: mol_type = other RNA
atggcagccgcttccgcaggggctaccaggttattactcctattgctgatggcagtagccgccccatccagggcaagaggatcaggctgccgtgcgggtactggtgcgcggggcgcgggtgccgaggggagggagggcgaagcctgtggaaccgtgggactcctacttgaacactcttttgaaatagatgactccgctaacttccggaagcgagggagcctgctttggaatcagcaagatggtaccctctctctctcacagaggcagctatcagaggaagaaagaggacgattgcgagatgtggctgcgctgaatggactgtatagagtgcggatcccgagaagacctggcgctctcgacggcctcgaagctggcggctatgtgagctctttcgtgccagcctgttccctcgtcgagtctcatctctctgaccaactgacattacatgtggacgtcgccgggaatgtggtaggagtctctgtggtgactcatccaggggggtgccgtggccatgaagtggaggatgtggatctcgagttgtttaatacaagcgttcagctgcaaccgccaaccactgcccctggtcccgaaactgcggcttttatagagaggttggaaatggagcaggcacagaaggctaaaaaccctcaagaacagaagagtttcttcgctaagtactggatgtacattattccagtcgtattattcctcatgatgagcggagcaccagatactggaggccaaggagggggtgggggcgggggaggagggggtggaagtggtagatgttgcgtgccgccatcactctag

SEQ ID NO: 14144 - RNA, 480 nt, synthetic construct
  misc_feature 1..480: note = source = /note="Description of Artificial Sequence: Synthetic coding sequence"
  source 1..480: mol_type = other RNA
atgtccagtcctcagagacgtaaagccatgccctgggccctgtctctcctgctaatgggatttcagctgttggtcacttatgcctggtgctccgaggaggaaatgggcggaaacaacaaaatcgtgcaagatccaatgtttttggctaccgtagaattcgcgttaaacaccttcaacgtccagtctaaggaagaacatgcttaccggctgttgcgcgtgctgagcagctggcgtgaagacagcatggacaggaaatggagaggaaagatggtgttctcaatgaatctgcaactgcgtcagacggtgtgcaggaagttcgaggacgacattgataactgcccctttcaggaatcgctcgaactgaacaacgtcagacaaggaatctcattcccccaagtgcacagttgcggatgctgcatgggttgtggggtgggaacaggtgccgcagataaagctataccccgcgacaaaggaaaatag

SEQ ID NO: 14145 - RNA, 1737 nt, synthetic construct
  misc_feature 1..1737: note = source = /note="Description of Artificial Sequence: Synthetic coding sequence"
  source 1..1737: mol_type = other RNA
atgctcctgctgcttcttctcgctcccctattcctccgacctcccggcgccggcggtgcccagactcccaatgccacctctgaggggtgccaaatcattcaccctccctgggagggcggcattcgctatcgcggcttgacacgagaccaagtaaaggccattaatttcctacctgttgattatgaaattgaatacgtatgtcggggtgagagagaagtggttggtccaaaagtgcgaaagtgtctcgctaatgggtcctggacagacatggacactccatcacgttgcgtgcgtatatgtagcaagagttacttgaccctcgagaatggcaaagtgtttctgacaggtggcgacctgcccgctctcgacggagccagggtggattttcgctgtgaccccgacttccacttggtaggctcttcaaggagtatatgttctcagggccagtggagcacaccaaaaccccattgccaagtcaatcgtacaccacactccgaacgcagagccgtttacatcggagccctttttccaatgtccggggggtggccaggaggccaggcctgccagcccgccgtagagatggcgctcgaagatgttaattctagaagagacatcttgcccgactacgaactcaagctgatccaccatgatagcaaatgcgacccaggacaggctacgaagtatctttacgaactgctgtacaacgatccaataaagattatactcatgccagggtgttcaagtgtaagcactctcgtggctgaagcggcgcgtatgtggaacctaattgtcttaagctacggaagcagttcacccgccctctctaaccggcaaagattccctaccttttttcgcacccacccttcagccacactgcacaaccctacccgcgtaaaactgttcgagaaatggggctggaagaaaatcgccacaatccagcagacgacagaagtattcactagcacactcgacgatctagaggaacgcgtgaaggaggctggaatagaaatcacttttaggcaatcattcttcagtgatcctgcggtaccagtaaaaaacctgaagagacaagatgcaaggattatcgtcgggctgttctacgaaactgaggcacgtaaggtcttttgtgaggtgtacaaggagcggctttttgggaaaaagtatgtctggttcttgatagggtggtacgccgacaattggtttaagatatatgatccttctattaattgtaccgtggatgagatgactgaagccgtggagggccacatcacgacggagattgtaatgcttaacccagcaaatactagaagcatatctaatatgactagccaggagtttgtcgagaagttaactaagcgcttgaagcgccacccagaagaaacaggtggttttcaggaagctcccttggcttatgatgcaatttgggcattagccctggccctgaacaaaaccagtggtggtggaggcagatctggcgtgcgactcgaagactttaattataataaccagacaataacagaccaaatctatcgtgccatgaattcatcctcatttgagggggtttccgggcatgtcgtttttgacgcttcaggatcccggatggcctggactttaattgagcaattacaaggcggatcgtataaaaagatcggctactatgacagcaccaaagatgatctgagctggtccaaaactgataaatggatcgtaataagccgtactcactcacccacttag

SEQ ID NO: 14146 - RNA, 444 nt, synthetic construct
  misc_feature 1..444: note = source = /note="Description of Artificial Sequence: Synthetic coding sequence"
  source 1..444: mol_type = other RNA
atgctaggcctcccttggaaaggaggtttatcttgggcacttttactgcttctcctgggttcccagatattacttatctacgcatggcattttcacgaacagagagactgtgatgagcacaacgtaatggcccgctatctcccagccactgtggaatttgccgtccacacatttaatcagcagagtaaggactactatgcatatcgcctcggacacattctgaatagctggaaagagcaagtagagtcgaagactgtgttcagtatggagctgctgctcggaagaactagatgcggcaaattcgaagacgacattgataactgccattttcaggaatctaccgagctgaataatacttttacatgttttttcacaatttcaacacggccctggatgacacaattttctctcttgaataagacctgcctggagggctttcattag

SEQ ID NO: 14147 - RNA, 444 nt, synthetic construct
  misc_feature 1..444: note = source = /note="Description of Artificial Sequence: Synthetic coding sequence"
  source 1..444: mol_type = other RNA
atgtggtccttacccccatcccgagctctgagctgtgccccgctcctgctactctttagctttcagtttctggtaacctacgcctggcggtttcaagaagaagaagaatggaatgatcagaaacagattgccgtgtatctgccacctacgctcgaattcgccgtgtacacctttaacaagcaatcaaaggactggtatgcatacaaattagtccccgtcttagcgtcctggaaggaacaggggtacgataaaatgacattctctatgaacctacaactgggaagaaccatgtgtggcaagttcgaggacgacattgataattgcccgttccaagaatctcctgaacttaacaatacttgtacctgtttctttaccatcggcatcgaaccgtggcgcacaagattcgacctgtggaacaagacatgttctggcggacactcatag

SEQ ID NO: 14148 - RNA, 2535 nt, synthetic construct
  misc_feature 1..2535: note = source = /note="Description of Artificial Sequence: Synthetic coding sequence"
  source 1..2535: mol_type = other RNA
atgggaccaggcgctccattcgcacgcgtggggtggccgctgccattgctggttgttatggccgccggcgtcgctcctgtgtgggcttcacattctccccacctccccaggccacactctagggtgcctccccacccttcaagcgaaagacgagccgtctacattggtgccctcttcccaatgtccggaggatggcctggaggccaagcttgccagcctgcagttgaaatggccctggaagacgtgaatagccgtcgagatattctccctgactacgaattaaaattgatacaccatgatagcaaatgcgatcccggtcaggctactaaatacctgtacgaactgctctacaatgacccaatcaaaattattctgatgcccggatgctccagcgtctctacacttgtggccgaggccgcccgtatgtggaatctaattgtgttgtcctacggctcatcttctccggccctcagcaataggcagcgatttccaaccttttttcgcacgcacccctctgctaccctgcacaaccccacccgagtgaaactgtttgagaagtggggatggaagaaaattgctaccatccagcaaaccaccgaagtcttcacaagtacgctcgatgacctggaagagagggttaaagaagcagggattgaaatcacattcagacagtcattctttagcgatcccgctgtgccggttaaaaacctgaaaaggcaagatgcccggattattgtcggattgttctatgaaactgaagccagaaaagtattctgtgaggtctacaaggagaggttgttcgggaagaagtacgtatggttcctgatcggatggtacgcagataactggtttaagatatatgatccttcaattaattgtacggtggacgagatgaccgaagcagtggagggccatattacaactgaaatcgtgatgctaaatccggctaatactagatctatttccaacatgacatctcaggagtttgtggaaaaacttacaaaaagactgaaaagacaccctgaagaaacgggcgggtttcaagaagcgccactggcttatgatgcaatctgggcacttgctctggcactaaacaagacatccggaggggggggacggtcaggagtacgtctggaagatttcaactataataatcaaacaatcaccgatcagatctatcgggctatgaattcaagttcgttcgaaggggtttcaggccacgtcgtctttgacgcctccgggtcgcggatggcttggaccttaatagagcagctccaaggaggaagctacaaaaaaatcggttattacgacagtaccaaggacgacctttcatggtctaaaacagataaatggatcggcggatcccctccagctgatcagactctcgttatcaaaacattcagatttctttctcagaaactgttcatatccgtaagcgttctgtcttccctggggattgtactggccgtcgtctgtctcagtttcaacatttacaatagccacgtcagatacattcagaattcccagccaaacctgaacaatttgaccgccgttggctgttcactcgctctggccgctgtgtttcccctcggcctggatggttaccacatcggtcgcaaccagtttcccttcgtgtgccaggctagactgtggctcttgggcctgggtttctccttgggctatggctccatgttcacaaagatttggtgggtacatactgtttttactaagaaagaagagaaaaaggaatggcgaaagaccctagaaccgtggaagctgtacgcaaccgtaggtcttctagtcggtatggatgtactcaccctggccatctggcagatcgttgacccactacatcgcaccatagagacgtttgctaaagaggaaccaaaggaggacattgacgtttccatcttgcctcagttagagcactgttctagtagaaagatgaatacatggctgggcatcttttatggttacaagggcctgctgctgttgcttggaatatttctagcatacgaaactaaatcagtgagtaccgaaaaaattaatgaccacagggctgtgggcatggccatctacaacgtggccgtcttatgtttaataacagcacccgtgaccatgattctgtcatcccagcaggacgccgcattcgcatttgccagcctcgctattgtgttttcgtcgtacatcacacttgttgttctgttcgttccgaagatgagacgtctaattacaagaggcgaatggcaaagcgaagcacaggacacgatgaagaccggatcttcaacaaacaacaacgaggaagagaaaagcaggcttctggagaaggaaaaccgcgaacttgaaaagattatagccgaaaaagaagagcgggtctctgaacttaggcatcagctccagagcagacaacaacttcgaagcagacgccacccacctacacccccggagcccagtggtggcctgccccggggtccacctgaaccccctgacagactctcatgcgacggctcacgagtacacttgctttataagtag

SEQ ID NO: 14149 - RNA, 2700 nt, synthetic construct
  misc_feature 1..2700: note = source = /note="Description of Artificial Sequence: Synthetic coding sequence"
  source 1..2700: mol_type = other RNA
atgctgctgctgctactgctagcccccctgtttctcaggccccccggtgcaggaggcgcgcaaactcctaatgcaacaagtgaaggatgtcaaatcatccacccaccatgggaaggcggtatccgttatcgcgggttaacacgggatcaggtcaaggctattaacttcttaccagtggattatgagatcgaatacgtgtgccgaggggagagggaggtggtgggccccaaagtgcggaagtgtttggcgaacggctcttggactgacatggacacccctagtaggtgcgtaaaccggaccccccacagcgaaagacgtgccgtgtacattggtgccctctttccaatgtcgggtggctggcctggaggtcaagcctgccagcctgccgttgagatggcactggaagacgtcaattctagaagggatattctgccggactacgagttaaagcttattcatcacgattctaagtgcgaccccggacaagcgacaaagtacctgtatgaactgttgtataatgaccctattaaaatcatccttatgcctggctgttcctccgtgagcaccttagtggcagaagctgcacgcatgtggaatcttattgtcctcagctatggatctagttccccagccctgtctaaccgtcaacgattccccacctttttcagaacgcacccatctgccacgttgcacaaccccacacgcgtcaaactgtttgaaaagtgggggtggaaaaagattgccacaatccaacagaccacggaggtgttcacctcaaccctcgacgacttagaggaacgggttaaggaggcaggcatagaaattacatttcgccagtcattcttttctgaccccgccgtacccgtgaagaaccttaaacgccaagacgcccgcatcatcgtgggcttattttatgagaccgaagctagaaaagtattctgtgaagtgtacaaggaacgactgttcggtaagaaatacgtctggtttttgattggctggtacgctgataactggtttaagatatatgatcctagcattaattgcacagttgacgaaatgaccgaggccgtggagggacacatcactacagaaatcgtcatgcttaaccccgcgaacacgagatctatctctaacatgacatcccaggaattcgtcgagaagctgacgaagagactcaaacggcatcctgaggagaccggtgggttccaggaagcaccactagcttacgacgcaatctgggctctagctctggcactcaacaaaacatctggaggcggaggccgaagcggcgtgaggctggaagattttaactacaataatcagacaatcacagaccaaatatacagggccatgaacagcagtagttttgagggcgtctccggacatgtggtgttcgacgcttctgggagtaggatggcctggacattaattgagcagctgcagggagggagctataaaaaaatcggctactacgatagtactaaggatgacctttcatggtccaaaacagataaatggatcggaggaagtccccctgctgaccaaacattagtgattaagacattccggtttctttcccagaaactcttcatttcggtgtcagttctgtcttctctcggtattgtgttggccgtggtatgcttatcctttaacatctacaatagtcacgttcggtatatacaaaattctcagccaaatctgaacaatctgaccgccgtcggctgctcactcgccctggccgccgtcttccccttggggctcgatggctatcacatcggcagaaaccaattccctttcgtgtgccaagcaaggttgtggctgctagggcttggattttctctgggatatggcagcatgttcacaaagatttggtgggtccacacggtgtttacaaaaaaagaggaaaaaaaggaatggagaaagacgcttgagccttggaaactttacgctaccgtcggcctgttggttggcatggacgtcctgaccctcgctatctggcagatcgtcgaccccttgcacagaactatcgaaaccttcgctaaggaagaacctaaagaagatatcgatgtcagtatactccctcaactcgaacactgtagtagtaggaaaatgaatacttggttgggtatattttacggctataagggcctcctgctacttttggggatttttctcgcatacgaaaccaagtccgtttcaaccgaaaagataaatgaccacagagctgtgggcatggctatctataatgtggcggtcctttgtctgattactgcccccgtgaccatgatcctctcaagccaacaggatgctgccttcgcgttcgccagtctagctattgtcttctcatcctatataaccctagttgttctatttgtgccaaagatgcgacgcctgattacccgaggtgaatggcagtccgaagcacaggatacaatgaaaactggatcttccacaaacaacaatgaagaggagaagtcccgcctgcttgaaaaggaaaacagagagttggagaaaataatagctgaaaaggaggagagagtcagtgaattaaggcatcaattacagagtcgccagcagctgaggtccaggcgacacccccctacccctcctgaaccatccggcggtttgccgagagggccacctgagccccccgaccgtctgtcttgcgatggaagcagagtccacctgctgtacaagtag

SEQ ID NO: 14150 - RNA, 2886 nt, synthetic construct
  misc_feature 1..2886: note = source = /note="Description of Artificial Sequence: Synthetic coding sequence"
  source 1..2886: mol_type = other RNA
atgctgttactcctgctgctggcacctttgtttcttcgtcctccaggagccggcggtgcccagacacccaatgccacttcagagggttgtcagattattcatcctccatgggaaggaggaattcggtatagaggtctgactcgtgatcaggtgaaagctattaacttcctgccagtcgactacgagattgaatacgtctgcaggggcgagagagaggtagtgggccccaaagtgcggaagtgcctcgctaacggctcttggacagatatggataccccctcacgatgtgtgcgtatatgctccaagtcataccttaccctcgagaatggtaaagttttcctgacaggaggagaccttcccgccctcgatggcgctcgcgtagatttccggtgcgaccccgacttccacttagtaggtagctctcgatccatctgttcacaggggcagtggtccacccccaaacctcactgtcaagtcaataggacaccacacagcgaacggcgcgctgtctacatcggggcactcttccccatgtctggcggatggcccgggggtcaagcctgccaacccgccgtggagatggccttggaagatgtaaatagccggagagacatcctacccgattatgagctgaaattgattcaccatgacagtaaatgcgatcctggccaggcaacaaagtatctgtatgagctgctttacaacgacccaattaaaatcatcctgatgcccggctgctctagcgtgtccaccttagtcgcagaagcagcacgtatgtggaacctcattgtcctcagctatggctcctcaagccccgccttgtccaaccgccagagatttcccactttctttagaacacaccctagtgctacgctccacaacccaactagagtgaagctgttcgagaagtggggctggaaaaaaattgctacaatacaacagactacggaggttttcacatctactctggatgacctggaagaaagggtgaaggaggcagggattgagatcactttcagacaatctttctttagtgaccccgctgtacccgtcaaaaatctgaaacggcaggacgcccgaatcatagttgggctgttttacgaaactgaggcccggaaggtcttttgtgaagtgtacaaagaaaggctcttcggtaagaaatatgtgtggttcctaatcgggtggtacgcagacaactggttcaaaatctatgatccttcaatcaactgtactgttgatgaaatgactgaagccgttgaagggcatattaccacagagattgtcatgctgaatccagctaacacaaggtctatctcgaatatgacaagccaggagttcgttgagaaactcacaaagcgactcaaaagacaccctgaggaaactggcggattccaagaggccccattggcttacgatgcaatctgggctctggctctagcgttaaataagactagcgggggaggagggaggtcaggggtgaggctagaggacttcaattataacaatcagactatcaccgaccagatctaccgggcaatgaatagcagcagtttcgaaggcgtgagtgggcatgtagtattcgatgccagcggcagccgaatggcttggacactaatagaacagcttcagggcgggtcttacaagaaaatcggctactatgattctaccaaagacgacctttcatggtctaagactgataagtggatcggcggcagccccccagccgaccagacactcgtaatcaagacgtttaggttcttgtcgcaaaaactcttcattagtgtgagcgtactgtcctcattaggaatagtcctcgccgtggtttgcctcagctttaacatctacaacagtcatgttagatacatccaaaattcacagccaaacttaaacaaccttacagccgtgggatgtagccttgctcttgcagcagtttttcccctaggactagatgggtatcatattgggcgtaaccagttcccctttgtgtgtcaggccagactgtggctattgggcttgggcttttcattgggctacggcagcatgttcacaaaaatatggtgggtccacaccgtctttactaagaaagaagaaaaaaaagagtggcgcaagacccttgaaccctggaagctgtatgctaccgtgggcctactcgtagggatggacgtgctgacactagccatttggcagatagtcgatcctttacatcgaaccattgaaacatttgcaaaggaagaacccaaagaagatatagatgtgagtatcctaccacagttggaacattgctcttctagaaagatgaatacatggctggggattttctacggctacaagggattactgttactactggggatattcttagcgtacgaaacgaaatccgtgagtactgaaaagatcaatgatcatcgcgccgtcggtatggccatctataatgtcgctgttctgtgtttgatcaccgcgcccgtgaccatgatcctcagttcccaacaggatgccgcatttgcttttgcctccctcgccattgtgttcagctcatacataacactcgtggtcctgtttgtcccgaagatgcggaggctgattacccgtggagagtggcagtccgaagcgcaagataccatgaaaaccggaagctctacaaataataatgaagaagagaagagtcggctcttggagaaggagaaccgtgagctagaaaaaattattgccgagaaagaggaacgtgtttcggagctcagacatcagctccagtcccgacaacagctgcgatcccgaagacacccacccactccgccagaaccgtccggaggcttaccacgtggaccaccagagccaccagacagactttcatgtgatggatcaagggtccacttgctgtacaaatag

SEQ ID NO: 14151 - RNA, 882 nt, synthetic construct
  misc_feature 1..882: note = source = /note="Description of Artificial Sequence: Synthetic coding sequence"
  source 1..882: mol_type = other RNA
atgaataatctgtccttctcagaactttgttgcctcttctgttgccccccctgtcccggcaagattgcaagcaagttagcttttctgcccccagatcctacttacactctcatgtgcgatgaaagtggttctagatggaccttgcatctcagtgaacgcgctgattggcaatattcctctcgcgagaaagatgcaatcgaatgttttatgacccggacaagcaagggcaaccgaattgcatgcatgttcgtcagatgctcccccaacgccaagtatacccttttgtttagccacggaaacgcggtcgacttgggacaaatgagtagtttctatattggtctgggctctagaataaactgcaacatttttagttatgactacagcggctatggcgcctccagcgggaagccaacggaaaaaaatctttacgcagatattgaagcggcttggctggccctgcgcacacgatatggtattaggccagaaaacgtcatcatctatggacagagcatcggaactgttccctccgtcgaccttgctgcaagatacgaatccgcggccgtgatcctccatagtcccttaacatccggcatgcgcgttgcctttcctgacaccaagaaaacctactgcttcgacgcatttccaaatatcgataaaatctctaaaattaccagccccgtgctaattatacacggaaccgaggatgaggttattgatttctcacacgggttagcattgttcgagagatgtcaacgcccagtggagcccttgtgggtggaaggggcagggcacaatgacgtggagctttacggtcagtacctcgaaaggctgaaacagtttgtatcccaggaactggtgcaaaagcataaagagggtaagtag

SEQ ID NO: 14152 - RNA, 1155 nt, synthetic construct
  misc_feature 1..1155: note = source = /note="Description of Artificial Sequence: Synthetic coding sequence"
  source 1..1155: mol_type = other RNA
atgtggtatgtcagcactcgcggagttgcccccagagtgaactttgaaggtgctcttttttctggctatgcccctgacggtggcctgttcatgcccgaagaactcccccaactcgaccgcggcacattatgtcagtggtcaactctatcgtaccctggtctcgtcaaggagctgtgcgcactgtttattggctccgaacttctccctaaagacgagctgaacgacttgattgatcgcgctttctcccgatttagacatcgcgaagtagtacacctgagccggcttaggaacggcctaaacgttctggagctgtggcatggcgtgacctacgcattcaaagacctgtcacttagctgtaccactcaattcctgcagtactttttagagaagcgagaaaaacacgttaccgtggtggtgggcacctctggcgacactggcagcgcggccatcgaaagcgttcagggagccaaaaatatggatatcatcgtgctgctccctaaaggacattgcacaaaaattcaagaactccaaatgacaaccgtactaaagcaaaacgtgcacgtctttggcgtggaggggaatagcgacgagctggacgaacccattaagactgtgtttgccgatgtcgccttcgtaaaaaaacacaatcttatgagtcttaatagcatcaattggagccgcgttctggtgcagatggctcaccattttttcgcatatttccagtgtactccgagtctagatacacatcccttacccttagtcgaagtggtcgtgcccacgggtgctgcagggaacctcgccgccggatatatagcccaaaaaatcggactgccaatccgcctggtggtcgcagttaaccgcaacgatataattcatagaaccgttcaacagggagacttttctctgagtgaggctgtcaaatctaccctggcttccgcaatggatatacaggtgccctataacatggaaagagtgttttggcttttgagcgggtctgactcccaggttaccagggccctcatggaacaatttgagcgcacccaaagcgtgaatctacccaaagaattacacagtaaacactctcccgtcctgcctcgtccctgcctttgcagtcaagtgcctggcagttgtcctggttgttggcccgacccctag

SEQ ID NO: 14153 - RNA, 2889 nt, synthetic construct
  misc_feature 1..2889: note = source = /note="Description of Artificial Sequence: Synthetic coding sequence"
  source 1..2889: mol_type = other RNA
atgcttaggagacctgcaccagcactggcacctgccgcgcggctgctactcgccggtcttttatgcgggggcggcgtgtgggccgctcgtgtcaacaaacacaaaccttggctagaacctacctatcacggcatcgtcaccgaaaacgacaacactgtactactggaccctcccttaatcgcgcttgacaaggatgccccgctgcggtttgctgaaagctttgaagtgactgtgacaaaagaaggcgaaatatgcggctttaagatccacggccagaacgtccccttcgacgccgtggtagttgataaatccactggcgaaggtgttatcagaagtaaagagaagctggactgtgagttacagaaggattactcttttactatccaagcatacgactgcggtaaaggccccgatggaaccaacgttaagaaatcacataaggcaacagtacacattcaggtgaacgacgttaacgaatacgctcccgtgtttaaagagaagagttacaaagcaacagtcattgaaggaaagcagtatgacagtatactcagagtggaagctgtggacgctgactgctcccctcagttctcccaaatctgctcatacgagatcatcacccctgacgtcccattcaccgttgacaaagatgggtatataaaaaatacagaaaagttaaattacggaaaggaacaccaatataagctcactgtcacagcctatgattgcgggaagaaaagagcaacagaagacgtcctcgttaaaatttctataaagccaacatgcacaccaggctggcagggctggaataatcggatcgaatacgaacccggcactggggcacttgctgtcttcccaaatattcacctggagacttgcgacgagcccgtggcttccgtgcaggccactgtggaacttgaaaccagccacattggtaaaggctgtgatagggacacttactcagaaaagagccttcatcgactgtgcggcgctgctgcgggtactgccgagctcttgccctccccctctggatctctcaattggactatgggtctgccaaccgacaacgggcacgacagcgatcaggtctttgaattcaacggaacccaagccgtccggattcccgatggggtcgtgtctgtgagccccaaagaaccctttactatctctgtgtggatgcggcacggaccctttgggcgcaagaaagagaccatcctatgcagcagcgacaaaaccgatatgaatagacaccactactccctttacgtgcacggttgtcgtttgatctttttatttagacaggatcctagcgaagagaaaaagtatcgccccgccgagtttcactggaaattgaaccaagtttgcgacgaagaatggcatcattacgtgctgaacgtggaatttccatctgtaaccctctacgtggacggaaccagtcacgagccctttagtgttacagaggactaccccctgcaccctagtaaaattgagacacaactcgttgtgggggcctgttggcagggcggagaccttcatatgacacagttctttcgcggaaacctcgccgggcttacactgagatctggcaaactggcagataaaaaggttatcgactgtctctatacttgtaaggagggtctggatttgcaggtacttgaagattccggaaggggcgtacagattcaggctcatccctcccagctcgtcttgaccctggaaggagaagatctaggagagctggataaagcgatgcagcacattagctatctgaattcccgacaattcccaacccctggcattcgccggctcaagatcacctccactatcaaatgcttcaacgaagcaacttgtatttcagttcctccagtggatggctatgtgatggtgctccaacccgaagaaccaaaaatatccctgtcaggcgtccaccacttcgctagggctgcttccgagtttgagtcatctgaaggcgtgttcctgttcccggaattgcgtatcatctcaaccattacacgggaagtagagccggagggcgatggagcagaagatcctactgttcaggaatctctcgtgtcagaagaaatcgtccatgacctcgacacctgcgaggtgacagtggagggagaggaattgaaccacgaacaggaatccttggaggtagacatggccaggctacagcagaagggtatcgaagtgtcgtcatcagagctaggtatgacctttaccggtgtggataccatggccagttatgaagaagtgttgcacctccttagatacagaaactggcacgcacgctcactcctcgatcgaaagttcaagctcatttgttctgagttaaacggaaggtacatatcaaatgaatttaaggtagaagtcaacgtcatccataccgccaaccctatggaacatgctaatcacatggctgcacaacctcaattcgttcatcccgagcacagatcattcgtagatctatcaggccataatctggccaacccccatccatttgccgtggtcccaagcacagccactgttgttatcgttgtgtgtgtgtcattccttgtgttcatgattatacttggagtattcagaatcagggccgctcaccgacggacaatgcgcgatcaggacacaggaaaagaaaatgaaatggactgggacgactccgccctgacgataacagtgaaccccatggagacttacgaggaccagcacagcagtgaagaagaggaagaggaggaggaggaggaagagagtgaggacggggaagaggaggatgacatcacaagtgcagagtcagagagttcggaggaggaagagggtgagcaaggcgacccgcaaaacgcaactagacagcagcagctggagtgggacgattctacgttgagttactag

SEQ ID NO: 14154 - RNA, 2946 nt, synthetic construct
  misc_feature 1..2946: note = source = /note="Description of Artificial Sequence: Synthetic coding sequence"
  source 1..2946: mol_type = other RNA
atgctccggaggcctgctcctgccctggcccccgcagctaggttgctcctggccggtctcctttgtggcggcggggtgtgggctgctagagtcaacaaacacaaaccctggctggaacccacttatcatggaatcgtgacagagaacgacaacaccgtattgctcgacccccccttgattgctttggacaaagatgctcccctgaggttcgctgagtccttcgaagtaaccgtgaccaaagaaggtgaaatttgcggattcaaaatccatggccagaacgttccttttgacgctgtggtggtagataagtccacaggagaaggtgtcattcgaagcaaggaaaaacttgattgtgaattacaaaaagactatagttttaccattcaggcttacgactgcggaaaagggcctgacggcaccaacgtaaagaaatcccacaaggcaacagtacacatccaggtgaatgatgttaatgagtacgcgcccgtctttaaagagaagtcatataaggctacagtcatagaaggtaaacagtatgattccattcttcgtgtggaagccgttgacgcggattgcagcccacagttctcccagatatgttcatacgagattattactccggacgtgccatttacggtcgacaaagacggatatattaaaaatacagagaagttgaattacggtaaggaacaccaatataaattgacagtcacagcttatgactgcgggaaaaaaagggcaacagaagacgtacttgttaagatcagcatcaaaccaacgtgtacacctggctggcagggctggaacaatcgtatcgaatacgaaccgggcactggtgccctggctgttttccctaatatacacctcgaaacttgtgacgaacccgtagcgagtgtccaggcgacagtagaactggaaacaagccatattggaaagggatgcgatcgagacacttactcagaaaaatctctgcaccgactgtgtggagccgcagctggtactgccgagctcctcccctcccctagcggatcactgaactggaccatggggcttcccaccgacaacggacatgattccgatcaggtctttgaattcaatggtacacaggctgttaggatacccgatggcgtagtgagtgtgtctccaaaggaaccattcacgataagcgtgtggatgcggcatggcccatttggcaggaaaaaggaaaccattttgtgcagttccgataaaacggacatgaatagacaccactattccctttacgtccatggctgtcgcttaatctttctctttcggcaggatcccagtgaagagaaaaaatatagaccagctgaattccactggaaattaaaccaggtgtgcgacgaagagtggcaccactatgtcctgaatgttgagttcccctcagtcactttgtatgtagatggcacatctcacgaacctttctcagtcacagaagattatcccctgcatccatctaaaatcgagactcagctggtggttggtgcatgctggcaggaattttccggtgttgagaacgacaacgaaactgaacctgttaccgtagcctcggcaggaggcgacttgcacatgacccaatttttccgcggcaacttggcaggcttaacactgagatcaggaaagttagctgacaaaaaagttattgactgtctatacacctgtaaagagggactggacttgcaggtattggaggattcagggagaggagtccagatacaggcccacccctctcagctggtcctgaccctggaaggagaagacctcggcgagttggacaaggccatgcagcatattagctacctcaactcacgccaatttcctacgcctggtataagaagactcaaaattacgagtacgatcaagtgctttaacgaggccacatgtattagtgtcccccctgtagatggttatgtaatggtcctccaacctgaagaacccaagattagcctgagcggcgtgcaccacttcgcacgcgcagcgagcgagtttgaatccagtgaaggagtgttcctgtttcctgaactccgcatcatctcaacaatcacacgcgaagtcgagccagagggtgacggagcggaggaccctactgtccaagaatccctagtgtccgaagaaatcgtgcacgatcttgacacatgcgaggtcactgtcgagggcgaagaacttaatcatgaacaggagtcattagaagttgacatggctaggctacagcaaaagggcatagaagttagcagtagtgagttggggatgactttcacaggggtagatactatggcttcatatgaggaggttttacatctgctcaggtatcgcaactggcacgcacggagtttacttgatagaaagttcaaattgatctgcagcgaattgaatggaagatacatcagtaacgaatttaaggttgaagtcaatgtcattcacaccgctaacccaatggaacatgctaaccacatggcagcccagccccagttcgtccacccagaacataggtcttttgtggacctctccggacacaacctagccaatccccatccttttgccgtggtcccgtccacagcaaccgttgtgatagttgtctgtgtcagcttcctcgtctttatgatcatactcggagtctttcgcattagggcggcgcaccgacgcacaatgcgggatcaggacacaggaaaagagaacgaaatggattgggatgacagcgccttgaccatcacagtgaacccaatggagacatacgaagaccagcacagctctgaagaggaggaagaagaggaagaagaagaagaaagtgaggacggagaggaggaggacgacattaccagcgccgaatctgaatctagcgaagaggaagaaggcgagcagggagaccctcagaacgcgacaagacaacagcaattggaatgggatgactccactttatcttattag

SEQ ID NO: 14155 - RNA, 678 nt, synthetic construct
  misc_feature 1..678: note = source = /note="Description of Artificial Sequence: Synthetic coding sequence"
  source 1..678: mol_type = other RNA
atgagcggctgttcgaaaaggtgtaagttaggattcgtcaagttcgctcagaccatcttcaagttaatcaccgggaccctttccaaggataaaatagaggacgagctcgagatgacaatggtgtgccacagacccgaaggactggagcagctggaagcccaaacaaactttacgaaacgagaactgcaagtcctgtacagaggattcaaaaacgagtgcccatccggggtggtgaacgaggacactttcaagcagatctatgcacagtttttcccccatggcgatgcatccacctatgcacactatctatttaacgcgtttgacacaactcagaccggaagtgtcaaattcgaggattttgtaactgcactaagtattttgctgcgggggacagtacatgagaagctccgttggactttcaatctgtacgatatcaacaaagatgggtatattaacaaggaagagatgatggacattgtcaaagcaatctatgatatgatggggaaatatacatatccagtcctgaaagaagatactcctagacagcacgttgacgtgttttttcaaaaaatggataagaacaaggacggaatcgtgactcttgatgaattcctagaaagttgccaggaggacgataacattatgagatcccttcagctgttccaaaatgtgatgtag

SEQ ID NO: 14156 - RNA, 420 nt, synthetic construct
  misc_feature 1..420: note = source = /note="Description of Artificial Sequence: Synthetic coding sequence"
  source 1..420: mol_type = other RNA
atgtacaagctggcatcctgctgcttactgttcatcggcttcttaaatccattactgagtttgcctctgctggactcccgcgagatctcctttcagttatcagccccacatgaggacgcaagattaacccctgaagagttggagagagccagtctgctgcagattctcccggaaatgctcggggctgaacgcggtgacattctcaggaaggctgactccagtactaatatcttcaacccacgcggaaatttgcgcaagttccaagacttctccgggcaagatccaaatatcctgctctcccacctcctcgcccgaatttggaaaccttacaaaaagcaaagaaggaagctccgacaggacctcagactgtggaagaaagaacctggtctccggattttcaagaactacgtgtgggtttag

SEQ ID NO: 14157 - RNA, 879 nt, synthetic construct
  misc_feature 1..879: note = source = /note="Description of Artificial Sequence: Synthetic coding sequence"
  source 1..879: mol_type = other RNA
atggaagtgaccgcggtggccacccagggaggttatggatctagcgactgggtaacaagttatctgctgatgttcagtgatggaggcagaaactggaagcagtacaggcgagaggagtcaatttggggtttccccggtaataccaatgcggacagtgtcgttcactacagattacaaccacctttcgaggcaagatttcttagatttctgccattagcttggaaccctcgggggagaattggcatgaggatcgaggtctatggttgcgcatacaaaagcgaggtggtgtatttcgatgggcagtctgccctactctatagactcgacaagaagcctctaaagccaataagggacgtgatcagtctgaaattcaaagcaatgcagtctaacggtattctcctacaccgggaaggccaacacggtaaccacataacattggagctcatcaaaggcaaactagtgttttttttaaactcaggtaacgccaaacttccatccaccattgctcctgtgactctgacgctggggagccttttagatgaccaacactggcactcagtgctgatcgagctactggatacccaagttaacttcaccgtagataagcatacccaccacttccaggctaagggcgatagtagttatctcgaccttaatttcgaaatttcattcggcggaattccaacccctggccgttcccgggccttccgacgcaaatcatttcatggctgtcttgaaaacttgtattacaacggagtggatgtaactgagctggcgaagaaacacaagccacaaattctgatgatggaattggctcatggcctccaggaccaaaatctgaagatctctctgactgtctgtcaccaaacaacccagtag

SEQ ID NO: 14158 - RNA, 783 nt, synthetic construct
  misc_feature 1..783: note = source = /note="Description of Artificial Sequence: Synthetic coding sequence"
  source 1..783: mol_type = other RNA
atgaagacttctgacggtttcaccttgaacgctgagtcctatgtatccttcacaaccaagctagacatcccaacagccgcgaagtacgaatacggcgtgcctttgcagacgtctgacagctttcttagatttccctcctccctgacttcctctctctgcaccgataataaccctgccgcttttctggtgaaccaagccgttaaatgcactcgcaaaatcaacctggagcagtgcgaagagatcgaggcccttagtatggccttctatagctcacccgagatactgcgggttcctgatagccgcaagaaagtaccaataaccgtgcaaagtatcgtgattcagagcctcaataagaccctgacccgaagagaagatacagacgtgctccaacccacattagtaaatgctgggcatttctcactgtgcgtgaatgtcgtgctggaagttaaatactcacttacctatacagatgccggagaagtgactaaagccgacctcagtttcgtactggggactgtctcttccgttgtggtccccctgcagcaaaagttcgagattcattttctccaaaccgactggtcaagtccggttagtgctcggagtacggaaggcgaggaaccagcagtaggaccaggtttgcctagactgaggggtccattctggaagttcccgggccctgggcacgccggacttggtgcccacccactccaccacccagttattcaacaggagggatttcttccagcacctagaggattcgggtatcgaagcgaagtcgactag

SEQ ID NO: 14159 - RNA, 3624 nt, synthetic construct
  misc_feature 1..3624: note = source = /note="Description of Artificial Sequence: Synthetic coding sequence"
  source 1..3624: mol_type = other RNA
atggctagtgtcgcctgggctgtactcaaagtcttactgctgctccccacacagacctggagtccagtcggcgccggaaatcctcctgattgtgacgcccctcttgccagtgcgcttccacgctcctcattttcaagtagtagcgagctctctagttcccacggacctggatttagcagattgaaccggcgagacggcgcagggggatggacccccctagtttcaaataaataccagtggctacagatcgatcttggagagaggatggaggttacggccgtagctacccagggagggtacggtagcagcgattgggttacatcctatttactgatgtttagtgatgggggaaggaattggaagcagtaccggcgagaggaaagtatatggggttttcctggtaacaccaatgccgactctgtggttcactatagacttcagcccccattcgaagcccggttcctgagatttcttccactggcatggaatcctcgtggacgcataggaatgaggatagaggtatatggctgcgcatacaaatcagaagtggtctattttgacgggcagtctgcactcctgtataggcttgataagaaaccactgaaacccatccgggacgttataagcttgaaattcaaggccatgcaatccaatggtatcttacttcatagagagggccagcacggaaaccacatcacgcttgaactcattaaaggaaaactcgttttttttctgaactctggcaacgcaaaattgccgtcaacgatagcgccagttaccctaactctgggctcactactcgacgatcaacactggcattctgtcctcattgaacttctcgatacacaagtgaatttcaccgtggacaagcatacacatcacttccaggcgaaaggagacagttcctacctagacctgaattttgaaatatctttcggaggcattccaaccccaggtcggtcacgtgcatttagacgtaagtctttccatgggtgtttagaaaatctgtattacaacggtgtcgacgtaactgaactggccaagaagcacaaaccgcagatcctcatgatgggaaatgtgtctttttcatgtccccagccccaaaccgtacctgtgacgttcctttccagtcgatcctacctggctctgcctggaaattccggagaagataaagtgtctgttacttttcagtttagaacttggaaccgcgctggacacctactcttcggagagcttagaagaggctctggctccttcgttctgtttctaaaagatggaaaactgaagctgtctctcttccagccaggccaatctcctcggaacgttacggcaggggctggattaaacgacggtcagtggcactctgtgtctttttctgccaaatggagccacatgaatgtcgtggtagatgacgatactgctgtccagcctctcgtggccgtgcttattgatagcggggatacttactactttgggggctgtcttgacaattcgtctggatcagggtgcaagtcgcctttgggtggatttcaaggatgcctaaggttgatcacaattggagacaaagcggtagatcccatcctggtccagcagggtgccctcggtagcttcagagacctgcaaatagactcttgtggaataactgatcgatgccttccctcatattgcgaacatggtggtgaatgctctcagtcctgggacaccttctcatgtgattgtctgggaacggggtacaccggcgagacctgtcatagcagtctgtacgagcagtcgtgcgaggcccataagcatagaggtaacccatccggactgtattacatcgacgctgacggctcaggaccacttgggccttttttggtttactgcaacatgactgacgccgcctggactgtggtgcaacacggcggacccgatgctgtgactctcaggggcgcgccatctggacacccacggagcgcagtgagttttgcctatgctgcaggagctggacagctgagatccgccgttaatcttgccgagaggtgcgagcagagactggccctcaggtgcggaaccgcacgcagacccgattcccgagacggcacgcccctaagctggtgggtcggccgaacaaatgagactcatacgtcctggggcggcagcctcccggacgcacagaaatgcacatgcggcttagaagggaattgtattgactcccaatactactgcaactgcgatgctggtcggaatgaatggacatcggatacaattgttttatctcagaaagaacatttacctgtcacacagatcgtaatgacggacgctggaaggcctcatagtgaagctgcttacacgctgggcccattgttgtgtcgcggagaccagagcttctggaattctgccagcttcaacaccgaaacctcatacctacacttccctgcctttcacggagaactaacagccgatgtatgttttttttttaaaacgactgttagctccggggtctttatggagaaccttggcatcacggacttcatccgcatcgagctccgggcccctaccgaggttacattttcctttgatgtcggaaacggaccctgcgaagttaccgtgcagagccccacaccctttaatgacaaccaatggcatcacgtccgcgcagaaagaaatgtgaaaggcgccagtcttcaggtggatcagctaccacagaagatgcaaccggctcctgccgatggccacgttcggctgcaacttaattcacaattattcattgagattagcgcttattttgccacaggaagctcaatgacttaccactttcaggagcattacacactgtcagaaaattcatctagcctagtcagttctctccacagagatgtgaccctaacccgggagatgatcacgctcagctttaggaccacacgcaccccctcactgctcctttacgtttctagtttctacgaagaatatttaagcgtcatcctagctaacaacggcagcttacagatcagatataaactagaccgccaccaaaaccccgacgcttttactttcgactttaagaatatggcagacggacagctccatcaggtgaagataaatagagaagaggctgtagtcatggttgaagtcaaccaatctactaagaaacaggtgattctgtcttcaggtacggaatttaacgccgttaaatcactcatactcggcaaagtgttggaggccgccggtgccgatcccgatactaggagggccgcaacctctggttttacaggctgtctgagcgccgtccgttttggccgagccgctcctctaaaggctgccctcagaccgtcaggcccttcacgcgttacagtccgaggtcatgtggcaccaatggctcgatgtgcagccggtgcggcatctgggtcaccagccagggaactcgcaccccgactggcagggggagccggtcgctcaggccccgcagacgaaggagagccacttgtaaatgccgatagaagggacagcgctgtcattggcggggtaatcgctgttgttatctttattctcctgtgtataaccgccatcgccatccgaatctatcaacagcggaaactgagaaaggaaaacgaatcgaaggtcagcaaaaaagaggagtgttag

SEQ ID NO: 14160 - RNA, 2238 nt, synthetic construct
  misc_feature 1..2238: note = source = /note="Description of Artificial Sequence: Synthetic coding sequence"
  source 1..2238: mol_type = other RNA
atggcctccgtagcctgggctgtattaaaagtgctcttgcttctacctactcagacctggtcacctgtaggcgctggaaaccctcccgactgcgatgccccgctcgcgtcagcactgccgcggtcaagctttagctccagctctgaactctcctcctcccacggacccggattctctcgcctgaatcgacgcgatggagcgggtggctggactcccctcgtatcaaataaataccaatggttacagatcgacctaggagaaaggatggaggtgactgcagtagcgacgcaggggggctacggatccagcgattgggtgacatcctacctcttaatgtttagcgacgggggccgcaactggaagcagtaccggagggaagagagcatatgggggtttcctggtaatactaatgccgactctgttgtgcattacagactgcagcctccatttgaagcacggtttctgaggttcctgcctcttgcctggaatcctagaggtagaattggcatgcgaattgaggtgtatggatgtgcttataagtctgaggtggtgtacttcgatggccaatctgctctgctgtatagactagacaagaaacctctgaagccaatccgggacgttatttccctcaaatttaaagcgatgcaatccaacggcatccttcttcacagggagggacagcacggaaatcacataacgctagaactgattaaaggaaaacttgtgttcttcctgaattctgggaatgccaaattaccctctacaatcgctccagtgactctcaccttgggctctctactagacgaccaacactggcatagcgtactcatcgaattgcttgacacccaggtaaactttacggttgataagcacacacaccattttcaggcaaaaggtgattcatcctacctggatctgaattttgagatctcttttggaggaattccaacccccggacggagtcgcgctttccgacgaaaatcctttcatggctgccttgagaacctgtattacaacggagtcgacgtgactgagcttgctaagaaacacaaacctcagatactgatgatgggcaatgttagcttctcctgtccacagcctcagacagtgccggttacctttctgtcttctcgttcttatctcgccctacctgggaattcaggtgaggataaagtttccgttacgtttcagttcagaacttggaatcgagctggccatctgttattcggagaacttcgaagagggtccggctcttttgtactctttttgaaggatggaaagctgaaactatcactgtttcagccaggacaaagcccaaggaacgtgaccgctggagcgggcttgaatgacggccaatggcactctgtttccttcagcgctaaatggagtcatatgaatgttgtcgttgatgatgatacagccgtgcaacctctcgtcgctgttctaattgattcaggcgacacctattattttggtggatgtttggataattcatcagggtccggctgcaagtcaccgttgggggggttccaaggctgccttcgactcattaccatcggagacaaggccgtagatcccattctcgttcaacaaggtgcattgggaagctttcgagacctccagatcgattcatgcggtattactgacagatgtctaccaagctactgcgagcacggaggagagtgttcccaaagctgggacacgttttcttgcgactgcctagggacaggatatacaggcgaaacctgccactcctctctgtacgaacagtcatgcgaggctcataaacatcgcggaaatccttctggactgtattacattgacgcagacggtagtggcccactcggtcccttcttggtctattgtaacatgacagatgccgcttggacagtcgtgcagcatggcgggccagacgctgtgacactgaggggcgcgccttccggtcatccccgcagcgcagtctcttttgcctacgcggccggagcaggccaactcagaagcgccgtcaatctagccgagcgatgtgagcagcggctcgccctcagatgcggaacagctcgaagacccgatagtagagatggaaccccactgagctggtgggttggacgaactaatgagacacacacttcttggggagggagcttgcctgatgcacagaagtgcacttgtgggctggaagggaattgtatagactctcagtactattgtaattgtgatgccggacgcaatgagtggtag

SEQ ID NO: 14161 - RNA, 549 nt, synthetic construct
  misc_feature 1..549: note = source = /note="Description of Artificial Sequence: Synthetic coding sequence"
  source 1..549: mol_type = other RNA
atggagccgcaactgggacctgaagctgctgcacttcgacccggctggttagcccttctcctctgggtgtcagccctgtcatgctctttctcactgcccgcgagcagtttaagttctcttgtacctcaagtgcgcacatcctacaactttggcaggaccttcctcggactggataaatgtaatgcttgcattggcacctcaatctgtaaaaaattctttaaggaggaaatacgatccgacaactggctggcctcccatctaggcctccctcccgactcccttctctcataccccgccaattatagcgatgacagtaaaatatggagacccgtcgagatctttaggttggtctctaaataccagaatgagatcagtgatagaagaatatgcgcctcggctagcgcacccaaaacatgtagcatcgagagagtacttagaaagacagaacgatttcagaagtggctccaagcaaaaaggttgaccccagaccttgtccaggattgtcaccagggccagcgagagctaaaattcctgtgcatgttgaggtag

SEQ ID NO: 14162 - RNA, 282 nt, synthetic construct; identical to SEQ ID NO: 12523
  misc_feature 1..282: note = source = /note="Description of Artificial Sequence: Synthetic coding sequence"
  source 1..282: mol_type = other RNA

SEQ ID NO: 14163 - RNA, 387 nt, synthetic construct
  misc_feature 1..387: note = source = /note="Description of Artificial Sequence: Synthetic coding sequence"
  source 1..387: mol_type = other RNA
atgggcaagtcggcgtctaaacaattccataacgaagtactgaaagctcataacgagtatagacaaaagcacggggttccacctctgaaactctgtaagaatctgaatagagaagcacagcaatactccgaagcactggctagtaccaggatcctcaagcactcacccgaatccagtcgtggacagtgtggcgagaatctggcatgggcaagttacgaccagacaggccactttacggcaatggtatggaaaaacactaagaaaatgggcgttggaaaagcgagtgcgtcagacggcagttcattcgtcgtcgcgcgctactttccagcagggaacgtcgtgaacgaagggtttttcgaagaaaatgtgttgcctccaaaaaagtag

SEQ ID NO: 14164 - RNA, 465 nt, synthetic construct
  misc_feature 1..465: note = source = /note="Description of Artificial Sequence: Synthetic coding sequence"
  source 1..465: mol_type = other RNA
atgggtaaatccgcttccaagcagttccataacgaggtgttaaaagcacacaatgagtatcggcagaaacatggggtccccccgctgaaactttgcaagaaccttaatagagaagcccaacagtacagtgaagccttagcatccactagaatcctgaaacacagccccgaaagtagcaggggccaatgtggggaaaacttggcctgggcctcatacgatcagaccggcaaagaggtggcagaccgatggtactctgaaataaaaaattataacttccagcagcccggtttcaccagcggcaccggccacttcaccgcaatggtctggaaaaacactaagaaaatgggagttggcaaagcgagcgcctccgacggtagcagcttcgtcgttgctaggtacttccctgcaggcaatgtagtcaatgaaggatttttcgaagaaaacgttctgccccccaaaaagtag

SEQ ID NO: 14165 - RNA, 831 nt, synthetic construct
  misc_feature 1..831: note = source = /note="Description of Artificial Sequence: Synthetic coding sequence"
  source 1..831: mol_type = other RNA
atggatagttcacgagagcccacactgggcaggctcgacgcagctggattttggcaggtgtggcaaagatttgatgctgacgagaaaggatacatagaagaaaaagagctcgacgcgtttttcctgcacatgctgatgaaacttggcacagacgacacagttatgaaagctaaccttcataaggtgaaacagcagtttatgaccacgcaagatgcaagtaaggatggcagaatccgtatgaaggagctggccggaatgttcctttctgaggacgagaattttctgctgctgtttcgaagagagaaccccctggacagctccgtggagtttatgcagatttggaggaaatacgacgccgactcctcaggctttatatccgctgctgaattgcgaaacttccttagagatctgttcctccaccacaaaaaagcaatatccgaagctaaactggaggaatacacaggaaccatgatgaagatcttcgatcgaaataaagatggccggctagacctcaatgacctcgcaaggatcctggccctccaagagaactttttgttacagttcaagatggacgcatgctcaaccgaagagagaaagagggattttgaaaaaatcttcgcgtactacgacgtaagcaagactggcgcgcttgagggacccgaagtcgacggatttgtgaaggatatgatggaactcgtgcagccttctataagtggcgttgacctagacaaatttagggagatactcctgaggcactgtgacgtaaacaaagatggcaagatacagaaatcagagctggcactctgcctcggcctcaaaataaacccatag

SEQ ID NO: 14166 - RNA, 216 nt, synthetic construct; identical to SEQ ID NO: 12527
  misc_feature 1..216: note = source = /note="Description of Artificial Sequence: Synthetic coding sequence"
  source 1..216: mol_type = other RNA

SEQ ID NO: 14167 - RNA, 1287 nt, synthetic construct
  misc_feature 1..1287: note = source = /note="Description of Artificial Sequence: Synthetic coding sequence"
  source 1..1287: mol_type = other RNA
atgaagcctatgctaaaagacttttccaacctcctattggtcgtgctgtgcgattatgttctcggcgaagcagaataccttttacttagagaaccgggacatgtcgccttgtctaatgacaccgtttatgtggattttcagtacttcgacggggcaaatggcacactgcggaatgtgtcggttctactcctggaagcaaacactaatcagactgtaacaaccaagtacttgcttacaaaccagagtcagggtacgttaaaattcgaatgtttttacttcaaagaagctggagattattggttcactatgacacccgaagccacagacaatagcacccctttcccctggtgggagaaatctgcgtttttgaaggttgagtggccagtctttcatgttgacctgaatagaagtgcaaaggcagccgagggaacgtttcaagtgggcctgttcactagccagcctctttgcccgtttcccgtggataagcctaatattgtggtggatgtcatctttacgaattccttacccgaggcccgcagaaattctcgacaaccgctggagatacgtacaagcaaacgcaccgagctcgcacaggggcagtgggtggaattcggctgtgccccattaggaccagaggcctacgtgactgtagtgttgaagcttctgggacgtgacagtgtaatcacatctaccggcccaatcgatctagcccagaaattcggttacaagctcgtgatggtaccagaattgacctgcgaatctggagtcgaagtaacagtgctcccccccccgtgtacctttgttcaaggcgtggtgaccgtcttcaaggaagcccctagatacccaggcaaaaggacaatccaccttgcggagaactccctgccactgggcgagcggcggaccatatttaattgtacactgttcgatatgggaaaaaacaagtattgctttgatttcgggatttcatcccggtcgcacttctccgcaaaagaggaatgtatgcttattcagaggaatacagaaacatggggtctttggcagccctggagtcagtgctccgcaacatgtggagatggagtgagagaacgacgtcgcgtttgtctgactagctttccttcctcccctgtatgccctggtatgagtctggaagcctccctgtgtagcctcgaagagtgcgcaggacgtttcaggagctgttgccctggctggtcagctatggtaaggtccagactgactaactccgcctctagagttcaagctattcttttgccccaaccgcttgcatag

SEQ ID NO: 14168 - RNA, 312 nt, synthetic construct
  misc_feature 1..312: note = source = /note="Description of Artificial Sequence: Synthetic coding sequence"
  source 1..312: mol_type = other RNA
atgaagctgtgcgtgactgtcttgtcactcttagtcttggttgctgccttctgctcccttgccttatctgcccctatgggctccgacccgcctaccgcctgctgctttagctataccgctcgtaaacttcctcgcaacttcgtggtggactattacgaaacctcaagcctgtgctcccagcccgcagtggtctacagggaatcagcctcatcagcagcgccaggaagaatcccaagcacccgagcagccccccacggaccttggagtggtagaggtaggtgcctgcctcaggccagagacaaggcccggtag

SEQ ID NO: 14169 - RNA, 279 nt, synthetic construct; identical to SEQ ID NO: 12530
  misc_feature 1..279: note = source = /note="Description of Artificial Sequence: Synthetic coding sequence"
  source 1..279: mol_type = other RNA

SEQ ID NO: 14170 - RNA, 282 nt, synthetic construct; identical to SEQ ID NO: 12531
  misc_feature 1..282: note = source = /note="Description of Artificial Sequence: Synthetic coding sequence"
  source 1..282: mol_type = other RNA

SEQ ID NO: 14171 - RNA, 1869 nt, synthetic construct
  misc_feature 1..1869: note = source = /note="Description of Artificial Sequence: Synthetic coding sequence"
  source 1..1869: mol_type = other RNA
atgggaaagagcgaaggacccgtcggtatggtcgaatctgctggacgagccggacagaagcgtccaggttttctggagggaggtctgttgttgctactgcttctggtgacagcagctcttgtggctttaggagtgctgtatgccgacagaagaggaaagcagctgcctcggctggccagccgcctgtgttttttacaagaagaacgtacctttgtcaagcggaaacctcgtggaatcccagaagctcaagaggtctcagaggtctgcactacaccaggatgcgttattgccgctgcccgaatcttacaaaacatggaccctactaccgagccatgtgacgatttctaccaattcgcctgtggtgggtggcttcgcagacacgtgatccctgaaacaaacagccgctattctatttttgatgtcctacgtgatgaactcgaggtgatcttgaaagttgagctggaaacccaactcgccaaggccactgttccacaagaagaaaggcatgacgtgatcgctctctaccatcgaatggggcttgaggagctgcagtcccagttcggcctgaaggggtttaattggactctttttattcagacggttttgtcaagtgtgaaaatcaagctccttccagatgaagaggtcgtcgtttacgggatcccctatctacagaatcttgagaatataatagacacctactcggctcggacaatccagaactaccttgtttggcgcttggttctcgatcgcattgggagcctgtcccagcgttttaaggatacccgtgttaattatcggaaggcattattcgggaccatggtggaagaggttagatggagagagtgtgtgggatatgtgaacagcaatatggagaatgccgtcgggtcgctgtacgtgagggaggcctttccaggggactccaaatccatggtgagagagctcattgacaaagtcagaaccgtgtttgtagagactttggacgaactgggatggatggatgaagagagtaagaaaaaggcccaagaaaaagctatgtctataagagagcaaattggccaccctgattacatccttgaagagatgaaccgccgcttggacgaagagtatagtaacctcaacttttcagaggatttgtatttcgaaaacagcctgcagaacctcaaggttggcgcccagcgaagcttgcgtaaattacgagagaaagttgaccctaatctctggattatcggcgccgccgttgtaaacgcgttttattcgcccaacagaaatcagattgtttttccagctggaatccttcaacctccattcttctctaaagaacaaccacaggctctgaacttcggcggcattggcatggtgattggccatgaaataactcacggattcgatgacaatggcagaaactttgacaagaacgggaatatgatggattggtggagcaactttagtacacagcacttcagagagcagagcgagtgcatgatctatcagtacggtaattatagctgggacctggctgacgaacaaaacgtgaatggtttcaatacccttggggaaaacatagctgataacggaggggttagacaggcttataaagcttatctgaaatggatggctgaaggcggaaaggatcagcagctaccaggactcgacctaacccatgagcaactttttttcattaactatgcacaggtatggtgtggttcctatagacccgagtttgccattcaatccattaaaaccgacgtgcactcacccctgaagtatagggtacttggctcactccagaatttagcggccttcgctgataccttccactgcgccagaggaacacctatgcatccaaaagaacgatgtcgcgtttggtag

SEQ ID NO: 14172 - RNA, 2340 nt, synthetic construct
  misc_feature 1..2340: note = source = /note="Description of Artificial Sequence: Synthetic coding sequence"
  source 1..2340: mol_type = other RNA
atgggaaagagtgaaggccctgtaggcatggtggaatctgctggacgggccggacaaaaacgcccaggatttctagaggggggtctgctcttgctcttgcttcttgtgaccgccgcactggtcgccctaggggttctgtacgccgatcgcagagggaagcaactgcctcgacttgctagtagattgtgcttcttgcaggaagaaagaacattcgtaaagcgtaaaccaagggggattccagaggcccaggaagtcagtgaagtctgtactacccccggatgcgtgatcgctgccgcacgcattctgcaaaatatggatcctaccactgagccgtgtgacgacttctatcaatttgcttgcggcggatggttaagacgccatgtgattccagaaacaaacagtagatacagcatcttcgatgtgctcagagacgagttggaggttattctgaaagcggttcttgaaaacagcacagctaaggaccgccctgccgtggaaaaggccagaaccttataccgatcttgcatgaaccaatccgttatcgaaaagcgtggaagccagccactcctggatatcttggaggtggtggggggatggcctgtggctatggacagatggaatgaaactgtgggcctggagtgggaattggaacgtcagttagccctcatgaacagtcaatttaatcgccgcgtactcatagatctatttatctggaacgacgaccagaactcatcaaggcacattatctatatcgatcagccaaccttggggatgcctagcagagaatactactttaatggaggtagcaatagaaaggtacgagaggcatacctccagtttatggttagtgtggccacgcttcttagagaggacgccaatctgcccagagattcctgtctggtccaagaggacatggtacaagtcctggagctcgagacacagctcgctaaggccaccgtccctcaggaagaacggcacgacgtcattgctctctatcaccgcatggggcttgaagaactgcagtcccaatttggactcaagggtttcaactggacactgtttatccagaccgtcctctcctccgttaagataaagttgttgccggacgaagaagtggtggtttacgggataccgtatttacagaatctggaaaatataatcgatacctattcagctagaaccatccaaaattatttggtttggagactggtgctggatcgcatcggaagtctgagtcagagatttaaagatacgcgtgtgaattacaggaaggccctgttcggcactatggtcgaggaggtgaggtggagagaatgcgtcggatacgtaaatagcaatatggaaaatgccgtaggaagcctgtatgttcgcgaagccttccccggcgatagtaaaagtatggtgcgggaactgatcgataaagtacgcactgttttcgtggaaacattggacgagctcggttggatggacgaggaatcaaagaaaaaagcacaggaaaaggcgatgtcgataagggaacaaattggtcatcccgattacattcttgaagagatgaaccggaggctggatgaagaatactctaatctaaatttctctgaagacctctatttcgaaaattctctgcaaaatttaaaggttggcgcacagagaagccttcgcaaattaagagagaaggtcgaccccaatctgtggattataggcgccgccgttgttaatgccttctacagcccaaaccgtaaccagatcgttttccctgcaggaattttgcagcctccatttttctctaaggaacagcctcaggctctgaatttcggcgggattggcatggttatcgggcatgaaattacccacggctttgatgacaacgggagaaatttcgataagaacggaaatatgatggactggtggtcaaatttctcgacccagcattttcgagaacagtcagaatgcatgatctatcaatacggcaactactcatgggaccttgcggacgaacagaacgtgaatggattcaatacattaggcgagaatattgcggacaacggcggggttaggcaggcctacaaggcatatttaaaatggatggccgagggggggaaggatcaacagcttcccggcctcgacctcacccacgaacagttatttttcattaattatgcccaagtgtggtgcggaagttacaggccagagttcgccattcagagtatcaaaacagatgtgcactctccactcaagtatcgggtcctgggcagtcttcaaaaccttgccgcttttgcggatacattccactgtgccaggggtacaccaatgcatcctaaggaaaggtgtagagtttggtag

SEQ ID NO: 14173 - RNA, 258 nt, synthetic construct; identical to SEQ ID NO: 12534
  misc_feature 1..258: note = source = /note="Description of Artificial Sequence: Synthetic coding sequence"
  source 1..258: mol_type = other RNA

SEQ ID NO: 14174 - RNA, 657 nt, synthetic construct
  misc_feature 1..657: note = source = /note="Description of Artificial Sequence: Synthetic coding sequence"
  source 1..657: mol_type = other RNA
atgggcagggtgttcctcacaggagagaaagcaaactccattttgaagagatatccaagagcaaacgggttttttgaagaaatccgccagggcaacattgaacgcgaatgtaaggaggaattttgtacttttgaagaagcaagggaggccttcgagaacaacgagaagactaaagagttttggtcgacctatactaaggctcaacaaggcgagtccaaccggggtagcgactggtttcaattctatttgacttttccactgatttttggtttattcattattcttctggtgatattcctgatatggagatgcttcttgcgcaataaaacaagaagacagacagtaaccgaaggacacatacccttcccccaacaccttaatattattacccctccccccccacctgatgaagtgttcgattctagcggcttgtcacccggtttccttgggtacgtcgtgggccgctccgatagtgtgagtactcgcctcagcaattgcgatcctcctcccacatatgaggaagctactggccaggttaaccttcagcgttccgaaaccgaaccacacctggatcctccccctgaatatgaggacatagtaaactctaactccgcatccgcaattccaatggtgccagtcgtaactactataaaatag

SEQ ID NO: 14175 - RNA, 1365 nt, synthetic construct
  misc_feature 1..1365: note = source = /note="Description of Artificial Sequence: Synthetic coding sequence"
  source 1..1365: mol_type = other RNA
atggctcgccccaacaagtttctactttggttctgctgttttgcttggctgtgctttcccatatccctcggatcacaagcgtctggcggagaagctcagatcgctgcttcagccgaattggaatctggcgcgatgccgtggagcctgttgcagcacatcgacgaacgcgaccgcgccggccttctgccagcccttttcaaggttctgagcgtaggcaggggcggcagtcccagacttcaaccggatagtagggcactccactacatgaagaaactgtataaaacatacgccacaaaggaaggaatccccaagtctaaccgaagccacctctataataccgtgcgactgtttaccccttgtactcgtcacaaacaggcgcccggcgatcaagttaccggcatccttccctcggtggagctgcttttcaatctagataggataactacagtcgaacacttgttaaagagcgttttgctctacaacatcaacaattccgtctcttttagttcagcggtcaaatgtgtgtgcaatctgatgatcaaagagcctaaatcctcatcacgtacacttggacgggccccttacagctttacctttaattctcaatttgaatttgggaaaaaacacaaatggattcagattgatgtgacttccctgctgcagcccctcgttgcctcaaacaaaagatccatacatatgagtatcaatttcacctgcatgaaagaccagctcgaacatccctctgctcagaacggcctattcaacatgaccctcgtatctccatcgctgatactctacctgaacgacacttctgcacaggcctatcacagctggtatagcctgcattataagagaaggccctctcaaggacccgaccaagaacgctcccttagtgcctatcccgtgggcgaagaggctgcagaagatgggcggagcagccaccaccgccatagaagaggacaagaaaccgtcagcagcgagctgaaaaagccactgggtcccgcctcgtttaatctcagcgaatatttccgccagtttctcctgccacaaaatgaatgtgaactacacgatttccgcctgtccttcagtcagctaaagtgggacaactggatcgtggctccacatcggtataatcctaggtactgcaagggcgactgtccaagagctgttggtcatagatacggttccccagttcacaccatggtccaaaatatcatttacgaaaaactggattccagcgttccccgcccaagttgcgtccctgccaaatatagtccactgtccgtgctcaccattgaacctgacggttccatcgcctacaaagaatatgaagacatgatagccacaaaatgcacgtgccggtag

SEQ ID NO: 14176 - RNA, 417 nt, synthetic construct
  misc_feature 1..417: note = source = /note="Description of Artificial Sequence: Synthetic coding sequence"
  source 1..417: mol_type = other RNA
atgacctggcggcaagcagttctattgagttgttttagcgccgttgtgttattaagcatgttgagggagggcacttcagtctcggtgggaactatgcaaatggcgggggaggaggcctcagaggacgctaagcagaaaatctttatgcaggaatccgatgcttctaattttcttaagagacggggaaagcggtcccctaagagtagagatgaggtgaatgttgaaaaccgccagaagctccgcgtcgacgaattacgaagagaatattatgaagaacagaggaatgaatttgaaaactttgttgaggaacagaatgatgagcaggaagagaggtcgagggaagcggtagaacagtggcgtcaatggcattacgatggtcttcacccaagctacctttacaacagacatcacacatag

SEQ ID NO: 14177 - RNA, 729 nt, synthetic construct
  misc_feature 1..729: note = source = /note="Description of Artificial Sequence: Synthetic coding sequence"
  source 1..729: mol_type = other RNA
atggcccttaagaataaattttcctgcctatggatcctggggctctgtctggttgcaacaacatctagtaagatcccgagtattacagacccccactttatcgacaattgtattgaggcacataacgaatggagaggcaaagttaacccccccgctgccgacatgaagtatatgatctgggacaaaggcctcgcaaaaatggctaaggcatgggctaatcagtgtaagtttgagcacaacgattgtctggataaatcttataagtgctatgccgcttttgagtatgtcggtgagaatatctggctgggggggatcaaaagtttcacaccaagacacgccatcaccgcatggtacaatgaaacacagttttacgattttgacagcctgagctgtagccgagtgtgcggacattacacacagttagtgtgggccaacagtttttacgtcgggtgtgctgttgcaatgtgtccaaatctgggcggcgctagcacggctatctttgtttgtaactacgggcccgccgggaattttgccaatatgccgccttatgtcagaggggaatcttgctctttatgcagcaaggaagagaaatgcgttaaaaacctgtgtcgaacaccacaactcattatccccaaccagaaccccttccttaaacctaccggccgggccccccaacaaacagcctttaatccattcagcctgggcttcctgttactgcgcattttctag

SEQ ID NO: 14178 - RNA, 813 nt, synthetic construct
  misc_feature 1..813: note = source = /note="Description of Artificial Sequence: Synthetic coding sequence"
  source 1..813: mol_type = other RNA
atgttaaggcagctcctcttagccgctctctgtctcgccgggcctcctgctcctgctcgagcttgtcaactgccctcagagtggcgccccctgagcgagggatgccgcgctgagcttgccgaaaccattgtgtacgcacgtgttctcgcgctgcaccccgaggctcccggcctgtacaaccacttaccctggcagtaccatgccggtcaaggcggattgttttactctgccgaagtcgaaatgctatgtgatcaggcttggggttcaatgctcgaagttcctgctgggtccagactgaatctgacaggactgggatacttttcttgccactcccatactgttgtgcaagactatagttattttttctttttgcgtatggacgaaaactacaatctactgcctcatggggtgaattttcaggatgccatttttcccgatactcaggagaatagacggatgttcagtagcctatttcaattcagtaattgcagccaaggacaacagctcgcaacattcagctctgattgggagatccaggaggacagccggctgatgtgctcatccgtgcaaaaggcactgttcgaggaggaggatcacgtaaagaagctacaacaaaaagtcgctacattggagaagcggaataggcagttacgtgaacgggtcaaaaaagtgaagcggagtctacgacaggcccggaaaaaggggagacaccttgagttggctaatcaaaaactgtcagaaaagcttgccgcaggcgccttgccccacatcaatgctcggggtcccgtccgtccaccatatcttagaggttag

SEQ ID NO: 14179 - RNA, 438 nt, synthetic construct
  misc_feature 1..438: note = source = /note="Description of Artificial Sequence: Synthetic coding sequence"
  source 1..438: mol_type = other RNA
atggacgaaaactacaatttactgcctcacggcgtcaactttcaagacgctatcttccccgatacacaggagaaccgtcggatgtttagtagtctattccaattcagtaactgttcccaaggtcagcagctcgcaactttcagctccgactgggaaattcaggaagactctcggctcatgtgttcctccgtacagaaggcccttttcgaggaggaagaccacgttaaaaagctgcagcagaaggttgctacactcgaaaaaaggaacagacagttaagagaaagggttaaaaaggttaaaagaagtttaagacaggcacggaaaaagggaagacatctggaactggctaatcagaaactttccgagaagctggccgcaggcgccttgccccatatcaacgctagaggtcccgtgagaccaccatacttgagaggatag

SEQ ID NO: 14180 - RNA, 1830 nt, synthetic construct
  misc_feature 1..1830: note = source = /note="Description of Artificial Sequence: Synthetic coding sequence"
  source 1..1830: mol_type = other RNA
atggagttgggatgctggacacaattagggcttactttcttgcagcttttacttatatccagcctgcccagagagtacacagtgatcaacgaagcatgcccaggggcggagtggaacatcatgtgcagagaatgctgcgaatacgaccagatcgaatgcgtatgtccgggaaaacgcgaggtcgtggggtatacaatcccttgttgtcgtaacgaggagaacgaatgcgattcttgtctgatacaccctggctgtacaattttcgagaactgtaagagttgtcgtaatgggtcttggggcgggacattagacgatttttatgtaaagggattttattgcgcagagtgcagagcaggatggtatggaggtgattgtatgccatgttcttccagcccttgtttccatgacggtacatgcgtgttagataaagccggctcatataagtgtgcttgcctggcaggttataccggacagaggtgtgaaaaccttctggaggagagaaattgtagcgaccccgggggccccgtcaatggttaccagaaaatcacggggggaccgggcttaatcaacggcaggcacgccaagattggtaccgtggtaagtttcttctgcaacaactcctacgttttgtccggtaatgagaagcgcacctgccagcagaatggggaatggtccggcaaacaaccgatctgtattaaagcatgcagggagccaaaaatttcagacctggtcaggcgcagagtgcttcctatgcaggtccagtccagagaaactccattgcaccagttgtactcagccgcgttttccaagcagaagctccagagtgcacctaccaagaagccagccttgccttttggggatctgccaatgggatatcaacacttacatacacagctccagtacgaatgtattagtccattctacaggaggctcggaagctccaggcgtacatgcctgagaacaggaaaatggtccggtcgcgcccctagctgcatccctatctgtggtaagattgagaatatcactgcccccaaaactcagggactaagatggccgtggcaggccgccatctacagaaggacctctggagtgcatgacggttctttacacaaaggtgcatggtttctggtttgcagcggagcattggtaaatgagcgaactgtcgtagtggctgctcattgcgtgacggaccttggcaaagtcactatgattaagaccgccgatcttaaagttgtactcgggaagttctatcgcgatgatgatcgagatgaaaagacaatacaatccctccaaatcagcgccatcatcttacaccctaattacgatcccatcctgcttgatgccgacattgctatcctgaaactgctggataaggcaagaatctcaactcgcgttcagcccatttgcctggccgcctctagagacctctcgacatcttttcaagagagccacatcaccgtcgcagggtggaacgtgctggctgacgtacggagtccaggatttaaaaacgatacgcttcggagcggtgttgtgagtgtagttgacagccttttgtgtgaagagcagcatgaggaccatggaatccccgtttctgtcaccgataacatgttctgtgcttcttgggagcccactgctccttctgatatctgtacagccgagactggtggcatagcagcagtgagtttcccaggccgggcctccccagaacccagatggcatttaatgggtctggtgtcttggtcatacgacaaaacttgctcccacagactaagcactgcgtttaccaaagtgcttccattcaaggattggattgagcgcaacatgaaatag

SEQ ID NO: 14181 - RNA, 2163 nt, synthetic construct
  misc_feature 1..2163: note = source = /note="Description of Artificial Sequence: Synthetic coding sequence"
  source 1..2163: mol_type = other RNA
atggaactgggttgttggacccagcttggcctcacttttttgcagcttctcttaattagctccctgcctagagaatatacggttatcaatgaagcatgtccgggagccgagtggaatatcatgtgcagagaatgctgtgagtacgaccaaattgagtgcgtatgcccagggaagcgggaggtggtagggtacaccattccatgttgtaggaacgaagagaacgagtgtgattcttgcctgattcatccaggatgcacaatcttcgaaaactgcaaaagttgccgaaacggatcatggggaggaactctagacgacttttatgtgaaaggattctactgcgccgagtgtcgtgcgggctggtatgggggcgactgtatgcgatgcggccaagtgttgagagcacctaagggtcagatactactggagagctatccgcttaatgcacattgtgagtggactatccatgcaaaaccaggatttgtgattcagctccgcttcgtaatgctgtcattggagtttgattatatgtgtcagtatgactatgttgaagtaagggatggggataatcgggacggtcagatcattaagagggtatgtggtaacgaaagacccgccccaattcagtccatagggtcatcgctgcacgtgctcttccattctgacgggtctaagaacttcgatgggtttcatgccatctacgaagagattaccgcctgcagctcttctccctgtttccacgatgggacatgtgtgctcgacaaagccggatcatataaatgcgcttgcttagctggttacaccggacagcgttgtgagaatttgctcgaagaaagaaattgctccgatccaggggggccagtcaatggctaccagaagattaccggtgggcctggcctcattaacggaagacacgctaagattggtacggtagtttccttcttctgcaataattcctacgtcctgtccggaaacgagaagcgcacatgccagcagaacggggagtggtccggaaaacagccaatatgtatcaaggcatgccgagagccaaaaatatctgatcttgtgaggagacgagtactgcccatgcaagtccagtctcgcgaaaccccattgcaccagctgtattctgctgcctttagtaaacaaaaacttcagagcgcacccacaaaaaagcctgccctcccctttggtgatttgcccatgggctatcaacacctgcatacacagttgcaatatgaatgcatcagccctttctataggcgattaggatcatccagacgcacatgcctaagaactggaaaatggagcggtcgtgctccatcatgcattcccatctgtggcaagattgaaaacatcaccgcgcccaaaacccagggtctgagatggccctggcaagcagccatctaccgaaggacatctggcgtacatgatggatctcttcacaagggcgcttggtttctcgtgtgttctggggctctcgttaatgaacgcacagtggtcgttgccgcgcattgcgtgaccgatcttggcaaagtgacaatgatcaagaccgccgacctcaaagtggtgctaggtaagttttacagagacgatgacagagacgagaagacgattcaaagcctacaaatctctgcgattatcctccaccccaattacgacccaatattactagatgccgatatagctatcctgaaactgttagacaaggcaagaatatcaacaagagtgcagcctatctgcctcgctgcatcaagagatttgtctacttcttttcaagagtcacatatcaccgtcgcgggctggaatgtgctagccgacgtgaggagcccaggttttaagaatgacacactaaggtcaggcgttgtgtccgtcgtggactccctcctgtgcgaggaacagcacgaagatcacggcatacctgtcagcgtaacagataacatgttctgcgcttcttgggagcctaccgccccatcagacatatgtacagccgagacaggtgggattgctgccgtatcattccccggacgagcatcaccggaacccagatggcatctgatgggtttggtatcttggagctacgacaaaacctgtagccaccgactgtctactgcattcacaaaagtgctgccttttaaagattggatcgaacgtaatatgaaatag

SEQ ID NO: 14182 - RNA, 1134 nt, synthetic construct
  misc_feature 1..1134: note = source = /note="Description of Artificial Sequence: Synthetic coding sequence"
  source 1..1134: mol_type = other RNA
atggaagccttactgctgggtgctgggctacttctaggagcctacgtgttggtatattataacctcgtgaaagcaccaccctgtgggggtatgggaaacctcagaggaaggacagcagtcgttactggcgccaacagcggaattggtaaaatgaccgcactggagctcgctaggcgcggggctcgcgtagtgctggcctgcaggtctcaggagcggggagaagcagccgccttcgatttacgccaggaaagtgggaacaatgaagtcatatttatggcactggatttggcctcgttggcttctgtgcgcgccttcgctactgctttcttgagttctgagccacgcctggacattcttattcacaatgctggcatttcttcgtgtggccggacgagggaagcttttaatttgttactgcgggtgaaccatatcggcccattcttactcacacatctgttgctcccatgtctgaaagcttgtgccccatctagagttgtcgtggtggcttctgccgcacattgccggggacgcctcgactttaagcgcctggatcgtcccgtcgtcggttggcgtcaggagctgagggcctatgccgatacaaagcttgccaacgtactatttgctagagagcttgccaaccaacttgaggctacgggcgtcacctgctatgccgcacacccaggccccgttaattcagaactgttcttgcgacatgttccagggtggcttagaccccttctgcggcctttagcctggctcgtgcttcgggcacctcggggtggtgctcagacgccattatactgtgctttgcaggagggaatcgaaccactttcaggtcgctactttgccaattgtcacgtggaggaagtgcccccggcagcccgggatgatagggccgctcacagattatgggaagcgtcaaaacgcctcgccggcctcggcccaggagaggatgcagaaccagatgaggatccacagtctgaggattctgaagctccatcctcactcagtaccccacatcctgaagagcccaccgtgtctcagccctacccaagtccacagagcagtcccgacctgagcaaaatgacccatagaatccaggcaaaggttgaaccagagattcagctgtcatag

SEQ ID NO: 14183 - RNA, 381 nt, synthetic construct
  misc_feature 1..381: note = source = /note="Description of Artificial Sequence: Synthetic coding sequence"
  source 1..381: mol_type = other RNA
atgatctccttccacgtgatctttctgtcacttggtcggggtaaactattcttacctgtcaatttctgctttcttaaacttaaaaactcccaagttaggatcccgaaagactttacatgtaatttgcacgttctcttccgtacagtgcagggtgaggatcgaaacaccatgttcagggggcactggagcatttacagtagaaacttcccgctcgctgttgtccccgcctacgtgactgaagacggcaagaatactagtcatagagcttccggccagttctgcaatgctctttctcaaggcgaaataccttcctccctgcaattggtgaatagctatgccctcgaaccccggactgacatgccttgtaactttctgacatag

SEQ ID NO: 14184 - RNA, 876 nt, synthetic construct
  misc_feature 1..876: note = source = /note="Description of Artificial Sequence: Synthetic coding sequence"
  source 1..876: mol_type = other RNA
atggcagtgacattaagtcttttgttggggggcagagtttgtgctgctgtgacacgctgcggtttcgctacccgaggagtggccggtcccggccccatcggcagagagccggaccctgactctgactgggaacctgaagagcgcgaattacaggaagtggagtccacactaaaacgacagaagcaggccatcagattccaaaagattcgccggcagatggaggcacccggcgctcccccacggaccctgacatgggaggcaatggagcagatccggtacctgcacgaagaattccctgaatcctggtcggtgccacggctggcagaaggatttgatgtttctactgacgtcatcaggagggtactgaaatctaagtttctccctactctggagcagaaactgaagcaagaccaaaaggtgctaaagaaggccggattggctcattcactgcagcatttaaggggatccggaaatacgagtaagttgttacccgccggacatagcgtgtcaggaagtcttctgatgcccggccatgaggcatcttcaaaagacccgaaccatagtacagcactgaaagtaattgagtccgatacccacagaacgaataccccaaggagaagaaaaggaaggaataaagagatccaggacttggaggaatccttcgtaccggtcgcagcccccctgggacacccgcgagaactccagaagtacagttctgatagcgaatcaccacgtggcaccgggtccggcgctctaccctcgggccagaaactggaagagctgaaagcggaggaacctgataactttagctccaaagtggttcaacgggggagagaattcttcgatagtaatggtaactttctgtacagaatctag

SEQ ID NO: 14185 - RNA, 2541 nt, synthetic construct
  misc_feature 1..2541: note = source = /note="Description of Artificial Sequence: Synthetic coding sequence"
  source 1..2541: mol_type = other RNA
atgtttaagtgttggtctgttgtactggttttgggctttatctttctggaaagcgagggcaggcctacaaaggagggcggttacggactaaagagctaccaacccctgatgcgacttaggcataaagagaagaaccaggagtcgagtcgggtaaaaggcttcatgattcaagatggtccctttggctcctgtgaaaataaatattgtgggctcggtaggcactgcgtcacaagccgcgagactgggcaagccgaatgtgcatgtatggatctgtgtaaaaggcattataagcctgtctgcggcagcgacggcgagttttatgagaatcattgcgaggttcaccgcgccgcctgcctcaagaaacagaaaattacaatcgttcataatgaagactgcttttttaaaggagataaatgtaagaccactgaatactctaaaatgaagaacatgcttttagatttgcagaaccagaaatatatcatgcaggagaacgagaaccccaatggagatgatatttcacggaagaagttgctggtggaccagatgtttaaatacttcgatgcagattccaatggcctcgtcgacatcaacgaactgacgcaggtgatcaagcaggaggagctgggtaaagacctttttgattgcactctgtatgtgctccttaaatatgatgattttaatgccgacaagcatctagctctcgaggaattttaccgggcttttcaggttatacagctttctctgccagaagatcagaaactgtcaattactgcagctactgtcggacagagcgctgttctgtcttgcgctatacaaggaactctaagacctcctatcatctggaaacgtaataatataattttgaataatctcgaccttgaagatattaacgactttggagatgacggatccctatacattactaaggtcacaacaacacatgttggtaattatacctgctatgcagatgggtatgagcaggtttatcagactcacatttttcaagtcaatgtccctccagtgatccgcgtgtatccagaatcacaggccagagaaccaggagtcaccgcctctctaagatgtcacgccgagggtataccaaaaccccagttagggtggctaaagaatggtatagacattacaccaaaactaagtaaacagctcaccctgcaagctaacggatctgaggtgcacatttcgaacgtgcggtacgaagataccggggcctatacatgtattgcgaagaacgaagcaggtgttgacgaagatatcagtagcctgttcgtggaggattccgcccggaagacactggccaacattttatggagagaggaaggactagggatagggaatatgttttacgttttttacgaagacggcattaaggtgatccagcctatcgaatgcgaatttcagcgacacatcaaaccctcagagaaactgctggggtttcaggacgaggtttgtcccaaggctgaaggagatgaagtgcagagatgcgtctgggcgagcgccgttaatgtcaaggacaaattcatttatgtggcccaacccactctggaccgcgtactgatcgttgatgtccagtctcaaaaagtggttcaagcagtgtctacagaccccgtgccagtgaaattgcattacgataagtcacatgatcaggtttgggttctgtcttggggcaccctggaaaaaacatcaccaactctgcaggtaattacactcgcctccggaaacgttccccaccataccatccacacccagcctgtgggtaaacaattcgaccgggttgatgacttttttatccctacaactaccctgataatcacccacatgcggttcgggttcatactccacaaagacgaagcagctctacaaaaaatagatctagagaccatgtcctatatcaagacgatcaacctgaaggattacaaatgtgttccccaatccttagcctatacacatctaggaggctactacttcatcggttgtaaacctgactctaccggtgcggtgtccccacaggtcatggtcgacggagtcacggattcagttattggcttcaacagcgatgtcaccggtaccccttacgttagcccagacgggcactacttagtatcaatcaacgatgtcaaaggtttggtgagagtccagtacatcactatcaggggcgagatccaagaggcattcgacatctataccaacctacacatctctgacctggctttccaaccctcattcacagaggctcatcaatacaacatatatggctcctctagcactcagactgatgtcttgtttgttgaactctcaagcggtaaggttaaaatgatcaaatctctgaaggaacccctgaaagcggaggaatggccatggaaccgcaaaaatcgccaaattcaagattccggactctttgggcagtatctcatgacacctagcaaagacagtctcttcattttggatggacggctcaataagctgaactgcgagattacagaagtagagaaggggaacacagttatttgggttggtgatgcttag

SEQ ID NO: 14186 - RNA, 291 nt, synthetic construct; identical to SEQ ID NO: 12547
  misc_feature 1..291: note = source = /note="Description of Artificial Sequence: Synthetic coding sequence"
  source 1..291: mol_type = other RNA

SEQ ID NO: 14187 - RNA, 1971 nt, synthetic construct
  misc_feature 1..1971: note = source = /note="Description of Artificial Sequence: Synthetic coding sequence"
  source 1..1971: mol_type = other RNA
atgcgtacagtagttctaaccatgaaagcaagtgttattgaaatgttcctagtgctgctggtgacaggcgttcatagcaacaaagaaaccgcaaagaagattaaaagaccaaagttcaccgtgcctcaaatcaactgcgacgtaaaggccgggaagatcatcgacccggaattcattgtaaagtgcccagcaggatgccaggatcctaagtatcatgtatacgggaccgacgtttacgccagttacagctcagtgtgtggcgcggccgtgcactcaggagtcttagacaatagtggaggaaagatcttagtccggaaagtcgccggccagtctggctataagggttcatattcaaatggagtccagagtctgtcactcccgcgctggagggagagctttattgttcttgagtccaaacccaaaaagggcgtaacttatccatctgccctcacgtattcctcgagtaagtcccctgcagcccaagctggtgaaaccacaaaggcctaccaaagacctccaattcccggaacaaccgctcaacccgttacactgatgcagctccttgccgtcaccgttgccgtggcaactcctactactctccctaggccctccccatccgcagcaagcacgacctccataccgagaccccagtccgttgggcatagatctcaagagatggacctgtggtcgacggctacatatacctcttcccagaacaggccccgcgcagaccctggactcgtccccaaagaagaactcagcactcaatcattggagccagtgtctctgggggacccaaattgtaagatcgacctatcattcttaatcgacggtagtacctccatcggtaagcggcgcttcagaatccagaaacagctactcgctgacgtcgcacaagccctggacatcgggccggccggaccactaatgggggtggtgcaatacggggataatcctgccactcactttaaccttaagacacacaccaattctagagatttgaagactgcgatcgaaaagattactcaacggggcggacttagtaatgtggggagagctattagttttgtgacaaagaacttcttttcaaaggccaacggcaaccgatctggcgctccgaatgtagtagtcgtgatggttgacgggtggccaaccgacaaggttgaggaggcttctagattggcacgggaaagcggtattaacatcttcttcatcactatcgagggcgcagcagagaatgaaaagcagtatgttgtagaaccaaattttgcaaataaggccgtgtgtcgaacaaacgggttctactctctccacgtccaatcctggttcggtctccacaaaactctgcagccacttgttaagcgtgtatgcgataccgatcgacttgcctgtagcaagacctgcctgaactctgccgatatcgggtttgttattgatgggtcctcctccgtgggtactgggaatttcaggactgttctacagtttgtcactaacctcactaaggaatttgaaattagcgacacagacacaagaatcggcgccgtgcagtatacttatgagcagcgattggaattcggatttgataaatatagctcaaaacctgatatcttgaatgctatcaaacgggttgggtactggtccggcggtacatctactggcgcggcaatcaatttcgccttagaacagttatttaagaagtctaagcctaataagagaaaattgatgattctgattacagatggccggagctacgatgacgtgcgcatcccagccatggcagcgcacctgaagggggtgatcacctacgccattggagtggcctgggcagcccaagaagaactggaagttattgcgactcatccagcccgggatcatagttttttcgttgatgaatttgacaatttgcatcagtacgtgccccgcattatccagaacatctgcaccgaatttaatagtcagccacgcaattag

SEQ ID NO: 14188 - RNA, 2082 nt, synthetic construct
  misc_feature 1..2082: note = source = /note="Description of Artificial Sequence: Synthetic coding sequence"
  source 1..2082: mol_type = other RNA
atgcgcaccgtggtcttgactatgaaagcctctgtgatagaaatgtttctggttttgctggtgactggagtccattccaacaaagagacagctaagaagattaagcgccccaaatttaccgtaccccagataaattgtgatgtcaaagccggtaaaattatcgatcctgaatttatcgttaagtgcccagctggttgtcaggatcccaagtatcatgtgtatggaaccgatgtatatgcaagttactcttctgtgtgcggggccgctgtgcactcaggcgtattagataacagcggagggaaaatcctcgtaagaaaggtcgctggacaaagcgggtataaaggatcctactccaacggagtgcaatctctgtctctaccgagatggagagaaagctttatcgttcttgagtctaaacctaaaaagggagttacgtacccatctgccctcacatactcatccagcaagtccccagctgcacaggccggcgaaactacaaaggcataccaaaggccccctatccccggaaccactgcccagccagtaaccttaatgcagctgctagctgtcacggttgccgtcgccacaccaacaaccctgccacgtccctcaccgtccgccgcgtcaacgaccagcattccccggccccagtctgtgggtcaccggagtcaagagatggacctttggagcacagctacctataccagctcacagaatcgccctagagccgatccaggcatacaaagacaagatccgagcggtgccgcattccaaaaacccgttggagcagatgtgtcattaggtgaaatggactcttggaagcctggaagcgtgctgttggacgaaggccttgtccctaaggaggaactcagcacacagtctctcgagcctgtttccctaggagatcccaactgcaaaattgacttatcctttctgatcgacgggtccacaagcatcggcaagcggagattcagaatccagaaacaattgctggcagatgtcgcacaggccctggatattggaccagcagggcctttgatgggtgtggtacaatacggagataatccagcaactcatttcaacctgaagactcatacaaactcacgagacctcaaaaccgctattgagaagataacccagagaggggggctatctaatgtgggcagagcaatttcttttgtaaccaaaaatttcttttctaaagccaatggaaatagatcgggagctccaaacgtcgtcgtagtaatggtggacggctggccaacagataaagttgaagaggcttcacgtttagcacgggaaagcgggattaatatatttttcattacaattgaaggagccgccgagaacgagaaacagtatgtggttgaacccaatttcgcaaataaagcagtgtgtcgcaccaatggattttactccctacacgtccagtcatggttcggcctgcacaagacgctgcagcccctggtgaagagagtctgtgatacggatcgtctagcatgcagtaagacctgtctgaactccgctgacatcgggtttgtcatagatggctcttcctccgtgggaaccggcaattttagaacagttttacaattcgtcactaacctcaccaaagaatttgaaatttccgacacagataccaggattggggcagttcagtacacttacgagcagcggctcgaattcggtttcgataagtacagttctaagcctgacatacttaatgcgatcaaaagagttgggtattggtcaggaggcaccagcaccggagccgctatcaacttcgcactcgaacagctgttcaagaaaagtaaacctaacaagcgtaaacttatgattctcatcactgacggacggtcttacgacgatgtgcgtatacctgccatggctgctcaccttaagggcgtgatcacatatgcaatcggtgtggcttgggcagcccaagaggaactcgaagttattgcaacacacccagcccgagatcactctttcttcgtagatgaattcgataacttacatcagtatgtacctagaatcatccagaatatctgtaccgaatttaattctcagccaaggaattag

SEQ ID NO: 14189 - RNA, 555 nt, synthetic construct
  misc_feature 1..555: note = source = /note="Description of Artificial Sequence: Synthetic coding sequence"
  source 1..555: mol_type = other RNA
atgttctgtctgttgcatctgtgtttctatcttgcgaatttcgccagcagcatcaaaagaacccatgcagtaaacggatgctgtggattgcagatgatcgccctgtgggcacaatcctccggtaacgccgatgctcgagtggaggagatacttgcaggagaagagagacgtctggccgcactcctcggatctcagggcatgcggttttgggtgtgcctagcagcttgtcgggccatgtgggggcttgcagcgaggaggggaagagcagaagatagtagtagttccccagtggatgcctccaagttcccctggagaggcggtcagcatagaaccacaatgatgccatgtctgttgagagttggagtttttcgaccttgtcacgtccgccctactggggacccttcctgtgatgtgcagccacctcgactgggttttagcagggtgcctgatacgcaggtcgctttttatggtagtggtcactgggatccaactccctttagtgtgcactcttgtttctttaatttccaagttagaaaaattatttttctgctgtag

SEQ ID NO: 14190 - RNA, 864 nt, synthetic construct
  misc_feature 1..864: note = source = /note="Description of Artificial Sequence: Synthetic coding sequence"
  source 1..864: mol_type = other RNA
atgacatcagctgcccactattatcctaaactcatgtcaataatgggcaacgttttgagattcttacctgcttttgtccgaatgaaacaactgatcgaggaggggtatgtcggtgagcctctcgtgtgcgaggtgcaagtccatgggggttccctcctcggaaaaaaatataattggagctgcgatgacctgatgggcggcggcgggctccactccgtcgggacctacattattgatctcctcacttttttaactggccagaaagctgtcaaagtgcacggactcttgaaaacctttgtaaagcaaacggaccacatcaagggaattcggcagatcacatcagacgacttctgcacctttcaaatggttctagaaggcggagtttgttgtacagtgacactgaacttcaatgtacccggtgaattcaagcaagatgtgaccgtcgttggatcggcaggtaggctacttgcggtgggcacagacctgtatggccagaggaattcagcgcccgagcaagaactcctggtccaagacgcgacccccgtatccaattctctgttacccgaaaaagctttctcggacatacctagcccttatctgcggggaactatcaagatgatgcaggcagttcggcaggcctttcaggatcaggacgacagacgtacctgggacggccgccccctcaccatggcagctacattcgacgactgtctttacgcgctatgcgtagtcgacactattaaaagaagttcacaaacaggagaatggcagaacatcgctatcatgaccgaagaacctgagttaagtcccgcctacctgataagcgaggcaatgcgtaggtctcggatgtcgctctattgttag

SEQ ID NO: 14191 - RNA, 1173 nt, synthetic construct
  misc_feature 1..1173: note = source = /note="Description of Artificial Sequence: Synthetic coding sequence"
  source 1..1173: mol_type = other RNA
atgctacccggagtgggtgtgtttggaacctcactgactgctagagtaattattcccctcctgaaagatgagggattcgccgtaaaagctttatggggtagaacacaggaggaagccgaggagctggctaaagaaatgagcgtccctttttacacaagcagaatcgacgaggtcttactgcaccaagacgttgatttggtgtgtatcaatttgccacctcccctcacacggcagatagcggtgaagacgttaggcatcgggaaaaatgtgatctgcgaccgtacagcgactcctttggacgcatttaggatgacgagcgctgcacattattatccaaagctgatgtcaatcatgggtaacgtcctcagatttctacccgcgttcgttaggatgaaacagctgatagaagagggttacgtcggagagcctctggtctgcgaagtgcaggttcacggaggatctctgctgggaaagaaatataactggagttgcgacgacttaatgggaggcggaggcctgcactctgtgggtacatacataatcgatttgctgactttcttgacggggcagaaggcggtaaaagttcacgggctactaaagacattcgtaaaacagaccgatcacattaaagggattaggcagataaccagcgatgacttttgcactttccagatggtgctggagggcggagtatgttgtaccgtgacactgaacttcaatgtcccaggcgaatttaagcaagacgtgaccgttgtgggcagcgccggccgactcctcgctgtaggtaccgacctgtatgggcagcgaaactcagcccccgaacaagaactacttgtccaggatgctaccccagtttcaaattctttgttacctgagaaggcatttagcgatatcccatcaccctacttacgcggcacaatcaaaatgatgcaggccgtccgccaagccttccaggaccaggatgatcgccgaacttgggatggacgacctctgactatggcagccacatttgatgactgcctttacgcgctgtgcgtggtggatactataaaacgatcgtctcagaccggggaatggcaaaatattgctattatgaccgaggagccagaactgtcacctgcctatctcatcagtgaagctatgcggagatctcggatgagtctttattgctag

SEQ ID NO: 14192 - RNA, 5718 nt, synthetic construct
  misc_feature 1..5718: note = source = /note="Description of Artificial Sequence: Synthetic coding sequence"
  source 1..5718: mol_type = other RNA
atgcagtcgagattactcctgttgggtgcacccggagggcatggcggtcccgcctccaggagaatgcggctacttttaagacaggtggtccagcgccgcccaggaggggacagacagcggcccgaggttagacttctgcacgccggatcaggggccgacaccggtgatacggtcaatataggcgatgttagctataagctaaaaattccaaagaatcccgaactcgtgcctcagaactacatcagcgattctctagcccaatcagttgtgcagcaccttcggtggatcatgcaaaaggatctgctgggccaagatgtcttccttattggaccacctggccccctgagacgtagcattgctatgcaatacctggagctcactaagcgggaagttgaatacatcgctctcagtagagacaccacggagactgacctgaagcagaggagggaaattcgcgccggtacagctttttacatagaccagtgtgccgtgagagccgctaccgaaggaagaactctgatccttgaaggactagaaaaggccgaacgcaatgtgttacctgtgctgaacaatttactcgagaaccgcgaaatgcagttagaggacggccgttttctgatgagcgccgagcgttacgacaagttactgagagatcacaccaagaaagagctcgatagctggaaaattgttcgtgtctccgaaaattttagagtgatcgcccttggtctgcccgttcctcgctactctggtaacccgctggatccaccacttagatctagattccaggcacgggacatctactaccttccttttaaagatcaactgaagctgctctattcgatcggtgctaacgtatccgcagagaaagtgtctcaattattgagcttcgcgactactttgtgttcacaggaatcgagcacactgggtctccccgactttcccttggattccctggctgctgcagtccaaatcttagacagctttccaatgatgccaatcaaacacgcaattcagtggctctacccttattccatactgctgggccatgaaggtaagatggccgtcgagggtgttctgaagaggtttgagctccaggatagcggatcttccttgctcccaaaagaaatcgtaaaagtagaaaagatgatggagaatcacgtttcgcaagcctctgtcactattaggattgccgacaaggaggtgaccatcaaagtccccgctggcaccaggcttctcagtcaaccatgcgcgagcgaccgattcattcagactctgagtcataagcaactgcaagccgaaatgatgcaatcccatatggttaaagatatttgcctaatcggaggaaaaggctgcgggaagacagttatcgccaagaatttcgctgacaccctcggctataatatagagccaatcatgctttaccaggatatgaccgcaagagatctgctgcagcaacggtacaccctcccaaacggcgataccgcgtggcgcagctccccgttagtaaacgccgccctcgagggcaagctggtgcttcttgacgggattcaccgagttaatgcaggaactcttgctgtcttgcaaagactcatacacgaccgggagttgagcctgtacgacggctcacggctgcttagagaagacagatacatgcgtttgaaagaggaattacaactgtcagacgagcagctgcaaaagcgaagcattttccctattcatccttctttcagaataattgcacttgcagaaccccccgtgataggtagcaccgctcatcagtggttgggccccgaattcctgaccatgttcttcttccactatatgaaaccactcgtgaaatcagaggaaatccaggtgattaaagaaaaggtgccgaacgttccccaagaagccctcgataagctattgtccttcacccataaacttagagagacacaggacccaacggcccagtcactcgctgcctccttgagtacccgacaactgctgcgcattagccggagactgtcacaataccccaatgagaaccttcatagtgcagtgaccaaagcttgcctgagcaggttcctgccctcattagccagatctgcacttgagaaaaatctggccgacgctaccattgagatcaacaccgatgacaatctagaaccggaactcaaggactacaaatgcgaggtgacgtctggtactctcaggatcggcgccgtgtctgcccctatctacaatgctcacgagaaaatgaaagtacctgatgttctattctatgacaatattcaacacgtcatcgttatggaggacatgctcaaggatttcttgctcggtgagcatctccttttagtcgggaatcagggcgtgggtaaaaacaagatcgtggaccgcttcttacacttactcaacagaccacgtgagtatattcagctgcatagagacacaaccgtgcaaacacttacccttcagccctccgtgaaagacggactaattgtttatgaagactcacccctcgtgaaggcagtgaagcttggacacattctggtcgtcgacgaggcagataaggcccctaccaatgtaacctgtatactcaagactttagttgagaatggtgagatgatcctcgccgatggacggcggatagtagccaacagcgccaacgttaacgggagagaaaacgtggtggtgattcaccctgattttagaatgatcgtgctcgccaatagacctgggttccctttcctgggcaatgatttttttgggaccctaggcgatatcttttcctgccatgcggtcgataatcctaagccacactccgaattagaaatgctccggcagtacggaccgaacgtgcctgagcctatccttcaaaagttggttgcagcgtttggtgaactgagaagcctggctgatcagggcattatcaactatccctatagcactcgcgaggttgtcaatatagtgaaacacctccaaaagttcccgactgagggcctttcctctgttgtgcgcaatgtattcgacttcgattcctacaataatgatatgcgagaaattctgattaatactcttcacaaatatgggattcctattggcgccaagccaacaagcgtgcagctggccaaggagctgactcttcccgagcaaactttcatgggttactggaccatcggacaagctagaagtggcatgcaaaaattgctgtgtcctgtcgaaacccatcacattgatatcaaaggaccggccctgattaatatacaagagtaccctattgaacgtcacgaggaacgatcgctgaatttcaccgaggaatgtgctagctggcgaatcccgctcgacgagattaatattatttgtgatattgccacctctcatgagaacgagcagaacacactatatgtagtgacttgcaatcccgcctctctgtattttatgaacatgactggcaagagtggattcttcgttgatttttttgacatatttcctcgaaccgccaatggagtgtggcatcctttcgttacagtagctccactaggctcaccccttaaagggcaggtcgtgctgcacgagcaacagagtaacgtaatcttgctccttgatactacgggcagagccttgcaccgtctcatattacctagcgaaaagtttaccagcaagaagcctttttggtggaataaagaagaagccgagacatacaagatgtgcaaggaattctcacacaaaaattggctagtgttctataaggaaaagggtaactccttgactgttttggatgtgttggagggacgcactcacactataagtcttccgattaacctgaaaaccgtgttcttggtagccgaagataaatggttgctcgtagaaagcaagacaaaccagaaatacctgttgaccaaacccgcccacatcgaatccgagggaagtggtgtgtgccagctgtacgtcctgaaggaggagcccccctcgaccggctttggagtaacccaggagacggagttttcaatcccccacaaaatatctagtgaccagttatcctccgaacacctcagctctgctgttgagcaaaagattgctagccccaatagaattttatcagacgaaaaaaattacgcaactattgtagttggtttccccgacttaatgagcccaagcgaagtgtattcttggaagcggccatcaagtctgcacaagagaagcggaacagacacctccttttatcggggcaaaaaaaagagaggtactccgaaacagtccaattgcgtgacccttctcgatacaaaccaagtagtacgaatcctgccccccggcgaggtgccacttaaggacatttacccaaaggacgtgaccccaccacagaccagtggttacatagaagtaactgacctccagagcaagaagttgagatatataccaataccccgcagcgaaagcctgtctccttataccacctggctgtcgacaattagtgatactgatgcgctgctcgctgaatgggataagagcggagttgtaacagtagacatgggcggtcatatacgtttgtgggagacgggactggaacgtttgcagcggtcactgatggagtggagaaacatgataggccaggatgatagaaacatgcaaatcacaatcaatagggactcaggggaagatgtgagctcacctaaacatgggaaggaggaccccgacaacatgcctcatgtgggcggcaacacctgggccggaggcacaggaggtagagatacagccggactgggtgggaaagggggcccttatcgcttggatgctggtcataccgtctaccaggtaagtcaggcagaaaaggatgcagtgcctgaagaagtgaaaagggccgctagagaaatggggcagagggcttttcagcagaggctcaaagaaattcagatgagtgaatacgacgcggcaacatacgagagattttcaggagcagtacggcgccaggtgcatagcctgcgtattattctcgataatctgcaagcaaaaggaaaggagagacagtggcttagacaccaggccacgggggagctagatgatgccaagatcattgatggattgacaggggagaaggccatatacaagaggcggggcgagcttgagccccagctaggaagcccacagcaaaaacctaagagattgaggctggtggttgatgtgtcaggaagtatgtatcgctttaacagaatggacggccggttggaacgtacgatggaagccgtgtgcatggtgatggaggcctttgaaaactatgaagagaagttccagtatgatattgtaggacatagtggcgacggctacaatatcggtctggtgcctatgaacaagatcccaaaggacaataagcagaggttagagattcttaaaacaatgcatgcgcacagccaattttgcatgtccggcgatcatactttggaaggaaccgaacacgctatcaaggagattgttaaggaggaagccgacgaatactttgtaattgtcctgtctgatgcaaacctctcacgttacggaatacacccagcgaaattcgcacagatattaactagggacccacaggtaaacgcctttgccattttcatcggcagtctcggagaccaggcaacaaggttacagagaacactgcctgcaggtagaagtttcgtcgccatggacactaaagacataccacagatattgcaacagattttcacgagtacaatgctttcttccgtctag

SEQ ID NO: 14193 - RNA, 561 nt, synthetic construct
  misc_feature 1..561: note = source = /note="Description of Artificial Sequence: Synthetic coding sequence"
  source 1..561: mol_type = other RNA
atggaggcattacccctattagccgcgacgactccagatcacggacggcacagaaggttgctgctgctgcccttgctgttgtttttgctccccgccggcgccgttcagggttgggagacagaagagaggccacggacaagggaagaagagtgccacttttacgcaggaggtcaagtctatccgggggaagccagtagggttagtgtggccgatcactcactgcatctgagtaaggcgaagatctcaaaacccgctccttactgggaaggtactgccgtaatagacggcgaatttaaagaactgaagcttaccgactatagggggaagtacctagtcttctttttctatcctcttgactttacatttgtgtgccctactgaaatcatagcttttggggaccgtctggaagaatttagatctatcaacaccgaagttgtcgcatgtagcgtggactcacaatttactcacctagcttggtcagtctcttacacctacattagacgcaagaaacggatggatcttctcctgaagcacggccagattactctggatatgatatag

SEQ ID NO: 14194 - RNA, 816 nt, synthetic construct
  misc_feature 1..816: note = source = /note="Description of Artificial Sequence: Synthetic coding sequence"
  source 1..816: mol_type = other RNA
atggaagctcttcctctgctcgccgctaccacacctgatcacggtagacatcgacgactcttactgttgccattgctattatttttgctgcctgccggtgccgtccaaggctgggaaacagaagaaagacctcggaccagagaggaagagtgccatttctacgcgggcggtcaagtgtatccaggcgaagctagcagggtctccgtggcagaccattccctacacctcagcaaagcgaaaatctccaagcccgctccttactgggaaggaacagcagtgatcgacggcgagtttaaagagctgaagcttacagactatcgagggaagtacttggtttttttcttctaccccttagattttacatttgtgtgcccaaccgaaatcattgcttttggcgatcgattggaggagttccgtagcattaataccgaggtagttgcatgtagtgtggattcccagttcactcacctagcctggatcaatacacctcgtagacaggggggcctcggacccataagaattcccctcctcagcgacctaacccatcagattagcaaggactacggagtatacttagaggactcaggccacacactacgcggactctttattatagatgacaagggcattctgaggcaaatcacattaaacgatctcccagtcggaagatcagttgacgagactctgaggttggtacaggctttccagtacaccgataagcatggtgaggtctgtccggcaggctggaaaccgggaagcgagactatcataccggaccctgcaggaaagttaaaatacttcgacaagctgaattag

SEQ ID NO: 14195 - RNA, 558 nt, synthetic construct
  misc_feature 1..558: note = source = /note="Description of Artificial Sequence: Synthetic coding sequence"
  source 1..558: mol_type = other RNA
atggatcacagaagccgtctgcgcggtaccggcctgaatcgaatccccggcactcagagccgtgcaccccgagttccactgcctttccatgtccagcaggaagccagagagggagaagactgggagagggaacctccaagacagcgccctccaatatacgagccccctgagagcgaagaattaccggataatgtgatggtgagtaaacctgccccctactgggaagggactgccgtcattgatggggagtttaaagaactaaagttgacagactaccgcggtaagtatttagtcttcttcttttatcctctcgactttacctttgtctgtccgaccgaaatcatagcctttggagatcgtttagaagagtttagatcaatcaacactgaagttgtggcctgcagtgttgactcacagttcacgcatctcgcttggatcaatacaccaaggcgacagggaggtcttggacctatcagaatccccctgctgagcgaccttacccatcagatcagtaaggattatggggtgtacttagaggactcgggacatactttatag

SEQ ID NO: 14196 - RNA, 843 nt, synthetic construct
  misc_feature 1..843: note = source = /note="Description of Artificial Sequence: Synthetic coding sequence"
  source 1..843: mol_type = other RNA
atggcccgcttttgggtatgcgtagctggtgctggtttttttctcgcctttctcgtgctccactcccggttttgcggttcacctgttctgagaaatttcacatttgcggtcagttggcgaaccgagaagattctttaccgtttggatgtgggttggccaaagcacccagagtacttcactgggactacattttgcgtcgcagtcgactccttgaacgggctagtgtacattggacaaaggggtgacaatatacctaaaatcctggtttttacagaagatggctactttctgcgagcttggaactacacagtagatacccctcacggtattttcgcagcttcaacactgtatgagcagagtgtgtggattaccgacgtgggttccgacttcatgatcctgtggctccacggagagaacggcacaggtcccgccaagtttaacattcctcacagcgtgactctggattccgccgggagagtgtgggtagcagataggggaaataagagaattcaggttttcgacaaagacaccggagagtggttaggtgcatggaacaactgtttcaccgaggagggcccctctagcgtccggtttacacctgacgggaaatatctcatcgtggctcaattaaatttatctaggttatccgttgttgccgctccgcctgttggatctattggagagtgtagcgtcatctctactatacagctcgctgaccaggtcctcccccatctcctcgaagtcgatcgcaagacaggcgcagtctatgtggctgagattggcgccaaacaggtacagaagtacgttcctctgaattcctatgttccgtccttcgggtcctag

SEQ ID NO: 14197 - RNA, 1044 nt, synthetic construct
  misc_feature 1..1044: note = source = /note="Description of Artificial Sequence: Synthetic coding sequence"
  source 1..1044: mol_type = other RNA
atggcccgtttttgggtttgtgtcgctggtgctggtttttttctcgcctttctggttttgcatagcagattctgtggttctcctgtcttgcgcaattttaccttcgccgtgtcctggcgcactgagaaaattctctacaggctagacgtcggatggcctaagcaccccgaatactttaccggaaccactttctgcgttgctgtggactcactcaacggtctggtgtatataggtcaacgcggggataacattcctaaaattctggtgtttaccgaggacggatacttcctaagagcttggaactatacggtggatacaccgcacggaatattcgctgcctccacattgtatgagcagtctgtgtggattaccgatgtaggctctggtttctttgggcataccgtcaagaagtatagtagttttggggatctagtgcaggtgctgggaactccgggaaagaagggcacaagtttgaacccacttcaattcgacaacccagcagagctctatgttgaagatacaggggatatctatattgttgacggagatggcggcctgaacaatagactgattaaactttcacaggactttatgatactgtggttgcatggcgaaaacgggacgggaccagccaagtttaacatacctcacagtgtgacacttgattccgccggccgtgtatgggtcgctgaccggggtaataagaggatccaggtgtttgataaagatacaggagagtggctcggtgcttggaacaactgtttcacagaagaaggaccctctagcgtgcggttcacaccagacggaaaatatttaatcgttgcgcagcttaatctctccagacttagcgtggtggcagcacctcctgtcggtagcattggcgagtgctcagtgattagtacaatccaactggctgaccaagtgctcccacatctcctggaggtggataggaagacaggtgctgtgtatgtcgcggaaatcggggcaaagcaagttcagaagtacgttccactcaattcttatgttcccagctttggatcatag

SEQ ID NO: 14198 - RNA, 1707 nt, synthetic construct
  misc_feature 1..1707: note = source = /note="Description of Artificial Sequence: Synthetic coding sequence"
  source 1..1707: mol_type = other RNA
atggttctgctgcactggtgcctcctgtggttactgtttccactctcctctcgaacccagaaactgccaacccgtgatgaggaattatttcagatgcagatcagagacaaggccttttttcatgatagttcagtcattcctgacggcgcggaaattagttcatacctctttagagacacacccaagagatatttttttgttgtggaggaagataacactccactgagcgtgacagtaacaccctgcgatgcccccctggagtggaaactctctctccaagaactccccgaggacagaagcggcgaggggtcgggcgacctggaacctctcgaacagcaaaagcagcagataattaatgaggaaggtactgaactgttttcttataaagggaacgacgtggaatatttcatctcctccagctcccctagtgggctgtaccaattggacctgctgagcactgaaaaggatacccacttcaaagtatatgctacaaccacgcctgagagcgaccaaccctaccccgaactgccctatgaccctcgtgtggacgtgacctctctaggacgaacaactgtgacactggcatggaaaccctctcccaccgcctccctgctgaagcagcccatacagtactgtgtcgtcatcaataaagaacacaatttcaaatcattatgtgctgttgaagcaaagttgagcgccgatgatgcctttatgatggcaccaaagcccggactggatttttctccatttgatttcgcccacttcgggttcccgagcgacaactccggcaaagagaggtcctttcaagccaagcccagccccaaattaggccgccacgtgtactcccgtcctaaggtagatattcagaagatttgtattggaaacaaaaatatattcaccgtgagtgaccttaagcctgacactcagtattatttcgatgtcttcgttgtcaacattaattctaatatgagcaccgcctacgtagggactttcgcacgaacaaaagaagaagctaaacagaaaactgtcgaacttaaggacggaaaaatcaccgacgtgttcgtgaagcggaaaggggcaaaattcttaaggttcgcacctgtatcatcccaccagaaagttactttttttatccattcctgcctcgatgcagtgcaaatacaagttagaagggatggaaagctactgctgagtcagaatgtggaaggcatacagcaattccaactgagaggcaaacccaaggccaaatacttagtgagactaaaggggaataagaagggcgcctcaatgcttaagattctggctaccaccaggcctacaaaacaaagtttcccttcactgcccgaggataccagaatcaaagcattcgacaagctccgcacttgcagttcagccacggttgcatggcttggcactcaggaaagaaacaagttctgcatctacaaaaaagaggtggacgacaattacaacgaggatcagaaaaagagagaacagaatcagtgtctcgggcctgatattcgtaaaaaaagtgagaaagttctctgcaagtacttccattctcaaaatcttcaaaaagcagttactacagagaccatcaagggacttcaaccaggcaagtcatatcttctggacgtgtatgtcatcgggcacggggggcacagcgtgaagtatcagtcaaaggtcgtgaagacacgcaagttttgctag

SEQ ID NO: 14199 - RNA, 489 nt, synthetic construct
  misc_feature 1..489: note = source = /note="Description of Artificial Sequence: Synthetic coding sequence"
  source 1..489: mol_type = other RNA
atgaaaggctttaccgcaaccctttttctatggactctgatttttcccagctgtagtggcggcggtgggggaaaagcctggccaacacacgttgtctgttctgactcaggtcttgaggtactttaccagtcttgcgaccccttacaggatttcggtttttctgtggagaaatgttccaaacaacttaaatccaatataaatatccgttttggtattattttgagagaagatatcaaagagctcttcctcgatctagccctaatgtctcaaggatctagcgttctcaacttcagctatcccatctgtgaggccgcactgcccaaatttagcttctgcgggagaagaaagggtgagcagatatactacgccggacccgtgaataaccccgaatttacaattccccagggcgaatatcaggtgctcctggaactatacactgaaaagcgttcaactgtagcctgtgcaaacgccaccattatgtgttcttag

SEQ ID NO: 14200 - RNA, 1698 nt, synthetic construct
  misc_feature 1..1698: note = source = /note="Description of Artificial Sequence: Synthetic coding sequence"
  source 1..1698: mol_type = other RNA
atggatttcttgttggcactggttctggtaagtagcctgtatttacaggcagcagctgagtttgacggccgatggccgagacagatcgtctcatctatagggttgtgcagatatgggggccgtatcgattgttgttgggggtgggcaaggcagtcatggggtcaatgtcagccagtgtgtcagcctaggtgcaaacacggcgagtgcatcgggcctaacaagtgcaaatgtcacccagggtacgccggtaagacatgtaatcaagaccttaacgaatgcggactgaagcctagaccatgcaagcacagatgtatgaacacttatggcagctacaaatgttactgcctcaacggatatatgctgatgcccgatggttcatgtagtagcgccttaacttgttcgatggccaactgtcagtacggatgcgatgtcgtgaagggtcagattcgatgccaatgtccatctccaggcctgcaactcgcacctgacggaaggacatgcgtagatgttgatgaatgtgcaaccgggagagccagctgccctcgctttaggcagtgtgtgaataccttcgggagctatatctgtaaatgccacaagggatttgacctcatgtatataggcggaaaatatcagtgccacgacatcgacgagtgcagcctggggcagtaccagtgtagttcctttgcaagatgctataatattcggggtagctataaatgcaaatgcaaagagggataccagggggatggcctgacttgcgtatacatcccgaaagttatgatagaaccttcaggccccatacatgttcccaaaggtaacgggacaatcctgaaaggagataccggcaataacaattggattcctgacgtgggcagtacgtggtggcctccaaaaactccctacattcctccaattatcaccaatcgacctaccagcaaaccaacaaccagacccacccctaagcccactcccatacccacaccacccccaccccctccactccccacagaacttagaacacctttgccccctaccactccggaaagacccaccaccggactgacaaccatcgccccagccgcatccactccaccaggggggatcacagtagataaccgcgtgcaaaccgaccctcagaaacctcgcggggatgtcttcatacctagacagcctagcaacgacttgtttgaaatttttgagatcgagaggggtgttagtgcagacgacgaggcaaaagatgaccccggggtattggtccattcttgcaactttgaccacggcttgtgcgggtggatccgcgaaaaggacaatgacttacactgggaaccaatccgggaccccgcaggaggccaatatctgacagtttcagcagcaaaagcaccaggaggcaaggccgccagattagtcctccctctcggaaggctcatgcactccggggatctctgcttaagcttccgccataaagtgacaggactccatagcggcacattgcaagtgttcgtcagaaaacatggagctcacggtgctgcgttatggggccggaatggaggacatggctggagacagacacagattacactgcggggagctgatattaagtctgtcgtcttcaagggggaaaagaggagagggcacacgggagaaattggacttgatgacgtgtctcttaaaaaagggcactgttcagaagaaaggtag

SEQ ID NO: 14201 - RNA, 1413 nt, synthetic construct
  misc_feature 1..1413: note = source = /note="Description of Artificial Sequence: Synthetic coding sequence"
  source 1..1413: mol_type = other RNA
atgaagcgttcagtggcagtatggttattagttggcctgtctctaggtgtgcctcagtttggtaaaggcgacatatgtgatcccaacccttgtgaaaatggtggtatatgcctgcccggcctggctgacggaagcttctcctgcgagtgcccggatggatttaccgatcctaactgcagcagcgttgtggaggtcggaccatgcactccaaacccttgtcacaacggcggtacttgcgaaatatcagaggcgtaccgcggcgatactttcattggctatgtctgcaagtgcccaagggggttcaatggaatccattgccagcataacatcaacgaatgtgaggtcgaaccttgtaagaatgggggaatttgcacagacctcgtcgctaattactcctgcgaatgcccaggagagtttatgggaaggaattgtcagtacaaatgcagcggacctctgggaattgaaggcggcatcattagtaaccagcagatcacagccagcagcacacacagggcacttttcggcttgcagaaatggtatccctactatgctaggctgaacaaaaagggactgattaacgcatggacagctgccgaaaacgacagatggccatggattcagatcaatttgcagcggaagatgcgcgtgaccggtgttatcacacaaggtgcgaagagaataggatcaccagagtacatcaaatcttataaaattgcctatagtaatgatggcaaaacctgggctatgtacaaagtcaaggggaccaatgaggacatggtgtttagaggaaatatcgacaacaatacgccatacgccaattcctttacacctcccattaaggcacaatacgtccgcctgtacccacaagtctgtagacgacattgcactctccggatggagctcttgggctgtgaactgtctggatgctcagaacctcttgggatgaaaagcggtcacattcaagattatcagataaccgctagttccatttttaggaccctcaatatggacatgtttacatgggaaccgcgaaaagcacgcttggacaagcaggggaaagtcaacgcttggacctctggccacaatgatcagagtcagtggttacaggtggacctgttagtgcctactaaagtcaccgggatcattactcaaggggcaaaagactttggacacgtacagttcgtcggcagctataagttggcctactcaaatgacggcgagcattggactgtgtaccaggatgaaaagcagcgaaaggataaagtgttccaaggtaattttgacaacgatactcatagaaagaacgttatcgacccacctatctacgctagacacatacgaattttaccctggtcttggtacgggagaataacactgcggagtgagttactggggtgtacagaggaggaatag

SEQ ID NO: 14202 - RNA, 1254 nt, synthetic construct
  misc_feature 1..1254: note = source = /note="Description of Artificial Sequence: Synthetic coding sequence"
  source 1..1254: mol_type = other RNA
atggcctcttacttatatggcgtgctgttcgccgtcgggctctgcgctcccatctactgcgtgtcccctgcaaatgccccatccgcctatcccaggccatcgtcaaccaaatctacgcctgcaagccaggtctacagcctgaacacggattttgctttccgcctttaccgccgtcttgttcttgaaacccctagccagaatatctttttctctcccgtcagcgtttccactagcctcgccatgctctccttaggagctcactctgtcactaagacacagatcctgcaagggttaggatttaatctgacccatacacccgaatctgccatacaccaaggttttcagcacctcgtgcattctctgacagtgcctagcaaagatttaacgttaaagatgggctcggccctgtttgtcaaaaaagagcttcaactgcaagccaacttcctcggaaatgtcaaacgcctttacgaagctgaggtcttctcgaccgacttttccaatccaagcattgcacaagcacgcatcaattctcacgtcaaaaaaaagactcaagggaaggttgttgatatcatacagggtctggatctgcttaccgccatggtcttggttaaccatatattttttaaggctaaatgggaaaaacctttccatccagagtatacccgtaaaaacttcccgttcttagtgggcgagcaggttaccgttcacgtccccatgatgcaccagaaggagcagttcgcatttggggtagacactgagctcaattgtttcgtattgcagatggattataaaggcgacgcagtggcattttttgtactcccatctaaaggcaagatgcggcagctggaacaggccctcagtgcacggactctgagaaaatggtcacactcactgcagaagagatggatcgaagttttcattccaagattctctatctcagcttcgtataatctagaaaccatcctgcctaaaatgggaatccagaacgtgtttgataaaaacgcagatttttccggaatagcaaagcgggattcactgcaggtttcaaaagcaacacataaggcagtgcttgacgtgtcggaggagggaacagaagcaactgctgctaccacaacaaaatttatagtccgtagcaaggatgggcccagctactttacagtgtcatttaatagaacatttctaatgatgattactaataaggcaacagacggcatcctattccttggaaaagttgaaaaccccactaaaagttag

SEQ ID NO: 14203 - RNA, 486 nt, synthetic construct
  misc_feature 1..486: note = source = /note="Description of Artificial Sequence: Synthetic coding sequence"
  source 1..486: mol_type = other RNA
atgttaatgcccgttcactttcttctgctcttacttttactgctgggcggaccccgaaccggtctcccacataagttctacaaggccaaacctattttctcttgtctgaacaccgctctcagcgaggccgagaaaggacaatgggaggatgcttccctgctttcaaaaaggtctttccactacctgagatcacgggatgcttcatccggagaagaagaggagggcaaagaaaaaaagacgtttccaatttctggggccaggggaggggccaggggcacaaggtatcgatacgtcagccaggcacagcctcgtggcaagcccagacaagataccgctaaatctccccatagaacaaaattcacgttgtccctcgatgtacccactaacattatgaatctgctgtttaacatcgccaaagctaaaaatctccgcgcccaggctgccgccaatgctcacctgatggcccaaattggaagaaaaaaatag

SEQ ID NO: 14204 - RNA, 2091 nt, synthetic construct
  misc_feature 1..2091: note = source = /note="Description of Artificial Sequence: Synthetic coding sequence"
  source 1..2091: mol_type = other RNA
atggctatggcaagactgggctcttggctaggagaagcacagtggctagcgttggttagtttgtttgtggctgcactggctaccgttggtctgtaccttgcacagtgggcactagcccgtgctagaccccaaccccagaggcgggcggtggaaccaggcgagggtcctcgtcctggtagtgacgcgctactgtcctggatactgacactgggcagctggagaagtcagtggcaggcagcctgggtgaccgccttaaatgaggaagcggaaagaaagggaggacccccattccttagcttcgaagaagatcccagacagcaggcattagaactggtggtgcaagaggtttcctctgtgctccgaagcgcagaagaaaaggtagttgtatgccatgttgtaggccaggcaattcagttccttgtgtcagagacgcccgcactcggggccggctgccgcctgtacgatatgcggttgagtccattccatcttcaactggagtttcatatgaaagagaaaagagaagacctgcagatcagctggagttttatcagtgtgcccgagatggctgtaaacatacaacccaaggccttaggagaagatcaggtggccgagacaagcgccatgtccgatgtattgaaagacattcttaagcatctcgccggatctgcatctccctccgttgtgctgattactaagccgacaactgttaaagaggctcagaaccttcagtgcgctgcttcgaccgcgcaggaatcttgcccccccaaacctccgagggctcatgaactcaagttgctcgtgcgcaatatccacgttctactgctgtctgaaccaggcgcttcaggacacatcaatgccgtgtgtgtcgtacagctgaacgaccctgtccagagattctcctccacactcacgaaaaacacccctgacttgatgtgggaggaagaatttactttcgaactcaacgccaagtccaaagagttgcacttgcaaatctcagaagcagggagatcctctgaagggctactcgcaacagcaaccgtaccgttagatctctttaagaagcagccatccggaccacagtccttcacactcacctctggatccgcctgtggctctagcgtactcggctcagttaccgcagaattcagttacatggagccgggcgaattgaaatcctggccgattccaccaccagtcccagcagccaagatagagaaggaccgaaccgttatgccttgcggcacagtcgttacaaccgttactgccgtcaagacgaaacctagagtagatgtgggacgtgcttccccgttaagttcagactcacctgttaaaacacctattaaagtgaaggtcatagaaaaggatatttccgtacaagcaatcgcatgtcgatcggccccggtttccaaaacactctcaagctccgatacagaactcctggtgctgaatggctcagaccctgtcgctgaggtggccatccggcagctttccgaaagttcaaaacttaaactcaagagcccacgcaaaaagtctacaattataatatctggtatttccaagacctcactgtcacaggatcacgatgcagcactgatgcaaggatacacagccagtgtggatagtacccaccaggaagatgcaccatcccatccagagcgcgcagctgcaagcgccccacccgaggaagcagagagcgcccaggcgtcactggcccctaaacctcaggaagatgaactggattcttgggatttagagaaggaaccccaagctgcagcctggagcagccaagtccttctggatcccgacggagatgaactgtccgagtccagcatgtctgttttagagcccggcaccgcaaaaaagcataaaggaggaattcttaggaagggggctaagttattctttagaagacgtcatcagcagaaagatccaggtatgtcccagtctcacaatgacctagtgttcctcgagcagcccgaagggagtagaaggaaaggcatcacactcacgcgcattctgaataagaaacttttgtcgcgccataggaacaaaaacaccatgaacggcgctccagttgaaccgtgtacatag

SEQ ID NO: 14205 - RNA, 669 nt, synthetic construct
  misc_feature 1..669: note = source = /note="Description of Artificial Sequence: Synthetic coding sequence"
  source 1..669: mol_type = other RNA
atgcctgcgtcaagtccattcctcttagccccaaaagggccccctggcaatatgggcggtccagttagggaaccagctctgagcgtggccctatggctcagctggggagccgctctgggcgcagtagcatgtgctatggccctgctgacacaacagactgaacttcagtcactgcggcgagaagtgtcgcgccttcagggtacaggcggccctagccagaacggagaagggtatccgtggcagtctcttccagagcagcattcagtactccacttggtgccaattaacgcgacctctaaagacgactccgacgtgaccgaagtgatgtggcaaccagcactcagaagagggagaggacttcaagcccagggctacggcgtccgtatacaagatgcgggagtgtatttgctctacagccaggtactcttccaagacgttacatttacaatgggtcaggtcgtttcacgggaaggacagggacgacaggagacacttttccggtgcatacgatctatgccatctcacccagatcgagcctacaattcatgttacagcgcaggggttttccacctccaccagggagacatcctgagcgtaatcataccccgagctagagccaaactgaatctttccccacacggcacatttctgggcttcgttaagttgtag

SEQ ID NO: 14206 - RNA, 2205 nt, synthetic construct
  misc_feature 1..2205: note = source = /note="Description of Artificial Sequence: Synthetic coding sequence"
  source 1..2205: mol_type = other RNA
atgtggggtctcttacttgcactggccgcatttgctcccgccgtgggccccgctcttggagccccaaggaacagtgtgttgggtcttgcacagccgggaacaaccaaggtgcccggcagtactcctgcattgcacagctcacccgcccaacctcccgccgaaacagcaaacggcacctcagagcagcatgttcgaattagagtaataaaaaaaaagaaggtgataatgaagaaaagaaagaaactgacactgacacggccaactccacttgtaaccgctgggccactcgtcacgcctacgcctgcaggtactcttgaccccgccgagaaacaggagaccggctgtcctccactggggctggagtcactacgagtttccgacagcagattagaagcctcaagctcccagtcctttggcctgggcccacaccggggaaggctgaacattcaatccgggttggaagatggagatttgtatgacggcgcgtggtgcgctgaggagcaggacgccgacccctggttccaggtcgatgcgggtcaccccactaggttctcaggcgtaatcacccagggtagaaactccgtctggcgctatgactgggtcacctcctacaaagtgcaattcagtaatgactcccgaacctggtggggatcacgcaaccactcatcaggcatggacgccgtatttcctgccaactcagatccggaaacacccgtgttaaacctcctgcccgaaccgcaggtcgcccgatttatccggttgctgccgcagacttggctacaagggggcgcaccgtgcttacgcgccgagatattagcctgtccagtcagcgatcccaacgacttattcttagaggcacccgcctccggtagttccgatcccctggattttcaacaccacaattacaaggctatgagaaaactgatgaaacaagtgcaggagcagtgcccaaatattacccgtatctattcaataggaaagtcttatcagggcctcaaactctacgtgatggagatgtcagacaaaccaggggaacacgaactgggggaacctgaggttaggtatgtggccggcatgcacgggaacgaagccctcggaagggagttacttctcctgttgatgcagtttctgtgtcacgaattcctgcggggcaatcctcgcgtcactcgcctcctctccgaaatgcgtattcacttactgccgagcatgaacccagatggttacgaaatagcttatcaccggggcagcgaattagtggggtgggccgaaggtagatggaataatcagagcatcgacctcaaccataacttcgcggacctgaacactcccctctgggaggcacaagacgacgggaaggtaccacatatagtgcccaaccaccatctgccattgcctacttattataccctgcctaacgcaacagttgcaccagagacccgagctgtaataaaatggatgaaaagaattccttttgttctctccgcaaacctgcacggcggcgagctggttgtctcttacccttttgatatgactcgaacaccttgggcggcccgcgagctgaccccaaccccagacgatgccgtattcagatggctgagcacagtttacgcaggctctaatttagcaatgcaggacacatcacggcggccctgtcattctcaggatttctcagtgcacggaaatataattaatggagctgactggcataccgtccctggatcaatgaacgatttttcatatttgcatactaactgctttgaggtgaccgtcgagttgagttgcgacaagttccctcacgaaaacgaactccctcaggagtgggaaaataacaaagatgctctgctgacctatctcgagcaagtaagaatgggtattgccggcgtggtccgagacaaagacactgaactgggaattgcggatgccgtcatcgccgtagacggtataaatcacgatgttacaactgcttggggaggtgattattggcgactcctaactcctggtgattatatggtcacagcttccgctgaaggatatcatagcgtgaccagaaactgccgcgtcactttcgaggaaggcccttttccatgtaactttgtgctcaccaagaccccaaagcagagactccgggaattactggctgcaggtgccaaagtcccccccgatctgcgtcgacgactggagcggctcagaggacagaaagattag

SEQ ID NO: 14207 - RNA, 759 nt, synthetic construct
  misc_feature 1..759: note = source = /note="Description of Artificial Sequence: Synthetic coding sequence"
  source 1..759: mol_type = other RNA
atgcgcgctcctcttcttccacccgccccagtggttctttccctgttaatcctgggttccggccattacgccgcaggactcgacctcaatgacacttattccggtaaaagagaaccttttagcggcgaccattctgcagatggttttgaagtcacgtctaggtccgaaatgagttccggctcagagatctcgcctgtgtcagaaatgccaagctcctccgagccttcatccggcgccgactacgattacagcgaagagtatgataacgagccacagattcccggctatattgttgatgattcggtccgggtggagcaggtggtcaagcctccacagaacaagacagagtccgagaatacaagcgacaaaccaaagcgtaagaaaaagggagggaagaatggaaagaataggagaaatagaaagaagaagaacccgtgtaacgccgagtttcagaatttttgtattcacggtgagtgtaagtacatagagcacctcgaagccgttacatgcaagtgtcaacaggagtatttcggagaaagatgtggagaaaagtctatgaaaacccactctatgatagatagttcactgagtaaaatcgcgctggcagcaatcgctgcgtttatgtcggccgtgatcctgaccgccgtggcagtaattactgtgcaactgagacgccagtacgtgagaaaatacgaaggagaagccgaggaaagaaaaaaactgcgccaggagaacgggaatgtgcacgccattgcttag

SEQ ID NO: 14208 - RNA, 8487 nt, synthetic construct
  misc_feature 1..8487: note = source = /note="Description of Artificial Sequence: Synthetic coding sequence"
  source 1..8487: mol_type = other RNA
atgccaaagagggctcactggggagcgctgagcgttgtacttatcctactgtggggtcaccctcgtgttgctctggcatgtccccatccgtgtgcttgctacgttcctagcgaagtgcactgtactttccgatcgctcgcttcagtccctgccggaatagctaagcacgtcgaacggattaacctgggcttcaactccatacaagctctgtccgaaacatcgttcgctgggctcacaaagctggagctacttatgattcacggaaatgagatcccctcgatccctgacggcgccctgcgcgatttatctagtctgcaagttttcaaattttcctataacaaacttagagtgatcacaggacagacgttacaaggcctctccaatttgatgaggcttcacatcgaccacaataaaatagaatttatccaccctcaagcttttaacggcctcacaagcctcaggctcctccatctggaagggaacctcttgcatcaactccaccctagtactttcagcacattcaccttcttagattattttcgcctctccacaattcgccacctgtatctggcggaaaacatggtacgtaccctgcccgcttctatgttgaggaatatgcccttgttagaaaacctataccttcaaggaaatccctggacatgcgactgtgaaatgagatggttcctcgaatgggacgccaagtctagaggcattctcaaatgcaagaaggataaggcctacgagggaggacagctgtgcgccatgtgcttttcccctaagaaattatataaacacgaaatccataagctcaaagacatgacgtgcttaaagccatctatagaaagcccactccgccagaataggtccaggagcattgaagaggagcaggaacaggaagaggacggaggcagtcaactgattttagagaagttccagttgcctcagtggtctattagcttaaacatgactgacgaacatgggaatatggtaaacctagtgtgtgatatcaagaagcccatggatgtatacaaaatccaccttaaccagaccgaccctccagatatagacatcaatgccaccgtggcccttgacttcgaatgccccatgacgcgcgagaactacgaaaagctttggaaattaatagcctattattcggaggtacccgttaagctgcaccgcgagctaatgttgagcaaagaccctcgcgtctcttaccagtaccgccaggacgccgacgaggaagctctttattacacaggcgtgagggcccaaatcttggccgaacctgagtgggtgatgcagcctagtattgacattcagctaaatcgcagacaaagtacagccaaaaaagtgctcttatcctactacactcaatattcacagactatctccaccaaagacacaaggcaagcgcgtggtaggtcatgggtgatgattgaaccatcaggcgccgtgcagagggatcagactgttctggagggaggcccatgccagctgtcttgtaatgtgaaagcctccgaaagcccctccattttttgggttctcccagacggatcaatcttgaaagctccaatggatgaccctgatagcaagttttccatattgtcatctggctggctgagaatcaagtctatggagccctccgattctggactgtaccagtgcattgcacaggtcagagatgagatggataggatggtttacagagtcctggtgcaatctccatccacgcagcccgcagaaaaagatacagttacgatcgggaagaacccaggtgaatctgttaccctgccatgtaacgcactggctatccccgaagcccatctttcttggattctgccaaatcggagaatcataaacgacctagccaatactagtcacgtgtatatgcttcccaatggaacattatccattcctaaagttcaggtttcagatagcgggtactacagatgcgtggcggtgaaccagcagggcgccgaccacttcacagttggaattacagtgacaaagaaaggctcggggttaccatcaaaaagagggcggcggccgggtgctaaggctctatcaagagtgagggaggatatcgtggaggatgaggggggtagcggaatgggggatgaggagaatacaagccggagacttctgcatcccaaggaccaggaggtgtttctgaaaaccaaagacgatgcgatcaatggggataaaaaagctaaaaaagggcgtcggaagctgaagctttggaagcatagtgagaaggagcctgaaactaacgtggctgagggtaggcgcgtgttcgaaagtaggagacgcattaacatggctaataagcagataaatcctgaacggtgggccgacatactggccaaggtcagagggaaaaacttgccaaaagggacagaggtccctcccctaatcaaaaccacatcccccccatccttatctttagaggttacacctccattccctgccatctcaccgccgagtgcctcgcctgttcaaactgtgacatccgccgaagaatcaagcgctgatgtcccgctgcttggtgaggaagaacatgtattgggtaccatctccagcgcgtcaatgggactagagcacaaccacaacggggtgattttggtcgaacccgaggtaactagtacccccctcgaggaagttgtggatgatctgagcgagaaaaccgaagagatcacctctacagagggcgatctcaaaggaacagcagcacccacactgatttctgaaccctacgaacccagtcctaccttgcatactttagacacagtctacgaaaaaccaacacacgaagagacagcaactgagggttggtctgccgcagatgtgggaagttctccagaaccaacttcttccgaatacgagcccccacttgacgccgttagccttgcagagagcgaaccaatgcagtactttgaccctgatctggaaacaaaatcccagcctgatgaggacaaaatgaaagaagacacatttgcgcatctgacgcctactccgacgatttgggttaacgactccagcacatcccaattattcgaggactcaactatcggtgagcctggtgtgcctggacagagccacttacagggattgacagacaatatccatctagtaaaatcttccctgtccacgcaggatacactgctgatcaagaagggcatgaaggagatgagccagacacttcaaggggggaatatgttagaaggtgaccccacacactcccgctcaagcgagtcagagggccaggagagcaaatctatcacactgcccgactccaccctgggcattatgtcttcaatgtcccctgtaaaaaaaccagccgagaccaccgtgggaactctgttggataaagacacaaccaccgccacaacgacccccagacaaaaagtcgctcccagttcaacaatgtccacacacccgtctagacggaggcctaatggacgaaggagactgcgcccgaataaatttagacacagacataagcagacaccacctaccacctttgctccctccgaaacgttttcaacacagccaacccaagcacctgatataaagatctcatcacaggttgagtctagtctcgtccccaccgcttgggtcgacaatacggtgaacacacctaagcagctggaaatggagaaaaatgccgaacccacaagtaaagggacacccagaagaaagcatggcaagagacccaacaagcaccggtacaccccgtcaaccgtgtcgtcaagagcctcaggatccaaaccatcgccatcccccgagaataaacatcgaaatatcgtcacccctagctcagagaccatcttgttgcccagaaccgtgagcctgaaaactgagggaccatatgatagtctagactacatgacaaccacacgtaagatttactcttcttatccaaaggtacaagaaaccctccctgtgacctacaagcccaccagcgatggcaaagaaatcaaggacgatgtggctaccaatgtggataagcacaaatctgacattctcgtcaccggagaaagtataactaacgctattcccaccagccgatctctagtgagcacgatgggggagtttaaagaggaatcatctccagtcggattccctggcacaccaacctggaacccttcccgaaccgcccaaccaggcaggctgcagactggcatccctgttacaacaagcggcgaaaacctgacagaccctccactccttaaagaactcgaagatgtggattttacctctgagttcctttccagtctgacagtgtccacaccgttccatcaggaagaagctggctcctcaactacgctctcttcgattaaggtggaggttgcgtcaagccaggccgagaccacaaccctcgatcaggatcatctcgaaaccaccgttgccatcctgctctccgagacaaggccccagaaccacactcctaccgccgctcgcatgaaagaaccagcctcaagttcacccagtaccatactgatgtcccttggacagactaccaccaccaaacctgctctgccatcccctcgcatctcccaggcaagccgcgacagtaaggagaatgtatttttaaactatgtcggcaatccggaaacagaagccacacccgttaataatgaaggcacgcagcacatgtccggcccaaacgaactgtccacccctagctctgaccaggacgcctttaatcttagtactaagctggaactcgaaaagcaagtttttggcagcagatctttgccccgcgggcctgattcccagcgtcaggatgggcgcgtccacgcaagtcatcagctcacccgcgttcctgcaaagcccattcttcctacagctacagttcggctcccagagatgtccacccagtccgcctcccgatatttcgtcacatcccagtcgccccgccactggactaacaaacccgaaattactacttatccttcaggagctctacccgagaataagcagtttaccaccccccgcctttccagtaccacaatccctcttcccctgcacatgtctaagccttcgatacccagtaagttcaccgatcggcggacagaccagttcaacggctatagtaaggtgtttggaaataacaacatcccagaagcacgaaatcctgtcggcaagcccccaagcccaagaatccctcattacagcaatggacgccttcccttctttactaacaagacactgtcatttccgcagctaggagtcactaggagaccgcaaatcccaacctcccctgcccccgtcatgcgtgagaggaaagtcatccctggttcatacaaccgaattcactctcactctaccttccacttggacttcggccccccagcacctcctttgctgcatacacctcagactactggcagcccaagcactaatcttcagaacattccgatggtgagttccacccaatcttctatatccttcatcactagttccgtccagagcagcggctctttccaccaaagctctagtaaattttttgctggtggaccgccagctagtaaattttggtcccttggagaaaaaccacagatccttacaaagtctccacagactgtgtccgtaactgccgaaaccgacaccgtgttcccctgtgaagctaccgggaaacccaaaccattcgtaacctggacaaaggtcagcactggcgcactgatgacacccaatacgagaatacagcggtttgaagtgctgaaaaacgggacccttgtgattagaaaggtacaggtgcaagatagagggcagtacatgtgcaccgcctctaacctccacggtttagaccgtatggtagtgctactatccgtgaccgtgcaacagccgcagattctggcctcacactatcaggatgtgaccgtatacctgggagacactattgccatggagtgcctcgccaagggcacaccagcgccccagattagctggatcttccccgaccgccgtgtgtggcagacagtttcacccgtcgaaggacgcataaccctacacgagaacagaaccctcagcatcaaagaggcatcatttagcgataggggagtttacaagtgcgtggcctctaacgccgccggagccgactcattagctattcgccttcatgtcgccgcactgcctcccgtgatacaccaggaaaaattggaaaatatatcccttccccctggcctttccattcacatccattgtaccgccaaagctgcccctcttcccagtgtgcgatgggttttaggcgatgggacccaaatccgtccgtcacagttcctgcacggcaatctgttcgtgttcccaaatggtacgctatacatccggaacttagctcctaaagacagtggaagatacgaatgtgtggcggctaacctggtcggatctgctagaaggactgtgcagctgaacgtgcagagggctgcagctaacgctcgaataactggcacctcacctcgccgcaccgatgttcgctacggcggcaccctaaaactagattgctccgcttcaggcgatccttggcctcgtatcctctggcggttgccttcaaaacgtatgatagatgccctcttttcctttgactctaggatcaaggttttcgcaaatggtacattagttgtgaagagcgtcacagacaaagatgccggagattacctgtgtgtggctaggaataaagtgggtgacgattacgtggtgttaaaggtcgatgtcgtgatgaagcctgcgaaaattgagcataaagaagagaatgatcataaggttttctatggcggcgaccttaaagtcgattgtgtggctaccggactccctaatccagaaattagctggtcactgcctgacggctccctggtcaacagctttatgcagagcgacgatagtggagggaggacaaagcgctacgtggtatttaacaacggaaccttgtacttcaatgaagtgggaatgagagaggaaggagactacacatgctttgcggaaaatcaggtagggaaagatgagatgagagtgcgagtgaaagtggtgactgcgcccgccacgattcgaaataaaacatatttggcagtccaggtgccgtatggagatgtggtaacggtagcttgcgaggcgaagggggaaccgatgcctaaggtaacatggctgagccccacgaacaaagtgatccccacatcctctgaaaaatatcagatatatcaggacgggacattactcattcagaaggcgcagaggagcgattcgggcaattatacctgtctcgtacgtaacagtgctggcgaggaccgcaaaactgtgtggatccatgtcaatgttcaacctccaaaaattaatggcaaccccaatcctattacaaccgtccgagaaatagccgccgggggctctagaaagctgatagattgcaaggcagaaggcatcccaactcccagagtgctgtgggcctttcccgagggcgttgtgctgccagcaccatactacggcaatcgcataaccgttcacggcaatgggtcactcgacatcagatccctaaggaaaagcgattctgtgcagctggtctgcatggcacgcaatgaaggaggcgaagcaaggttgatcctacaattgactgtcctcgagccaatggaaaagcctattttccacgatcctatctcagagaagatcaccgccatggcaggtcacacaatttccctgaactgctccgcagctggaacaccgactccctcactcgtgtgggtcctcccaaatggtaccgacctgcaatccggccagcaacttcagcgtttctatcataaagcggatggaatgttacacatttccgggttatcttccgtggacgcgggcgcctacagatgtgtcgcccgtaatgccgccggacacacagaacgactcgtcagcctcaaggtgggtctcaaacccgaagctaataaacagtatcataacctggtgtctataattaacggtgaaacacttaagctcccctgtacccctccaggggctggacaagggcggttctcttggacacttcccaatggaatgcatcttgaaggtcctcagacactgggaagagtgtccctgttggataatggaacacttaccgtgcgggaagcgtcagtttttgacagaggcacatatgtatgtcgcatggaaaccgaatatgggcctagcgtgacctcaatccctgtaatcgtaatcgcctatcctcctaggatcacctcagaaccaacgcccgtaatttatacaagacccgggaataccgtcaaactgaattgcatggctatgggcattcccaaggcagacatcacctgggagcttcctgataaatcccacttgaaagcaggagttcaggccagactctatggcaaccgcttcctccacccgcagggctccttaactatccagcacgccacacaaagggacgctggcttctacaagtgcatggctaaaaacatcctgggctccgattccaaaaccacttacatacacgtattctag

SEQ ID NO: 14209 - RNA, 3330 nt, synthetic construct
  misc_feature 1..3330: note = source = /note="Description of Artificial Sequence: Synthetic coding sequence"
  source 1..3330: mol_type = other RNA
atgcgactgttgttactagtgcccttgctcctagctcccgcgccggggtcatccgctccgaaggtgagacgtcaatcggatacctggggcccctggagccagtggtcaccctgttcacgcacatgcggagggggggtgagcttccgggagcgaccatgctatagtcaaagaagggatggtggatcctcgtgtgtgggacccgcaagatctcatcgatcctgtcgtacagagtcttgcccggatggcgcccgagatttcagggcagaacaatgtgcagaatttgatggagccgaatttcaggggagaagatatcgatggttgccatactactccgctccaaacaagtgtgaactcaattgcatacctaaaggtgaaaacttctattacaaacatcgggaagccgtcgtggacggaacgccttgcgaacctggaaaacgggacgtctgtgtggacggatcttgcagagtcgtcggatgtgatcacgaactagacagtagcaaacaggaggacaaatgtcttcgatgtggcggagatgggacgacgtgttatcccgtcgcagggacttttgacgccaatgatctgtctagaggatacaatcagatactgatagtgccaatgggcgccacatccattttgattgacgaagcagccgcatcacgcaacttcttagccgtgaagaatgttagaggagagtattacctgaacggacattggaccattgaggctgcaagagccctccccgcagctagtaccattttgcactacgaacggggtgctgaaggtgacctggctcctgaacggttgcacgcccgtggacctaccagtgagccactggtaatcgagctgatttcacaagaaccaaatccgggggtgcattacgaatatcatctgcctttaaggagaccatcaccaggcttttcatggtctcacgggagctggagcgactgctctgcagaatgtggaggcggacatcaatccaggctggtgttttgtaccattgaccacgaagcgtatccggaccatatgtgtcagaggcagccaagacctgcagatagaagaagttgtaatctgcacccttgcccagaaaccaagcggtggaaggccggtccttgggcgccctgcagcgcgtcctgcggcggtggatcacagagcaggagtgtctactgcatctcctcagacggagctggaattcaggaagctgtggaagaagcagagtgtgcaggccttcctggtaagccccccgctatccaggcctgcaatttacaacggtgtgccgcgtggagtcccgaaccgtggggggagtgttcggtgtcatgtggtgttggcgtccgtaagcgatccgtgacctgcagaggcgagagaggatcattgctgcacactgccgcgtgttccctggaagatagaccaccgctgactgagccatgcgtacatgaagattgccctctgttgtccgaccaagcttggcatgttggtacttgggggttatgcagcaaatcgtgttccagtggaactagaagacgccaggtaatttgcgcaattggaccaccttcccactgcggtagcctacagcattccaagcccgtagacgttgaaccgtgcaatacacaaccctgccaccttcctcaggaggtcccaagcatgcaggacgtccatacacccgcttcaaacccatggatgcccctgggacctcaggaaagccctgctagtgattcacgaggacagtggtgggctgcccaggagcacccatccgctaggggcgatcaccgaggtgaacggggcgatccacgcggtgatcaagggacacatttgtcagcactcgggcctgccccctctctacaacagccaccttaccaacagccattacgttcgggatctggtcctcacgactgcagacacagcccccatggatgctgccccgacggccacactgcaagcctgggcccacagtggcagggctgccctggagctccttgccagcagtcgcgatatggttgctgtccagacagggtgtcagtcgccgaaggaccccatcacgctggttgcaccaagtcctatggaggcgacagtaccggtggaatgccccggagtagagccgtggctagtacagtgcacaacactcaccaaccccaggcccaacagaacgagccatccgaatgtcggggcagccaatttggttgctgctatgacaacgtagccactgccgctggcccccttggagagggttgtgtcgggcagccgagccacgcctaccccgtcagatgcctgctgccaagtgcacatggttcctgcgcagactgggccgccaggtggtacttcgtggcttctgtcggtcagtgtaatagattttggtacggcggctgtcatggaaatgcaaacaactttgcttctgagcaagaatgtatgagtagctgtcagggatcactgcatggcccacgcagacctcaacccggcgctagtggtaggagtacacacaccgacggcgggggatccagcccagctggcgagcaggagccaagccaacatagaacaggtgccgcagtgcagagaaagccttggccaagtggtggtctttggcgccaggatcaacaacccggaccaggggaagcaccccacactcaggctttcggcgaatggccatggggccaagagctcgggtcaagggccccgggcctgggcggagatgccggctccccggccccgccattccactcttcctcctacaggatctccctcgcaggagtcgagccttccttagttcaggccgcgctggggcaactggtacgtctatcctgcagcgacgacacggccccagagtctcaggctgcttggcaaaaggatggccagccaatttcttccgacagacacagattgcaattcgatggttccctcattattcaccccttgcaggccgaagacgccggtacgtactcttgtggttcaacaagacccgggagggactcccagaaaatacagttaagaattattggtggagatatggccgttttgtctgaggcagagctgtctagatttccccagccccgagacccagcacaggatttcggacaggccggcgccgctggaccattaggcgctatcccttcttctcaccctcagccagccaataggttacgtctggatcagaatcagccaagagtagtggatgcctctcccggccagcgcattcgaatgacatgccgagcagaaggtttcccacccccagcaatcgagtggcagcgcgacggccagccggtgagtagcccgtcgacacatcgtcctgcacagggcccttggcaaggcctgaggagacccgctcgcgccggacagctgtag

SEQ ID NO: 14210 - RNA, 405 nt, synthetic construct
  misc_feature 1..405: note = source = /note="Description of Artificial Sequence: Synthetic coding sequence"
  source 1..405: mol_type = other RNA
atgaagagtgtgttgttgcttactacgctccttgtgcccgcccatttagtagccgcctggagtaataactatgccgtcgactgtccgcagcattgcgacagctctgaatgcaaatcttccccacgatgcaagcgtaccgtcctggatgattgcggatgctgcagagtctgcgcagctggacggggagaaacgtgctaccgaacagtgtcaggaatggatggaatgaagtgcgggccaggcctaagatgtcaaccgtcaaatggcgaagacccattcggggaagaatttggtatctgcaaagaacacgatatggcgagtggagacgggaacattgtcagagaagaagtggtgaaggaaaatgccgccggaagccctgtaatgcgtaagtggcttaacccaagatag

SEQ ID NO: 14211 - RNA, 555 nt, synthetic construct
  misc_feature 1..555: note = source = /note="Description of Artificial Sequence: Synthetic coding sequence"
  source 1..555: mol_type = other RNA
atgaagtctgtcctattgctaaccactttactggtgcctgcacatctggttgctgcatggtctaataactatgccgtggactgtcctcaacactgtgactcaagtgaatgcaaaagctcaccgaggtgcaaaaggactgtgcttgacgactgtggctgttgcagagtgtgcgctgctggtagaggagagacttgctatcgcaccgtttccgggatggacgggatgaagtgcggaccgggcttgagatgccagccttccaacggcgaggaccctttcggcgaagaatttggaatttgcaaggattgcccttatggtactttcggaatggactgcagagaaacttgtaattgccaaagcggaatctgcgaccgcgggactggaaagtgcctgaagttccccttcttccagtatagtgttaccaaatcctctaatcgctttgttagcttgactgaacacgacatggccagcggcgacggaaatatcgtcagagaagaggtcgtgaaggaaaacgcagctgggtctcctgtgatgagaaaatggctgaaccccagatag

SEQ ID NO: 14212 - RNA, 597 nt, synthetic construct
  misc_feature 1..597: note = source = /note="Description of Artificial Sequence: Synthetic coding sequence"
  source 1..597: mol_type = other RNA
atgccaattccagcgagcccccttcaccctcctctgccatccttgcttctttatcttctccttgaattagccggcgttacacatgttttccacgtgcagcagactgaaatgagccagactgtttctacgggcgagagtattattcttagctgttctgtacccaataccctgcctaacggacctgttctgtggtttaagggcacaggcccaaatcgcaaattgatttataattttaagcaggggaattttccacgcgtgaaggaaataggggatactactaaacctgggaacaccgatttttctacacgcataagagaaatctcactggctgatgcgggcacctactactgcgtgaagttcatcaagggcagagcaataaaggagtatcaatcaggtagagggacacaagtcttcgtcaccgccgagcagaaccctagacctcccaagaacagacccgccggaagagctggctcacgcgctcaccacgatgcacacacttgtctgagcgccctacctgagagaaacagtaccaattactttgttcagccttgttgttgtctgaggctcctgggcctgacaggcctcctctcgaagtag

SEQ ID NO: 14213 - RNA, 594 nt, synthetic construct
  misc_feature 1..594: note = source = /note="Description of Artificial Sequence: Synthetic coding sequence"
  source 1..594: mol_type = other RNA
atgcccatacctgcctccccactccatccccctcttccgtcgttattactctatctgttacttgagttagctggggtgacacacgtctttcacgttcagcagacagagatgtcccagaccgtgtctactggcgagagcataatcctttcatgctcagtacccaacactctcccaaatggacccgtgctgtggtttaaaggaaccggccccaatagaaaactgatctacaatttcaaacaaggaaatttccctagggtgaaggagataggagataccactaaacccgggaatacagatttctccactagaataagagagatctccctggccgatgctggaacttattattgtgtaaagtttataaaggggagggctattaaagaataccagtcagggaggggaacccaagtgttcgtgacagagcagaatcctcgacctcctaaaaacaggcccgctggtcgggccgggtctcgagctcaccatgatgcccacacctgtttatcagctctgcctgaacgtaatagcacaaattattttgtccagccatgttgctgtctgaggttactggggctcaccggtttactgagcaaatag

SEQ ID NO: 14214 - RNA, 1563 nt, synthetic construct
  misc_feature 1..1563: note = source = /note="Description of Artificial Sequence: Synthetic coding sequence"
  source 1..1563: mol_type = other RNA
atgaccacagacgacactgaggtgcctgccatgaccctggctccaggccacgccgcactcgagactcagacactgagtgctgaaacttcctctagagcgagtactcccgcaggacctatcccagaagccgagacccggggagcaaaacgaatttcaccagcgagagagacccgaagcttcactaagacgagccccaatttcatggtattgatcgcaacctccgtagaaaccagtgccgcaagcggatcgcccgaaggagccggcatgaccactgtgcagactatcacaggcagcgaccctcgcgaggctatattcgacacactctgtaccgatgatatctccgaagaagctaaaaccttgacgatggatattttgacactcgcacatacatcaactgaagcaaagggacttagttccgaaagttctgcgagctccgatggcccgcaccccgtgatcacaccatcccgagccagtgagagctctgcttcctcagacgggccacatccagttataacaccatcgcgagccagcgaatcctctgcatcaagtgacggcccgcatcctgtaatcacaccctcccgagcatccgagtcttctgcatcctctgacggccctcaccccgtgataaccccatcttggtccccaggttccgacgttacactgctcgctgaagcccttgtgacagttaccaatatcgaagtgatcaattgttcaataaccgaaattgaaaccactacttctagtatcccaggagcatctgacaccgaccttattcctactgagggcgttaaggcttcctccacgtctgacccccccgcattgccagacagcaccaataccaaacctcacattacagaggtgacagcttccgcagagacactttccactgcaggcaccacggaatcagccgctccagacgctacaattggtacgcccctccccactaactcaaccatcgagcgcgaagttaccgcacccggggccacaacattgtctggcgctctcgcaactggcaatcccctggaagaaacgagcgcattgagcgttgagaccccgtcctatgtgaaggtgtcaggagcagccccagtgtccattgaagccgggtccgcagtaggtaaaaccacctcattcgctggatcctcagcctcgtcctattcccccctggaagcagcactcaagaactttacgccctctgaaactcttacaaccgacatcgctactaagggaccttttccaacaagcagagaccctctcccaagtgtcccccctacaactacaaactcttcaaggggcacaaatagtacactagctaaaataactactagtgctaagacaactatgaaaccaccaaccgccacccccacaacagctaggactagaccgacaactgacgtgagcgccggagaaaacggaggttttttgctcctgcggctgtctgtggcgtcgccagaagatcttaccgatccacgtgttgcagaacgattaatgcagcagctgcaccgggagttacacgcccacgccccccatttccaagtctcactgctaagagtgcgcagaggttag

SEQ ID NO: 14215 - RNA, 600 nt, synthetic construct
  misc_feature 1..600: note = source = /note="Description of Artificial Sequence: Synthetic coding sequence"
  source 1..600: mol_type = other RNA
atgctctggaggcaactcatatattggcagctccttgcgcttttctttttacctttttgtctctgtcaggatgagtatatggagtccccacagacaggcggccttcccccggactgtagtaagtgttgccaccacgggaataacggaaataacggcgccactggtcacaagggagaaaagggttatcccggtatcccacctgagcttcaaattgcttttatggctagcctcgcgacgcacttcagtaaccagaacagtgggatcattttttcatcggtcgaaacaaatattggaaatttcttcgatgtaatgactggcagattcggtgctcctgtgagcggggtctatttctttacattctccatgatgaaacatgaggacgtcgaggaagtctacgtgtatcttatgcacaatgggaacaccgtgtttagcatgtattcctacgaaatgaaaggcaaatccgatacaagttccaaccacgctgtgttgaagctggccaagggcgatgaagtctggttacggatgggcaacggcgcccttcatggagaccatcagcggttctcgacctttgcaggctttcttctctttgaaaccaagtag

SEQ ID NO: 14216 - RNA, 960 nt, synthetic construct
  misc_feature 1..960: note = source = /note="Description of Artificial Sequence: Synthetic coding sequence"
  source 1..960: mol_type = other RNA
atgttgtggcgccagctcatatactggcagctgctagccctcttttttctccccttttgcctctgccaagacgagtatatggaagtgagcggcagaactaataaagtcgtcgccaggattgtccagagccaccagcagaccggccgatccggctctagacgggaaaaagtgagagagcggtcccacccaaagaccggaaccgtcgataacaatacttccaccgacctaaaaagcctgagacccgatgaactccctcacccagaggttgatgatctcgcccaaatcaccacattttggggacaatctcctcagaccggagggcttcctcccgattgcagtaagtgctgtcacggtgattatagtttcaggggctatcaaggtccaccaggtccgcccggccctccggggatcccgggcaaccacggcaataatggcaacaatggcgcgactggccacgagggcgcaaagggggagaaaggcgacaaaggagatctcggacctcggggcgagagaggacaacacggcccaaagggcgaaaaaggctacccaggaatccctcccgagctacagatcgcgtttatggcgtctctggcgactcatttctccaatcagaacagcggtatcatcttctcatcagtggaaactaacataggaaatttctttgacgtcatgaccggcagattcggcgccccagtcagcggagtttacttctttacattttcaatgatgaaacacgaagacgtcgaagaggtgtatgtctacttgatgcacaatggtaatacagtgtttagtatgtattcttacgagatgaaaggcaagagcgatacctcctccaaccatgctgtgctgaaattggcaaaaggcgacgaagtgtggctgcgaatgggtaatggggcactgcatggagaccaccagcgcttttcaacttttgcaggcttccttctttttgagacaaaatag

SEQ ID NO: 14217 - RNA, 855 nt, synthetic construct
  misc_feature 1..855: note = source = /note="Description of Artificial Sequence: Synthetic coding sequence"
  source 1..855: mol_type = other RNA
atgactaaatcatcactcaggccgctgcaaaagcagtccccccagaccggaggactaccccctgattgtagcaagtgttgtcacggggattacagttttagaggctatcaaggcccccctggtccccctgggcccccaggcatcccaggtaaccacggaaacaatggaaataatggtgccacaggacacgaaggagctaaaggtgaaaaaggggataaaggggacctcggaccacgtggagaaagaggtcagcatggccccaaaggcgaaaagggttatccgggcatccctcccgagctgcagatcgcttttatggcttcactcgcgacacacttttcgaaccagaactcaggaataatctttagctcagtcgagacaaacataggaaatttctttgatgtgatgacagggaggttcggggcgcctgtgtccggcgtatatttttttactttctccatgatgaaacacgaggacgtggaggaagtctacgtatacctgatgcataatgggaataccgtctttagcatgtattcatatgagatgaaaggaaagtcagacacatcctcaaaccatgccgttctcaagttagctaagggagacgaagtgtggctgagaatggggaatggagcgctccatggtgaccatcagagattctccacattcgcaggattcctcctgttcgagacaaagtgccatggagagacccctgcaggcccccgcgattctgccgcaggtaaaagtaaggcttatctctgtcaagctgagtggatctggccagtacgcaagctgttacccgtttcatggcctcggtatcaacttttcggattcgtaagatggaaagagcagcatatctag

SEQ ID NO: 14218 - RNA, 234 nt, synthetic construct; identical to SEQ ID NO: 12579
  misc_feature 1..234: note = source = /note="Description of Artificial Sequence: Synthetic coding sequence"
  source 1..234: mol_type = other RNA

SEQ ID NO: 14219 - RNA, 237 nt, synthetic construct; identical to SEQ ID NO: 12580
  misc_feature 1..237: note = source = /note="Description of Artificial Sequence: Synthetic coding sequence"
  source 1..237: mol_type = other RNA

SEQ ID NO: 14220 - RNA, 627 nt, synthetic construct
  misc_feature 1..627: note = source = /note="Description of Artificial Sequence: Synthetic coding sequence"
  source 1..627: mol_type = other RNA
atgggggcacagggggcccaagaatctattaaagctatgtggagggtcccaggaactacgagaaggcccgtcaccggggaatccccgggtatgcacagaccagaggcaatgttactactacttacactagccttattgggaggccccacctgggctggtaaaatgtacggccctggaggcggcaaatatttttccactactgaagattacgaccatgagattaccgggctccgtgtctccgtgggtctgctgttggtgaaaagcgttcaagtgaaactgggtgatagttgggacgttaagctgggtgccctcggtggtaacacccaagaagtgaccctccagcccggcgaatacattactaaggtcttcgtcgccttccaagcattcttaaggggtatggtaatgtacacatcaaaagatcggtacttctatttcggcaaactggatggtcagatttcatctgcttatccttcccaagagggtcaagtgcttgttggtatctatggccagtaccaactgctcggcatcaagagtattggcttcgaatggaattaccccctggaagagccaacaacggagccccctgtgaacctgacttactctgctaactcacccgtcggacgatag

SEQ ID NO: 14221 - RNA, 288 nt, synthetic construct; identical to SEQ ID NO: 12582
  misc_feature 1..288: note = source = /note="Description of Artificial Sequence: Synthetic coding sequence"
  source 1..288: mol_type = other RNA

SEQ ID NO: 14222 - RNA, 339 nt, synthetic construct
  misc_feature 1..339: note = source = /note="Description of Artificial Sequence: Synthetic coding sequence"
  source 1..339: mol_type = other RNA
atgtttgtgcttctgtatgtcacgtcttttgccatttgtgcatcgggacagccccgcggaaaccagcttaaaggggagaattatagtccccgctatatttgctctatccctggcctccctggccctcccggacctcccggcgctaatggatcacctggccctcacgggcgaataggactccccggcagagacggacgtgatggaaggaaaggggagaaaggagagaaaggaaccgccggcttgcggggtaagactggaccattaggccttgccggcgaaaagggggaccagggagagactggaaaaaaaggtcctataggccccgaaggagagaagtag

SEQ ID NO: 14223 - RNA, 300 nt, synthetic construct; identical to SEQ ID NO: 12584
  misc_feature 1..300: note = source = /note="Description of Artificial Sequence: Synthetic coding sequence"
  source 1..300: mol_type = other RNA

SEQ ID NO: 14224 - RNA, 336 nt, synthetic construct
  misc_feature 1..336: note = source = /note="Description of Artificial Sequence: Synthetic coding sequence"
  source 1..336: mol_type = other RNA
atgaagtctctgttatttaccctcgcggtgttcatgctcctggctcagctagtctccggcaactggtacgtaaaaaagtgtctgaatgacgttggtatatgtaaaaagaaatgtaagccagaggaaatgcatgtcaaaaacggctgggctatgtgcggtaaacagagagattgctgcgtgccggccgaccgacgtgccaattatcccgtattctgtgtccagaccaagaccacccgaatctcaaccgtaaccgctaccaccgctaccactaccctgatgatgactacagctagtatgtcttccatggctccaactcccgtctcccctacaggatag

SEQ ID NO: 14225 - RNA, 1698 nt, synthetic construct
  misc_feature 1..1698: note = source = /note="Description of Artificial Sequence: Synthetic coding sequence"
  source 1..1698: mol_type = other RNA
atggaggattccgactcggcagccaagcagctgggactggcggaggctgctgccgtggccgccgccgctgcggttgccgctgccgccgccgccgccgccggaggagaagccgaagaacccgtgctttcgcgcgatgaggactccgaagaagacgctgacagcgaagccgagagagaaacaccgagggtaaccgccgtggcagttatggccgctgaaccagggcatatggacatgggagctgaagccttgccaggaccggacgaggcagccgccgccgccgctttcgccgaagtcacaactgtcacagtcgccaacgtaggagctgcagctgacaacgtatttacaacctcagtggccaatgctgcaagcatcagtggacacgttctttctggcaggaccgccctacagattggcgattcccttaacactgaaaaggccacccttatcgtggtccatacggatggtagtattgtagaaacaaccggcctaaagggaccagccgcccctctcacccccggtcctcagtctccacccacaccccttgcccctggtcaggaaaaaggcgggaccaagtataactgggatccctccgtatatgattccgagttacctgttcgttgtcggaatatcagcggaacactctataaaaaccggttaggaagcggggggcgtggtaggtgcattaaacagggtgagaattggtacagccccacggagttcgaagctatggcagggagggctagctcaaaagactggaagaggtcaatccgctatgccggccgtccattacaatgcctaatccaagatggcatattaaatccccacgctgcttcttgcacctgcgctgcatgctgcgacgatatgaccctatcaggcccagtgagacttttcgtaccttataaaagacgcaagaaagaaaacgagttaccaaccacacccgtgaaaaaggatagccctaaaaacatcaccctcctgccagcgaccgcagctacaacatttaccgtcaccccctctggtcagatcactactagcggcgccctaactttcgatagagcaagtaccgtagaggcgactgccgttatctccgaatctcccgcgcaaggtgatgtctttgccggcgctacagtgcaagaggctagcgtccagccaccctgccgtgcttcccaccccgaaccacattaccctggatatcaggacagttgtcagatagctccgttcccggaggccgctctgccaacatcacacccaaagattgtcctgacgtcccttcccgccctggctgtacccccccccacaccaaccaaagcagccccacctgcccttgtaaatggactggaactgtccgagccacgatcttggttatatctcgaagagatggtaaattccttgttaaatactgcacaacaactcaaaacccttttcgagcaggctaagcatgcgtccacttatagagaagcagccactaaccaagccaaaatccacgccgacgccgaaagaaaagaacagagttgtgttaattgtggaagggaggcaatgtcagagtgcaccggttgtcacaaagtaaactattgtagtacattttgccagagaaaagactggaaggaccatcaacatatctgtggccaaagcgctgctgttaccgtgcaagcagatgaagttcatgtggctgagtccgtgatggagaaagtgacagtgtag

SEQ ID NO: 14226 - RNA, 471 nt, synthetic construct
  misc_feature 1..471: note = source = /note="Description of Artificial Sequence: Synthetic coding sequence"
  source 1..471: mol_type = other RNA
atgaacattcttatgctgacctttatcatctgtggcctcctaacccgcgttacaaaagggagcttcgagcctcagaaatgttggaagaataatgtcggacattgccgaagaagatgcctggacaccgagcgctatatcctgctgtgtagaaacaaactgagttgctgtatttctatcatctctcacgagtacacaagacgaccggcctttccggtgattcatctggaggacatcaccctcgactatagtgacgttgattcttttaccggtagccccgtttccatgctgaacgacctcattacctttgacacaacaaagttcggcgaaaccatgacccccgagacaaacactccagagacaaccatgccaccaagcgaagcaaccacacccgaaaccaccatgccacctagtgagacagcaaccagtgaaactatgcctccaccatctcaaacagcactgacacataattag

SEQ ID NO: 14227 - RNA, 837 nt, synthetic construct
  misc_feature 1..837: note = source = /note="Description of Artificial Sequence: Synthetic coding sequence"
  source 1..837: mol_type = other RNA
atgggaggacctcgcgctctcttggcagcattgtgggcactggaggccgctgggactgctgctctaagaatcggtgccttcaatattcagtctttcggggattccaaggtgtctgaccccgcatgcggctcaattatcgccaagatcttggccgggtacgatttggcgctcgttcaggaagtacgcgatccagacctgtccgccgttagcgccctgatggagcaaattaatagtgtgtcagagcatgaatattcgttcgtatcctctcaaccactcgggagggatcaatataaggaaatgtacttgttcgtgtacaggaaggatgctgtgtctgttgtggacacctacctgtatccagatccagaagacgtgttcagcagagagcccttcgttgtgaaatttagcgcacccggcactgcccaaaatctagtactgataccactacatgcagctccacatcaggctgtggcagaaatagacgcactttatgatgtatatttggatgttattgacaaatgggggacggatgacatgctttttctcggggacttcaatgccgactgtagttatgtccgggcacaggattgggcagcaatcagactgagatcgtcagaagttttcaagtggttaattcccgatagtgcggataccacggttggcaattcagactgtgcatacgatcggattgtggcttgcggcgctaggctcagaagatccttaaaaccacaatctgcgactgttcacgacttccaggaagagttcgggctggaccagacgcaagcactagctattagcgaccactttcctgttgaggtgacactcaagtttcataggtag

SEQ ID NO: 14228 - RNA, 3039 nt, synthetic construct
  misc_feature 1..3039: note = source = /note="Description of Artificial Sequence: Synthetic coding sequence"
  source 1..3039: mol_type = other RNA
atggccgaagccgccttggaagccgtcaggtctgaactgagagagttcccggcagcagcccgcgaactgtgtgttccgttggccgttccatatttggataagccacctacccccttgcatttttatcgggattgggtttgccctaatcggccctgcataattcggaatgccctgcaacattggccagctctacaaaaatggagcctaccctatttccgcgcaaccgttggctctacggaggtgtctgtggctgttactcccgatggctatgctgatgcagtgcgaggtgacagatttatgatgcccgccgagaggagactgccgctgagtttcgtgctagatgtgcttgaaggccgagcccaacatccaggagtcttatatgtgcagaaacagtgctccaacctacccagtgaactgccacagttgctcccagatctggaaagccacgtgccttgggcaagcgaagccttgggaaagatgccagatgccgtcaacttctggctcggcgaagctgccgccgtcactagccttcataaggaccactacgaaaacctttattgcgttgtctctggtgagaaacattttctgttccacccacctagcgatcgcccatttattccatacgaattatacaccccagctacctaccagctcacagaagaggggacgtttaaagtcgtggacgaggaggcaatggaaaaagctgaggtttctcgaacatgcttactgacagttagagtacttcaagcccaccgtctcccatcaaaggaccttgttacccctagcgactgctatgttaccctgtggctgccaaccgcttgctcacacagactgcagactcgaaccgttaaaaacagctcctcccctgtgtggaaccagagctttcatttccgcattcatagacagctgaaaaatgtcatggaactgaaggtgttcgatcaggatcttgtgaccggtgatgaccctgtcctctccgtattattcgacgccggaacgcttcgtgccggggaatttagaagagaatctttttcactgagcccgcagggagaaggacgtctagaggtggaattcagattacagagtctagccgatagaggggagtggcttgtaagcaacggagtcctcgttgctagagagcttagctgccttcatgttcagctggaggaaacaggtgatcagaagtccagcgaacatagagttcagctggtcgtacccggcagctgcgagggaccgcaggaagcctccgtaggcacagggaccttcagatttcactgtccagcctgttgggagcaggagttgtctatacggctgcaggatgcccctgaggaacaactgaaagcccccctgagcgccctgcctagtggccaagtcgtccggctggtattccctacctcacaggagccgttaatgcgtgtcgagctgaagaaggaagccggacttagagaacttgctgtccgcctgggtttcgggccctgtgctgaagagcaagccttcctttcaaggcgcaaacaggtcgtcgcggcggcactgcggcaggccctgcaacttgacggcgatttacaggaggacgaaatccccgttgtggccattatggccactggaggaggaatcagagccatgacatcactgtatgggcaactagccggcttaaaagagttaggactattagattgtgtgtcttatattaccggcgcatcaggttcaacatgggcccttgccaacttgtacgaggaccccgagtggagccagaaggaccttgccgggcctactgaactcctgaagacccaggtgacaaaaaacaagctcggggtgctggcccccagtcaactgcagcgataccggcaagagctcgccgaaagggctagactcggctaccctagctgctttacaaatctttgggcattgatcaacgaggcattacttcacgacgaacctcacgaccacaaactcagcgaccagcgtgaagctctcagccacgggcaaaatccattacctatctactgcgccctgaacacaaaaggtcagtctcttacgacattcgaattcggtgaatggtgtgaattctcaccttatgaagtcggttttcccaagtacggcgcatttatccccagcgaattgttcggtagtgaatttttcatgggccaactaatgaaacgcttacccgaatctcgcatatgcttcctcgaaggtatctggtctaatctctacgccgctaatttgcaagacagtctctactgggcctcagagccatcacaattctgggatagatgggtacggaaccaagcaaacttggataaagagcaggtgcccctgcttaaaattgaagagccgccatccactgccggaaggattgccgagttcttcacagatcttttaacgtggcgccctctggcccaggccacacacaactttctaaggggactacacttccacaaagactactttcagcacccccatttttctacctggaaggcaacgacactagacggactgcccaatcagctcacgccttcagagccccacctgtgtttgttggatgtaggatatttaatcaatacatcatgcctacctttgcttcaaccaaccagagatgtggaccttatcctctccctcgactacaatttgcacggggcctttcagcaacttcagctgctcggccggttttgtcaagaacagggaataccttttcctcctataagccctagcccagaggaacagttacagccaagggaatgtcacacttttagcgatccaacctgtcccggagcccctgcagttttacatttcccccttgttagtgactctttcagggaatattccgcgcccggtgtaaggcgaacacccgaagaggccgcagccggtgaggtgaatctgagctcttccgatagcccctaccactataccaaggtcacctacagccaggaagatgtggacaaacttctgcacctgactcattataacgtgtgcaataaccaggaacaactgctagaggctctgagacaagcagtacagagacgcagacagcgacgaccccactag

SEQ ID NO: 14229 - RNA, 1548 nt, synthetic construct
  misc_feature 1..1548: note = source = /note="Description of Artificial Sequence: Synthetic coding sequence"
  source 1..1548: mol_type = other RNA
atggcatggccctacttcctagactgccatagatactttacgagagaagacgaaggatgttatgaccccctagaaaagcttcgcggcggcctggaagccgacgaagccctgcccagcgggctgccacccacatttattagattctcccaccactcctacgcccagatggtccgggtgctgaggagaactgcctcccgttgcgctcacgtcgcaaggacatactctatcggaagatcgtttgatggtcgagaattgttggtcattgaatttagttcccgcccaggacaacacgagttaatggagcccgaggtcaaattaattgggaacattcatggaaatgaagttgctggtcgcgaaatgctgatctatctcgctcaatatctgtgttcagaatacttgctcgggaacccccgcatacaaaggctgcttaataccaccagaattcacttgcttccgtcaatgaaccccgacggatatgaggtagctgccgctgagggagctggctacaatggttggacgagcggacgccaaaacgctcagaacctcgacctgaaccggaacttcccagatttaacaagcgaatactataggttggccgagaccagaggagcccgaagcgatcatatcccaatccctcaacactactggtgggggaaggtagcccccgaaaccaaagccatcatgaaatggatgcagacaattccttttgtgctgtcagcaagcctgcatggaggtgatcttgtcgtctcctacccatttgatttctcaaagcaccctcaagaagagaagatgttctcgcccaccccagatgaaaagatgtttaaactgctgtcaagagcctacgctgacgttcaccctatgatgatggatagatcagaaaatcgctgtggcggtaacttcctaaagagaggatccattataaacggagctgactggtactcgttcaccggcggcatgagcgatttcaattacctgcacactaactgctttgagattaccgtcgaactcgggtgtgtgaaattccctccagaggaagccctgtacatcctgtggcaacacaacaaggaatctttattaaacttcgtcgaaactgttcacagagggataaagggcgtggtaacagataaattcggaaagccagtcaagaacgctcgcatctcagtcaaagggattcgccacgacataaccacggcgccagacggggattattggcgtctattaccccccggcattcacattgtgattgcgcaggcccccggctatgccaaggtaataaagaaggttatcattcccgcccggatgaagagagctgggcgagtcgattttatactccagccactgggcatgggtccaaagaatttcatccacggccttagacgcactggcccacacgacccactcggcggcgcctcctccctaggggaagccacagaaccagatccgcttcgtgcgcgaagacaaccctctgctgatggatcaaaaccttggtggtggtcatacttcacctctctttctacacatcgaccacgctggctgctgaaatactag

SEQ ID NO: 14230 - RNA, 285 nt, synthetic construct; identical to SEQ ID NO: 12591
  misc_feature 1..285: note = source = /note="Description of Artificial Sequence: Synthetic coding sequence"
  source 1..285: mol_type = other RNA

SEQ ID NO: 14231 - RNA, 420 nt, synthetic construct
  misc_feature 1..420: note = source = /note="Description of Artificial Sequence: Synthetic coding sequence"
  source 1..420: mol_type = other RNA
atgggcaatccaggtggagttggcagcgaacgcatgagagttgctaggcgtacaagaaatgtctgtagatgccctagggccgcaggaccaggagtccccgaacccagagccgctcccctcccactcctggctatggctcccccgcctgcgtgccgatcccccatgtctcccccgcctccgccgctactgctgttactgctgagccttgccctgctgggtgctcgtgcccgcgctgaacctgcaggatctgccgtgccagcccagtctagaccatgcgtggattgtcacgcgtttgagtttatgcagcgggcactccaggaccttagaaagacagcctgttcactggacgcaagaaccgagacattgcttcttcaggctgagagacgagctctttgtgcatgctggcccgccggacactag

SEQ ID NO: 14232 - RNA, 471 nt, synthetic construct
  misc_feature 1..471: note = source = /note="Description of Artificial Sequence: Synthetic coding sequence"
  source 1..471: mol_type = other RNA
atggctcccgcagttacccgccttctgttccttcagctggtgctgggacctaccctggtgatggacattaaaatgcaaataggatctcgaaacttctacacactgtctatagattatcctcgcgttaattacccaaagggcttccggggctactgtaatggcctcatgagctatatgagggggaaaatgcagaattcagattgcccaaaaatacactacgtgattcacgctccctggaaagcgattcagaagttttgcaagtactcagactcgttttgtgagaactataatgaatactgtacactgacacaagattctctgcccatcaccgtctgctccctttcacatcagcagccacctacctcttgctactataactcaacattaaccaaccagaaactatatttactatgctcaagaaagtatgaagcagatccgatcggtatcgccggcctgtatagcgggatctag

SEQ ID NO: 14233 - RNA, 444 nt, synthetic construct
  misc_feature 1..444: note = source = /note="Description of Artificial Sequence: Synthetic coding sequence"
  source 1..444: mol_type = other RNA
atgatcatcatggttataatattcctagtcttgttattttgggaaaatgaagtaaatgacgaagccgtgatgtccactttggagcacttgcacgtagactatccacagaacgacgtccccgtgcccgcacgatactgcaatcacatgatcatccaaagagtgattcgagaacccgaccacacatgcaaaaaggaacacgtgttcattcatgaaagaccgcgcaaaattaacgggatttgcatctctcccaaaaaagtcgcctgtcagaatctctccgccatcttctgtttccaatcggagaccaagtttaaaatgaccgtttgccagctcattgagggaactcgctacccagcctgcaggtaccactactctcccaccgaaggattcgttctggtgacttgtgacgacttacgacccgacagctttttgggatatgtgaagtag

SEQ ID NO: 14234 - RNA, 453 nt, synthetic construct
  misc_feature 1..453: note = source = /note="Description of Artificial Sequence: Synthetic coding sequence"
  source 1..453: mol_type = other RNA
atgaggtttatggccggccccgccgggtcccaaagcttgggccccctttgtttccactctagtcctcaggcactgtacaccgtattgctaatagttttagtaatgatgtctctagtattcggaaagttcgtgcccgtcaactgggaaccaccccagcctctgcccttccctaagtatctccgctgctataggtgcctgctggagacgaaagaactaggctgtctccttggatcagacatctgcctgacacccgcaggctcttcctgtattacactgcacaaaaagaatagttccggctctgatgtgatggttagtgattgccgctccaaggaacagatgtcagactgcagcaacactcggacctcccctgtgtcaggtttttggattttttcacagtattgtttcttagatttctgtaacgaccctcagaaccgcgggctctacaccccttag

SEQ ID NO: 14235 - RNA, 2742 nt, synthetic construct
  misc_feature 1..2742: note = source = /note="Description of Artificial Sequence: Synthetic coding sequence"
  source 1..2742: mol_type = other RNA
atgggacccgaagccttgtcctccctcttactgcttctgctcgtcgcttccggcgatgcagacatgaaaggacattttgatcccgccaaatgcagatatgctctcggcatgcaggacagaacaatccccgacagcgacatttcagcttcaagcagctggagtgattcgacggcagcccgacatagcagattggaaagtagcgacggagatggtgcctggtgcccagctggctctgtgtttccgaaggaagaggagtatttacaggtagacctgcagagactgcaccttgtggccctcgtcgggactcagggaaggcacgccggagggctcggcaaagagttcagccggagctataggctgcgatattctcgcgatggaaggagatggatgggatggaaagatcgatggggacaggaagtgatctcaggaaatgaggaccctgaaggcgtagtactgaaagacctgggccctcctatggtggctcggctggtgaggttttatccccgtgccgatagagtcatgagtgtttgcttgcgggttgagctgtacggttgcttgtggcgggacggcctgttatcctatacagcgccagtcggccagaccatgtacttgagcgaagccgtctacttgaatgatagtacttatgacgggcacacagtaggcggcttacaatatggcggcctcggtcaactcgcggatggggtcgtcggacttgacgattttaggaaaagccaagagttacgcgtatggcctggctacgattacgtgggctggagtaaccattctttttcatccggatacgtcgaaatggaattcgaattcgacaggctgcgcgcatttcaggctatgcaggtccactgtaataatatgcacactctcggggccagactgcccggtggcgtagagtgtcgtttccgccgcggtcccgccatggcttgggaaggcgagcctatgagacataacctcggtggtaacctgggggatcccagagcaagagccgtctcagtacccctgggtggtagagtggccagatttctgcagtgccgtttcctttttgctggtccttggttgctcttctcagaaatttcatttataagcgatgtcgtcaacaactcctcaccagccctcggaggcacatttcctcccgcaccttggtggccccctggtcctcctcccaccaacttctcgagcctggagctagaacctcgcggtcagcaacccgtagcaaaagccgagggatcaccaacagccatcttgataggatgtctagtggccattattctcctcctgcttcttattattgcgctcatgctgtggcgacttcactggagaaggttattgagcaaagcagaacgtagggttcttgaggaggagctgacagttcatctctcagtgcctggcgacacaattttgatcaataatcgtcctgggccccgtgaaccaccaccatatcaagaacctcggcctcgcggaaaccctcctcactcagccccgtgcgtgccaaatggctccgccctgctgctgagtaatcccgcttatagactcctgttagcaacttacgcccggccacccagaggtccaggacccccaacacccgcttgggcaaagccaaccaatactcaagcgtattcaggcgattatatggagccagaaaagcccggtgcccccttacttccacccccaccacaaaacagcgtgccccactacgccgaagccgacatagttaccctccaaggagttactgggggcaacacatatgccgtgccagcactcccccccggcgctgtgggcgatggaccaccccgggtggactttccacggtcccggcttaggttcaaagaaaaattaggcgaagggcagtttggcgaagttcatttatgtgaagttgactctcctcaagatcttgtctctctggatttcccactaaacgtgcgaaaaggacaccccctactcgtagctgttaagatcctgaggcctgacgctaccaagaacgcccgcaacgactttctcaaagaggttaaaatcatgtccaggctgaaggatcccaatattatacggcttctcggggtttgcgtgcaggacgatcctctgtgtatgatcactgattatatggaaaacggcgaccttaaccagttcttgagcgcacatcagttagaagataaagcggcagaaggcgctcccggcgatggacaagccgctcaagggccaaccattagctatccaatgctcctacacgtggccgcgcaaatcgctagtggaatgagatacctcgccactctgaattttgtacaccgcgaccttgcaacacggaattgtttagtgggagagaattttaccatcaaaatcgcggactttgggatgtccagaaacctatacgccggcgactattatcgcgtgcagggtagagctgtgctccctatacggtggatggcttgggaatgcattctgatggggaaatttaccacagcctctgatgtctgggcattcggagtaaccttatgggaagtcctaatgctgtgtcgtgcccaacccttcggtcagctgacggacgaacaggttatagagaacgccggagagttctttcgggatcagggtcggcaggtgtatctgagcagaccgccggcatgccctcagggcttgtacgaattgatgctgcgatgctggtcacgcgagtcagaacaaagacctccatttagtcagcttcacagattcctcgccgaagacgccctgaacaccgtgtag

SEQ ID NO: 14236 - RNA, 453 nt, synthetic construct
  misc_feature 1..453: note = source = /note="Description of Artificial Sequence: Synthetic coding sequence"
  source 1..453: mol_type = other RNA
atgagatttatggcgggccctgccggctcccaatcactgggtcctctctgttttcactcttccccccaggcactctacaccgttctgctgatcgtgctggtcatgatgagcctcgttttcggtaagtttgtgcccgtcaactgggaacccccacagccattacctttccctaagtatttgcgctgctataggtgtttgctcgaaacaaaagaactgggctgtcttctcggttctgacatttgcttgacaccagccggctcctcatgtatcacgctgcacaagaaaaactcctcaggctccgacgttatggtgtccgattgcagatcaaaagaacaaatgtccgattgctctaacacacgcacctcaccagtgtcaggattttggatcttttctcagtattgcttcttagacttttgtaacgatccacaaaataggggcttgtacactccgtag

SEQ ID NO: 14237 - RNA, 567 nt, synthetic construct
  misc_feature 1..567: note = source = /note="Description of Artificial Sequence: Synthetic coding sequence"
  source 1..567: mol_type = other RNA
atgttccaccaaatctgggctgcgctcctctatttctacggcatcattcttaattctatctatcagtgccctgaacatagtcagctgaccaccctcggcgtcgacggcaaggagtttcctgaggtgcatctcggacagtggtacttcatagccggcgctgccccaactaaagaggaactggctactttcgacccagtagataacatagtatttaatatggccgctggatcagcaccaatgcagttgcacctacgagccacgatccgaatgaaagacggactgtgcgtcccacgcaagtggatttaccacctgaccgagggctctaccgatctgagaaccgagggcagaccagatatgaaaacagaattgttctcatccagctgtccgggcgggatcatgttgaacgaaaccggccagggctaccaacgctttctactttacaaccgatccccccaccctcccgagaagtgcgtggaagagttcaaatccctgacgagttgccttgatagcaaagcttttctgttgacacctcgcaaccaagaggcctgcgaactttccaataattag

SEQ ID NO: 14238 - RNA, 2535 nt, synthetic construct
  misc_feature 1..2535: note = source = /note="Description of Artificial Sequence: Synthetic coding sequence"
  source 1..2535: mol_type = other RNA
atgggcccaggagcaccgtttgcaagagtgggctggcctttgcccctgcttgtggttatggcagcaggagtggcaccagtatgggcctctcacagtccgcacctccctaggccacattcccgagtccccccccacccttcctccgagcgccgggcagtgtatattggggccctgtttcctatgtcaggaggatggccaggtggtcaggcttgccaacccgcagtagagatggcgctggaagatgtcaactccaggcgagatatcctcccagattacgaacttaagctcatccatcatgacagtaagtgcgatcctggccaagctactaagtacctttatgaactcctttacaacgatccaatcaaaattatcttgatgcccggttgctcttccgtatcaacattggtggcagaggcagccagaatgtggaacctgatagtcctctcctatggaagttcttcgcctgcattgagcaatcgccagaggttcccaactttctttcgaacccaccccagtgctaccctgcataaccctacacgggtgaaactgtttgagaaatggggttggaagaagattgctaccattcaacagaccaccgaagtcttcacatccacgctcgacgatttggaagagagagttaaagaggccggtattgagataacgttcagacagtcttttttctctgatcctgctgtgcctgtgaaaaacctaaaacgccaggacgccaggattatcgtgggactgttctatgagaccgaagcccggaaagtgttttgtgaggtctataaggagagattgtttggcaaaaagtacgtctggtttctcattgggtggtatgcagataattggtttaaaatctacgacccgtccattaactgtaccgttgacgagatgactgaggcagtcgaaggccacatcaccaccgagatagtcatgctcaatccagcaaacacaaggtctatcagcaatatgacaagccaggaattcgtcgaaaagctgacaaagaggctgaagcgtcaccccgaagaaacaggagggtttcaggaggcccctctggcctatgacgctatatgggcacttgctctagctttgaataaaaccagtgggggaggcggtagatctggggttagacttgaggacttcaattacaataaccagacaataaccgatcaaatatatagagccatgaatagctcttcctttgaaggcgtgtctggacacgtggtctttgatgcaagcgggagcaggatggcctggactcttatcgagcagctgcagggaggatcctacaagaaaattggctattatgactctacaaaagatgatttgagttggagcaaaacggataagtggatcgggggttccccaccggcggatcagaccttggtgatcaaaacttttagattcctttcacaaaaactctttattagtgtctctgtgttatcaagcctgggcattgtactggctgttgtgtgcctatcatttaacatttacaattcccacgtccggtatatccagaacagtcaacctaatctgaacaatctgacagccgtgggatgttcacttgctctcgctgccgtgtttcctcttggtctagatggctatcatatcggaaggaaccagtttccatttgtctgtcaagcccgactgtggctgctaggactgggatttagtctcggttacggatctatgttcacgaagatctggtgggtgcatacagtgttcactaagaaagaagaaaagaaggaatggagaaagacactcgaaccctggaaattgtacgcaaccgtcggcttactcgtggggatggacgtgctgacattggcaatatggcagattgtggatcctttacacagaacaattgaaacattcgctaaagaggaacctaaagaggacattgacgtctccattctcccacagttggaacattgttcaagccgtaagatgaacacttggctcggaattttttatgggtacaagggcctcctgcttctattgggtattttccttgcatacgaaacaaaatcagttagcaccgaaaaaattaacgaccaccgggctgtcggaatggctatttacaacgttgctgtgctttgcctgataactgcccccgttacaatgatcttaagttctcaacaggatgcagcgtttgcctttgcttcgcttgccattgtatttagttcatatatcaccctggttgtcctatttgtgcctaagatgcgtagattgattactcgcggagaatggcaatcagaggctcaggacactatgaaaactggcagctctacaaataacaacgaagaagagaagtccaggctcctcgaaaaggagaaccgtgagctggaaaagataattgccgaaaaagaagagcgcgtttccgagctccggcaccaattgcaatccagacaacagctaagaagcaggcgacacccaccaacaccaccagaacccagcggcggccttccacggggacctccagagccacctgaccgcctgtcctgcgacggatcaagggtccacctgttatacaagtag

SEQ ID NO: 14239 - RNA, 237 nt, synthetic construct; identical to SEQ ID NO: 12600
  misc_feature 1..237: note = source = /note="Description of Artificial Sequence: Synthetic coding sequence"
  source 1..237: mol_type = other RNA

SEQ ID NO: 14240 - RNA, 2700 nt, synthetic construct
  misc_feature 1..2700: note = source = /note="Description of Artificial Sequence: Synthetic coding sequence"
  source 1..2700: mol_type = other RNA
atgttgctcctattgttgctggccccattgttcctgaggccgcccggtgccggcggagcccagactcccaacgccacaagcgagggatgtcaaatcattcaccccccttgggagggtggcattaggtaccgcggactgacaagagaccaagtaaaagctatcaactttctgcccgtggactatgagatagaatatgtgtgtagaggagagagagaggtggttgggccaaaagtcagaaaatgcctggccaatggttcttggaccgatatggacactccatccagatgcgtgaaccgcacaccacacagcgaaagacgtgcagtctatattggcgccctcttccctatgtcaggcggatggccaggaggccaagcatgccagcccgctgtcgaaatggcgctcgaggacgtgaactccagacgggatattcttcccgattatgagctgaagctgattcatcacgattccaaatgcgaccccggtcaggccacaaaatatctctacgagcttctttacaacgaccctatcaagattatcctgatgcccggatgcagctctgtgtctactcttgtggctgaggccgctaggatgtggaacttgattgtgctgtcctatggttcttcatctcctgcgctttctaacagacagagattcccaacttttttccgcacacatccttctgctaccttgcataacccaacccgtgtgaagttgtttgagaagtggggctggaaaaaaatcgcaactattcaacagaccaccgaggttttcaccagcactctcgacgatctggaggaacgggtgaaagaggccggcatcgaaatcaccttccgacagtcattcttctcagatcccgcagtgcctgtaaaaaatcttaaaagacaggatgcgagaattatagtgggcctgttctacgaaaccgaggcaagaaaggtcttctgcgaagtgtacaaagaacggctgttcggcaagaagtacgtatggtttttaataggttggtacgcagacaattggttcaagatctatgatccatccattaattgtacagtcgacgaaatgacagaagcagtcgagggccatataactaccgaaattgtaatgctcaatcctgccaacacaagaagtatcagcaacatgacaagtcaagaatttgttgaaaagcttacgaaaagactcaagagacatcctgaggaaactggtggcttccaggaggcaccgctggcatacgacgctatctgggctttagcactggctttaaataagacgtctggtggcgggggaaggagcggggtgcgcctcgaagactttaattataacaatcaaaccattacagatcagatttatagagccatgaattcgtctagctttgagggggtaagcgggcatgtagtatttgatgccagcggcagtagaatggcttggacactgatagagcagctccaaggagggtcctataagaagatcgggtattatgactccacaaaggatgatctaagctggagtaagaccgataagtggattggcggatctccaccagccgaccaaacgctcgtgatcaaaaccttccgcttcctctctcagaaactttttatttccgttagtgtgctgagtagcctcggaatagtccttgccgtcgtatgcctcagcttcaacatttataattcccacgttagatacattcagaactctcagcccaacctcaacaatttgaccgcggtcggctgtagcctcgccttggccgccgtgttccccctcggactcgacggctatcatatcggaaggaaccagttcccgttcgtgtgccaagcccgattgtggctcctgggtctcggattttctctcggatatggttccatgttcacaaaaatatggtgggtgcatacagtctttacaaaaaaggaggaaaaaaaagagtggagaaagactcttgagccgtggaaactttacgcaacagtgggattgctcgtgggaatggacgtgctaactctggccatttggcagattgtggatcccctccatcgcaccatagaaacatttgcaaaagaggagccaaaagaagacatcgatgtttccatattaccacaacttgaacattgcagctcccgcaagatgaatacatggctagggatattctacggttataagggattactgctcctgctaggcatttttctggcttacgaaacaaagagtgtatctactgaaaagatcaatgatcaccgcgctgtgggcatggccatctacaacgttgcagttctatgcctcataactgcccctgttactatgatcttatcctcgcagcaggatgccgccttcgccttcgcttcactggccattgttttttcttcatacatcactctggtggtactgtttgtccctaagatgagaagactgattactagaggtgaatggcagtccgaagcccaagataccatgaagacagggtcctccactaacaacaacgaagaagagaaaagtcgccttcttgaaaaggaaaatcgagagcttgaaaaaatcatcgctgaaaaggaggaaagagtgtctgagttacgccaccagttgcagtccagacaacagctacgcagtaggcgccatccacccaccccccccgagccatctggaggattaccaaggggcccccccgagccaccagatcgcctaagctgtgacggaagccgggtgcatctcctgtacaagtag

SEQ ID NO: 14241 - RNA, 2886 nt, synthetic construct
  misc_feature 1..2886: note = source = /note="Description of Artificial Sequence: Synthetic coding sequence"
  source 1..2886: mol_type = other RNA
atgctacttttactcctactggctcccttattcctgcgcccgcccggggccggaggtgcccagacgcccaacgccacttctgagggttgtcagataatacatccgccatgggaaggaggcattcggtacaggggtctgacacgcgatcaggttaaagccatcaattttctccccgtagattatgaaattgagtatgtgtgccgcggcgaaagagaggtcgttggtcctaaagttcggaaatgtctggcgaatggctcttggactgacatggatactccgagcagatgcgttcggatctgttccaaatcttacttgaccctggaaaacggaaaagtctttctcacaggcggcgacctccctgctctggacggcgcgcgcgtggacttcagatgtgaccccgattttcaccttgtaggtagctcgagaagcatttgtagtcaaggccagtggtctaccccgaagcctcactgtcaggttaacagaactccacacagcgagagacgcgccgtttatattggggcactgttccctatgtctggcggctggcccggcggccaggcttgtcaacccgccgtggagatggcactggaagatgtgaatagcaggagagatatattacccgactacgaactgaagttaattcaccatgacagtaagtgcgatcctggacaggccacaaaatacctgtacgaactgttatataacgatcccattaagataatactgatgccaggttgctcttccgtttccaccctggtcgctgaggcagctcgaatgtggaacctgatcgtactttcttatggatcttcctccccggccctcagcaatcgccagcgatttcccacatttttcagaacccacccctctgccacactgcacaatccaacacgagtgaaactctttgagaaatggggctggaaaaaaatcgcaacgattcagcagacgaccgaagtgtttacaagtaccctggacgacctggaggaaagagttaaagaggccgggatagagatcaccttccgccagtcgtttttcagtgatcccgccgtccctgttaaaaatttgaagcggcaagatgctcgaattatcgtcgggctgttctacgaaacagaggcgcgcaaagttttctgcgaggtttataaggagagactcttcgggaaaaagtacgtttggttcctgataggctggtatgctgacaattggttcaaaatttatgaccctagcatcaactgcactgtggatgaaatgacggaggccgtcgaagggcatattaccactgaaattgtcatgctcaacccagctaatacccgctcaatctccaatatgacatcccaagaatttgtggaaaagctgaccaaacgtctcaaaaggcatcccgaggagaccggcggtttccaagaggcaccacttgcttatgatgcaatatgggctctggctttggccttgaacaaaacaagcgggggaggaggaagatctggcgtgcgtctggaggattttaactataataatcagaccattaccgaccagatttaccgagctatgaattcttcgtcctttgagggtgtgtccggacacgtggtgtttgatgcctccggctctagaatggcatggacccttattgagcaactgcagggtgggtcttacaagaaaattggttactacgacagcacaaaagatgatctatcttggtctaagaccgacaagtggataggagggtcaccacccgctgaccagactctggtaatcaagacattccgcttcctgagtcaaaaactgttcattagcgtgtctgttctttctagcctgggcattgtgctcgctgtcgtttgcctaagcttcaacatctacaactcccatgttcgctatatccagaactctcagccaaatctaaacaatcttacagcagttgggtgttctcttgccttggcagccgtgtttcctctcggcctggacgggtaccacatcggccgcaaccaattcccttttgtgtgtcaagctagactctggttattaggcttggggttttctctgggttacgggtccatgtttactaagatctggtgggtccatacagttttcactaagaaggaagaaaaaaaagaatggagaaaaacgcttgaaccctggaagttgtatgccacagtcggactgttggtgggtatggatgtcttgactcttgctatatggcagatcgtggatcccctgcacaggacaatcgagacgtttgcaaaagaagaaccgaaggaagatatagatgtgtccatactccctcaactcgaacattgctcatctcggaagatgaatacttggctcggaattttttacggatataaaggactgttgctgctgctgggtatcttcctcgcttatgaaacaaaaagtgtctctacggaaaagatcaacgatcatcgagccgttggcatggccatatacaacgttgctgtgctctgcctgattaccgcccccgtgactatgatcttgtcatcccagcaggacgcagcatttgcgttcgcatccctcgctattgtcttctcatcatatataactttagtggtgttatttgtgcctaaaatgcgaagacttatcactcgtggagaatggcagtctgaagcccaagatactatgaagaccggaagttcgacaaataacaatgaggaagaaaagagccggcttcttgaaaaagaaaatagagagttagagaaaattatcgcagagaaggaagaacgtgtctccgagttaagacaccaattgcagtctagacaacagctgaggagccgccggcatccacccaccccacctgagccaagtggaggattaccacgaggccctcctgagccccctgaccgcctgtcctgtgacgggtcacgcgtgcatctgctttataaatag

SEQ ID NO: 14242 - RNA, 2535 nt, synthetic construct
  misc_feature 1..2535: note = source = /note="Description of Artificial Sequence: Synthetic coding sequence"
  source 1..2535: mol_type = other RNA
atgggacccggtgccccatttgcccgcgttgggtggcctctcccactgctggtcgttatggccgctggtgtggccccggtgtgggcgtcacactcaccccacttgccccgtcctcactctcgtgtaccaccccacccgagctccgaaaggcgagccgtatatataggcgcccttttccccatgtctggtgggtggcccggaggccaggcctgtcagcccgccgtcgagatggcactggaagacgttaattcccgcagagacatactccctgattatgaactgaaactgattcatcacgactccaaatgcgaccctggccaggcaaccaagtacctgtacgaactgctgtacaatgacccaatcaaaattattctgatgccaggctgttcatccgtttctacattagtcgccgaagccgcgagaatgtggaatttaatcgtcctaagttatgggagttctagtccggcactgtctaaccgtcaaagatttcctacttttttccggacccatccgtcggcaaccctccacaatcctacacgcgtaaagctattcgagaaatggggatggaagaaaattgcaaccatacagcagacaaccgaggtattcacttctactttagatgatctcgaggaacgtgtgaaagaagctggaattgagattacattccgccaatccttcttttctgaccccgccgtaccggtcaaaaatcttaagcgtcaggacgcgcgtatcattgtggggctgttctacgagacagaggcaaggaaggtgttttgtgaagtgtacaaggagcgattatttgggaaaaagtacgtttggtttctgatcgggtggtacgcggataattggtttaaaatctacgatccatcgataaactgcactgtggacgaaatgactgaggccgtggagggacatatcaccacagagatagtgatgttgaatccagccaacactcgatcgatctcaaacatgacaagccaagaatttgtcgaaaaactcaccaaaagattgaaacggcatccagaggaaacaggcggttttcaagaggcaccactggcatacgacgcaatttgggctctggctctggcgctcaacaagacttccggaggaggtggccggagcggagtcaggctagaagattttaactataataaccagactatcacagatcagatctaccgtgcaatgaacagtagtagcttcgaaggggtttcagggcacgttgtttttgacgccagcggtagcaggatggcttggactttaatagaacagctccaagggggctcatacaagaagatcggatattatgattctacaaaggacgacctcagttggtccaagacagacaagtggatcggcggcagccctcccgccgaccagaccctggtcattaagacgttcaggttcttatctcagaaattattcatctctgtatccgtcctgtccagtctcggcattgtattagcggtggtttgcctcagtttcaacatttacaattcccatgtgcggtacattcagaattcacagccaaatctcaataacctgaccgcggtcggatgctctcttgccctagctgccgtgtttcccctaggtctggacgggtatcacatcgggcggaatcaattcccattcgtgtgtcaagctagactttggctccttggacttggtttctctctgggatacgggtcaatgtttactaaaatctggtgggtgcacaccgtttttacaaaaaaggaggagaaaaaagagtggaggaaaacattagagccatggaaattatacgccacagtcggtcttctggtcgggatggatgtgcttactctcgctatctggcagatcgtagatcctttacatagaactatagagacctttgccaaagaagagcctaaagaagatatcgacgttagtatcttacctcagcttgaacactgctcatctaggaagatgaacacctggttggggatcttttacggctacaagggactgttactgctgctgggcattttccttgcttatgaaacaaagtccgtatccaccgagaaaattaatgatcaccgggccgtcggaatggctatttacaatgttgccgtgctgtgtttgataacagcccccgtaacaatgattctaagctcacagcaggacgctgcctttgcttttgcaagtctggcaatcgtatttagctcatacattacgctggtcgtactcttcgtccctaagatgcgtcgtctgataacaaggggtgaatggcaatctgaggcccaggacacaatgaaaacaggaagctctaccaacaacaacgaagaagagaaaagccggttgcttgaaaaagagaatcgagaactagagaaaatcattgccgagaaggaagaaagagtatcagagctacgtcatcagcttcagtcaagacaacagctgagatctcgaagacaccctcccactccaccagagccttccggaggcctgccccgtggcccgcccgagcccccggacagactgtcctgtgacggtagccgtgtacatttactgtataagtag

SEQ ID NO: 14243 - RNA, 2535 nt, synthetic construct
  misc_feature 1..2535: note = source = /note="Description of Artificial Sequence: Synthetic coding sequence"
  source 1..2535: mol_type = other RNA
atggggcctggtgccccctttgcccgcgtgggctggccacttcccctgcttgtcgtaatggccgccggcgtagctcccgtctgggccagtcactctcctcacctgcccaggccgcacagtcgtgttccaccccatccctccagtgaacgtcgcgcagtatacataggagctttatttccgatgagcggcgggtggcccggaggacaggcatgtcagccagctgttgaaatggcacttgaggacgtcaatagcagaagagatatcctacccgactacgagctgaaactgatccaccatgactcaaaatgtgatccaggacaggccaccaagtacctctatgagctgctgtacaatgacccaatcaaaataatccttatgccaggctgctcctcagtatcaaccctcgtggcggaggccgccagaatgtggaacctgattgtcctgtcttacggctcttcttctcctgccttatctaacagacaacgcttccccaccttcttccgaacacacccctccgccacccttcataatccaactagagtgaaactttttgagaaatggggctggaaaaagattgccaccatccagcagacaactgaagtatttacttccacactggatgatctggaagagcgtgtgaaggaagccgggatcgaaataacattcagacagtccttcttttcagatcccgccgtgcccgtgaagaatttgaaacgccaagatgccaggatcattgtgggcctgttctatgagaccgaggccaggaaggtgttctgtgaagtgtataaagagagactctttggaaagaagtatgtttggtttctaattggatggtatgctgataattggttcaaaatttatgatccatccattaactgtactgtggatgaaatgactgaagcggtggaaggacatattactacagaaattgttatgttaaatccggctaatacccgttccatttctaacatgactagccaggaattcgtggagaaactcaccaagagattgaagcgccaccccgaggaaaccggaggtttccaggaagctcctttggcctacgatgccatttgggccctcgcccttgcactaaacaagacatcgggcggcggtgggaggtctggagtacgattagaagatttcaactacaataaccaaacaattactgatcagatctatagagccatgaattcctcctcatttgaaggagtatctgggcacgtagtcttcgacgcaagcggcagtagaatggcttggactttaatagaacagcttcagggtggttcttacaagaaaattggatattacgattcaaccaaagacgacctgtcttggagcaaaacggacaaatggatcggaggcagccccccagccgaccaaacactggtgattaagaccttcaggtttctatcccaaaaactgttcattagcgtttctgtcctttcctccctgggcattgtcctcgcagtggtgtgtctgtcatttaacatctataacagtcacgttcgctacatacagaattcgcagcccaatctcaataatctcaccgcagtcggctgcagcctggctctggcagctgttttcccattaggcctggacggttaccatatcggacgcaatcagttcccttttgtatgtcaagcccgcctgtggctgttaggactcggcttttcactgggctacggttccatgtttaccaagatctggtgggtgcacacggtgtttacaaaaaaggaggaaaaaaaagagtggcgaaaaaccttggaaccatggaagctgtatgctacagtcggtttgctggttggcatggacgtgctgactttggctatctggcaaattgtcgacccactgcataggacaatcgaaacgttcgcaaaagaggaaccaaaagaagatatcgatgttagcattttaccgcagctcgaacactgctcctcccggaaaatgaacacatggcttggaattttttatggctataaaggtcttctgctcctgctgggcatctttcttgcctacgaaacaaaaagcgtatctaccgagaaaatcaacgaccatcgtgccgtaggcatggccatctacaacgttgctgtgctgtgtctcatcaccgcacctgtcacaatgattctgtctagccagcaggacgctgccttcgcttttgcctcgttagcaatcgttttcagcagctatatcactctggttgtattgtttgttccaaaaatgcgccggcttatcacgcggggagaatggcagtccgaggctcaggataccatgaaaactggctctagtacaaacaacaatgaagaagagaaatctagattattggagaaggaaaatcgcgagttggagaagattatcgctgaaaaagaagaacgagtgtccgaactgcgccatcaactccaatcaaggcagcagttaagatctcgacggcacccacctaccccaccagagccttctggcggtcttcctagaggtccccctgaacccccagataggctatcttgcgatggctccagagtacaccttttgtataagtag

SEQ ID NO: 14244 - RNA, 2700 nt, synthetic construct
  misc_feature 1..2700: note = source = /note="Description of Artificial Sequence: Synthetic coding sequence"
  source 1..2700: mol_type = other RNA
atgcttctgcttttactgctggccccgttattcttaagacctcctggcgctggtggagcacaaactcctaatgctacctctgagggatgccagatcattcaccccccatgggaaggcggaatcagataccgcggcctgactcgggaccaggtaaaggcgattaattttctgcctgtcgattacgaaatcgaatatgtatgtagaggagagcgggaagttgtaggtcctaaagttcgtaaatgtctggctaatggatcctggactgacatggatacccctagtcggtgcgtgaatcgcacgccacattccgaacgccgagccgtgtacattggagccctattccccatgtctggaggctggcctggaggtcaagcttgccagccggcagtggaaatggcactagaagacgttaacagcagaagggatattctgcctgattacgagctgaaactcattcatcacgacagtaagtgtgatcccgggcaggctactaaatacctatacgaattactctataatgacccaataaagatcatcttgatgcccggttgctcatccgtatctaccttagtcgccgaagccgcccgcatgtggaaccttatcgttttaagttacggtagcagttcccccgccttgagtaataggcagagatttccaacctttttcagaacacatccctccgcaactctccacaatccaacacgggtgaagctgttcgagaagtgggggtggaaaaagatcgccacaatacaacagaccacggaagtctttacgagtaccttagatgacctcgaggaacgtgttaaagaagctggcatagagataacttttcggcagtcattcttttcagacccggcagttcccgtgaagaatttaaagaggcaagacgcccggatcatcgtgggactgttctatgaaaccgaggcacgcaaagtattttgcgaagtgtataaagagcggctcttcggcaaaaagtacgtttggtttttaatcggatggtacgctgataactggttcaagatttacgatccttccatcaactgtacagtcgatgaaatgaccgaagcagtcgaagggcatattacaactgaaatcgtcatgctgaacccagcgaacacaagaagcatttctaatatgacgagtcaagagttcgtggagaagctaacaaaaagacttaaaaggcacccggaagaaacaggcggattccaagaagctccactggcctacgacgccatctgggctctggctctggctctgaacaagacctcaggtggtgggggaagaagcggtgttagattagaagactttaactacaacaatcagactatcaccgatcagatttatcgtgccatgaattccagctccttcgaaggtgtgagcgggcacgtggtcttcgacgcttccggatcccgaatggcatggaccctcatcgagcagctccaaggcggcagctacaaaaagattggctattacgattcaactaaagacgacctgtcctggtcaaagactgacaagtggattggcggttctcctcctgcagaccagacgcttgtgattaagacttttcggttcctgagtcagaagttgtttatcagtgtgagcgtactctcaagtctgggcatagtcttagcagtggtttgtctttctttcaacatctataattcccacgtccggtacatccaaaattctcaacccaacctgaataatcttactgcagttggttgcagtctggccctcgctgcagtctttcctctgggactagacggctatcacatcggcagaaatcagttcccttttgtttgtcaagcacgtctttggctgctaggccttggcttctcgttagggtacggatctatgtttactaaaatttggtgggtgcataccgtgtttaccaaaaaggaggaaaagaaagaatggaggaaaacgctggagccatggaagctttacgccactgtgggattacttgtagggatggacgttctgactctggcaatctggcaaatcgtggaccctcttcatagaacaattgaaaccttcgctaaggaagaacccaaggaagatattgacgtgtccatcctgccacaacttgagcattgtagcagtcgaaaaatgaacacttggctgggcattttctatggttataagggcttactcctcctgctcggtattttcttggcatacgaaaccaaatccgtgtcaacagagaaaatcaatgaccaccgtgcagtcggcatggctatatacaatgtagctgtactgtgtttaataaccgcaccggtgactatgatcctatcctctcagcaagatgccgccttcgctttcgcctcccttgccattgtcttctcaagttatataacactcgtcgtcctgtttgtccctaaaatgcgacggctcataacgagaggcgaatggcagtcagaggcacaagatactatgaagacaggcagttcaactaataataatgaagaagagaaaagtagactcttggagaaagagaaccgcgaacttgagaaaatcatcgctgaaaaggaagaacgtgtttccgaactgagacatcaattacagtcgagacagcagctacggtcacgtcgccatccccccacgccacccgaaccttccggcggtctgccacgggggcccccagaaccccctgataggctctcttgtgacggttcaagggtacatttgctgtataaatag

SEQ ID NO: 14245 - RNA, 2886 nt, synthetic construct
  misc_feature 1..2886: note = source = /note="Description of Artificial Sequence: Synthetic coding sequence"
  source 1..2886: mol_type = other RNA
atgcttctgttgcttctcctcgcacccttgtttttgagaccacctggcgcgggcggcgcccaaaccccaaacgcgaccagtgagggctgtcagattatccatcccccatgggagggtggtatcaggtacagaggattgactagggaccaggtaaaagcaataaatttccttcccgtagattacgagatcgagtacgtatgccgaggtgagagggaggtcgtcggccctaaagtcagaaaatgtcttgcgaacggatcctggacagacatggataccccttctcgctgcgtgaggatttgcagtaaatcttacctgaccctcgaaaatggcaaggtttttcttacggggggtgatctccctgctttggatggcgcacgagtggattttagatgtgacccggactttcacctggtgggatcgtcgcgcagcatttgctctcagggacagtggtccactccaaaacctcactgtcaggtcaatcgcacaccacactccgaacgtagagcggtctatattggagcactgttcccaatgtccggcggttggcccggtggtcaggcctgccaaccagccgttgaaatggcacttgaggacgtaaacagcaggcgagatatactgcctgactacgaattgaagctgatccaccatgatagcaaatgtgaccccgggcaggccaccaaatacctgtacgaattgctgtataatgatcccattaaaattatcctgatgcccggatgttcctctgtgagtaccctggttgccgaagcggctcggatgtggaatttaatcgtgttaagttatggatcaagcagcccagctctttctaatcgccagcgatttcccaccttctttcggacccaccccagcgctactctgcacaaccctacccgagtaaaactgttcgaaaaatgggggtggaagaagatcgcgacaattcaacagacaaccgaggttttcacaagtacactggatgatctggaggaaagagtgaaagaagctggaattgagattacctttaggcagtccttttttagtgatccagccgttccagtgaaaaacctgaagagacaagacgcccgaattattgtgggcttgttctatgaaaccgaagctaggaaagttttttgcgaggtgtataaggagcgactgtttggaaagaaatatgtgtggtttctgatcgggtggtacgctgataactggtttaaaatctacgatccctccattaactgtacagtggatgagatgacagaagcagttgagggccatattactacagaaatcgtgatgttaaaccctgccaacacaaggagtattagtaatatgacaagtcaggaatttgttgagaagctaaccaaacgcttgaagagacatcctgaggagaccgggggattccaggaagcacctttggcctacgacgccatctgggcccttgctctggcactgaataaaaccagcggaggaggaggtaggtcaggagttcggttagaggactttaactacaataaccagaccattaccgaccaaatatatagagcgatgaactcgagctcattcgagggagtttcggggcatgtcgtatttgatgcatccggcagtcgcatggcatggaccctcatcgagcaactgcaaggcggttcctacaagaaaattggctattatgattcaacaaaagacgatctcagttggtccaaaacagataaatggatcggcggttctccccctgccgaccagactttggtcatcaagacattccggtttctcagtcagaagctgtttatctccgtaagcgttctttcctcccttggaatcgttctggctgtcgtatgcctttcctttaatatctacaatagtcacgtgcgttatattcaaaattcacagcctaaccttaacaacctcactgccgtcgggtgctctcttgctcttgctgcagtttttcccctgggtctcgacggttaccatatcggccgtaatcagtttccctttgtatgccaggctcgactttggctgcttggattgggcttttcactgggctacggctccatgttcactaaaatttggtgggtgcacacggtttttactaagaaggaggagaagaaggagtggcggaagacacttgagccctggaaattgtacgcaaccgtgggattattagtggggatggatgtgctgaccctcgccatttggcagattgtagaccccttgcatcggactattgagactttcgctaaggaagaaccgaaagaagatatcgatgtctctattctccctcaactggaacattgcagctcccgcaaaatgaacacgtggctcgggattttctatggatataaaggcttgttactgctgttgggaatatttttggcatacgagacaaaatcagtgagcacggaaaaaattaatgatcacagggccgtcggcatggcgatctataacgtggctgtcttatgcctaattaccgcacccgtgacaatgatactgtcctcccaacaggatgccgcatttgctttcgcctctctcgccatagtcttctcgagttatatcaccctggtagtcttgttcgtgcccaaaatgcggcggttaattacgaggggggaatggcaatctgaagctcaggacacaatgaaaaccggatcaagtacgaataacaatgaagaagaaaaatcaagactgctggagaaggagaatcgggagcttgagaagatcatcgcagagaaggaggaaagagtaagtgaactgcgtcaccagcttcagagtcggcagcaacttagatctaggagacatccccctacccccccagaaccatcaggtgggctgcctcgaggcccacccgagccccccgatcgacttagctgtgacggatcccgcgtgcacttgttatacaaatag

SEQ ID NO: 14246 - RNA, 2535 nt, synthetic construct
  misc_feature 1..2535: note = source = /note="Description of Artificial Sequence: Synthetic coding sequence"
  source 1..2535: mol_type = other RNA
atgggacctggcgcaccttttgctcgagttggctggccactacctctgttagtagtgatggctgccggcgtggcgcctgtctgggcaagtcattctcctcacctccctagacctcatagccgcgtgcctccacatcctagttccgaacgaagggccgtttatatcggagcactattccctatgtctggaggatggcctggagggcaggcgtgccagcccgccgtcgagatggctttagaagacgttaattcacgccgggacattctccccgactatgaactgaagctaatccaccacgattctaagtgtgacccaggccaggctaccaaatacttgtacgagcttttatacaacgaccccatcaaaataatccttatgccaggttgctcctccgtcagtacactcgtggctgaagcagccaggatgtggaaccttatagtactcagttatggctccagctcccccgcactgtccaacagacaacggttcccgactttttttcgcacccatccttcagccacactacacaaccctacgcgcgtcaagctgtttgagaagtggggctggaagaaaatcgcaacgattcagcaaacgaccgaggtgttcacatccactctggacgatctcgaagaacgagttaaggaggctggcatcgaaatcacattcaggcagtcgttttttagcgacccagctgttcccgtaaagaacttaaagagacaagacgctagaataatcgttggcctattttatgagaccgaggcaagaaaggtattttgcgaagtgtataaggaacgactcttcggaaaaaaatacgtatggtttctaatcggctggtacgctgacaattggttcaaaatttatgatccctctatcaattgtacagtggacgaaatgacagaggccgtagaaggtcacatcaccaccgagatcgtaatgctaaatcctgccaataccagaagcatttccaatatgacttctcaagaattcgttgagaaattgactaaaaggctaaaaagacacccagaagagactgggggttttcaagaggctcctctagcttacgacgctatatgggctctagccttagctctgaacaagacaagtgggggaggaggacgcagtggcgtcaggctcgaagattttaattataacaatcaaactatcacggatcagatctatagagcaatgaatagcagcagcttcgaaggagtgtcgggccacgtggtgtttgatgcctccggctctcgaatggcttggacactaatagagcagctgcagggggggagttacaaaaagataggctattatgacagcaccaaggacgacctgagctggtctaaaacagataagtggattgggggttcccctccagccgatcagacattggtgataaaaaccttcagattcctttcacagaaactctttattagcgtaagcgtactgtcgtcactgggtatagtgttagccgttgtttgcttgtctttcaacatatataatagccacgtcagatatattcaaaactcacagcctaatctcaataacttgacggcagttgggtgttccctggcccttgcagctgtgttccctctaggcctggacggttaccatatcggcagaaaccagtttccattcgtgtgtcaggcacgactgtggttgctaggccttgggttttccctgggatacggttctatgttcacaaaaatttggtgggtgcacacagtgtttacaaagaaagaggaaaagaaggagtggcgtaaaaccttagaaccatggaaactgtacgctactgtcggattattagtgggaatggacgtgctgaccttggccatctggcagattgtggacccgcttcatcgcacaattgagacgttcgcaaaagaagagcctaaagaagacattgacgtatccatcctaccacagttggagcactgtagctcgcgcaaaatgaacacgtggcttggaatcttttacggttacaagggtttgcttctgctactgggtatctttttggcttacgagactaagagcgtgtcgacagaaaaaatcaatgatcacagggcagtgggaatggctatttataacgtcgccgtgttgtgtctgatcacagcccccgtgactatgatattaagctcgcaacaggacgctgccttcgcatttgcttctttggccatcgtcttcagctcgtatattacattggtcgtgctgtttgtgcctaaaatgaggaggctgatcactaggggagaatggcaaagtgaagcccaggacactatgaaaaccgggtcgtctaccaacaacaatgaagaggaaaaaagccgactccttgagaaagagaaccgcgagttagaaaaaattattgcagaaaaagaagaaagagtaagcgagttacgacatcaactccagagcagacaacagctacgcagtcggcgacacccacctactccccctgagccttctggtgggctcccacgcggaccacccgaacccccagacagactctcttgcgacggctccagggtgcacctgctttacaagtag

SEQ ID NO: 14247 - RNA, 3090 nt, synthetic construct
  misc_feature 1..3090: note = source = /note="Description of Artificial Sequence: Synthetic coding sequence"
  source 1..3090: mol_type = other RNA
atgccaccaacaaaatccgtttcagagcctgtaccttttgaaaccgaagctcccagcatgactatagtgcccaccacagacatcgagccagtgacagttcgcacagaggcaaccgtcacgactttagcgcctaagactagccaaagaactagaacaagaagacctcgcccaaagcataagactaccccaaggcctgagaccctccagaccaaacttgacttcggccccatcacaccaggcacctcaagcgctcccacgaccactaccaaacgcaccagacgcccacacccaaagcctaaaaccaccccccatcctgaagtcccccagacgaagctagtgccagcgactatcctggagcccgtcttacgtaccgaagccagtggtacaacagccgtgcctgctaccatttttgaacccgtcagccccatcaaggaagcaccagggactacattcgtaccagtgaccgacctggagcctgtgacctttagaaccgaaatcccagcgacaacacttgcaacaaaaactagcaaaaggacccgtcctccccgacccagacccaagacaaccccctctcctcaggccccagagactaaacctgtacctgcaacagtcctagagcccgtgacgttgcgtccagaagcaagtactacactggcatccaagacctcccagcggaccagaagacccagactcagaacaaagactacaccacggcccgaggctcccgaatctaaaccagttccaacagctgaacttaagcctgtgactttacgtaccgaaacctgggtcacgactcaagccccaaagacatcacagcgcacacgccgccctaggccaaagaccaaaacaacaccgtcaccagaagtcccccagacaaaactggtgccttctaccgacttagaacccggaacccttcggacagaagcgccaaaaactatggttgtgactaccgtgttagaaccagatacattccgcaccaagttccccgaaaccaccctcgccccaaagactcagcgaaccagaagaccaagaccaaggcctaaaaccacttcctccccagaggttcctcaaaataaatctgtgagtgtgacgggatttgagcccgttgttcatagcacagacgcacccgggaccacctttgctttaacagaattgcagactcttattctcaagcccgtgacaagtcccagcctcgaaatgaccgaatcacagccagtgtcagacgtgctcgaatcagttacacttagtacagagagtcctaaggaaactatcgctcccgcgaagacagactacgtgtatcctactgctaaagcccctctctggccagaggaaccgaaaactgaagtcgtggaatcaattacatatgtgagcgaaccccctgagactacacttgagactagcccactgcccagccagtctatcactctaccttcaccagacgaaccccagacagaacccgcccccaaacaaactcccagagctcctccaaaacccaagactagccctcggcccagaatccctcaaacccagccagtccctaaggttccccagagagtaacggcaaaacccaagacaagtccaagcccagaagtgagctacacgacccccgctcccaaagacgttctactcccccacaagccatatcccgaggtgagccaatccgaaccagcaccactggagacaagaggtatcccattcattcctatgataagcccgtccccaagtcaggaggaattacaaacaaccctggaagagaccgaccaaagcacacaggagcccttcacgacaaagataccccgaaccacagaactggccaaaactacacaggcacctcaccgattttatactacagtcagacctcgcacctcagacaaaccccacatcagaccaggagtgaagcaagctccacgtccatcgggggcggaccgaaacgtgtcagtagactcaacccaccctacaaagaagccgggtactcgccgaccacctctgccgcccagacccacacacccaagacggaaacccctgccgccgaacaacgtaaccgggaaacctgggtccgcaggcataatctcttccggtccaattacaacccccccactgagatccactcctcgccccactggaacgcctctcgagcggattgaaaccgacataaaacagcctacagtgcccgcttcaggcgaagaactagagaatattaccgacttttcctcaagccctaccagagagacagacccactaggaaaaccacgctttaaaggcccgcatgttcgctatattcagaaaccggataattccccatgtagcattactgatagcgttaaacgattccctaaggaggaggcaactgaaggaaacgccacctcccccccccagaaccccccaactaatcttacagtcgttaccgttgaaggatgcccatcattcgtgatactagactgggagaagcctctgaacgacactgtaacagagtatgaagtgattagtagggaaaatggttcttttagcggcaaaaataagagcattcaaatgactaatcaaactttcagcacggtggaaaatctcaagccaaacacatcctacgaattccaggtcaagccaaaaaatcccttaggcgaagggcctgtcagcaacacagtggcgttttcaaccgagtctgccgaccctagagtatctgaacctgtatcagccggtcgtgacgctatttggacagagaggcctttcaattccgattcatatagcgagtgtaagggaaaacagtacgtgaagagaacatggtataaaaaatttgtaggagtccagctttgtaactccctgcgttacaaaatctacctgagcgatagtctgacgggaaaattctacaatattggagaccagcgaggacacggcgaagatcactgtcagtttgtcgacagctttctcgacggacggactgggcagcagctaacctccgatcagctccccataaaagaaggctactttagagcggtgcggcaagaacccgttcagtttggcgagatcggcggtcatactcagattaattacgttcaatggtacgaatgcgggacaactatcccaggtaaatggtag

SEQ ID NO: 14248 - RNA, 2355 nt, synthetic construct
  misc_feature 1..2355: note = source = /note="Description of Artificial Sequence: Synthetic coding sequence"
  source 1..2355: mol_type = other RNA
atgactatcgtacccacaacggatattgagccggtaacagtgcgaactgaagcaaccgttactacacttgcacccaaaacaagtcagcgcacccgtactcgccgcccccgcccaaaacacaaaacaacccctcgcccagagacacttcaaactaaactcgatttcggcccgataacccccggcacttcatccgctccaacaaccaccaccaagagaacaagacgcccacacccaaaacccaaaacaaccccacacccagaggtgccccagacaaagttggctccaaaagtacctcagagaacacacagacctcaccccaagcctaaaacgaccttatctccggaagaactccagactgaattagtacctgtgacagatcttgagcctgtgacttttagaacagagatacccgcaaccacgcttgcaactaaaacgtccaaaagaactcgccccccccgcccacggcccaagactacaccgtccccccaggccccagagacaaaacccgtgcccgcaaccgtactcgaacctgttaccctaagacccgaagcatctacaacattagcttcaaagacttctcaaagaacccgacgccctcggctgagaaccaaaacaaccccaaggccagaagcaccagaatcaaagccagcacctaagcaaactcctagggcccctcccaagcccaaaaccagccccaggcctcgaatccctcagacccagcctgttccaaaagtgcctcagagagtcactgcgaaacctaagaccagccccagcccagaagtgtcctataccacccccgccccaaaggatgttctcctcccccacaagccatatccagaagtgtcccaatccgaacctgcgccactggaaaccagaggcattccatttataccaatgatcagcccaagcccaagccaagaggaacttcaaactactcttgaggagacagatcagtctacacaagaacctttcacgacaaagataccacggacaacagaattagcaaagacaacccaagcacctcatcgattctatactacagtgcgccctagaactagtgacaaaccacacattcgtcccgtattaaatagaacaactacgagaccaacgagacccaaaccctctggaatgccctcaggcaacggggtggggactggggttaagcaggcccctagaccctctggcgctgacagaaacgtctccgtggattcaacccatcctacaaaaaaacccgggaccagaagaccaccactgccacctagacctactcatccacggagaaagcccttaccacctaataacgtgaccggaaagccaggatccgcgggcattatctcatcaggacctatcactactcctcctttgcgatccacaccgcgccccaccgggaccccattggaaaggatcgagaccgacatcaaacaaccaacagtgcccgctagcggcgaagagctcgaaaacataacagatttttctagcagtcccaccagagagaccgatccacttggcaaacctcgctttaaggggccccacgtgcgctatatccagaaaccagataactcgccttgctcaattacagactcggttaagcgatttcctaaagaagaagctacggagggtaacgccacatctcccccacagaacccacccaccaacctgacagtggtgaccgtcgaaggatgcccgagttttgtcatattagattgggagaaacctctgaacgatacagtgacagagtatgaggtcatatcacgcgaaaatggaagtttctccggcaagaataagtctattcaaatgacaaaccagactttttctactgtcgagaatctgaaaccaaatactagctacgagttccaagtgaagccaaagaaccccttaggggagggccctgtcagtaacaccgtggctttttcaactgaatccgcagatccaagagttagtgaaccagtctctgccggccgggatgcaatttggactgaacgaccattcaactcagactcctactctgagtgcaaaggaaagcaatatgttaagaggacatggtacaagaagtttgtaggggtgcaactctgcaattctctccgatacaagatttatctcagcgacagcctaacaggaaaattttacaatattggagaccaaaggggccacggggaagatcactgccagtttgtagactcttttcttgatggcagaacaggccagcagttgacgagtgatcaacttcctatcaaggagggctattttagagcagtgcgtcaggaacctgtccaatttggcgaaattggcgggcacacacagatcaactatgtgcagtggtacgagtgtggtactactataccaggaaaatggtag

SEQ ID NO: 14249 - RNA, 1584 nt, synthetic construct
  misc_feature 1..1584: note = source = /note="Description of Artificial Sequence: Synthetic coding sequence"
  source 1..1584: mol_type = other RNA
atgttaatgctgttcgttttcggcgttttactgcacgaggtctcacttagcggccaaaacgaagcacctccaaatacacacagtatcccgggcgaaccactctacaattacgccagcattagattgccagaagaacacatcccgttctttctccacaataaccgccacatcgcaactgtctgtcgcaaagactctctgtgtccctataaaaagcatctggagaaacttaaatactgttggggttatgaaaagtcctgcaaacccgagttcagattcggttaccctgtatgttcctatgttgatatgggatggaccgatacacttgaatcagctgaggacatattctggaagcaagccgatttcgggtatgcaagagagaggctggaagagatgcacgttctctgtcaacctaaagagaccagcgacagctccctggtttgcagccgctacctgcagtactgtagagccacaaatctgtatctggatctgcgtaacattaaaaggaaccacgatagatttaaagaagactttttccaatccggcgaaataggaggccattgtaaactggacattaggaccctaacctccgagggacaacgtaagagccctctgcagagctggtttgcagaacttcagtcatatacccaactcaacttccggccaatagaggatgccaagtgcgatatcgtcattgaaaagcccacttacttcatgaaactggatgccggcgtcaacatgtaccaccacttctgcgacttcattaacctctacatcacccagcatgtgaataactcattttctaccgacgtttacatcgttatgtgggacacctccagctacggttacggagatctgttctcggacacttggaacgcatttactgactatgatgtcatccacttgaaaacctatgactcaaaaagagtgtgtttcaaagaggcagtgttctccttgttaccccggatgcgatatgggctattttataacacgccactgatctccggctgccaaaacaccggccttttcagagcctttgcacaacatgtcttacatcgcctcaatattacacaggagggtccaaaggatggaaagattcgcgtaacaatcctcgcacggtcaactgaatacaggaagatcttgaatcagaacgagctcgtgaacgccctgaagacagtatccacctttgaagtacagattgtagactacaagtaccgcgagctaggatttcttgaccaattgcgtattacccacaatacagacatctttattggaatgcatggcgcaggacttacacatcttctgtttctaccggactgggccgcagtttttgaactctataactgcgaagatgaaagatgttacctggatctggcaaggttgaggggcgtgcactacattacatggcgacggcaaaacaaagtttttccgcaagacaaaggacaccatcctacactgggagagcacccaaagtttactaattatagcttcgacgtcgaggagttcatgtatctcgtactccaggcagccgaccacgtcctccaacaccctaaatggccatttaagaagaaacacgatgaactctag

SEQ ID NO: 14250 - RNA, 2004 nt, synthetic construct
  misc_feature 1..2004: note = source = /note="Description of Artificial Sequence: Synthetic coding sequence"
  source 1..2004: mol_type = other RNA
atgggctcttcgagattagccgcactgctgttgccactgcttctcattgtgattgacctgtctgattccgctgggatcggattccgccatttaccacactggaacacacgctgccctctagcttctcacaccgacgacagcttcactggttcatctgcttatatcccttgccggacgtggtgggcccttttctcaactaagccttggtgtgtccgtgtgtggcattgctcgcgctgtctttgtcagcatctcttgtctggggggagtggactacagcggggactcttccacttactcgtgcagaaaagtaaaaaatccagtaccttcaagttttatagacgccataagatgcccgcccctgcccaaagaaagctcctacctagacgccacctgtctgaaaagagtcaccacatttctataccctcccctgatatttcacacaaaggcctgcgatccaaacgcactcaaccctctgaccctgaaacatgggagagtctgcctcgccttgacagccagcgccatggcgggcccgagttctcttttgatctgctccccgaggcacgtgcgattcgtgtaaccatatctagcggcccggaggtgtccgtgcgcctctgccaccagtgggccctcgagtgtgaagagttatcctctccttacgacgtacagaaaattgtgtccggaggacacacagttgaactcccctacgagttccttctaccctgtctttgcattgaagccagttacctacaagaggatactgtgagaagaaaaaagtgtcccttccagtcatggcccgaggcctatggcagtgacttttggaaatcagtacacttcaccgactatagccagcacacgcagatggtgatggccctgactctgagatgtcctcttaagcttgaggccgcattgtgccagagacacgattggcatactctctgcaaagatctgccaaacgcaactgcccgagaatccgatggatggtacgtgttagagaaggttgacctgcacccacagctctgctttaagttttcatttggtaacagtagccatgtagaatgcccccaccagaccgggtctctgacttcctggaatgtctctatggacacccaggcccagcaactcattcttcactttagctcaagaatgcacgcaacttttagcgcagcttggtctctcccaggcttaggccaggatactttagtccccccagtatacactgtctcccaggcgcgtggttcaagccctgtgagtttggacttgatcattccctttctacggccaggctgctgtgttctggtgtggcgttccgacgtccagtttgcctggaagcacctcttgtgcccagacgtgagttaccgacatctcggactcttaatcctggctcttctagctctactcactcttctcggtgtggtgctcgccctcacgtgtcgtagacctcagtcaggacccggccccgcaagacccgtcctcctcttacatgccgctgacagtgaggcacagcggcgtctggtgggcgcattggccgagctgctccgcgcggcccttggtggcggcagggatgtcattgtcgacttatgggagggaagacatgtagcccgagtggggccgctgccatggctttgggcagcaaggacccgagttgcacgagaacagggaaccgtgcttcttctctggagtggtgcagaccttcgccccgtgtctggccccgatccacgagcagcacccctgctggctctccttcacgctgccccaagaccgctcctgctcctggcttattttagccgtttatgcgcaaaaggagacatcccacctccactgcgggccttacctcggtacagactgctgcgcgatctccctcgcctgctccgtgcactggatgctagaccatttgccgaggcaacatcctggggacgcttaggagccagacaacgccgacagtccagactcgagctatgctctaggttggagcgggaggcagccagattggccgatcttggttag

SEQ ID NO: 14251 - RNA, 1101 nt, synthetic construct
  misc_feature 1..1101: note = source = /note="Description of Artificial Sequence: Synthetic coding sequence"
  source 1..1101: mol_type = other RNA
atgccaatgataagcgtgcttggcaagatgtttctgtggcagagagaggggccgggtggacgctggacttgccagacatcacgtagagtctcgtcagatcctgcatgggctgtggaatggattgaactgcctcgcggattgagcttgtcttcacttgggtcagcacggactcttcgtggttggtcgcggagtagtcgcccatcttccgttgattcacaggatctgccagaggtaaacgttggggataccgtcgccatgctgccgaagtcccgtcgggccttgacaattcaagaaatcgctgctctggcacgatccagcctgcacggcatctcccaggtggtgaaagatcatgtgactaagccaaccgccatggcacaggggcgtgtagctcatctcatcgagtggaaaggatggagtaaaccaagtgatagccccgcagccctggagtcagcttttagtagttattcagatttgtccgaaggggaacaggaagcccgctttgctgccggcgtagcggagcagtttgctatagctgaagccaaactgagggcctggagtagcgtcgatggggaagattcaactgatgacagctacgacgaggactttgctggcggaatggatactgacatggctgggcagttgccgctcggcccacatttgcaggacctgtttaccgggcatcgttttagtagacctgttaggcagggaagtgttgaacccgagagcgattgcagccagacagtgagtcccgacacactctgtagtagtttatgttcattggaggatgggttactgggatcacctgcccgtctcgcttcacaactattaggtgatgaactgttgctggccaagcttcctccatctcgcgaatctgcgtttcgttccctgggtcctctggaggcacaggatagcttatataatagccctttaaccgaaagttgcctgtccccagccgaagaggagcctgcgccttgcaaagactgccagcccttatgccccccgctcacaggatcctgggagagacagcggcaggcgtctgatctagcatccagtggtgtcgtctcgctggacgaagacgaagcagaacccgaagaacaatag

SEQ ID NO: 14252 - RNA, 5172 nt, synthetic construct
  misc_feature 1..5172: note = source = /note="Description of Artificial Sequence: Synthetic coding sequence"
  source 1..5172: mol_type = other RNA
atgcagtttcagcttactctgtttctgcaccttggctggctgagttatagcaaagcccaagacgattgcaatcggggtgcgtgccatccaactacaggagatttacttgtcggtcgtaacactcagcttatggcatcgtcaacttgtggtctttcaagagctcagaaatattgtatcctgtcttacctggagggggaacaaaagtgtttcatttgcgactcccgctttccatatgatccgtacgaccaaccgaacagtcacaccattgaaaatgtcatcgttagcttcgagcctgatagagagaaaaaatggtggcaatcagagaatggcctggaccacgtgtctattcgtctcgatcttgaggctctgtttcggttctcacacctgatcctgacttttaagacctttcggcccgcagcaatgcttgtcgagcgttctacagactatggccacaactggaaggtttttaaatacttcgcgaaagactgcgcgactagcttcccaaacataacttctggacaggcacagggcgttggagatatcgtttgtgattccaagtattctgacatcgaaccatctacaggaggcgaggttgtgctgaaggttttagatccaagctttgagattgagaatccttattcgccttatattcaagaccttgtgacactgacaaacttgcgaattaattttactaaacttcacaccctgggcgatgcactgcttggccgcaggcaaaacgattctcttgataagtactactacgccctttatgaaatgatcgtccggggttcgtgcttctgtaatggccatgctagtgagtgccgccctatgcagaaaatgagaggcgacgtgttttcccctcccggaatggtgcatgggcagtgcgtgtgccagcacaacacagacgggcccaactgtgagaggtgtaaggacttttttcaggatgccccatggcgaccggcagcagatctccaggataacgcatgcagaagttgcagctgtaattcacattcctctcggtgccatttcgatatgactacctatctcgcctccggcgggctaagcggcggtgtgtgcgaggattgtcagcacaatacagaaggacaacactgtgacagatgtagacccttattttatagggatcccttaaagactatcagcgacccctacgcgtgtataccctgtgaatgcgatcctgatggcaccatctcgggtggcatctgtgtgagccatagcgaccccgccttgggttctgttgcaggacagtgtctgtgcaaggaaaatgttgaaggagccaagtgtgatcaatgtaaacccaaccactacggactgtcagcaactgacccgctaggatgccagccctgtgattgtaatcctctaggttctctgcctttcctgacgtgcgacgtggatactggacaatgcctctgcctgagttacgtcactggcgcacactgcgaggaatgcaccgtgggttattggggactcggcaatcacctgcatggttgctcaccttgtgactgcgacatcggcggtgcttattctaatgtgtgctcccctaagaatggccagtgcgagtgtagacctcatgttacaggccgcagttgcagtgagcctgcacccggctacttcttcgccccacttaacttctacctgtacgaggctgaagaagctacaactcttcaggggctggccccccttggttctgaaaccttcggtcaatctcccgctgttcatgtcgttctgggagaacccgtgcccgggaatccagtgacttggaccggccctggatttgcacgggtcctgcccggtgccggattacgattcgcagtgaataacatccccttccccgtagacttcacaattgccatccattacgagactcaatccgccgccgactggaccgtgcaaattgttgtcaatcccccaggtgggtctgaacactgtatccccaagacattacaatcgaaacctcaatccttcgcactgccggccgctactagaataatgctgctgcccacacccatttgtcttgagcccgatgtgcagtatagtattgatgtgtattttagtcagcctcttcagggcgaatcacatgctcatagccatgtattagtcgattccctaggcctgatacctcagatcaacagtcttgagaatttttgcagtaaacaggatctggatgagtatcagttacacaactgtgtcgagattgcctctgccatgggtccgcaggtgcttcctggagcctgtgaaagactcattatcagtatgtctgctaagctacacgatggagctgttgcatgtaaatgtcatccccagggcagcgttggtagtagttgttccagactcggtgggcaatgtcaatgtaaacccttagtcgtggggcggtgttgtgatcgatgctcaaccggcagttacgatttaggccatcatggatgccatccttgccattgtcatccccaggggtccaaagatacagtgtgtgaccaagtcaccggccaatgtccatgtcacggggaggtaagtgggcgacgctgtgaccgatgtctggccggctactttgggttcccaagttgccatccttgtccctgcaaccggttcgcagagctatgcgatcctgaaaccgggtcatgctttaactgtggaggcttcactactgggcggaattgcgaaagatgtatagacggctattacggtaatcccagctctggtcaaccctgtcgcccttgtctctgcccagatgatccaagtagtaaccagtactttgctcactcttgctaccagaacctgtggtcctctgacgtgatctgtaactgtctgcagggatacacaggaacccagtgcggcgagtgttcgacaggcttctacggaaacccaagaattagcggagctccctgccaaccgtgtgcatgcaataacaacatcgacgtgactgatccagaatcttgctccagagtgaccggtgaatgtcttaggtgtttacataatacacagggcgctaattgccagctatgtaagccaggacactacggatcagccttgaaccaaacatgccgtcggtgctcttgccacgcgagcggagtctcccctatggagtgtcccccgggaggaggagcctgcctatgcgacccggtaacaggtgcttgcccctgtctaccaaacgtgaccggcctcgcatgtgaccggtgtgctgatggatactggaaccttgtgcccggaagaggctgtcagtcctgcgactgtgatccccgtacaagccagtctagccattgcgatcaactgacgggacaatgtccttgtaaactcggctatggcgggaagcggtgttccgaatgtcaagagaactattacggagacccaccgggaaggtgtatcccttgcgattgcaatcgagctgggacgcagaaacctatttgtgacccagacactggcatgtgtagatgtagagaaggagtgagcggacaacgttgcgataggtgcgctcgtggccacagtcaagaattccctacctgcttgcagtgtcacctgtgttttgaccagtgggatcacaccattagcagcctgagtaaagctgtgcagggcttgatgaggttagccgccaatatggaggacaaacgcgaaaccctgcccgtgtgtgaagctgattttaaggacttacggggcaatgtctcagagatcgaaagaattctaaagcaccccgtgtttccatcaggcaaattcctaaaagtgaaagactaccacgattccgtccgtaggcagatcatgcaattaaatgaacagctgaaagccgtatacgagttccaggatcttaaagataccatcgagcgagccaagaacgaagctgacttattgcttgaagatttacaggaagaaatagacctccagtccagtgttcttaatgcttcaatcgccgacagttctgaaaacattaaaaaatattatcatatctcctcatctgcagaaaaaaaaattaacgaaacaagttccacaataaatacatctgctaatactcgcaatgacctactgaccatcttggacacactgacaagtaagggcaacttatctctcgaacgtcttaagcaaattaagatcccagacatacagatcctgaatgagaaggtgtgtggggaccctggcaacgttccctgtgtacctctaccctgtggtggggccctatgtaccgggcgcaagggacacaggaaatgtcggggacctggttgccatgggtctctcaccctgagtaccaatgcgctgcagaaggcacaggaggcgaagtcaataattcgtaatctagataagcaggtgcgcggcctaaagaaccagattgaatccattagcgagcaagcggaggtttccaaaaataacgcacttcaattgcgggaaaaactggggaatattagaaaccagagcgacagtgaggaagaaaacatcaatttatttataaagaaagttaaaaattttctgttggaggagaatgtgccacccgaagatattgagaaagtggccaatggagtcctggatatacatttgcccataccgtcccagaacctgacagatgagctggtcaaaatccaaaagcacatgcagctttgtgaagactacagaacagacgaaaaccggcttaacgaagaagccgacggggcgcaaaagcttctggttaaagcaaaggccgccgagaaagctgcgaacatcctcttaaacctggataaaacactcaaccaactgcaacaggcccagatcacccaaggtagagcaaacagtactataacacaacttaccgcaaacatcacaaaaataaagaagaacgtattgcaggccgaaaaccagactcgcgagatgaaaagcgagttagaacttgcgaaacagcgaagcgggctcgaagacgggctatcactgctccagaccaaactgcaaagacaccaggatcacgcagttaacgccaaggttcaagccgaaagcgcccaacaccaggcaggctcgttggaaaaggaattcgtcgagttaaaaaaacaatatgcgattctccagcgaaagacctcaactacaggactgacaaaagaaacgctggggaaagtgaaacagctgaaagacgccgctgagaaattggcaggcgacaccgaagctaaaataagacgcattacaggttgttttcagaactccgcacgctag

SEQ ID NO: 14253 - RNA, 5286 nt, synthetic construct
  misc_feature 1..5286: note = source = /note="Description of Artificial Sequence: Synthetic coding sequence"
  source 1..5286: mol_type = other RNA
atgcaatttcagcttacccttttcctccacctgggatggttatcctattcaaaagcccaagatgactgtaatcggggcgcctgtcacccaacaaccggtgatcttctagtcggcagaaatacccaactcatggcctccagcacctgtggactttcacgcgcgcagaagtattgcatcctcagctatctggaaggggagcagaagtgcttcatttgcgatagtagattcccttacgacccttatgaccagcctaactctcacactatagagaacgtcattgtgtcgttcgaaccggaccgcgaaaagaagtggtggcaatccgaaaacggtctggaccacgtcagcattagactcgatctcgaagccctctttagattctctcacttaatccttactttcaagacatttcgtccggcagccatgctagtcgagaggagcacagattacggccataactggaaagtttttaagtactttgccaaggactgcgctaccagtttcccaaatatcacatcaggtcaagctcagggggtgggggacatagtctgcgatagcaagtattcagatattgagcccagcacaggaggtgaagtcgtattaaaagttcttgacccaagtttcgagatcgaaaatccttactcaccttacattcaagatcttgtgacccttacaaacctcagaataaatttcacaaagctgcacactttgggggacgccttactcggaaggagacagaacgactctctagataaatactactatgccttatacgagatgatagtcagaggttcctgtttttgcaacgggcacgccagcgagtgtaggcccatgcagaaaatgcgaggggatgtgttctcacctccaggtatggttcatgggcagtgcgtgtgccagcacaatacggatggcccaaactgtgagagatgcaaggactttttccaggacgccccgtggagacccgccgcagacctccaggacaatgcgtgccgttcctgcagctgcaattcccactcgagcagatgccactttgatatgactacctacctggcttctggtggcttaagtggaggagtatgcgaggattgccagcataacactgaaggacagcattgcgaccggtgtagacctctgttctatcgagaccctctaaagactataagtgacccttatgcctgcattccctgcgagtgtgacccagacggtactatttcaggtgggatttgtgtttctcatagcgaccctgcattaggatctgtggcaggccagtgtctgtgtaaggaaaatgttgaaggggcaaagtgcgatcagtgtaagcccaaccactacggcctgagcgcaaccgaccccctgggctgccagccttgtgactgtaaccccctgggatctctgcctttcctgacctgcgatgtcgacacaggacaatgcctatgtttatcatacgttacaggtgctcactgtgaagaatgtaccgtcggctactggggactgggcaaccaccttcatggttgttcgccctgcgactgtgacataggcggcgcgtacagtaatgtgtgctctcccaaaaacgggcagtgcgagtgtaggccacacgtcacaggaaggagttgctccgaacccgccccaggttatttcttcgcaccactcaacttttatctctacgaggcagaggaggccactactcttcaaggactggcacccttagggagcgaaacattcggccagtctcccgctgtacatgttgtcttgggggaacccgtacctgggaacccagtgacatggactggccccggttttgccagggtgctgcctggggctgggttgcgttttgccgtaaacaacattccattccctgtcgactttactattgccatccactatgaaactcaatccgccgctgattggactgttcagatcgtagttaacccacctggtggttctgaacactgtataccaaagaccctgcagtcgaaaccgcaatcatttgccctgcctgccgcgaccagaataatgttgctgcccacacccatctgtcttgagcctgacgttcagtactctattgatgtatatttttcccagcccctgcagggcgagtcacacgcccactctcacgttctggtggactccttgggactaattccacagattaattcgctcgagaatttttgttcaaaacaggacctagacgagtaccagctccacaactgtgtggaaattgcatcagctatgggaccccaggtactgccgggtgcctgcgaaagactgataataagcatgagtgctaaactgcacgatggagcagtagcttgtaaatgccaccctcagggatccgtcggttcgtcatgcagccggctcggtggacagtgccagtgtaagcccttagtcgtgggcagatgttgtgatcgttgttccacagggagttacgatttaggtcatcacggatgtcacccctgtcattgtcaccctcagggctccaaagatactgtttgcgatcaagttaccggacagtgcccttgccatggcgaggtgtccggcagacgctgtgataggtgcttggcaggatattttgggtttcctagctgccatccatgtccatgtaacagatttgcagagctgtgcgacccagagaccggctcatgcttcaactgtggcggcttcactacaggcagaaactgcgaaagatgtatagatggttattacggcaatccctcatctggccagccctgcagaccatgcctgtgtcctgacgacccctctagcaaccaatactttgcccactcatgctatcaaaatttgtggtcaagtgatgttatttgcaactgccttcaaggctacacaggtacccagtgcggcgaatgctcaacggggttttacggaaaccccaggatttccggcgccccatgtcagccatgtgcctgtaacaataatatagatgtgacagaccctgaaagttgttctcgagtgaccggagaatgtttgcggtgcctccacaatacacaaggtgcgaactgccaactatgcaagcctggccattatgggtcagcgttaaaccaaacatgtaggcgctgttcatgccacgccagcggtgtatctcccatggaatgtccacccggcggcggagcttgcctgtgcgaccctgtgaccggcgcgtgtccatgtttgccaaacgtgactggattagcctgcgatagatgcgctgatggatattggaatctcgtacctgggcgtggatgtcaaagctgcgactgtgaccctagaaccagtcaatccagtcattgcgatcagttaacgggtcagtgcccttgcaaattgggctacggaggtaaaagatgttcggagtgtcaggagaattactacggtgatcccccgggaagatgtatcccctgtgactgcaaccgagctggcacacagaaacctatatgcgaccccgacaccggcatgtgcagatgcagggaaggtgtgtctgggcagagatgcgaccgttgtgctaggggacactctcaggaatttcccacttgcttacaatgccatttgtgcttcgatcagtgggatcataccatctcctccttgagtaaagccgtgcagggcctgatgagacttgccgccaacatggaggataagagagagacattgcccgtctgcgaagccgatttcaaggacctccggggcaacgtgagcgagatcgagcgaatcctaaaacaccctgtgtttccatccggcaaatttctgaaagtcaaagattatcatgactcagtgcgcaggcaaatcatgcaacttaatgaacaactcaaggctgtctacgagttccaggacctcaaggatacaatcgaacgtgccaaaaacgaggcggatttattattagaggacctgcaagaggagatcgatttgcagtcatcagtcctgaatgcttctatagctgactcctccgaaaacataaagaaatactaccatatttcaagtagcgccgagaagaagataaatgaaactagcagtaccattaatacaagcgcaaatacacggaatgacttactaaccatcctggataccctaaccagcaagggcaatctgtcacttgaacgcctcaaacaaatcaagattcctgatatccaaattctcaatgaaaaagtctgtggagacccgggtaatgtgccatgcgtccctttgccctgcggaggggcactctgcaccggaagaaagggccatcgcaagtgtagagggccgggctgtcacgggtcactgaccctctctactaatgctctccaaaaagcccaggaggctaaatccatcatacgcaacctggataagcaagtgaggggattaaagaatcagattgagtccatcagtgaacaggctgaagtgtctaaaaataatgctctacagctcagagagaaattgggaaatatacgaaaccaaagtgatagcgaagaagaaaatatcaatttattcatcaaaaaagtaaagaatttccttctggaagagaatgttccacccgaggatatcgaaaaagttgcaaatggggtactggacattcacctccctatccctagtcaaaacctgacggacgagctagttaaaatccagaagcacatgcaactctgtgaagactaccgcaccgacgaaaaccgcctgaatgaggaagcagatggtgcccagaaattgctcgttaaagccaaagcagccgagaaagcagcgaatattttactgaatctggacaaaaccctaaatcaacttcaacaggctcagataactcagggaagagccaattccactatcacacagcttacagcaaacatcactaagattaagaagaacgtgctgcaggccgaaaatcagactcgagaaatgaaatccgaactggaacttgcaaaacaaaggagtgggctcgaggatgggttgtcactgctccaaaccaaacttcagagacaccaagaccatgccgtgaatgcaaaggtgcaggccgaaagcgcgcagcaccaagctggaagtctggaaaaggaattcgtggaactcaagaaacaatatgccatcctgcagagaaaaacatcgaccaccggactcaccaaagaaactttagggaaggtgaagcagctaaaagacgcggcagagaaactagccggagatacggaagcgaagatcagaagaatcacagacctcgaaagaaagatacaggaccttaatctgagccgacaagctaaagccgaccagctccgaattctggaagaccaagttgtggctattaaaaacgaaatcgtagagcaggagaagaaatacgcccgctgttactcctag

SEQ ID NO: 14254 - RNA, 1455 nt, synthetic construct
  misc_feature 1..1455: note = source = /note="Description of Artificial Sequence: Synthetic coding sequence"
  source 1..1455: mol_type = other RNA
atgggcgcagaggccctgcctggaccagacgaggctgccgcagctgctgcctttgccgaggtgaccaccgtcaccgtagctaacgtcggagccgcagccgataatgtttttactacatcagtcgcaaatgctgcttccatctctggacatgtgctctcgggaaggacagctctccagattggtgacagtctgaacaccgagaaggcaaccctcatagtagtgcacaccgacggctccatcgttgagaccacaggactaaagggtccagccgcaccactcacacccggaccacagtcaccacctacacccctggcacctggacaggaaaaaggcggtacaaagtacaactgggacccctccgtgtacgattcagaattgccagtccggtgtcgtaacatttcagggacattatacaaaaataggctcggatccggaggacggggtcgatgcattaagcagggagaaaactggtactccccaaccgaatttgaagccatggccggccgcgcctcatctaaagactggaagcgaagtattaggtatgctgggaggccactgcaatgtctcattcaggatggcatcctaaatccacatgctgcttcttgcacctgcgctgcctgttgcgacgatatgaccctgtcaggccctgttaggctgttcgtgccttacaagagacgcaaaaaggaaaatgagctgcctacaacacctgtgaaaaaagatagtcctaaaaatataactctgctccccgcaacagccgctactacttttacagttacgccctctggacagattaccacttcaggcgctcttacttttgatcgcgcgtccacggttgaggccacagcagtaatatctgaatcacctgcccaaggggacgtttttgccggggctacagtccaggaggcatccgttcagccgccctgtcgagcgtcccatcctgaaccgcactaccccggctaccaagattcatgtcaaatcgctccattccctgaggccgctctgcctacctctcacccaaagattgtgcttacaagcttaccagctctcgccgtcccccctccaaccccaacaaaggctgctccacctgccctcgttaacggtttagaacttagcgagccacgctcctggctctatctcgaggaaatggtgaactccttgctcaacactgctcaacaactcaaaacattgtttgaacaggccaaacatgcttcaacctacagggaagccgccactaatcaagccaaaatccacgctgacgccgagcgcaaagaacaatcttgtgtgaactgcggcagagaggccatgagcgagtgtacaggctgtcacaaggttaattactgttccacattttgccagagaaaaaggtggagtcttactatgttaacgtccctcgtgtctataagttggttaagggccatcttaccatgccagccacccaaggtcctcgggctgtag

SEQ ID NO: 14255 - RNA, 1512 nt, synthetic construct
  misc_feature 1..1512: note = source = /note="Description of Artificial Sequence: Synthetic coding sequence"
  source 1..1512: mol_type = other RNA
atgtcaggcgctctgctctggcctcttttgccgcttctgttacttctgttaagtgcgcgtgatggagtccgggccgcccagccccaagcccctggatatctgatcgcagctcccagcgtgtttagagctggcgtcgaggaagttattagtgttacaatctttaatagtcctcgcgaagtgacagtgcaagcccagttagtcgctcagggcgagcccgtagtgcagagtcagggtgctattctcgataaagggactattaaacttaaagtgcccactggcttgcgtggacaagcactcctgaaggtctggggacgtggatggcaggctgaggagggtcccttgttccataaccagacctcagtcacagtggacgggagaggagccagcgttttcatccagacagataaaccagtgtaccggcctcagcacagggtgctcatatctatctttaccgtgtccccaaacttaagaccagtgaacgaaaagcttgaagcatacatcctggatccaaggggctcgcgcatgattgagtggagacatctgaagcctttctgttgcggaataactaatatgtcattccctctaagtgatcagcctgttctgggtgagtggtttatctttgtcgagatgcagggtcacgcctataacaagagttttgaggtccagaaatatgttctccctaagtttgagttgcttatcgatcctcctcgctacattcaggatttggacgcatgcgaaaccggaactgtgagggctcggtatacatttggaaagcccgtagctggtgctctgatgattaacatgactgtgaatggagtgggttattatagtcacgaggtcggacggcctgtgttgagaaccaccaagatactcggaagtcgcgactttgatatctgtgtccgggatatgattccagcggacgtgcctgagcatttcagaggaagggtcagtatttgggcgatggtgacaagtgtggatggaagtcaacaggttgcttttgatgattctacaccggtccagcgacagctcgtggatatccggtacagcaaagacactaggaagcagttcaagccaggattagcatatgtgggtaaggtggagttgtcctacccagatggaagccccgctgaaggtgtaacggtccaaatcaaagccgagcttaccccaaaagacaacatctacacaagtgaagtcgtctcccagagagggctggtgggcttcgagataccaagcatccccacaagtgctcaacacgtctggctcgaggtgtttcaagaattggaggattatgacgtaagtgacagtttcggggtcagccgcgaggatgggccattttggtgggcaggtctcacagcccagagaagacgacggagctcagtctttccctggccatgggggatcactaaagattctggattcgcttttaccgtgcgaaggggaaatggcactggaggtgatgaccggcctagtgaaccagaaccacccgctggtcgttggcctttgcataggtag

SEQ ID NO: 14256 - RNA, 144 nt, synthetic construct; identical to SEQ ID NO: 12617
  misc_feature 1..144: note = source = /note="Description of Artificial Sequence: Synthetic coding sequence"
  source 1..144: mol_type = other RNA

SEQ ID NO: 14257 - RNA, 861 nt, synthetic construct
  misc_feature 1..861: note = source = /note="Description of Artificial Sequence: Synthetic coding sequence"
  source 1..861: mol_type = other RNA
atggaagtatatattaggcatctcgagaaagttctgagacgttatgtgcagaggctccagtggctcctgagtgggcctgtcctttgtagtcggacttggtatcggcagagtatggatagaggggtgatgatgaccgccgcatctggtagtaggagactgtttgggacggtgctcgagagtaaagtgtgcatattactcgatacaagcggctccatgggaccctatctgcaacaggtaaagacggagttagtgttgctaatttgggagcagcttagaaagtgctgtgactctttcaatctcttgagtttcgccgaaagtttccaaagctggcaggacactcttgttgagaccacagacgccgcctgtcacgaagccatgcagtgggtgacccacctgcaggcccagggctctactagtattctccaggctctacttaaggctttctcttttcacgaccttgaaggactctatcttctgaccgatggcaagccggataccagctgttccctcgtgctgaatgaagtgcaaaagctgcgcgaaaaaagagacgtgaaggttcacacaatcagtctgaactgttccgatcgagcggccgttgaattcttgcgcaaactggccagttttacaggcggtcgctatcattgccccgtgggcgaagacaccttatcaaaaattcattccctcttaactaaaggcttcatcaatgaaaaagaccctactctcccccctttcgaaggagacgatctcaggatcctcgctcaggaaatcactaaagccagatcttttttgtggcaggctcagagtttcaggtcacagctgcagaaaaagaacgatgccgaacccaaggttacacttagttag

SEQ ID NO: 14258 - RNA, 3555 nt, synthetic construct
  misc_feature 1..3555: note = source = /note="Description of Artificial Sequence: Synthetic coding sequence"
  source 1..3555: mol_type = other RNA
atgaaaaagtaccgcaagatctctatcggctgctttgccatggctacacaaacctcccatgtgtttcacggtcaagagaacatgttcttagaaaatcattgcatcagaaggaacacaggaagagacagcaagaaacccctgaaacaaaagaatatgaacggtctaggtcagaatagcgataatggcctactggttacccatgtgaaccaaacccaggatctgctacgcttgcagggctccgagacacaatccagtgattgggaggacagcgaagattggttaagtgcccacagcctcaaatgtcagaagctcacactcgctgatctaatctcccagggtacagaggtgctagaagagggcacgaatgtggtgcaaaaaatttgcttctctactcagatcataagacacttcgaatcaaagttgtcagataccatagaggtgtaccaggaacgaattcagtggctgactgaaaactcaaagaaggcatttgggttaattaagggggcaagagtaagcatcctcattgacgtctcagcaatttcttcagggccacagaaggaagaattccagaaggaccttatgagcctcatagatgaacagttgtctcataaggagaagctgtttgttttatccttcggcactaacgctggttcactttggcctgaccctatggaagtatctgcaagcactttacaggaactgaaactttgggtgaaaactttacagccggacggcggctccaacctgctccaggctctgaaaaaaatatttactttgaagggattagactctctggttgctattatgagaagttgtcctgatcagccaagtgaaatactgagcgactatattcaacagagtaccatggggagggacctcatcatccactttattacttataggtgtgacgatcagatgcctcccgccgtactgaagaacctagccgaagctgtgcgaggatattatcactgttattcacctaagatggaacactatacctcccgtgacatggatgagttgttagctgaaattcagaaagctcagtcactcctgtcccatgtgcaagccttacagcattcttcaccctgtgaagcactgacctgtaccatggaggagatatcaacggagattaccaacggacctttaatctcattacttccaaagcccccgaagcacgacgcccctttaacaattgagtttcccaatttagacaaaaccagcgccgagtggctgaaggtcaatggcttaaaggctaaaaagctttctctgtaccaggtgttggctcctaacgcattttcccctgtcgaagagtttgtgcctattctccagaagacagtatcttctactattcacgagaaagctatgattcagtttgagtggcacgatggaacagtgaaaaatatccacgtcgatccccccttcctgtataagtatcagcaacaattatctcgcgctatgaggatgtacgaaagaagaatcgagtggctctcacttgcttctcgcagaatctggggcacagtgtgcgaaaagcgagttgtagtccttctcgacattagcgccactaattcaatgtacataatccacatccaacattcactgcgcctgctgctcgaagaacaactctccaacaaagactgctttaatctgatcgcctttggatcaacgatcgaatcgtggcgcccagagatggtacccgtatcccataacaatctacaatctgcttggagatgggccctgaacctccgatgcaggggctctagaaatgtcttgtccgccttgagaaaagctgtcgaagttgatttcaaggataaggacaagcaccagtcacagggaatttacttattcacgggagggattcctgatcaagacatgcctaccctcagtgcctacatggcggaagcgtgtggaggttgtgacctacaactcaacgtctgccttttctatgtcggcgagcctaagatggacacaactccacccgctcgttacgcatctcacacagacacagcagcagcatataaagaggttaccagggcagcaggtgggcggttccactggttcggagataccggcatttacgagagtgatgatatcaactccattatgagtgaaatggagaaagcacttaattacagccagaaatgtgcttttcttatggcctccctcaaaaaccacagcggcaaggtcctcggaagcagcgcattacctaaggaaaagccgaagactctacaactgagaagccagcctaagaaactctgtcccccccgacccaccgtgcccctcggagcccgtatgtcgatcaaagatgaccccgatagagaaaaatcccccccgctgaagtctttaaagtggcgccccctgtcctcccgggttggaatcagccccgcagctgctcagcccaccaaggaagggatgatggagttgagacgaaagacaaaatccagagaagctgagaccagtctacttctgttttacacagaaaaggggaacgacgtgggctctgtgtacaaaaaatatccacaaggccgcggcttgagaaggacatctagttcgattgatttacctaggaaagatacagtctgctcctcacaggaatgggtcgctaagtatggactgaagaaactgaaactcgagatctcccggtgcatgggtccaaattgtacccatcagaagagtgggcagcggagtgcaagcgccaaacattgttctatcttccctagcgtggagattcacggcgtggtgcggcacattcaatggaccccccgcgagatggaagtgtacataaggcaccttgagaaagtcttaagaaggtacgtacaacggttgcagtggctcctgagcggttcgagacgcttgtttggtacagtattagaatcaaaagtctgcatactcttagacacttctggttctatgggtccgtacctccaacaagtgaaaacagaactggtactgctgatctgggaacaattaaggaaatgttgcgacagctttaacctgctgagctttgcagagagttttcagtcatggcaggataccctggtcgagaccaccgacgccgcttgccacgaggctatgcagtgggtcacccatctacaagcccaaggaagtacatccatccttcaggccttgttaaaagccttttcatttcacgacctggagggactatacctcctgaccgatggcaaacccgacacaagttgtagcttggttctcaatgaagtacaaaaactgagagagaagagggatgttaaagtgcacacaataagcctgaactgctcagaccgtgctgctgtggagttcttgagaaagctggcttccttcaccggaggacgataccactgccccgtgggcgaagataccctatctaaaattcactctctccttaccaaagggtttataaacgagaaagacccaaccttgccccccttcgagggcgatgacctgcgaatccttgcccaagagatcactaaggcccgaagctttctgtggcaagcccaaagctttagatcccagttgcagaaaaagaatgatgccgaacccaaagtgactctaagctag

SEQ ID NO: 14259 - RNA, 906 nt, synthetic construct
  misc_feature 1..906: note = source = /note="Description of Artificial Sequence: Synthetic coding sequence"
  source 1..906: mol_type = other RNA
atgttaccgttgaccatgacagttcttatcttactgttactacctacgggacaggcagcccctaaagatggagtcacccgccctgatagtgaggtccagcaccagctgctgcctaatccttttcagccagggcaggagcaattggggttactacagtcctatctgaaaggcctcggcagaactgaagttcagcttgaacatttgagtagggaacaagtccttctgtatttgtttgccctccatgactatgaccagagcggccagctcgacggcctggaattactctcgatgctcaccgccgccctcgcccccggcgccgctaattccccgacaacaaaccccgtgatcttgatcgtggataaggtacttgagactcaggatctcaacggcgacggactaatgacccccgcagagcttatcaactttcccggtgtggcactccggcatgtggagcccggggagccactcgcaccaagcccacaggaaccccaagcagtcggtcgacagtcattactcgcgaaaagccctctgcggcaggagacgcaggaagcacccggtccaagagaagaagctaagggacaggtggaagccaggagagagtcgctagacccagtgcaggaaccaggaggccaggctgaagctgacggagacgtgccaggcccacgaggggaagccgaaggtcaggccgaagcaaaaggagatgctcctggtcctagaggagaagctggcggccaggccgaagctgagggcgacgcacctgggcctagaggcgaagctggcggtcaagcggaggcacgggaaaatggcgaggaagcgaaagagctgccaggcgaaacactagaatctaagaatacccagaatgatttcgaagtccatatagtgcaggtggaaaatgatgagatctag

SEQ ID NO: 14260 - RNA, 4722 nt, synthetic construct
  misc_feature 1..4722: note = source = /note="Description of Artificial Sequence: Synthetic coding sequence"
  source 1..4722: mol_type = other RNA
atgagagtgttagcatgccttctggccgctctggttggaattcaggctgtggaaaggttgcgactcgccgacggccctcacggctgcgccgggaggctcgaagtttggcatggcgggcgctggggaaccgtgtgtgacgatgggtgggacttgagggatgcagcagtggcgtgcagacagctgggatgcggtggcgctctcgctgcccccggaggagcgttttttggtgaaggagctggccccgtatggctgagcgaattggcttgtcgaggaaatgaggggcagctaggtttgtgtcaccacagaggctggaaggctcacatctgctcacacgaagaggacgccggagtcgtgtgcgctggtcaacgtgtggcaaacagccgggatgattcaaccagccctttagatggtgccccttggcccggcctactgctcgaattgagtccatcaaccgaagagcctctagtcactcatgccccacgtccggcaggtaacccacagaacgcctctcgtaagaaatctcccaggcctaagcaggccaagtccacccgcgcgccactgctgaccaccggagcacccagacaagagaggttacggctcgtgagcggacctcacagatgtgctgggcggctcgaagtgtggcacggggggagatggggaactgtgtgtgacgatggatgggatctccgagacgctgcggtggcctgtcgtgagctggggtgtgggggagcactcgccgcccccggaggggcacgcttcggccctggtgcagggcctgtatggatggacgacgtcggttgtggaggcggggagcaggccctgagggattgtcctagaagcccatgggggaggagtaattgtgaccatagcgaggatgccggtttggtttgcaccggccccgccccaaggctaagactcgctgatggcccgcacggctgcgccggcagactggaagtgtggcacggcggccgatggggatcagtatgcgatgacgcctgggacttgagagacgccgcagtggcctgtagggagttaggatgtggaggggctcttgctgcaccaggaggcgcctttttcggcgaggggtcaggtcctattatcctagatgacctccggtgcaggggcaacgagacagcgctccgtttctgtccagcacgtccgtggggacagcacgattgccatcacagagaagacgccggtgccgtgtgtgatggaatgccactcggatatgtcccacctacagccccaactgattcaaataacagcacacctcgagaggctgctagtagacctccaagcactatgaccagccaagcaccaggcaccgccggcgtttcaccacccccagccagccccacagtcctttgggaaccaggacccgaggccggttcaccccaactgcgccttgtcgccgggccgtctaagtgttctgggagattagaggtgtggcatgatcagcgttgggggaccgtctgcgatgattcatgggacatgcgggatagcgcggtagtatgtcgcgaactgggatgtggcggcccacagcagcctgatcccgccgcagggaggttcgggtggggtgctggaccaatctggctggatgatgtggggtgtgtcggtacagaagcaagcctttccgattgtccagctgctccctggggtaaacataattgcgcacataacgaggatgtaggcgttacctgcactggaccccctggactggatagtatttcggaccctttctcttggtcatggattcctggcctgggtcgggaccgcgatgcgtggttgcctggcgagcttgccaccaagccctccgcctccgtgactgctagcgtcctagaaaagactacgacaaaggcgcctggtaagatgcccaaaagcacgaaaaagtgggttacaaagaatgccaaacgccccacaactcagccacccgttatgcctactaccaaacattcccgtgctcagtctccccccgatttgacctcacagaccactgcagctctcaccaccgaggccagtagaagacccacaagcgagttcactcgacggcctaccaccgaagctccccagcgatggacttcccacactactgcaactttaacgccccaggccccgcgcgagagaactaccaaaaccatggcaatgctgacaacgcaaggaccccaagagatgacaagcgagagcacgattaagtcaatcccacaggcctcccttgaacccagcgccgagatacctgaaggcagccctgaaagccccaaggacccagcaccttcacccagcgtttccacgactggggagagtgggctattccgagttagacttgctgacggaccaaatcgatgcgccggaagattagaagtttggcacgctggtcgctggggaaccgtgtgtgacgataattgggatcttagggatgccacggtggcatgttgggagctcggatgcggcaaggtgcggccaagagtaggaaagacacattacggccccggaacaggacccatttggctcgatgacatgggttgcaaaggttccgaagcaagcttatcagactgtccatcaggagcatggggaaaacacaattgcgaccatgaggaagacgttggcctgacatgtacagggtacacagattacgacgactatccgccatggacctgggacccgacatcacgagaagatctggcgaagggaaccacgaccgccggcgtgcctggacatactctaccctggcgaactacccgccggccgggctcctcctctcccgcgattagacgactgcctgacactggctccaaagacggatataagctgccctggacttgggacacaccctctggaaggggactggccgaaggaactccaactgccggcaagctaggaccaacactaggagccggaacgaccagaagcccaggatccccacccactttgcgcgtgcacggcgataccggatcccctcgcaagccctggcccgagcgccgccccccgagacccgcggcgacacgcacagcgcctccgacaccaagcccaggtccttcagcctccccaggtcctcctggccccgcgttaaccagtgattcctctcgagaattgaccccccactcagccttgacctccgaagccacctcagatgctcctgatacatcacccccgacaccggaccccgcctctcgcaccaaccccgacttgatactcacatcccctgattttgcccttagtactccggactcttccgtggtccccgccctcacccccgaaccaagtccgactcccttgccgacactccctaaggaactgaccagtgatccttctaccccctccgaagtcacatcactgtccccgacctcagagcaagtgcccgagagtgataccactccagatcttgacactacaccgtatagctcaacagtttctgaatacagccgctcaccagacccatctccatcaccgcatcctactacaactccagatccaaccatggctccagaccctatcactacactgaatcctaccgtgacccctcatttccctaccacccctcatcccaccaccacaccccacccaaccaccatcacccactccacaatgattcctgaccccacaactaccccacaaccctttactactataactcacagcacaatgataccagaccccacaaccactccacaaccctttacgaccatgcagcctacaaccactccccattccaccacccctcacccaactaccactcctcatccaactactatcacccacagtactatgattcccgaccctaccaccacccctcagcctttcacaaccatgcaaccaactacaatgcctcacccaaccaccactccgcaccctactactactccccaccccacaacaacgccacaccccacgaccacccctcatcccacaatgactcctgatccgaccacaactccctaccccaccaccaccccagatccaaccacaacaccccatcccacaactcctgatccgtctagcacgcccgtgattacaaccgtgtctctccccacctccctcggcaccgaactaagctctcctacattggcccccacagtgaaaccttctctacatcctcagctaacatttaccgccccagcccctcacacttctacttcccagattcccacgttagaacctagtcctgcgctcgaaagtagcccatcgcgctcttccacggcaacttccatggaccccttatctaccgaggatttcaagcctccacgcagccaatctcctaatcttacaccgccgccgacccacaccccccatagcgctagcgacctcaccgtctcaccagatcctcttctctcaccaaccgctcaccccctcgatcacccacctttagatccgctcacactcggccctacccctggtcagtcacctggaccccatggcccgtgcgttgccccgacgccaccggtaagagtcatggcctgcgaaccccccgcccttgtggaactggttgccgctgtgcgggacgtaggaggccagctacagaggcttacccaagttgtggaacaagagcggcaggaaagacaagcactcttactgggcctgacccagttggtggaagctgcacgcggtctggggcaactcggcgaagctgtgaaacgattggccgaaatggcctggacaacatcaatgccagccccaactaccaccacaccagaagaggaagaaaggccactccgaggggacgtgtag

SEQ ID NO: 14261 - RNA, 1911 nt, synthetic construct
  misc_feature 1..1911: note = source = /note="Description of Artificial Sequence: Synthetic coding sequence"
  source 1..1911: mol_type = other RNA
atgactacctggtccctgcgccggcgccctgctagaactcttggtctgctgctgctggtagtgctcggattccttgtgctgaggagactagattggtcaacccttgttcccctaagactgcgccatagacagctcggacttcaggccaaaggttggaactttatgctcgaagatagcacgttttggatcttcgggggatcaatacattactttcgggtcccccgagagtattggagagatcggcttctgaaaatgaaagcctgcggactcaatacattaaccacatacgttccctggaatctgcatgaacccgagcgcggcaagtttgatttttctggaaacctggacttagaagcctttgtgctcatggctgcagaaatagggttatgggtgatccttagacccggcccgtacatttgttcagagatggacctgggagggctgccttcgtggttacttcaagatcctgggatgaggctgcggacaacatataagggcttcacagaggctgtagacctgtacttcgaccatcttatgagccgggtagtgcctttacagtataagcggggcggtcccattatcgctgttcaagtcgagaatgagtacggctcctacaacaaagatccggcctacatgccctacgtgaaaaaggcccttgaggaccggggaatcgtggaactgctcctaacctctgataacaaagatggcctgagcaaagggattgtgcagggcgtattagcaaccatcaatcttcaatcaacccatgaactgcagcttttaactactttcctctttaacgttcaaggaacccagccaaagatggtgatggaatactggaccggatggtttgactcctggggcggtccacataacattcttgactcaagtgaagtgctgaagaccgttagcgccattgtcgatgctggatcttctattaacctgtatatgttccacggaggtaccaactttggattcatgaacggtgccatgcattttcacgattataaatcggacgtgacttcttacgactatgatgccgtacttacagaagccggagattatacggccaaatacatgaagctacgcgattttttcggatccatttccggcattcccttaccccctccacccgatcttttgccaaagatgccttatgagcctctcacacccgtgctgtacctttcattatgggatgccctgaaatatttaggcgaacctatcaagtctgagaagcccatcaacatggagaatttgcctgtcaacggtggaaacggccaatctttcggttacatcctgtacgaaacttccatcactagttcaggcattttatctggccatgtccatgacagagggcaggttttcgttaatacagttagcatcggtttcctcgactataaaactactaagattgctgtccctcttatacaaggctacaccgtgctgagaatactggtggaaaaccggggaagagttaattacggcgagaacatcgacgatcagagaaagggacttatcggtaacctttatcttaatgattcccctctaaaaaatttcaggatatattctctagatatgaaaaagagcttcttccaacgtttcggattagataagtggtcaagcttaccagaaacccctacacttccagccttttttttgggatctctaagtatatctagtacaccctgcgacacctttctaaaacttgagggatgggagaaaggcgtcgtgtttataaatgggcaaaacttagggagatactggaatatcggccctcagaagacactgtatctgcctggaccttggctttcttcaggaattaaccaagtgatcgtcttcgaggagacaatggcaggacctgccctccagttcacagaaacaccccatctcggtcgaaatcagtatatcaaatag

SEQ ID NO: 14262 - RNA, 2037 nt, synthetic construct
  misc_feature 1..2037: note = source = /note="Description of Artificial Sequence: Synthetic coding sequence"
  source 1..2037: mol_type = other RNA
atgagaacagtagtactgaccatgaaagcctccgttatcgagatgttcctggttttgctcgtgaccggtgtgcacagtaacaaggagaccgcaaaaaaaatcaaaaggcctaagttcaccgttccacagataaattgtgatgttaaggccggcaaaatcattgaccccgaatttatcgttaagtgtccagcagggtgtcaggacccaaagtaccacgtctatggaaccgatgtttatgcttcttacagtagcgtatgcggcgccgccgtgcactcaggtgtgctagataattccgggggcaagattcttgtgcgcaaagtggctggccagagtggatataaagggtcttacagcaatggagttcagagcctctccctccctagatggcgagaatcctttattgttttagagtcaaaacccaaaaagggcgtgacgtaccccagcgctttaacatattcaagttcaaagagtcctgcagctcaggcaggtgaaacaaccaaggcatatcaaaggccgccgatacccggaacaaccgctcagccagtgactctaatgcaacttttggcagttaccgtcgccgtcgccacgcctaccaccctcccccggccctcccccagtgccgcatccacaacttctattccccgtccacagtccgtcggtcatcgctcacaagaaatggatctgtggtccaccgctacttacacatcaagccagaaccgcccaagagcagacccaggaattcagagacaggatccttctggagcagcttttcaaaaacctgtgggagcagatgtgtcgctcgggttagtgcccaaagaagaactttccacccaatccctggaacccgtctctctcggggatcctaattgcaagatcgatctgagtttcctgattgacggctcgacctccataggcaagagacgcttccgaatccagaaacagcttctcgctgatgtcgcacaagccttggatatcggacctgccggccctctgatgggagtggtccaatacggggacaatcccgccacccactttaacctcaagacccatactaactcaagggatctcaaaacagcaatcgagaagattacccagcggggcgggctctctaacgtcggtcgagcaatctcattcgtcacaaaaaattttttctccaaagctaacggtaacagatctggtgctcccaacgtagtggttgtgatggtggacggttggcctacagacaaggtcgaagaagcctcccgactagcgagagaatctgggatcaatatcttcttcatcaccatcgaaggagctgctgagaatgaaaagcagtacgtggttgagcctaactttgcgaataaagccgtgtgccgtacaaatgggttctacagtctgcacgtgcagagctggttcgggctacataaaacactacaaccactggtaaaacgcgtttgcgacaccgatagacttgcatgttccaaaacatgtttaaactcagccgacattggatttgtcatcgatggctctagctccgttggtaccggcaacttcaggaccgtgcttcaattcgtgacaaatctgacaaaggagttcgagatatcagacaccgatactaggataggggccgtgcagtatacttacgagcagcgactagaattcggatttgataagtatagtagcaaaccagatattcttaatgccatcaaacgagtgggatattggagcggcggaacatccaccggtgcagccatcaactttgctctagaacagctctttaaaaaatctaaacctaataagcggaaattaatgatcttaattaccgacgggaggagctacgacgatgtccgcatacctgcaatggccgcgcatctaaagggcgtgatcacctatgctattggggttgcttgggccgcacaagaagaattggaagttatagccacccatcctgccagagatcattccttcttcgtagacgaattcgataatctacaccagtatgttcccagaattatccagaatatatgcaccgagtttaacagccagcctcgtaactag

SEQ ID NO: 14263 - RNA, 324 nt, synthetic construct
  misc_feature 1..324: note = source = /note="Description of Artificial Sequence: Synthetic coding sequence"
  source 1..324: mol_type = other RNA
tgaaccgtagctgccccatcagtttttattttcccacctagcgacgaacagttaaaaagcggcaccgcatccgtcgtttgcctgcttaataatttctaccctcgcgaagctaaagttcagtggaaggtagacaatgcgcttcagtccggcaacagccaggaatccgttaccgaacaggactcaaaagattccacctattccttatcatcgaccctcaccctcagcaaggccgattacgaaaagcacaaagtttacgcctgcgaggtgactcaccagggcctgtcttcgcctgtgaccaaaagttttaataggggggagtgttag

SEQ ID NO: 14264 - RNA, 366 nt, synthetic construct
  misc_feature 1..366: note = source = /note="Description of Artificial Sequence: Synthetic coding sequence"
  source 1..366: mol_type = other RNA
atggtgctgcagactcaggtctttatcagcctcctactgtggatctcaggcgcgtacggtgatatagtcatgacacaaagcccagatagtctggctgtgagtctgggggagagagcaaccattaattgcaagtcttcgcagagtgtgttatattctagtaataacaagaattatcttgcatggtaccagcagaaaccaggccaaccccccaaacttcttatttattgggcctcgacaagggagagtggcgtgccggatagattttctggatctggaagcggcacggattttacactgaccatttcctccctccaagccgaagatgtcgcagtctactattgccagcagtactacagtacaccttag

SEQ ID NO: 14265 - RNA, 984 nt, synthetic construct
  misc_feature 1..984: note = source = /note="Description of Artificial Sequence: Synthetic coding sequence"
  source 1..984: mol_type = other RNA
gccagcaccaaaggcccctcagtttttcctttggctccgtgttctcgaagtacttcagaatcaaccgccgcgctgggatgtttggtgaaggactatttccctgagcccgttaccgtcagctggaatagtggggcccttacaagcggagttcacaccttccctgctgtcctccaatcttccggactctacagtctcagctccgttgtcacagttccttctagttcattaggcaccaagacatacacctgcaacgtagaccataaaccatccaataccaaagtggataaaagggtggagtctaaatatggtcccccctgccctagttgtccagcgcccgagttccttgggggtcccagcgtctttctatttcccccaaagcctaaagacaccctgatgatcagcagaacccctgaagtaacctgtgtggtggttgacgtgtcccaagaagacccggaggtccagttcaattggtatgtcgacggagtggaggtgcataatgccaaaacaaagcccagagaagagcagttcaatagcacctacagggttgtgtcagtgcttactgtcctgcatcaagactggctgaatggtaaagagtacaagtgcaaggtaagcaataaaggactgccttcctctattgaaaagacgatttcaaaagccaaaggccagccgcgcgaaccacaggtgtatacccttcccccatcccaggaagagatgactaagaatcaagtatccctgacctgcttggtgaaaggcttttatcccagcgatatagctgttgaatgggaatctaatggacagcctgaaaataactacaaaacaaccccccccgttctagattcagacggctcattctttctctacagtaggctaacagtcgataaaagtaggtggcaggagggaaacgtattctcatgttcagtcatgcacgaagctttgcataaccattatacacaaaagtcactcagtctgagcttaggcaagtag

SEQ ID NO: 14266 - RNA, 981 nt, synthetic construct
  misc_feature 1..981: note = source = /note="Description of Artificial Sequence: Synthetic coding sequence"
  source 1..981: mol_type = other RNA
gcatcaaccaaaggaccatccgtgttccccctagctccatgctctcgctctacatcagaatctacagcagcactcggctgccttgttaaagattactttccggaaccagtaaccgtgagctggaattcgggagccctgacatccggagtgcacacattcccagcagtcctccagagctccggcctttattccctgtcaagcgtcgttactgtaccctcttcaaactttggcacacagacttacacatgtaacgttgaccataaaccctcaaataccaaggtggataaaactgtcgagcggaaatgttgtgtcgaatgccccccgtgtcccgctcctcctgttgctgggcccagcgtgtttctcttccccccaaagcctaaagacactctgatgattagcagaaccccagaggtaacatgcgtggtggtggacgtaagtcatgaagacccagaagtacaattcaattggtatgttgacggtgttgaggtccataatgctaaaaccaaaccccgcgaggaacagttcaactccaccttccgcgtggtatctgtgcttactgtcgtgcaccaggactggctcaacggcaaggagtataaatgcaaggtatcaaacaaaggacttcctgctcctattgaaaagacaatcagtaaaaccaaaggccagcccagggaacctcaggtgtatacacttcctccttctcgggaagaaatgacaaaaaaccaagtgtcattgacctgcctggttaagggcttttatcccagtgatatttcagtagagtgggaaagtaatggtcagccagaaaataattataagacaaccccaccgatgcttgatagtgacggttccttcttcctctatagtaagctcaccgttgacaagtcacgctggcagcaaggcaatgtattttcatgctctgtcatgcacgaagccctacacaaccattacacacagaagtccctatcattgagtccaggcaagtag

SEQ ID NO: 14267 - RNA, 993 nt, synthetic construct
  misc_feature 1..993: note = source = /note="Description of Artificial Sequence: Synthetic coding sequence"
  source 1..993: mol_type = other RNA
gcatctaccaagggaccgtccgtcttcccactggcaccttcttcaaagtctacctccgggggcacggccgccctgggttgtctggtgaaggattactttcccgaacccgtaactgttagctggaatagcggagcacttacttctggcgttcacactttcccagccgtactgcaaagcagcggcctgtattctttgtcttccgtcgtcaccgttccatcttcttcactgggaacacaaacatacatctgcaatgttaaccacaagccttccaacacaaaagtcgacaaaaaagtagagcctaagtcctgtgataagacacacacctgccccccatgccccgccccagagctcctaggcggaccatccgtattcctctttccgccaaaacccaaagatacgctaatgatatccagaacccccgaggtgacctgcgtagtcgtggatgtgtcccacgaggatcctgaggtcaagttcaattggtacgtcgacggcgttgaagtacacaatgccaaaaccaaacctcgagaagaacaatataattccacttatagggtagtgtccgtgctcacagtactccaccaagattggttgaatggaaaggaatataaatgcaaggtctccaataaagctctgcctgcacctatcgagaaaactatctctaaagccaagggccaacccagggaacctcaggtgtacacccttccaccttcaagagatgagctgactaaaaatcaagtctccttaacttgtcttgtgaagggattctatccctccgatatcgctgtagagtgggaaagtaatggtcaacctgagaataactataagacaacgcccccggtgctcgattccgacggttctttctttctgtactccaagttaactgtggacaaaagccgctggcagcaaggaaatgtgttctcttgttcagttatgcatgaagctctgcacaaccactacacccaaaagtcactgtctctctcccccggtaagtag

SEQ ID NO: 14268 - RNA, 651 nt, synthetic construct
  misc_feature 1..651: note = source = /note="Description of Artificial Sequence: Synthetic coding sequence"
  source 1..651: mol_type = other RNA
atgggtgccgttatgggcactttttcatccctgcagacgaagcaacgacgtccctctaaagataagattgaagatgagctcgagatgacaatggtgtgtcaccggccagagggcttagagcagttggaggctcagactaactttactaaacgcgaactgcaagtcctgtataggggctttaagaacgagtgcccttccggagttgttaatgaagacacatttaagcagatctacgcgcagttctttcctcatggagatgcatcgacatatgcacactatttattcaatgcttttgataccacacaaacaggttctgtaaagttcgaggactttgttacggccttgtcaattttactgcgcggcacagtacacgaaaaattgcgttggacattcaacctgtatgacatcaacaaagacgggtacataaataaagaggagatgatggacatcgtgaaagccatatatgatatgatggggaagtacacttatccagtgctcaaagaagatacccccagacagcatgtggatgttttttttcagaagatggacaagaacaaagacggaatcgtaaccctcgacgaatttctcgaatcatgccaggaggatgacaatataatgagatccctccagctgttccagaatgtgatgtag

SEQ ID NO: 14269 - RNA, 762 nt, synthetic construct
  misc_feature 1..762: note = source = /note="Description of Artificial Sequence: Synthetic coding sequence"
  source 1..762: mol_type = other RNA
atggcgcggtcactcctgctcccccttcagattctcctcttaagcttagccctcgaaaccgccggtgaggaagcacagggtgataaaattattgacggggccccttgtgctcgtggatcacatccctggcaagtggctctactctctggcaatcagcttcactgtggaggggtcctcgtgaacgaaagatgggtgttaactgccgctcactgcaagatgaacgagtacactgtccacctggggtctgacactttgggtgacagaagggcacaaaggataaaggcatcgaagtcattcagacacccaggttactctactcagacccacgtaaatgacttgatgctggtaaaacttaatagtcaagctagactcagctccatggtgaagaaggtacgactgccctcccgttgtgagcctccaggaacaacttgcactgtatcaggttggggaacaaccacaagccccgacgtgacatttcctagtgatctgatgtgcgtggacgtaaagctcattagcccccaggactgtaccaaggtgtacaaggacttgttggaaaattcaatgctatgcgctggtattcccgatagcaaaaaaaatgcctgtaacggcgatagcggcgggccactggtctgtcgggggacgctgcagggcctggtttcatggggcacttttccttgcgggcagcctaatgacccaggagtttacacccaggtctgcaaatttacaaaatggataaatgacacaatgaagaagcaccgatag

SEQ ID NO: 14270 - RNA, 468 nt, synthetic construct
  misc_feature 1..468: note = source = /note="Description of Artificial Sequence: Synthetic coding sequence"
  source 1..468: mol_type = other RNA
atgttccaacgcctgttactgttgctgcttctgagtatgggaggaacatgggctagtaaggagcccttgagacctcgatgcagacccataaacgcaaccttagcagttgagaaagaaggctgccccgtgtgcataactgtaaacacaacgatttgtgccggctactgtcccacaatgactcgggtcctgcagggtgtgctccccgctttgccccaagttgtgtgcaattaccgcgacgtgcgctttgaaagtattcggctgcctggctgccctcgcggtgtcaacccagttgtatcgtatgccgtcgccctttcttgccagtgtgccctgtgcagacgctctactaccgattgtggcggacccaaagaccatccactgacctgcgacgaccccagattccaagactcttcttccagtaaagctccaccgccatcactgcctagtccttctaggctcccaggaccttag

SEQ ID NO: 14271 - RNA, 1554 nt, synthetic construct
  misc_feature 1..1554: note = source = /note="Description of Artificial Sequence: Synthetic coding sequence"
  source 1..1554: mol_type = other RNA
atggccgtgagcagaaaggattggagcgcattgagctccttggctcggcagagaacactagaagacgaagaggaacaggagagagagcgtaggcggcgccaccgaaacttgtccagcaccactgatgatgaagcccctagattgtctcaaaatggggatcgccaagctagtgcaagtgaaagacttccttccgtcgaagaagctgaggtgcctaagcctctcccaccagccagcaaagacgaagatgaagatatacagagcatactaagaacacgccaagagaggcgacaacgacggcaggtggtcgaggccgcacaagccccaattcaggaacggttggaggctgaggaagggcgaaactcactcagtcccgtgcaagcaacacagaaaccattagtcagtaagaaggagcttgaaattccaccacggagacgtctcagcagagagcaaaggggcccttgggcactcgaggaggagtctctggttggccgcgaacccgaagaacgcaagaagggcgtccccgagaagtcacctgttctggaaaaaagcagcatgcctaaaaaaactgcccccgagaagagccttgtttccgacaagacctctatcagcgaaaaggtcctagcatccgaaaagactagtctgagcgagaaaatcgcggtcagtgagaagcgcaattcatcagaaaagaagagcgtcctggagaaaacttcagttagcgagaaaagccttgcccctggaatggccctgggctcaggaagacggcttgtatccgaaaaagccagcatttttgagaaagcattggcttctgaaaagagtcctactgcagatgctaagcccgcccctaagagagccaccgcatccgaacagccattagcgcaggagccgcccgctagcggggggtcgcctgccactacaaaggagcagcggggaagagccctacctggtaaaaacctcccttcactcgctaagcagggcgcttctgatccccccacggtagctagtcgattacctcctgtgacacttcaggtgaaaataccatccaaagaggaggaggccgatatgagctccccaacacagcggacatactcatctagtctaaagcgctcttctccacgcaccattagctttcgtatgaagcccaagaaagagaactctgagaccacacttacacgcagcgcctctatgaaattgccagataataccgtgaaacttggggaaaagctggaaagatatcacaccgctatcagaagatcagaaagtgtgaagagtagggggctgccatgcaccgaactcttcgttgctcccgtgggcgtggcttccaagagacacctgtttgagaaagagcttgcaggacagtcccgcgccgaaccagcatcatcacgtaaggagaatctccgcctgtccggtgttgtgaccagcaggctcaacctatggatttctaggactcaagaatcaggcgaccaggatcctcaagaagctcaaaaagcctctagcgcaaccgagagaacacagtggggccaaaaatcagattcttcgttggacgcagaagtctag

SEQ ID NO: 14272 - RNA, 270 nt, synthetic construct; identical to SEQ ID NO: 12633
  misc_feature 1..270: note = source = /note="Description of Artificial Sequence: Synthetic coding sequence"
  source 1..270: mol_type = other RNA

SEQ ID NO: 14273 - RNA, 1302 nt, synthetic construct
  misc_feature 1..1302: note = source = /note="Description of Artificial Sequence: Synthetic coding sequence"
  source 1..1302: mol_type = other RNA
atggggaacgcctgttgggagctctactgccttgagcacggaattcaacctgacggccagatgccaagtgataagacaatcggcggtggggacgactcgtttaccaccttcttctgtgaaactggggccggaaaacatgtgcctcgagccgtattcgttgacctcgagccaacagtgatagatgaaatccggaatggcccttacagacagctgtttcaccccgaacaactgatcacagggaaagaagatgctgcaaacaattatgcaagaggacactacactattggaaaggagattattgatccagtgctagataggatacgtaagcttagtgaccagtgcacaggcctacaaggcttcttggtgtttcattcttttgggggcgggacaggctcagggttcacatcgttactgatggagagacttagtgttgactacggaaagaagagcaaactggaattcagcatctacccagcgcctcaggtttctacagccgtcgttgaaccttacaatagcatccttactacacacaccacgttggagcattcagactgcgcctttatggtcgacaacgaagccatttatgacatttgccgaaggaacttggacattgaaagacccacatatactaatctgaaccgcttaatctcccaaatcgtctcatcgataactgcatccctacgtttcgacggagccctgaacgtcgacctcactgagttccagaccaatctcgttccttaccccaggatccacttcccactcgctacctatgcccccgtcatttccgcggaaaaagcctaccatgaacagctgtctgtcgcagagattacgaacgcttgttttgagcccgctaatcaaatggttaagtgcgaccctagacatggtaaatacatggcatgttgcttgctgtataggggggacgttgttccaaaagatgtgaatgctgcaattgctgcgataaagaccaagagatctattcaattcgttgactggtgccccacaggattcaaagttggcatcaattatcagcctcccacagtcgtcccgggcggcgacttagcaaaagtacagagggctgtatgtatgctcagcaacacaaccgccattgctgaggcatgggcccgcctcgatcacaaatttgaccttatgtacgctaaacgagccttcgtccattggtacgtcggagaagggatggaagaaggggaattttcagaagcacgggaggatatggcagcactggagaaggactacgaggaagtcggcattgattcatacgaggacgaggatgagggggaagagtag

SEQ ID NO: 14274 - RNA, 1965 nt, synthetic construct
  misc_feature 1..1965: note = source = /note="Description of Artificial Sequence: Synthetic coding sequence"
  source 1..1965: mol_type = other RNA
atggcccctaaaaagctgagttgcctgcggagtcttctattgcccctgtcacttactcttctgcttccccaggccgacacccgcagcttcgtcgttgatagaggccacgaccgatttctactagatggcgctccgtttaggtacgtgagcgggtcattgcattattttcgggtgccgcgtgtactgtgggccgatagattactgaaaatgcggtggtcaggtcttaatgccattcaattctatgtcccttggaactaccacgagccacagcctggcgtgtataactttaatggctccagagatttgattgcctttctgaacgaggctgctctagctaacctcctagttattctgagacctggcccatacatttgcgctgagtgggaaatggggggactccctagctggctgttgagaaaacccgaaattcacttaagaacttcagatcctgacttcctcgcagctgtggactcgtggtttaaggttctgctccccaaaatttacccgtggctctaccataatggcggcaatattatcagcatacaggtggagaacgaatatggatcttaccgagcctgcgacttttcctatatgagacatttagccgggctctttcgggcactcctcggggaaaaaattctgttattcacaacagacgggccagagggactgaagtgcggatctctacgcggtctatacacaaccgtagatttcgggccagcagataatatgactaagattttcacactcctgagaaagtacgagccccacggaccactcgtcaattccgaatattacactggatggctggactattggggccagaaccactcaacaagatccgtttccgcagtgacaaaaggattggagaatatgttgaaacttggcgcttcagtgaatatgtacatgtttcacggtggaacaaattttgggtattggaatggagctgacaaaaaggggagatttctcccaatcactacaagttacgactacgatgcgccaatttctgaggctggtgatcctacaccaaaattgttcgcattgcgagatgttatcagcaagtttcaggaagtacccttagggcccctgccacccccatctcccaaaatgatgctcggacccgtgactctgcaccttgttggccacctgttagcattcctcgatctgctttgcccccggggtccaattcactctatcctgccaatgacttttgaggccgtgaaacaggaccatggatttatgctgtatcggacctatatgacccataccatcttcgaacccacacctttctgggtgccaaacaatggagtacacgatcgcgcatatgtgatggtggatggagtctttcagggagtggtggagaggaatatgagagacaagctgttcttaacgggtaaactaggcagcaagctcgacatcctcgtagaaaacatgggaagattatccttcggctctaattccagcgatttcaagggactgcttaagcctcctattttgggtcagaccatactaacacaatggatgatgttccctctcaaaatagataatcttgtgaagtggtggttcccactgcaactccctaagtggccctaccctcaggcaccatcaggaccgacattttattcaaagactttcccaattttaggctccgttggtgatacattcctctatctgccgggctggaccaagggccaagtgtggataaacggcttcaatctcggtcgctattggactaaacaagggccacagcagacgttatacgttccacggttcctgttattcccaagaggcgccttgaataagatcacgttactggaactagaggacgtccctttgcagccacaggtccagtttctcgacaagccaattctcaactcaacatcaaccctgcatagaacccacattaactcactgtccgcagatacactgagcgcatctgaaccgatggagctatccggacattag

SEQ ID NO: 14275 - RNA, 1173 nt, synthetic construct
  misc_feature 1..1173: note = source = /note="Description of Artificial Sequence: Synthetic coding sequence"
  source 1..1173: mol_type = other RNA
atgaagttccagggaccattggcttgtttattgctggccctgtgtctgggtagcggggaagcgggaccacttcaaagtggcgaagaatctacagggacaaatataggcgaggccttaggccacggtctcggagacgctctcagtgagggggtgggaaaagccatcggtaaggaggccggaggagcggctggatcaaaagtgagcgaggcactcggacaggggaccagagaagctgtcggaactggggtgaggcaggtgcctgggtttggcgtcgcggacgcgctggggaatagggtgggcgaggctgcccacgctttggggaatacaggacatgagataggcaggcaggctgaagatgttattcgacacggcgcagatgctgtgcgaggttcatggcagggagtcccaggacacaatggcgcttgggaaaccagcgggggacatggcatttttggctcacagggcggtttagggggacagggacaagggaatccgggaggacttggcaccccatgggtgcatggctatcccggtaactctgctggaagcttcggcatgaatccacaaggagctccgtggggacaaggaggcaacgggggaccacccaattttggaaccaacacacaaggcgccgtggcacaaccaggttacgggtccgtcagagcttcaaaccagaacgaagggtgcaccaacccaccaccgtctggtagcggcgggggttcatccaactcaggcggtggaagcggtagtcaatccggctcaagcggtagcggatctaatggagataacaataatggctcatcaagcgggggttcatcgtccggatcttcttcagggggatcctctggaggctcctccggcgggtctagtgggaatagcggaggtagcaggggagactccggctctgaatcatcttggggaagttcaacaggttcatctagcggcaatcatggtggcagcgggggcggtaacggccacaaacctgggtgcgaaaagccaggcaatgaggctaggggctccggggaaagcggaattcaaggatttcgcggacagggcgtgagcagtaatatgaggaacagcgagacctctccaggcatgttcaacttcgataccttttggaaaaactttaagtcaaaactgggctttatcaattgggacgccattaacaaatag

SEQ ID NO: 14276 - RNA, 846 nt, synthetic construct
  misc_feature 1..846: note = source = /note="Description of Artificial Sequence: Synthetic coding sequence"
  source 1..846: mol_type = other RNA
atggggagtcggggacagggactcctgttagcttattgtttactgttggctttcgcctctggcctggtgctgtctagagtccctcacgttcagggagaacaacaggaatgggagggtactgaagaactgccaagccctcccgaccacgctgaacgagccgaagagcaacatgaaaaatataggcctagtcaggaccaaggattgcccgcctccagatgtctccgttgctgcgatcccggcacctcgatgtacccagctactgccgtcccacaaattaatatcactatactgaagggagaaaaaggagacaggggcgaccgagggctacaggggaagtacggcaaaaccgggagcgcaggagcccgcggtcacaccggaccaaagggacagaaaggatctatgggcgcacctggtgaaagatgtaaatctcactacgctgctttctccgtgggaagaaagaagcctatgcacagtaatcattactatcagactgtgatctttgataccgaattcgtcaatctatatgaccatttcaacatgtttaccggaaaattttattgctacgtaccaggactctatttcttctccctgaacgttcacacatggaatcagaaagagacatacctgcatataatgaaaaacgaggaagaagtggtcattctgttcgcccaggtaggggaccgatctatcatgcagtcacagagcctcatgctagagctgcgagaacaggaccaggtgtgggtgcgcctctacaaaggagagagagagaatgcaatcttttcagaagaattagacacttacattactttttctggatacctagttaaacatgccacggagccctag

SEQ ID NO: 14277 - RNA, 876 nt, synthetic construct
  misc_feature 1..876: note = source = /note="Description of Artificial Sequence: Synthetic coding sequence"
  source 1..876: mol_type = other RNA
gtgctcagcgcatctggaccaggccgaaaaatggggagcaggggccaaggcttgctactggcttactgtttacttctcgcctttgccagtggactggtgttaagcagagtgccccacgtgcaaggagagcaacaggagtgggagggaacagaagagcttcctagcccacctgatcacgcggagcgcgccgaggaacaacacgagaagtatcgcccttcacaggatcaaggacttccagcctcccgctgtttaagatgctgcgatcccgggacaagcatgtacccggccactgccgtaccacagatcaatataacaatcctaaagggagaaaagggcgatcgaggtgatagaggcttgcagggaaaatacggaaagactggatcagccggcgctcgagggcacacgggccccaaaggacagaagggcagtatgggagcaccaggagagcgctgtaagtcacactacgcagcctttagcgtcggacgaaagaagccaatgcattcgaatcattattaccagaccgtcatattcgacactgagttcgtcaacctctatgatcattttaatatgtttacggggaagttttattgctacgtgccaggcctgtactttttttccctgaatgtacacacatggaatcagaaagagacttatctacatattatgaaaaatgaggaagaagtcgttatactttttgcccaggtgggggaccgctcaataatgcagagccaatcattgatgttagagttaagagagcaagaccaggtttgggtgaggctctacaaaggcgaaagggaaaacgcaatcttttctgaagaactcgacacttatatcacattttccggctacctggtgaaacatgccacggagccatag

SEQ ID NO: 14278 - RNA, 1002 nt, synthetic construct
  misc_feature 1..1002: note = source = /note="Description of Artificial Sequence: Synthetic coding sequence"
  source 1..1002: mol_type = other RNA
atggtaagcaaaagtcgatggaagctcctagccatgttagccttggtcctggtcgtgatggtgtggtattccatctctagagaagatagatacatcgagcttttctacttcccaattccagaaaaaaaagagccatgcctccagggggaagcagagtcaaaagcatccaagttgttcggcaattattctcgggaccaaccaatattcctgagattggaagattacttctgggttaaaacaccatccgcatacgaacttccttacggaacgaaaggaagtgaagaccttctccttagagttttggccatcaccagtagctccatccccaaaaacatccagtctctccgttgcaggcgatgtgtggtcgttggaaatggccaccgcctgaggaatagttcacttggagatgcaattaataagtacgacgtagtcataaggctcaataatgctccagttgcgggctacgaaggggacgtggggtccaaaacgacaatgcgcctcttttatccagaatctgcccattttgaccctaaagtagagaataacccagataccctcctagtcttggtcgccttcaaagcaatggatttccactggattgagacaatactttccgacaagaagagagtcaggaagggattctggaagcagccaccactcatatgggacgtaaatccaaaacaaatccgtatactcaatccgttttttatggagattgctgccgacaaactgctctcactacctatgcaacaacctaggaaaataaaacagaagccaacaactggtctactggccatcaccctcgctctgcacctttgcgacctcgtccatatcgccggcttcgggtaccctgatgcttataataagaaacagaccatccattactatgagcaaatcaccctgaagagtatggccggatcgggacataatgtaagccaggaggcccttgccattaaacgcatgctggagatgggagccataaagaacctcacttctttctag

SEQ ID NO: 14279 - RNA, 312 nt, synthetic construct
  misc_feature 1..312: note = source = /note="Description of Artificial Sequence: Synthetic coding sequence"
  source 1..312: mol_type = other RNA
atgtctggtagaggtaaaggcggcaaaggcttaggtaaggggggggctaagagacacaggaaggtattacgggacaacatccaggggataactaaaccggccatcagacgcctagcacggagaggcggagtcaaaagaatcagtggcctcatctatgaagagactagaggggtacttaaggtgttcctggagaacgtcatccgtgacgcagtcacatacactgaacatgcaaagcggaaaaccgtcacagcaatggacgtagtatacgcccttaaacgtcagggacggacgctatatggatttggcggttag

SEQ ID NO: 14280 - RNA, 312 nt, synthetic construct
  misc_feature 1..312: note = source = /note="Description of Artificial Sequence: Synthetic coding sequence"
  source 1..312: mol_type = other RNA
atgtcaggacgaggaaagggtggaaagggacttggaaaagggggggcgaagaggcaccggaaagtattgcgtgacaatatccaggggatcaccaaaccagctatcaggagactggcccgacgcggcggagtgaaacgaatctctggtcttatctacgaagaaaccaggggggtgctaaaagtgtttctagaaaatgtcatccgggacgctgtcacatataccgagcacgccaaacgcaagacagtgactgccatggacgtggtgtatgctctcaaacggcagggccgcacactgtacgggttcggtggatag

SEQ ID NO: 14281 - RNA, 312 nt, synthetic construct
  misc_feature 1..312: note = source = /note="Description of Artificial Sequence: Synthetic coding sequence"
  source 1..312: mol_type = other RNA
atgtccgggagaggaaaaggcgggaagggactgggcaaaggcggggcgaagagacaccggaaagtgcttcgggataatatccaaggaattacaaaacccgccattcggcggctggccagacgaggcggagttaagaggatatcaggtctgatctacgaggaaaccaggggggtgttaaaagtcttcctggaaaatgtcatccgagacgcggtaacctataccgagcatgctaagcgaaaaactgtgacggccatggatgttgtgtacgcacttaaaaggcagggtagaactctgtacggctttggcggctag

SEQ ID NO: 14282 - RNA, 312 nt, synthetic construct
  misc_feature 1..312: note = source = /note="Description of Artificial Sequence: Synthetic coding sequence"
  source 1..312: mol_type = other RNA
atgagcggaaggggtaagggcggtaaaggcctaggaaaaggaggtgcaaagcggcaccgcaaagtactgagagacaacatccaggggattactaagccagccatccgaagacttgcacggcgcggcggggtgaagcgcatttccggcctaatctacgaagagacgcgcggagtcctgaaggttttcttagagaatgtcattagagatgccgtgacttacactgaacacgccaagagaaaaacagtgacagcaatggatgtggtatatgcactgaaaagacaagggcggacattatatggatttggcggatag

SEQ ID NO: 14283 - RNA, 2268 nt, synthetic construct
  misc_feature 1..2268: note = source = /note="Description of Artificial Sequence: Synthetic coding sequence"
  source 1..2268: mol_type = other RNA
atgcctccatttctgctgcttgaagccgtttgtgtattcttgttctcccgggtcccaccttcccttcccctccaggaggttcatgtgtctaaagaaactatcggaaagatttctgctgcctcaaagatgatgtggtgtagtgccgccgtagacattatgtttcttttggacgggtctaatagcgttggcaaagggagtttcgaacgctcaaaacattttgcaataaccgtctgcgacggcctcgacatatctcccgaacgtgtacgtgttggcgccttccagttcagttccactcctcacctagaatttcccctcgattcatttagcacacagcaggaagttaaagccaggattaagaggatggttttcaaaggcggacggacagaaaccgaactagctctgaagtatctgctgcacagaggcttgccgggcggaagaaacgcctcagtcccacagatcctgataatagtgaccgatggaaaatctcagggcgatgtagcactgccttccaagcaacttaaggagcgaggggtgacagtctttgcggtaggagtccggttcccccggtgggaggagctgcatgcactcgcttccgagccacgcggacaacatgtgctgcttgctgagcaagtagaggatgcgacaaacggactcttttctacactgagctcaagtgccatctgttctagtgcaacccctgattgccgggtagaagcccatccttgtgagcatcgcacgcttgaaatggtccgcgaatttgctggtaacgccccatgctggcgcggttcgagaagaacactggccgtgttagcagcccactgcccgttctactcctggaagcgcgtatttcttacacacccggctacttgctataggactacatgcccaggtccttgtgactcccagccttgtcaaaatgggggcacctgcgtgccagaaggcctcgatggttaccagtgtctttgtcccttggcttttggcggggaggctaactgcgctctgaagctgtctctcgaatgccgcgttgatcttctgtttctcttggattcttccgccggaactaccttagacggttttctgagggcaaaagtgtttgtaaaaagattcgttagagcggtacttagtgaagattctagagctagggttggtgttgcaacttattcaagagagcttcttgtagccgtgccggtgggcgagtatcaagacgtacccgacctggtgtggagcctggacggaattccattcagaggagggccaacactgacgggtagcgcactccggcaggctgcagagagggggttcgggtccgccactcggactggccaggatcggcctcggagagttgtagttctcctcaccgagtctcactccgaggacgaggtagccggccccgcaagacatgctagagctcgggagctgcttctgttaggagttgggagcgaggccgtgagggctgagttggaagagattacaggttcacccaagcacgttatggtgtattcagacccgcaggatttgttcaaccagatcccagaactccaaggtaagctctgttcaagacagagacccggctgtagaactcaagccctggacttggtttttatgctggatacttctgcctccgtgggcccagaaaacttcgctcagatgcaatcctttgtgagatcttgtgccctgcagttcgaagtcaaccccgacgtaacacaggtgggacttgtagtctacggctcacaggtgcagactgcttttggtctcgataccaaaccgacacgcgctgctatgcttcgcgcgatttctcaagctccctacctgggcggtgtcggatctgctggcacagccttgctgcatatttatgacaaagtgatgactgttcagagaggggcccgaccaggcgtgcccaaagctgttgtcgtcctcacgggcggccgtggcgcggaggacgcagctgtgccagcgcagaaactgaggaacaatggaattagtgtcctggttgtgggagttgggcctgtcctttcagaaggcctgagaagattggcgggacccagagacagtctgatacatgtggcggcctatgccgatttgagatatcaccaagacgtactgatcgaatggctatgtggtgaagctaaacaacccgtgaatctgtgcaagccatcaccatgtatgaacgaggggagctgtgtgctgcagaatgggtcctatagatgcaaatgtcgagatggttgggaggggccacattgtgaaaatcggtttcttagaagaccttag

SEQ ID NO: 14284 - RNA, 816 nt, synthetic construct
  misc_feature 1..816: note = source = /note="Description of Artificial Sequence: Synthetic coding sequence"
  source 1..816: mol_type = other RNA
atgatcaccggcgtgtttagcatgaggctttggacacccgttggagttttgacttcccttgcatattgcttgcatcagagacgtgtcgcactcgcggaactgcaagaagctgatgggcagtgtccggtggatcgcagtctcttgaagctcaaaatggttcaggtcgtcttccgccatggagcacgttctcccctaaaacctttacctcttgaggagcaggttgagtggaacccccagttacttgaagtgccaccccaaacccagtttgactacaccgtcaccaatctggcaggaggccctaaaccttatagcccttacgactcccaataccacgaaacaacactgaaagggggtatgtttgcaggtcagttaacaaaggtcggtatgcagcaaatgttcgctctgggggaaagattacgcaaaaactacgtggaagatattccctttcttagcccgacattcaatcctcaggaggtcttcattagatccaccaacattttccggaacttggagagtacccggtgtctgctggctggcctgttccagtgtcagaaagaaggacctattatcatccacactgacgaggctgattcagaagtgctatatccaaattaccaaagctgttggtcactccgccagagaacccgtggccgcagacagaccgcctccctacaacctggaatttcagaagatcttaaaaaggttaaagatcgcatgggcattgactcctccgacaaagttgacttcttcatcttactggataacgttgcagctgagcaggaaaagatgggtagctgccgctttcatggaagctag

SEQ ID NO: 14285 - RNA, 1395 nt, synthetic construct
  misc_feature 1..1395: note = source = /note="Description of Artificial Sequence: Synthetic coding sequence"
  source 1..1395: mol_type = other RNA
atggagcatagtgtgtgtccatcatccgcagtacatttgatcccggtatccaccccaaagaacggcatgtccagtaagtctcggaagcgcattatgcctgatcctgttacagaaccacccgtgactgaccccgtctatgaagctctcttgtattgtaatatacccagcgtcgccgagcgtagcatggaaggccacgccccacaccattttaagctggtctccgtacacgtctttatccgccatggtgatcgctacccgctctacgttatcccaaagacgaagaggcccgaaatcgattgtacacttgtggccaatagaaaaccctatcacccaaagctagaagctttcataagtcatatgtctaaagggtccggggccagttttgagagtcctttgaactcactccccctctatcccaaccacccgctctgcgaaatgggagaactgactcagactggtgtggtgcagcaccttcagaatggacagctactgcgcgatatatatctaaagaaacacaaactcttgccaaacgattggtctgcagatcagctatacctcgagactacaggtaagtctcggacactacaatccggcttggccctgctttatggctttctccccgacttcgactggaagaagatctactttcggcaccaaccatctgcattgttttgctccgggtcctgctattgccctgtgcgtaatcaatacctcgagaaagaacagcggcgacagtatctgctgagactaaagaattctcaattagaaaaaacgtacggcgaaatggcaaagatcgtggacgtcccgacaaaacagttaagagccgcaaatcctatcgattctatgttgtgccacttctgccataatgtgtctttcccctgcacccgaaacggatgtgttgacatggagcacttcaaggtaattaaaacccaccagattgaggacgagagggagcggcgagaaaaaaaattgtactttggctattcattactcggagcccaccctattttgaatcagacgattggccgcatgcaacgagcaacagagggaagaaaagaggaattatttgcactttactcagctcatgacgttaccttgtcccctgtgctgtctgcccttgggctcagtgaggcgcgcttcccacgattcgccgcgaggttaattttcgagctgtggcaggatagagaaaaaccctcagagcactccgtgcgcatcttgtataatggggttgacgttacctttcacacttctttctgccaggaccaccacaaacgatcgcccaaacctatgtgccccttagagaatcttgtaaggtttgtgaagcgagatatgttcgtggcgctgggaggctcaggtactaattattatgacgcatgccaccgcgagggcttctag

SEQ ID NO: 14286 - RNA, 1443 nt, synthetic construct
  misc_feature 1..1443: note = source = /note="Description of Artificial Sequence: Synthetic coding sequence"
  source 1..1443: mol_type = other RNA
atgctgttcaggaataggttcctcctgctgctcgccctagctgccctactggccttcgtgtctttgtcgttgcagttctttcatcttattccagtttctacaccaaaaaatgggatgtcttccaaatcacgcaaacgcattatgcccgaccccgtaacagaaccgcccgtgactgaccccgtctatgaagccctgctgtattgtaatattccctccgtcgcagaacgaagtatggaaggacacgcccctcaccatttcaaacttgtaagcgtgcatgtcttcatcaggcatggcgatagatatcctctatacgtcatccctaagaccaaacgcccagagattgattgcaccctggttgctaacaggaagccatatcaccccaaacttgaagctttcatcagtcatatgtcaaaaggaagcggcgcaagctttgaatcaccactaaactccctgcccctataccctaaccaccccttatgcgagatgggcgagctgacccaaactggcgtagtccagcatctccagaatggccagcttctaagggacatctacttgaaaaaacataagctcctgcccaatgactggtccgctgaccaactttatttagagacaaccggaaagtcaagaactctacagtcaggtctggccctgctgtatggctttctacccgatttcgactggaagaaaatatatttcaggcatcagccaagtgccctgttctgctcaggctcgtgctactgtcccgttcggaatcaatacttggagaaagagcaacgcaggcagtatcttctccggcttaagaacagtcagttagaaaagacatatggcgaaatggcgaaaattgttgatgtccctacaaaacagctccgcgctgcgaaccccattgattcaatgttgtgtcatttctgtcacaacgtttctttcccttgcacacgaaatggttgcgttgacatggagcatttcaaggtcattaaaactcaccagattgaggatgagcgggaaagacgcgagaaaaaactttactttggatactctttactgggcgcccatcctatcttgaatcagacaattgggagaatgcaacgtgccacagaggggcggaaagaggagctttttgcactctacagcgcacatgatgtcaccttatccccagtcctcagcgcactgggcctgtcagaagctcgctttcccagattcgctgcgcggctcatttttgaactatggcaagatcgcgaaaagcctagtgagcattctgtaagaattttatacaatggagttgacgtaacatttcacacatccttctgccaagaccatcataagcgatcacccaaaccgatgtgccccctggagaatctcgtgcgttttgtcaagcgtgacatgttcgtagccttaggcggaagcgggacgaattattacgatgcctgtcacagagagggattttag

SEQ ID NO: 14287 - RNA, 1311 nt, synthetic construct
  misc_feature 1..1311: note = source = /note="Description of Artificial Sequence: Synthetic coding sequence"
  source 1..1311: mol_type = other RNA
atgcagggcacccctggaggaggaacacgacccggcccaagccctgttgataggcgtacattacttgtgttcagcttcatcttggcagctgcgctggggcagatgaattttaccggtgatcaggtacttcgcgtattggccaaagacgaaaagcaactgtcactgctgggggacctcgagggtctgaaaccccaaaaggtcgatttttggagaggccctgccagaccatcactgcccgtagatatgagagtcccgttttctgaactgaaggatattaaagcctacctggaatcccacggcttagcctactcaattatgatcaaggatattcaagtcctgttagacgaagagcgacaggctatggcgaagtcacgcagattggaacgctcaaccaactccttttcttactctagttaccacactcttgaggaaatttactcttggatagataatttcgttatggaacacagtgacatagtttccaaaatccagattggaaactccttcgaaaaccagtcaattttagtgctcaagttttccaccggagggtctcgacacccagccatctggattgatactgggatacattctcgggaatggattacacacgctaccggcatctggactgcaaacaagatagtctctgactacggaaaagatcgcgtactgacggacattcttaacgccatggatatctttatcgaactcgttacaaacccagacggctttgctttcacacactccatgaacagactgtggagaaagaacaagtctattagaccaggcatcttttgcattggggtcgatctcaatagaaattggaaatcaggctttggtggcaacggttcaaacagtaatccatgcagcgagacataccacggaccctccccccagtctgagccagaagtcgctgccattgtcaacttcatcacggcccatggtaacttcaaagccttgatctcaatccacagctattcccaaatgttaatgtacccttatggtcgccttttggagcccgtatccaaccaaagggaactatatgatctggcaaaagatgcggtcgaagcactatacaaagtgcatggaatcgagtatattttcggaagtattagtacaacactctacgtggcaagcgggatcaccgtcgactgggcttacgatagcggaattaaatacgcttttagctttgaactgcgggacactggccaatacggttttctgcttccagcaacccaaattatacccacagcacaagagacatggatggctctccggaccataatggagcatactctgaatcatccttattag

SEQ ID NO: 14288 - RNA, 1161 nt, synthetic construct
  misc_feature 1..1161: note = source = /note="Description of Artificial Sequence: Synthetic coding sequence"
  source 1..1161: mol_type = other RNA
atggctcaatggcactgttcccaacgaacacaagcaggcggccacggagtgggggagagactggcgcaatgtcaggaccaatcaagtcgccatgccgcagagcttcgggattttaagaataagatgctgcccctcctggaagtggctgaaaaagagagagaagctctgagaactgaagctgacaccatttcaggacgagttgatagactggagagggaggtagactatttggagacacaaaatcccgctttaccgtgtgtggagtttgacgagaaggttacgggaggcccagggactaaaggcaagggacggagaaatgaaaagtatgacatggtgacggattgtggctataccatttcacaggtgaggagtatgaagatcctgaaaagatttggtggaccagcagggctttggaccaaagaccccttaggacagacagagaaaatttatgtgctggatggaacccaaaacgacacagcgtttgtttttccccggctgcgcgattttactttggcaatggccgccagaaaggcatcaagagtgcgcgtcccttttccatgggtagggacagggcagttagtgtacggaggctttctatattttgcaagaagacctcctgggcgtcccggtggcggaggcgagatggagaacactctgcagctgatcaagtttcacctcgctaaccggaccgtggtcgactccagcgtattccctgccgagggactgattcctccttatggacttactgcagacacgtacatcgaccttgccgccgatgaggaaggcttgtgggccgtttacgcaacacgggaagatgatagacacctctgcctagccaaactcgatcctcaaactcttgataccgaacaacagtgggatacgccttgcccaagagagaatgccgaagccgctttcgtcatttgtggcacactatatgtagtatataacacccgacccgccagccgcgcccgtatccaatgttcctttgacgcctccggaacactgactcccgagagagcagccctgccctattttcccaggcgctatggtgcccacgctagcttgaggtataatccaagagagagacagctctacgcctgggatgacggataccagatagtatacaaactggaaatgagaaagaaggaggaagaagtgtag

SEQ ID NO: 14289 - RNA, 990 nt, synthetic construct
  misc_feature 1..990: note = source = /note="Description of Artificial Sequence: Synthetic coding sequence"
  source 1..990: mol_type = other RNA
atgcggccacctcccgcactggcactagccggcttgtgccttcttgccttacccgctgctgctgcctcctatttcggtctgacaggtagagaagttttgacaccctttcccggactgggaaccgccgctgcacctgcacaggggggagcccacctcaagcagtgtgatttgttaaaactgagtcgcagacaaaagcaactttgtcgcagggagcctggactggccgagacactcagggacgccgctcacctgggtttactggaatgtcagtttcagtttcgccacgagcgctggaattgttctctggaaggacgtatgggcttgctaaaaagaggctttaaggaaactgcctttctgtatgccgtcagtagcgccgcgctgacacacaccttagctcgagcttgttctgcaggtcgcatggagcgctgcacctgtgacgatagccccggcctagagtctcgacaggcctggcagtggggggtgtgtggtgacaacctgaaatacagtactaaatttctctccaattttctggggtcaaaaagaggaaataaggatctgagagcccgggccgatgctcacaatacacatgttggcattaaggcagttaagtcaggccttagaaccacatgcaaatgtcacggcgtcagcggctcgtgcgcagttagaacttgctggaagcagctgagtccattccgtgaaaccggacaagtcctaaaacttcgatatgactccgccgtaaaagtatcctcagccactaacgaagctttagggcgtttggaactgtgggctccagctagacagggatcacttaccaagggactagccccccggtctggggatctggtttacatggaggatagtcctagtttttgccggccgagcaagtacagcccaggcaccgcaggttggtccgcagttgcccggtcgcagctcatcaccacaagcacaagtagaatccaggccatattaccatcccaacttcctgaatag

SEQ ID NO: 14290 - RNA, 579 nt, synthetic construct
  misc_feature 1..579: note = source = /note="Description of Artificial Sequence: Synthetic coding sequence"
  source 1..579: mol_type = other RNA
atgaggctagccgggccagaatcaagtgttaccgctgcacctagagcaaggaagtataagtgcgggctgcctcagccatgccctgaggaacatctggccttccgagttgtaagcggggccgccaatgtgatcggaccaaagatttgtctcgaagacaagatgctaatgagctctgtgaaggataatgtgggaaggggacttaacattgcacttgtgaatggggtgtctggagagttaattgaagcaagggcatttgacatgtgggctggtgacgtcaacgaccttctgaagttcatacggcccctgcatgaagggacccttgtattcgtcgccagctatgatgatccagccacaaagatgaatgaggagacacgaaaattgttcagcgaactgggttcccgtaacgctaaggagcttgccttccgggatagttgggtgttcgttggtgctaagggcgtgcagaacaaaagtccatttgagcaacacgtgaaaaacagtaaacattctaacaaatatgaggggtggcccgaagccctggaaatggaaggctgcatccccaggaggagcaccgcatcgtag

SEQ ID NO: 14291 - RNA, 1053 nt, synthetic construct
  misc_feature 1..1053: note = source = /note="Description of Artificial Sequence: Synthetic coding sequence"
  source 1..1053: mol_type = other RNA
atgaaatgctctttacgcgtgtggtttcttagcgtggcgttcttgctcgtgttcattatgtcgttactctttacctacagtcaccattctatggcgaccctgccttacctggactcaggtgccttggacggcacacacagagtgaaactggttcctggttacgccggcctgcagaggctcagcaaagagaggttatctggcaagtcttgcgcatgccgacggtgcatgggcgacgcaggagcctccgattggttcgattcccattttgacggcaacatatccccagtatggactcgcgaaaacatggatcttcctccagatgttcagcggtggtggatgatgctgcaaccccagtttaaatctcataatactaacgaggtcttagaaaaactgtttcaaatcgtgcccggagagaatccctataggtttcgagacccccaccaatgtaggaggtgcgctgtggttggaaatagcgggaacttgcgaggaagcggatacggccaagacgtagacggacacaatttcatcatgcggatgaatcaggcgcccacagtcggattcgaacaggacgtcggctcaagaactacgcaccattttatgtaccctgaaagcgctaaaaacttgcccgcaaatgtctcttttgtactggtgccttttaaagtgctggatctcctgtggatcgctagcgcactgagtactgggcaaatcagatttacttacgcccccgtaaagtctttcctgagggtggataaggagaaagttcagatatataacccagccttctttaaatacatacatgatcgatggaccgagcaccatggtaggtatcctagcaccggaatgctagtgttgttcttcgccctccacgtatgtgatgaggtaaatgtctacggttttggagctgacagtcgcgggaactggcatcactactgggaaaataatcgctatgccggagagtttcggaaaacgggggttcacgatgccgactttgaggcgcacattatcgacatgcttgccaaggcatcaaagattgaagtttatagaggaaattag

SEQ ID NO: 14292 - RNA, 189 nt, synthetic construct; identical to SEQ ID NO: 12653
  misc_feature 1..189: note = source = /note="Description of Artificial Sequence: Synthetic coding sequence"
  source 1..189: mol_type = other RNA

SEQ ID NO: 14293 - RNA, 738 nt, synthetic construct
  misc_feature 1..738: note = source = /note="Description of Artificial Sequence: Synthetic coding sequence"
  source 1..738: mol_type = other RNA
atgacattgttcccagtattgctgtttctcgttgcaggactgcttccctcttttcccgcgaatgaagataaggacccagcctttaccgccctattgaccacacagactcaggtacaacgcgaaatcgttaataaacacaacgagttgagaagggccgtctcaccacctgcccgcaatatgctgaagatggagtggaacaaagaggctgcggcaaacgcacagaagtgggctaaccagtgtaactatagacacagcaacccaaaagacagaatgacgtccctcaaatgtggcgaaaacctgtacatgagctctgcctcttcctcttggtcccaggctattcagtcctggttcgatgagtacaatgattttgacttcggagtggggcctaagacccctaacgctgtggttggccattacacacaggttgtatggtactcttcctatctggtaggatgcgggaacgcatattgtccaaaccagaaagtacttaagtattactatgtctgtcagtactgcccagcaggcaattgggccaatcgtctgtatgtcccctacgagcaaggagccccttgtgctagctgcccagataactgcgacgatgggctgtgcaccaacggctgtaagtacgaggacctttattccaactgtaaatcgctgaagctgactctcacatgtaaacaccaactggtaagagattcctgtaaagcatcctgcaattgctctaattctatctattag

SEQ ID NO: 14294 - RNA, 1341 nt, synthetic construct
  misc_feature 1..1341: note = source = /note="Description of Artificial Sequence: Synthetic coding sequence"
  source 1..1341: mol_type = other RNA
atgctgcacccagaaacatcccccggaagaggccacctgttagctgtgctcctcgcactcctgggaacggcttgggctgaggtttggcctcctcaattacaggaacaggcgccaatggccggcgccctgaatcggaaggaaagctttttattgttgagcctccataatagactaagatcttgggtgcaaccccccgccgccgacatgagaagattggattggtctgattccctcgcgcagcttgcccaagcccgcgctgcactgtgcggaacccctactccctcactcgccagcgggctgtggcggaccctgcaagttggatggaatatgcagttacttcccgctggcttagtctcctttgtcgaagtggtttcactgtggttcgccgagggccagcgttactcacacgcagccggcgagtgtgcacggaacgctacttgtacacactacacacagctagtctgggcaacaagcagccagctgggctgcggacgtcacctctgttcggcaggccaggctgctattgaagcttttgtatgcgcctactccccccgtggcaactgggaagtgaatggaaagaccatcgttccttacaagaagggggcatggtgctcactgtgcactgccagtgtgagcggttgtttcaaggcgtgggaccacgcaggaggtctctgtgaagtgcccagaaacccatgtcgtatgtcttgccagaatcacggtcggcttaacatttcaacatgccattgtcactgccccccaggctatacaggccgctactgtcaagtgagatgctctctccaatgtgtgcatggccgctttcgcgaggaggaatgttcttgtgtatgcgatattggttatggaggggcccaatgcgctacaaaagtccatttcccattccacacgtgcgacttgagaattgacggcgactgcttcatggtatcctcagaggcggacacttattacagggctcggatgaaatgccagagaaagggtggtgttctagcgcagattaaatcccagaaagtacaggatatactggccttttatctaggcagactcgaaaccacgaatgaagtcatcgattctgacttcgagaccagaaatttctggataggcctaacttataagaccgccaaagattccttcagatgggcgaccggggaacaccaagcatttactagcttcgcatttggacaacccgataatcatggatttggcaattgcgtcgagctgcaggcttccgctgcttttaattggaatgatcagaggtgtaagacacggaacagatacatctgtcaatttgctcaggaacacatctcacgatggggacccggtagttag

SEQ ID NO: 14295 - RNA, 585 nt, synthetic construct
  misc_feature 1..585: note = source = /note="Description of Artificial Sequence: Synthetic coding sequence"
  source 1..585: mol_type = other RNA
atgactatgagacataactggacaccagatctgagccctctgtgggtcctgctgctgtgcgcccacgtcgtcaccctcctcgtgcgagccacccctgtgagccagaccaccaccgccgcaaccgcctcagtccgttctaccaaagacccatgcccttcacaacctccagtttttccagctgctaaacagtgccccgctcttgaggtgacttggccagaagtagaagtgccactgaacggcacccttagtctgtcttgcgttgcctgtagcaggttccccaatttttctatcctatactggttaggaaatggttccttcattgagcatttgcccggaagattgtgggaaggctctactagtcgtgaacgtggctctaccggtacacaactgtgcaaagcactcgtactcgaacagctcacccccgcattacattcaactaacttcagctgtgtgcttgttgaccccgaacaagttgttcagaggcacgtcgttttggcccagctatgggctggcttaagggcaacactgcccccaacacaggaagcactgccctcatctcactcctcaccgcagcaacaaggatag

SEQ ID NO: 14296 - RNA, 585 nt, synthetic construct
  misc_feature 1..585: note = source = /note="Description of Artificial Sequence: Synthetic coding sequence"
  source 1..585: mol_type = other RNA
atgaccatgcgacacaattggacccctgacttaagtcccttgtgggtgctccttttgtgcgcacatgtggtgaccctcctggttcgagctacccctgtgagtcagacaactaccgccgctaccgcatctgtgagatccaccaaggatccctgccctagccagccaccagtgttcccggccgctaagcaatgtcctgccctggaggtaacatggccagaagtagaagtcccgctgaacggcaccctgtcactgtcttgcgttgcctgttctcgtttccctaatttctctattctgtactggctcggtaacggaagcttcatcgaacatttgcccggacggctctgggagggatctacatcccgggaacgtggaagcacaggaacacagttatgtaaggcactggttctggaacagctaacacctgccctgcactccaccaacttttcttgcgtgttagtcgatcccgaacaggtcgtgcagcggcacgtcgtgcttgctcagctttgggccggcctacgcgccacactccccccgactcaagaagccctgccgtctagccattcgagcccccaacagcaggggtag

SEQ ID NO: 14297 - RNA, 348 nt, synthetic construct
  misc_feature 1..348: note = source = /note="Description of Artificial Sequence: Synthetic coding sequence"
  source 1..348: mol_type = other RNA
atgacaatgagacataactggacacccgacctctcccccctatgggttctgcttttgtgcgcccatgtcgtcaccctcctggtccgtgcaacacctgtgagccagactactaccgctgccaccgcatctgtacgctccaccaaagacccatgtccttcccagccccctgtgttccctgcagccaaacagtgccctgccctcgaagttacctggcccgaagtggaagtgcccctctcttgggccgagggcaatctggctcctcacccccggtcccccgctctgcaaccacagcaaagcaccgccgccggccttcgtttaagcaccggccccgccgccgcccagccatag

SEQ ID NO: 14298 - RNA, 528 nt, synthetic construct
  misc_feature 1..528: note = source = /note="Description of Artificial Sequence: Synthetic coding sequence"
  source 1..528: mol_type = other RNA
atgctccctcccatggcactcccctccgttagttggatgctgctgtcatgcctcatgctgctcagccaagtacagggggaagaaccacagcgcgaattgccatcagccagaattcgctgtcccaagggaagcaaagcttacgggagccactgctatgctctattcctcagccctaagagctggaccgacgcagacttagcatgtcaaaaacgacccagcgggaacctggttagtgtgttgtcaggcgccgaaggttcttttgtttcaagtttagtcaaatccattgggaatagctacagttacgtgtggatcggactccacgaccctacgcaggggacagaacccaacggtgagggctgggaatggagctcgagcgatgttatgaattactttgcttgggagagaaaccccagtaccataagctcacctggacattgcgcatccctgtcacgaagtacagcctttttacgctggaaagattacaattgcaacgtacgcctcccctacgtgtgtaagttcacggactag

SEQ ID NO: 14299 - RNA, 993 nt, synthetic construct
  misc_feature 1..993: note = source = /note="Description of Artificial Sequence: Synthetic coding sequence"
  source 1..993: mol_type = other RNA
atgggtaagctgtgtctaggcccaactctgtgtcctgctgcagctgccgaggaaagcagggatgctgagccccgccgtgaactcctctgttctggacgtccctggacctggagagccgctgcccgagtgacgaccatgattccctgggtgcttctggcatgtgctcttccttgcgccgccgatcctctgctgggagcgttcgcacgaagagatttccgcaaaggctctccccaacttgtatgctctctgcctggaccacagggacctcccggacctcccggggcccccggacccagcggcatgatggggcgtatggggtttcccggcaaggatgggcaagatggacacgacggtgataggggagatagcggagaggaggggccccctggccgcactggtaaccggggtaagccgggacccaagggaaaagctggcgccataggacgagctggcccaagaggtccaaaaggggttaacgggacaccagggaagcacggcacacctggcaaaaaggggcctaaggggaagaagggtgagcctggcctcccagggccttgtagctgtggatccggtcacacaaagtctgcattctctgtggccgtgaccaagtcttaccctagggaacggctacctattaaatttgacaaaatcctgatgaatgaaggcgggcattacaatgccagttccggcaagtttgtctgcggcgtacctggcatctattactttacctacgatatcactctcgcaaacaaacacctggctataggattagtgcataacggacagtatagaataaggacattcgacgcaaataccgggaaccacgatgtggctagcgggtctacgatactcgcgctaaaacagggggacgaggtctggctgcagatattctattccgagcagaacggactcttctatgacccctattggacagactcgctattcacaggttttctaatttacgcagatcaggacgatcccaacgaagtgtag

SEQ ID NO: 14300 - RNA, 390 nt, synthetic construct
  misc_feature 1..390: note = source = /note="Description of Artificial Sequence: Synthetic coding sequence"
  source 1..390: mol_type = other RNA
atgagattgctcctcctcgtaccactactgttagcccccgcacccgggtcttcggcccccaaagtgaggcgtcaaagtgatacatggggcccgtggtcacagtggtcaccctgttcaaggacctgtggaggtggcgtgagctttagggaacgcccttgctattcccagcgcagggatggaggcagttcttgcgttggacctgcccgatcacaccgaagttgccggactgaaagctgtcccgatggtgccagagactttcgcgcagaacaatgtgccgagttcgatggagccgaatttcaggggaggagataccgctggctgccatactatagcgcacccaataagtgtgaattgaattgtatacctaagggactcgggttgcagggctag

SEQ ID NO: 14301 - RNA, 1227 nt, synthetic construct
  misc_feature 1..1227: note = source = /note="Description of Artificial Sequence: Synthetic coding sequence"
  source 1..1227: mol_type = other RNA
atgttctccaatgctaattcgaggagcaaaatgtggcttttactgactatggcgtctttgatcagcgtcttaggtaccactcatggactttttggcaaactgcaccctgggagtcctgaagttactatgaacatctcccagatgataacatattggggttatcctaacgaagagtacgaagttgtgacggaggacgggtacattcttgaagtcaacagaattccctacggcaaaaaaaacagcggtaatacagggcaacggccggtggtgttcttgcagcacggtttgctcgctagcgccacgaactggatttctaatttacccaataattccctggcattcattctggccgatgccggctacgacgtttggctcggaaactctcgcggcaatacttgggccagacggaatttatattacagccccgatagtgttgaattctgggcgttcagctttgatgaaatggctaagtacgatttgcccgcaacgatcgacttcattgtgaaaaagaccgggcaaaaacaacttcactacgtcggacattcacaaggcaccacaattggattcatcgctttcagtaccaatccttccctagccaagcgaatcaaaaccttctatgccctcgctcccgttgcaactgttaagtataccaaaagcctaattaacaagctacgattcgtaccacaaagtctgttcaaattcatttttggtgataagatcttttatccccacaactttttcgaccagttcctcgccactgaagtttgtagccgggagatgttgaatctgctttgctctaacgctctcttcattatctgcggcttcgattcaaaaaacttcaacacctcgcgcctagacgtatacctgtcccataatcctgccggtacaagcgttcaaaatatgtttcactggacccaggctgtcaaatcagggaagtttcaagcatacgactggggttcccctgtccagaatcgaatgcattatgaccagtcacagcctccttactataacgttaccgccatgaacgttcccattgctgtttggaatggtggaaaggacctactagcagacccccaggacgtgggccttctcttacctaagcttccgaacctcatttaccacaaagaaatccctttctacaatcacctggattttatctgggccatggacgccccacaggaagtgtataatgatatagtttctatgataagcgaggacaagaagtag

SEQ ID NO: 14302 - RNA, 393 nt, synthetic construct
  misc_feature 1..393: note = source = /note="Description of Artificial Sequence: Synthetic coding sequence"
  source 1..393: mol_type = other RNA
atggcgtccgatctcattagaaccatacttgccgttgccctcatttccaaacttggcactgcagtggatgcggaactgatgccatctggcgctatacttcagaacaaaagagagaacctgcctcgagtgtgtcacgctctagctttcctgggcatggctagatgtcaggaccttttcctcgtcagattgcaggggtggaagcttggcactaggtttcaggatggccctaggtctacacctcaggaggaaggaggctcaccacagagaaaacgaggtatgccagtccagattcactttctcctaaagtcctttctctcctctcccatcacattcgcctttatttccctagcccgtaccgtttcactcgccaccgccatttgcaagattgtgtag

SEQ ID NO: 14303 - RNA, 393 nt, synthetic construct
  misc_feature 1..393: note = source = /note="Description of Artificial Sequence: Synthetic coding sequence"
  source 1..393: mol_type = other RNA
atggcatccgacttaattaggacaattcttgccgtcgccctgatcagcaagcttgggacagccgttgatgccgagttaatgcctagcggagcaatcctgcaaaacaagcgagagaacctcccccgtgtctgtcatgccttagcctttctgggaatggctcgttgtcaggatttatttctcgtgcgcttacaaggttggaaattaggtacccgctttcaggacggtccaaggagcaccccacaggaggaaggtggaagcccgcagcgaaaaagagggatgcccgtgcagattcacttcctcttaaaatcatttctgtcatcacctatcacctttgccttcatttcattagcacggaccgtcagtttagcaacagccatttgtaaaatcgtctag

SEQ ID NO: 14304 - RNA, 1731 nt, synthetic construct
  misc_feature 1..1731: note = source = /note="Description of Artificial Sequence: Synthetic coding sequence"
  source 1..1731: mol_type = other RNA
atgattgtcttcggatgggctgtgttcctggcttccagatccctcggacaaggactattactgaccctggaggagcacatcgcccacttcctgggcaccggcggagctgcaaccacgatgggcaatagttgtatctgcagagatgattcaggaaccgatgactcagttgacacccagcagcagcaggcggagaacagtgccgttcctacagccgacacacgaagccagcccagagatcctgtgcggccaccaaggaggggaagagggccacatgagcctcgtcgcaaaaaacaaaatgttgacggtctggtactagacactctcgccgtgatacgaaccctggtagacaacgatcaggagcccccttacagcatgattaccctccacgagatggcagagacagatgagggttggcttgatgtcgtccagagcctgatccgagtaattcccctggaagacccactggggccagcagtcataacactgctcctcgacgagtgtccattgcccactaaagatgccctgcaaaagcttaccgaaattcttaatttaaatggagaagttgcatgtcaagactcatcacaccctgccaaacacagaaatacatccgcagtgctggggtgcctggcagaaaagcttgcgggacccgcctctattgggctgctctcccctggtattttagagtatctcctccagtgtctgaaacttcaatcacaccctaccgtcatgcttttcgctctgatcgcactcgaaaagttcgcacaaacctccgaaaataagctgacgatctcagaaagtagtatatcagaccgccttgttaccctcgaatcctgggcaaatgatccagactacctgaaacggcaagtagggttctgcgctcaatggtcactagacaatctttttctgaaggagggccggcagctgacatacgagaaagtaaatctgagcagtattagagcaatgcttaattctaacgacgtatcagaatacctgaaaatttcccctcatgggcttgaagcgagatgtgatgccagtagttttgagagcgtcaggtgtacattttgcgtggacgccggtgtgtggtactacgaggtcacagtcgttacgtcaggagtgatgcagattgggtgggcaaccagggatagcaagttcctcaaccatgaaggatacgggattggcgacgatgaatatagctgcgcttacgacggatgccgccaactgatttggtataatgcaagaagcaaaccccatatacatccatgctggaaggagggcgacacggtaggattcttacttgacctgaacgaaaaacagatgatctttttcctcaatggcaaccagctaccaccagagaaacaagtgtttagcagcacagtatccggtttctttgcggccgccagctttatgtcttaccaacaatgtgaattcaattttggagcgaaacctttcaagtacccccccagcatgaaatttagcacttttaacgactatgccttccttaccgccgaggagaaaatcatacttccgaggcatcgccgtttggctctactgaaacaagttagcatccgggagaactgctgtagcttatgttgtgatgaggtggccgacacacagctgaaaccttgcggccactcagacctgtgcatggattgtgctcttcagctggagacctgtcccctgtgccgtaaagagatcgtttcaagaattcgacaaatctctcacatctcatag

SEQ ID NO: 14305 - RNA, 360 nt, synthetic construct
  misc_feature 1..360: note = source = /note="Description of Artificial Sequence: Synthetic coding sequence"
  source 1..360: mol_type = other RNA
atggcgaggcctggtatggagagatggcgagataggctggctttggtgacaggagcttctgggggcatcggcgccgcagtcgccagggcgctcgttcaacaaggcctgaaagtggtgggatgcgctcgtactgtggggaacattgaggagctggcagcagagtgtaagtcggctggctatccgggaaccctgataccatacagatgcgacttgagtaacgaagaggacatcctctccatgttttcagctatcaggtcacaacattcaggggtggacatttgtataaataatgctggactggctagaccagacactctacttagcggctccacttctggatggaaagacatgttcaactag

SEQ ID NO: 14306 - RNA, 144 nt, synthetic construct; identical to SEQ ID NO: 12667
  misc_feature 1..144: note = source = /note="Description of Artificial Sequence: Synthetic coding sequence"
  source 1..144: mol_type = other RNA

SEQ ID NO: 14307 - RNA, 159 nt, synthetic construct; identical to SEQ ID NO: 12668
  misc_feature 1..159: note = source = /note="Description of Artificial Sequence: Synthetic coding sequence"
  source 1..159: mol_type = other RNA

SEQ ID NO: 14308 - RNA, 1272 nt, synthetic construct
  misc_feature 1..1272: note = source = /note="Description of Artificial Sequence: Synthetic coding sequence"
  source 1..1272: mol_type = other RNA
atggagctggaactcatgcctttcaatgtgctgctgaggactactctcgatctcctacaagaaaaagaccctgcccacattttcgccgaacccgtaaacctgtccgaggtgcccgactacctagaattcatctccaaaccaatggacttttctacaatgagacgaaagctcgagagccatctttaccgaaccctcgaggaatttgaagaggacttcaatctcattgtcacaaactgcatgaagtataatgccaaggatacaatatttcatagagcagccgttagactgcgtgatttgggcggcgcgatcctccggcacgcccgtcgtcaggctgagaatatcggctatgacccagaacgcggaactcacctgcccgaaagcccaaagcttgaagatttttataggttctcatgggaagatgttgataacattctgatacccgaaaaccgggcccacctgtctcccgaagttcagctcaaggaactgttggagaaactcgacctcgtctcagcaatgcgatcgtctggcgcaagaacacgaagagtccgcctgctcagacgcgaaattaatgcgctacgacagaaactcgctcagcccccccctccacagccaccctcattaaacaagactgtcagcaacggtgagctccccgcagggccgcaaggagatgccgctgtgctggagcaagccctgcaagaggagcctgaggacgacggcgatagagatgatagcaaattgccaccaccccctacccttgagcctaccggtcccgcaccgtctctgagtgagcaggaatcaccacccgaaccacctaccctgaaacccattaacgattctaaacctccctctcgcttcctgaaaccacggaaagtcgaggaagacgaactgctagaaaagagcccacttcagctgggcaacgaacccttgcagcgcctcttatctgataatggaataaatagactgtctctgatggctcctgataccccggctggtacgcccctatcaggggtcggacgccgcacctccgttttattcaagaaggccaaaaacggagtgaaattacaaaggtcacctgatcgggttctggaaaatggagaagaccatggtgtagccgggtcaccagcatcgcccgccagtatagaggaggagaggcactccagaaaacggcctcgctccagaagctgctctgagtcagaaggtgaaagaagcccgcaacaggaggaagaaaccggtatgacaaatggattcggaaaacatcgcaagagagtatag

SEQ ID NO: 14309 - RNA, 3030 nt, synthetic construct
  misc_feature 1..3030: note = source = /note="Description of Artificial Sequence: Synthetic coding sequence"
  source 1..3030: mol_type = other RNA
atgggatctggaagagtcccagggctgtgcctacttgttttgctggtgcatgctagggcagcacaatactccaaggccgctcaggatgtggatgaatgtgtggaggggaccgataactgtcacatcgatgctatatgtcagaatacgccacggtcctataagtgcatctgcaagtctggctacactggcgacggaaaacactgtaaagacgtggatgagtgcgagcgtgaggacaatgcgggctgcgtgcatgactgcgtgaacatccccgggaattaccgctgtacatgttatgacggctttcatctagcacacgatggtcacaattgcctcgacgtagacgaatgcgcggaaggcaacgggggatgtcagcagagttgcgtcaacatgatgggcagctacgagtgccactgccgagagggttttttcttgtccgataaccagcatacgtgtatccaacgccccgaagaaggaatgaactgtatgaacaaaaatcatggctgtgcacacatttgcagagaaactcctaaaggcggcatagcatgcgagtgcaggcccgggttcgagttaacaaaaaatcaaagggattgcaaattgacatgcaattacggtaatggcggatgccagcacacgtgtgacgatacagaacaaggaccacgatgcgggtgtcatatcaaattcgtcctgcatactgacggaaaaacctgtattggggaacggagactggagcagcacatacccactcaggcagtgtccaatgagacgtgtgctgtgaataacgggggttgcgattcaaaatgtcatgatgccgccacaggagtccactgtacttgtccagtcggctttatgctccaacctgatcgaaagacttgcaaagatattgatgagtgtcgcctgaacaatggtggctgcgaccatatttgtagaaataccgtgggcagtttcgagtgttcatgcaaaaagggctacaaattgttaattaatgagaggaactgtcaggacattgatgaatgtagtttcgatcggacatgtgaccacatttgcgtaaacaccccaggctcttttcagtgtttgtgtcatcggggctatttgctttacggaattacccattgcggcgatgttgatgaatgttctattaaccgcgggggctgtaggtttggttgtatcaatacacctggctcataccagtgcacttgcccagccggacagggacgattacattggaatggaaaggattgtacagaaccactgaaatgccaggggagcccaggcgccagcaaggccatgctctcttgcaaccgctctggtaagaaagatacatgcgcccttacctgcccatcccgagcccggttcttgccagaatctgagaacggctttaccgtgagttgcggcacgccttcaccaagagccgcccccgccagggcaggacacaatggaaactcaactaactcaaatcactgtcatgaagccgccgtattaagtattaagcaaagggcctccttcaagatcaaggacgcaaaatgtcgactgcacctgaggaataaaggaaaaaccgaagaagctggccgcatcaccggccccggcggcgccccgtgcagcgagtgtcaggttacgtttatccatttaaagtgtgactcgagtcgaaagggtaaaggaagacgcgcccgcacccccccaggtaaagaagtcactaggctgacattggagcttgaggcagaggtgagagcagaagaaacaactgcaagctgtggcttgccctgtctcagacaacgcatggagaggagattaaaaggttccctgaagatgctcagaaagagtattaaccaggatcgctttctgctgaggttggcaggactggactacgaactagcccataagccaggtctggtagctggggagcgagcggagccaatggagtcttgtaggcccggacagcaccgagccggtaccaagtgtgtgtcctgcccccagggaacctactaccatggacagacagagcagtgcgtgccatgccccgccgggacctttcaggaaagagaaggacagctgagctgcgatctgtgtcccgggagcgatgctcatgggccgctaggagcaaccaatgtgaccacttgcgctggccaatgccctccaggacagcattctgtcgacggattcaagccttgtcaaccctgccctagaggaacctatcagcccgaagccggaaggaccctgtgcttcccatgcggcgggggcttgacaactaaacacgaaggcgctatttcatttcaagattgtgacacaaaggtgcagtgttcccccggtcactattacaacacatccattcaccgctgcattcggtgtgccatgggcagctaccagccagacttcaggcagaatttttgtagtcgatgccccggtaacacctctacagatttcgacggtagtactagtgtggcccagtgcaaaaatcgacaatgtggtggggaattaggcgagttcaccgggtacatcgagtccccaaattacccaggaaactacccagctggagttgagtgtatttggaacattaatcccccccctaagcggaaaatccttatagtggtgcctgagattttcttgccttctgaggatgaatgtggcgatgttcttgtgatgagaaagaactcaagtccctcatctattaccacttacgaaacctgccagacctatgagcggcccattgcgtttacagctaggtctcggaagctatggattaactttaaaacaagcgaagccaattctgcccgagggtttcagattccatacgttacttatgacgaagattatgagcagctcgtagaagacatagtacgcgacggaaggctgtacgcttcagagaaccaccaagaaatcctaaaggacaagaagctcatcaaggcctttttcgaagttcttgcccacccacaaaactactttaaatataccgaaaagcacaaggaaatgctgcctaaatcctttattaagctactcaggtccaaagtgtcatcctttctccgcccatacaagtag

SEQ ID NO: 14310 - RNA, 984 nt, synthetic construct
  misc_feature 1..984: note = source = /note="Description of Artificial Sequence: Synthetic coding sequence"
  source 1..984: mol_type = other RNA
atgactgccctggaacttgctagacgaggagctcgagtggtactagcttgtagatctcaggagaggggtgaggcggcagcattcgacctgaggcaggaatccggaaacaatgaagtaatcttcatggcactcgatctagcttcgctcgccagcgtgagggccttcgccacagcttttttgtccagtgaacctcggctcgacatcctcatccataatgcaggaatttcttcctgcggaaggacaagggaggcattcaacctgctgttaagggtgaatcatatcggcccattccttttaacacatctgctactgccctgtctgaaagcttgtgcccccagcagggtggtcgtggtagcaagcgcggctcattgcagggggaggttagactttaaacgacttgatagacctgtggtgggttggcgtcaggaacttagagcctatgcagataccaaactagccaatgttctttttgcaagagagttagcaaaccagctcgaagccacaggcgtaacatgctatgctgcccaccctgggccagtgaattctgaactcttcctccgtcatgtgcctgggtggctgagacctttactgcgtcctctggcctggctcgtgctgcgcgccccacgagggggagctcaaactccactatattgcgccctccaggaaggcattgaaccactctcagggagatattttgccaattgccacgtggaagaagtgccacccgccgccagagatgacagagcagcccataggctctgggaggcatcaaaacgactcgcaggcctgggcccaggggaagacgccgagcctgacgaggatcctcagagtgaagattcagaggcgccaagcagcctctcaacaccccatcccgaagaacccacggtgtctcagccatacccatcacctcagtcctccccggatctctccaaaatgacccaccgaattcaagccaaggttgaacctgaaatccagttgagctag

SEQ ID NO: 14311 - RNA, 1320 nt, synthetic construct
  misc_feature 1..1320: note = source = /note="Description of Artificial Sequence: Synthetic coding sequence"
  source 1..1320: mol_type = other RNA
atgcccgccattgcagtgttggctgctgccgcggctgcatggtgtttccttcaagtagaaagccgccacctcgacgccctggctggaggcgctggcccaaatcatggcaacttcctcgataacgatcagtggttgagcacagtgagccagtacgaccgcgacaagtattggaatagattcagggatgatgattatttcagaaattggaacccgaacaagcccttcgatcaggcactcgacccttccaaagacccgtgccttaaagtgaagtgctctcctcacaaggtatgcgtgacacaggattaccagacagccctctgtgtttcacgcaaacacctgttgccacgccagaaaaagggaaatgttgctcaaaagcactgggtcggcccttcaaacctcgttaaatgtaaaccgtgcccggtggcacagtcagcaatggtgtgcggtagtgacggccactcctacacttccaaatgcaaactggagttccacgcctgtagcacaggaaagagcctcgcaaccttgtgcgacggcccctgtccatgtttgcccgagcccgagccaccaaaacataaagccgaaaggtcagcatgtaccgataaggaactacgaaacttggccagcagactgaaggattggttcggggccctccacgaggatgccaaccgcgtaataaagcctacgagcagcaatactgcacaaggcagatttgacacttccattttacccatttgcaaggattccctagggtggatgtttaataaattagatatgaattatgacctcctgctggacccatcggagataaacgctatatacttggacaaatatgagccttgtatcaaacctttgttcaacagctgtgactctttcaaagacggtaagttatcaaacaacgagtggtgttattgttttcaaaaacccggtggactgccgtgtcagaacgaaatgaatcgcatccagaagctgagtaagggtaagtccctgctgggggcgtttattccacggtgtaacgaagaaggttactacaaggccacacagtgtcacgggtccacaggtcagtgctggtgcgtggataagtacgggaacgaactcgctggttcgagaaaacagggggccgtatcatgtgaggaagagcaagagactagcggcgatttcggcagtggggggagcgtggtgttactagacgatctggaatacgaacgagaactcggacctaaagacaaggagggcaaattaagggtgcacacgcgggcggtaacagaggacgatgaagatgaggacgatgacaaggaagacgaggtgggatacatttggtag

SEQ ID NO: 14312 - RNA, 3687 nt, synthetic construct
  misc_feature 1..3687: note = source = /note="Description of Artificial Sequence: Synthetic coding sequence"
  source 1..3687: mol_type = other RNA
atgaaaggcgcacgcctgttcgtcctgcttagcagcttatggagcggtggaatcggcctgaacaattctaagcacagctggaccattcccgaagatggcaacagccagaaaaccatgccctccgcttctgtgcctccgaacaagatccagagcttgcagattttacccacgacgagagtgatgagtgccgagatcgctaccacacctgaagccagaacttctgaggactccctgctaaagtccacacttcccccttccgagacatccgcacccgccgagggcgttaggaatcagactctgaccagcacagaaaaggctgagggcgtggtgaaactgcagaatttgacactccccacgaatgcatctattaagttcaatccaggtgctgagtccgtggtcctgagtaattctacactgaaattcttacaatctttcgccaggaaaagtaacgagcaggcaacgtccctgaacaccgtgggcgggacaggagggatcggaggggtgggcggtacaggcggggtgggcaacagggcacccagggaaacatatctctcccggggcgatagctcttcctctcagcgtaccgactaccagaagagcaattttgagaccacccgaggtaaaaattggtgtgcctacgtccacactagactgagccctactgtgatacttgataatcaggtgacttatgtgcccggcgggaaaggcccctgcggatggacaggaggaagctgcccccaacgctcacaaaagatatcaaaccccgtgtatcggatgcaacataaaattgttacatcactggactggaggtgctgtccagggtatagcggacccaagtgccagctgcgcgcgcaggaacaacaatctctgattcatacaaaccaggccgagtcccacacagccgtggggcggggcgtggcagagcagcagcagcagcagggatgcggggatcctgaagtgatgcagaaaatgacagatcaggttaactaccaagcgatgaagcttacacttctccagaaaaaaatcgataacatttcactcacagtcaacgatgtaagaaacacatactcttctctcgaggggaaagtctctgaggacaagtccagagaattccagagtctgctcaaaggcttaaagtcaaagtctataaatgtacttatcagggatatcgtcagggagcagtttaaaatcttccagaatgatatgcaagaaaccgtggctcagctatttaaaaccgtcagctcactgtccgaagacctagagtcaacccggcagataatccagaaggtcaacgaaagtgtcgttagcattgcagcccagcagaaattcgtgctcgtccaggaaaatcgtcctaccctcactgatattgtcgagttacggaaccacatcgtgaatgtcagacaggagatgactcttacatgtgagaagccgattaaggaactggaggtgaaacaaacgcatctagagggagccctagaacaggaacattcacgtagcattctgtattatgaatctctcaataagactctctccaagctgaaagaagtgcacgagcagttattgtcaaccgagcaagtttctgatcaaaaaaatgctcctgcagcagagtccgtctctaataacgtcaccgagtatatgtcaaccttgcacgagaatattaagaaacagtctctgatgatgctccaaatgtttgaggatcttcatatccaagaaagcaaaataaacaatttaaccgtgtctcttgagatggagaaagaatctctccgtggcgaatgtgaggacatgctgagtaaatgtcgcaatgactttaaattccaactcaaggacaccgaggagaatttacacgtgttgaaccaaacactcgctgaggtactctttcccatggataataaaatggataagatgagtgagcagcttaacgatctcacctatgacatggaaattctacagccactactcgaacagggggcatctctgaggcaaactatgacatatgagcagccaaaagaagcaatcgttatcaggaaaaaaatagagaatttaacttcagccgtcaacagcctgaatttcattatcaaagagctgaccaagcgacacaacttgttgagaaacgaagtgcaaggaagagacgatgcactggaaagacgcataaacgaatacgcactggaaatggaagacggccttaataagactatgaccattataaacaatgccatcgacttcattcaggacaattacgctctgaaagaaaccttgtctacgataaaggacaacagcgagattcatcacaagtgtacttccgacatggagactatccttacattcataccgcagtttcatagactgaacgattccatccaaacgctagttaacgataatcagcgatacaatttcgtgttgcaagtagcaaagactctggccggcatcccgcgcgacgaaaaattgaaccagagcaatttccaaaagatgtaccagatgtttaatgagacaacttctcaagttcgcaaatatcaacagaacatgtcccacctagaggagaagctacttttaactacaaagatttctaaaaatttcgaaacgcggttgcaggacattgagtcaaaagttactcagaccctcataccatactacatttccgtgaagaaaggctccgtagtaaccaacgagcgagaccaggccttacaactccaggtcctcaactctcgtttcaaggcactcgaagccaaatccatccatttgtccataaacttttttagtcttaataagactctccacgaggttctcaccatgtgtcacaatgcctctactagcgtcagtgaattaaacgcaaccattcctaagtggataaagcattccctccccgacattcaactcctgcaaaaaggtctgacagaattcgtcgaaccaatcatccagataaagacacaagccgcacttagtaacttaacatgctgtatcgatagatcactcccggggtcactggctaacgtcgtgaaatcccaaaagcaggttaagtccctcccaaagaagatcaatgctcttaaaaaacctacagttaatctcacaaccgtgctgataggtcgtacacaaagaaataccgacaatatcatatacccagaagaatattcttcctgcagccgacacccgtgccaaaacggaggcacctgtattaacggcagaacttccttcacatgtgcttgtcgccatccttttacaggagataattgcacaataaagctggtagaagagaacgcacttgccccagatttctccaagggatcctatagatatgcgcctatggtcgccttctttgcctctcatacctacggaatgacaatcccaggaccaatcctctttaataaccttgatgtcaactatggggcatcctatacaccacggacaggtaagtttcgcattccctacctaggcgtctatgttttcaagtatacgatagagtcatttagcgctcacatatccggatttttagtcgtggatggcatcgacaaactcgcgtttgaatccgagaatataaattctgaaattcactgcgatcgcgttctgacgggagacgccctgctagaacttaattacggccaggaagtttggctgaggctcgcaaaaggcaccattcctgcaaaattcccccccgtcactactttttcagggtacctattatacagaacctag

SEQ ID NO: 14313 - RNA, 1596 nt, synthetic construct
  misc_feature 1..1596: note = source = /note="Description of Artificial Sequence: Synthetic coding sequence"
  source 1..1596: mol_type = other RNA
atgaagggggcacgattatttgtactgctcagcagtctatggtcaggcggaataggccttaataacagcaaacattcttggactatcccagaggacgggaactcccagaagaccatgccatccgcttccgtcccacccaacaagattcagtccctccaaatccttccgaccactcgtgtcatgtctgctgaaatcgcaacaacacctgaaaaagctgaaggggtcgtaaagctgcagaacctgaccctgccaacaaacgcgtccatcaaattcaaccctggagccgaaagcgttgtcctcagcaattccacacttaaattccttcagtcttttgctaggaagagcaacgaacaagccacaagtctgaacacagtaggcggtaccgggggaattggcggggtgggcggaacaggcggcgtgggaaatcgggcccccagggagacatacctttcccgtggtgacagctccagctcacagcgaacagattatcagaaatctaattttgaaactacccgtggcaagaactggtgtgcttatgttcacactcgactctcacccactgtgatccttgataatcaagtaacctacgtccccggaggtaaagggccctgtgggtggacaggaggaagttgccctcagagaagccagaaaattagcaaccccgtctacaggatgcagcataaaatcgtgacctccctagactggaggtgctgcccaggatattctggccccaaatgtcagctgcgggcacaagaacagcagagtttgatccacactaaccaggcagagtcccacacagcagtaggcaggggcgtggcagaacagcaacagcagcaggggtgcggggatcccgaagtgatgcagaaaatgaccgaccaggtgaactaccaagccatgaaactgactctgttacagaaaaaaattgataacatatcgctcaccgtcaatgacgtaagaaatacttactcctctctggaagggaaggtcagcgaagataagtctagggagttccagtctctgctgaaggaggaatattctagctgctcacgccacccttgccagaacggcggcacgtgtatcaatggcagaacctcgtttacttgtgcgtgtagacacccctttaccggcgacaactgtacgataaagttagtggaggaaaacgctttggcaccagattttagcaaaggatcatataggtatgcccctatggtcgccttctttgcatctcatacctacggaatgacgatccctggacctatcctgttcaataacctggacgtaaactacggtgccagttacacaccaaggacaggaaaatttaggattccttatctgggagtttacgttttcaaatacaccatcgagagcttctcagcccatatatctggtttcctggtcgttgacggcatagataagctagcattcgaatctgagaatatcaactctgaaatccattgcgatcgagtcttaacaggagatgctctccttgaacttaactatggacaggaggtctggctccggctggctaagggcaccattcctgctaagttccccccagtgaccaccttcagcggctatctcctttatagaacctag

SEQ ID NO: 14314 - RNA, 942 nt, synthetic construct
  misc_feature 1..942: note = source = /note="Description of Artificial Sequence: Synthetic coding sequence"
  source 1..942: mol_type = other RNA
atgtccgacttactgctcttaggattaattggaggcttgactctattgttgctgctgacactgcttgccttcgctggatacagcggcctgcttgccggggtagaggtttctgctggttctccccccatccggaacgtcaccgtagcttacaaattccacatggggctatatggggagacaggccgcctgtttaccgaatcttgttcaatttcacccaaactcaggtctattgctgtgtactacgacaacccacacatggtcccaccagataaatgccgctgcgccgttggatccattctgtcagagggagaggagagtccctctcctgagttaatcgacctgtatcaaaagttcggttttaaagtgttttcgttcccggccccctctcacgtcgtgaccgccacctttccatacacaactatcctgtccatctggttagcaacgaggagagttcaccccgctctagatacttatattaaagaaagaaagctttgcgcctatccgcgcctagagatctatcaggaagaccagattcacttcatgtgtcctctagctagacaaggagacttttacgtccccgagatgaaagagactgaatggaagtggagggggctcgtcgaggctatagacactcaagtggacggaaccggagcagacactatgtccgacactagcagcgtttcactggaagtatcacctggatcacgggagactagcgccgccaccctatcacctggtgcatcttccaggggctgggacgacggagatacacggagtgaacactcttattcagaatcaggtgcctctggctcgtctttcgaggaattagatctggagggtgagggacccctgggtgaaagtcgtctggatcctggtactgaaccattgggcactactaagtggctgtgggaaccaactgcaccagagaaaggaaaggagtag

SEQ ID NO: 14315 - RNA, 834 nt, synthetic construct
  misc_feature 1..834: note = source = /note="Description of Artificial Sequence: Synthetic coding sequence"
  source 1..834: mol_type = other RNA
atgtgcacagtcgtggaccccaggattgtccggcgatatctgctgagaagacagttgggacaaggagcatacggcatagtgtggaaagccgttgacaggcgaaccggagaggttgtggcgataaagaagatttttgatgctttccgcgataaaactgatgcgcaacgaacctttagagaaattactttgctgcaagaattcggagaccaccctaatatcatcagcctgctggacgttattcgggccgagaacgaccgggatatttatctagtctttgagttcatgggttgtccgccttcccctcccccccccaccgccgtccggaccctctcagctgacaccgatctgaacgctgtcattaggaaaggaggcctccttcaagacgttcacgttcgctctattttctaccaacttctacgtgccactagattcctccattccggtcacgtggttcatagggaccagaagccaagcaatgttctgcttgacgcaaactgcactgtgaaattgtgtgattttggcctcgcccgatcactcggcgatcttcccgaagggccggaggatcaagccgtgacagagtatgtggccactagatggtatcgggcccccgaagtcctgctgagcagccacagatacacgctgggagtggatatgtggtccctgggatgtatactcggagagatgctccgtggaagacccctgtttcctgggacctctaccttacatcagctagagctaattctagaaactatcccaccaccctctgaagaagatttgcttgcccttggtagcggctgccgagcctcggtgctccaccaactgggctctcgatag

SEQ ID NO: 14316 - RNA, 765 nt, synthetic construct
  misc_feature 1..765: note = source = /note="Description of Artificial Sequence: Synthetic coding sequence"
  source 1..765: mol_type = other RNA
atgtgcacggtcgtggacccgcggattgtacgccgatacttgctgagacgccagctcggccaaggcgcttacggaatcgtttggaaagcggttgatagaaggacaggagaggttgtggccattaagaagattttcgacgcgtttagagataagacagatgctcagcgaacatttagagagatcacattgctccaggagttcggcgatcaccccaacatcatcagcttactagacgtcattagggcagaaaatgatcgggatatttatttagtatttgagtttatggacactgaccttaacgctgttatcagaaaggggggcctgttacaggacgtgcacgtcagatccattttctatcagctgctgcgagcaacacgatttttgcattccggtcatgtggtgcaccgtgaccagaaaccttccaacgtactgctggacgccaattgtaccgtcaaattatgcgactttggcttagcccgctccctgggcgacctgccagaaggacccgaggatcaggcagtgaccgagtatgtcgcaaccagatggtatcgagcccccgaggtgctgctctcatcccaccgctacacactgggcgttgacatgtggagcctaggatgcatcctcggcgaaatgctccgcggacgaccactctttcctggtacttcgacgctacatcaactggaattaatcttggagaccatcccacccccctctgaggaaggcgcccagacagcttgcaggtccggaacaggggccagcacttag

SEQ ID NO: 14317 - RNA, 474 nt, synthetic construct
  misc_feature 1..474: note = source = /note="Description of Artificial Sequence: Synthetic coding sequence"
  source 1..474: mol_type = other RNA
atggccctgctgctttgtctggtttgcttgaccgccgccctggctcacggatgcttacattgtcacagtaacttctccaaaaagttctccttttatcggcatcacgtaaactttaagagttggtgggtaggcgacatcccagtttccggcgctctgctgaccgactggtctgacgatactatgaaggaattacacctggctatccctgcaaaaattacacgggaaaagctggatcaggttgccaccgccgtgtaccagatgatggatcaactgtatcagggaaagatgtactttccaggatacttccccaatgaactgagaaacatcttccgagaacaggtgcatctgatccagaatgcaatcattgaaagacatctagctcccggcagttggggcggaggtcaactgtctagagaaggtccatccctggcaccagaaggatccatgccctccccacggggagacctcccatag

SEQ ID NO: 14318 - RNA, 699 nt, synthetic construct
  misc_feature 1..699: note = source = /note="Description of Artificial Sequence: Synthetic coding sequence"
  source 1..699: mol_type = other RNA
atggctctcctattgtgtctggtgtgcttaaccgctgccctcgctcacggctgtcttcattgtcacagcaattttagtaagaaattttcattctatagacaccacgtgaactttaagtcttggtgggtgggagacatacccgtgtctggagccctactgacagactggtctgatgacaccatgaaggagctgcatctggctattccagcgaagataacccgcgagaaactggatcaagtcgcgaccgctgtgtatcagatgatggaccagctttaccaaggtaagatgtactttcccggctactttccaaacgaactgagaaacatttttcgcgagcaagtccatctcatacagaacgctatcattgaaagccgcatagactgccaacataggtgcggcatattccaatatgagaccatttcctgcaacaattgcactgattcacatgtcgcatgcttcggatataactgcgaatcatcagctcagtggaaatcggcggtgcaaggattactgaattatattaataattggcataaacaggacactagtatgagaccccgctcttccgctttctcctggccaggcactcaccgagctactcccgctttcctggtgtcaccggctctaaggtgcttagaacctccccatcttgccaatcttaccctagaggatgcagccgaatgcttgaaacaacattag

SEQ ID NO: 14319 - RNA, 396 nt, synthetic construct
  misc_feature 1..396: note = source = /note="Description of Artificial Sequence: Synthetic coding sequence"
  source 1..396: mol_type = other RNA
atgggaggtgatggccgatacgttttgaacggacactgggtcgtttccccacctggaacttacgaagctgccggcacccacgtggtctacactagggacacgggcccccaggagacgctgcaggctgctggtcctacctcacatgatttactccttcaggtcctgcttcaggaaccgaatcccggaatcgaatttgaattttggttgccacgagagagatatagcccattccaagcccgggtgcaggctctgggatggcccctgcgacaacctcagccacgcggagtagaaccccagccccccgccgctccagccgttacgcccgcccaaacccccaccttagcacccggcccaagtgccggccccccaccacctggcccaggagaccccttatag

SEQ ID NO: 14320 - RNA, 447 nt, synthetic construct
  misc_feature 1..447: note = source = /note="Description of Artificial Sequence: Synthetic coding sequence"
  source 1..447: mol_type = other RNA
atggccaggatcccaactgccgccctaggttgtatatcactcctctgcctgcagctgcctgggtctctgtctcgctctctcggcggcgacccccgtccggtaaagccacgcgaacctccagccaggtccccttcttcatctctccagccccgacatcccgcaccccgacccgtggtgtggaaattgcacagagccctccaagctcagcgaggagccggccttgcccctgttatgggccagccactccgcgatggcggacgacaacactcagggccccgtagacattctggaccgcgacgaacacaagcacagctcctgagggtgggttgcgttttgggtacttgccaggtgcagaatttatcccatcgactgtggcaactaatgggtcctgctggccgccaagattccgctcctgtcgatccttccagcccacatagttacggctag

SEQ ID NO: 14321 - RNA, 447 nt, synthetic construct
  misc_feature 1..447: note = source = /note="Description of Artificial Sequence: Synthetic coding sequence"
  source 1..447: mol_type = other RNA
atggcgcggatcccaactgccgcactggggtgtatttccctcctctgcctccaactccccggttctctttccagaagtttagggggggacccccgaccagtgaagcctcgcgagcctccggcacgctcaccctcctcatcgcttcagcctagacatcccgcccccagacccgttgtctggaaactccacagagccctgcaggcccagcgaggcgccggactcgcacccgtcatgggtcagcctttacgagacggtggtaggcagcattccgggccccgacgacatagtggcccccgcagaacacaggcacagttactaagagtgggttgtgtgctcggaacatgtcaggtgcaaaacttaagccacaggttatggcaactcatggggcctgccggccgtcaagactctgctcccgtagacccctcctccccccattcttatggatag

SEQ ID NO: 14322 - RNA, 537 nt, synthetic construct
  misc_feature 1..537: note = source = /note="Description of Artificial Sequence: Synthetic coding sequence"
  source 1..537: mol_type = other RNA
atggatcgggccgccaggtgcagtggcgcgtcttctctgcccttactccttgctctcgcattgggactggtgattctccattgtgtcgtcgcagacggaaatagtacccgttctccagagacaaacggactcttatgtggtgaccctgaagaaaactgtgccgccacaactacacagtctaaaaggaagggccattttagtcgctgtcccaaacagtataagcactattgcataaaaggccgttgcagatttgtagtggcagaacagacgccttcttgcgtgtgcgatgaggggtacattggagcccggtgtgagagagtggacctcttttacttgcgaggtgatcgtggacaaattctggtgatttgtctcatcgctgtaatggtggtttttataatactcgtaatcggagtttgtacctgttgtcatcctttacgaaagcgccgcaaaagaaaaaagaaagaggaggaaatggaaactttagggaaagacattactccaattaatgaggacatcgaagaaacaaacattgcttag

SEQ ID NO: 14323 - RNA, 1251 nt, synthetic construct
  misc_feature 1..1251: note = source = /note="Description of Artificial Sequence: Synthetic coding sequence"
  source 1..1251: mol_type = other RNA
atgagcatcagcctgagctctctgatcctgcttcctatctggatcaacatggcccaaatccagcaagggggtcccgacgaaaaggaaaaaactaccgcattgaaagatctgctgtcccgcatcgatcttgatgaactgatgaagaaagatgaaccccctcttgactttccagataccttagagggctttgagtatgcgtttaacgaaaaagggcaattgcgacacattaagaccggcgagccgtttgtattcaactatagagaggatctgcacagatggaaccagaagagatatgaggccctcggcgaaattatcacgaaatacgtgtacgagcttcttgaaaaggattgcaatcttaaaaaagtctctattccggtggacgcaactgaatccgagccaaaatcatttatattcatgagcgaggacgcgctgacgaaccctcagaaacttatggtgctcattcacgggagcggagttgttagagcgggtcaatgggcacggaggctaatcatcaacgaagatctggatagtggcacccagattccatttatcaaacgcgctgtggccgaaggatatggtgtaattgtgctaaatcctaacgaaaattacatcgaagtagagaagccaaaaattcacgtgcagtctagtagcgattcaagcgacgaaccagctgaaaaacgggagcggaaagacaaagtgtcaaaagagaccaaaaaacgcagggatttctacgaaaaataccgcaacccacaacgcgagaaagagatgatgcagttatacatcagagagaatggatcaccggaggaacacgccatatatgtctgggaccactttatagctcaagccgccgcagagaacgtgtttttcgtggctcatagttacggtggactcgcatttgtggaactcatgattcagagagaagccgacgtcaaaaataaagtaaccgctgtggccctcaccgattctgtacataatgtgtggcatcaggaagccggcaagacgatcagagaatggatgcgtgagaactgctgtaactgggtgtcatcttcagaaccgctggacactagtgtggaatctatgctccctgattgcccccgggtctcagcaggaaccgaccgacatgagctgacatcatggaaaagtttcccttctatattcaaattctttacggaagcctcagaagccaagacatctagccttaaaccagcggtaacaagaaggtctcacagaatcaagcatgaagaactctag

SEQ ID NO: 14324 - RNA, 840 nt, synthetic construct
  misc_feature 1..840: note = source = /note="Description of Artificial Sequence: Synthetic coding sequence"
  source 1..840: mol_type = other RNA
atgaaaattattatcctgttgggcttccttggagccacactgtccgcccctctcatcccacaacgtttgatgagtgcttccaactcaaatgaactgttacttaatctcaacaacggccagttgttgccccttcagctgcaggggcccctgaactcctggattccccctttcagcggtattctgcaacaacagcaacaagcccagattcccggcctgtctcaatttagcttgagtgcccttgaccaattcgctggactacttcctaaccagatcccactcaccggcgaggccagctttgcacaaggagcgcaagcaggccaagtggatcccctccagcttcagactcctcctcaaactcagcccggaccctctcacgttatgccttacgttttttcattcaagatgccccaggagcaaggacagatgttccagtattatcctgtgtatatggtccttccatgggaacaaccacagcagacggttccacgtagccctcagcagaccagacaacagcagtacgaagagcagatccccttctatgcccaattcggctatattccccagctcgcggagccggccatcagcggtgggcagcaacaacttgcattcgacccacagttgggcactgcccctgagatcgccgtaatgagcaccggagaagaaatcccatacttacagaaagaagctattaactttcggcatgactcagccggagtgtttatgccaagcacttcaccaaagccatcaaccacaaatgtgtttacctccgctgttgaccagaccataacacccgagttgccagaagaaaaggataagacagatagtttgagagaaccatag

SEQ ID NO: 14325 - RNA, 444 nt, synthetic construct
  misc_feature 1..444: note = source = /note="Description of Artificial Sequence: Synthetic coding sequence"
  source 1..444: mol_type = other RNA
atgggccctgaagcactctcgtctctgctcttattattactggtggcttctggcgatgctgatatgaagggccacttcgatcccgccaaatgtaggtatgcactgggaatgcaggaccgtaccatcccagactccgatatttcggcctctagtagttggtcagattcgactgccgctagacattctaggctagagtcttcagatggggacggggcatggtgtcccgccggcagtgtgtttcccaaggaagaagagtatttacaggtggatttacagagactgcacttagtagcattggtcggcacacaaggcagacacgcaggagggctgggaaaggaattttctcgatcgtacaggctccgatactctagggacggcaggcggtggatgggatggaaggaccggtgggggcaggaagtgatctcaggcaatgaggatccatag

SEQ ID NO: 14326 - RNA, 618 nt, synthetic construct
  misc_feature 1..618: note = source = /note="Description of Artificial Sequence: Synthetic coding sequence"
  source 1..618: mol_type = other RNA
atgggagggcctgtgcgggagcctgctctatctgtagctttgtggctctcttggggcgctgcgttaggcgctgtggcttgtgcgatggcccttctgacccaacaaacagaactgcagtccttgcgaagagaagtgtcccgcttacagggtaccggaggaccaagtcagaacggggaaggctacccctggcagtccttgcccgaacagcactcagtgttacatcttgtgcccattaatgctacaagtaaagatgattccgatgtcactgaggtaatgtggcagcccgctctaaggaggggccgcgggttgcaggcgcagggctacggcgttagaattcaagacgctggagtttacctcctgtattcccaggttctcttccaggacgtcaccttcacaatggggcaagtcgtgtccagagaaggtcaagggcggcaagagacgttgttcagatgtattcggtcaatgccatcccacccagaccgagcctacaatagctgttactccgccggcgtgttccatctgcaccagggcgacattttgtcagttatcatcccacgagctcgtgccaaattgaacctctcacctcacgggacatttctggggtttgtaaagttgtag

SEQ ID NO: 14327 - RNA, 744 nt, synthetic construct
  misc_feature 1..744: note = source = /note="Description of Artificial Sequence: Synthetic coding sequence"
  source 1..744: mol_type = other RNA
atgcctgcctctagcccattcctacttgctccaaaaggacctcccgggaacatgggtgggccagtgcgcgaacctgcattgagtgtagcgctttggctttcctggggagccgccttgggggccgtggcatgcgcaatggccttactaactcaacaaacagagctccagagtctgcgaagagaggtgagtcggctacagggaactggcgggccctcacagaacggagagggctatccctggcaatccttacccgagcagagcagcgacgctctcgaagcctgggagaacggtgaaagatctcggaaaagacgggctgtgttaacacagaaacagaagaaacagcattcagttctgcacctcgtaccaattaacgccaccagtaaggatgacagtgacgtaaccgaagtgatgtggcaacccgcgctgagaagaggtagaggattacaggcccagggatatggcgtaagaattcaggacgctggagtgtaccttttatactctcaagtcctatttcaggacgtgaccttcacaatgggacaggttgtctcaagggagggtcagggtagacaggagacacttttcagatgtatccggagcatgccatcacacccagaccgggcttacaactcatgttacagcgcaggcgtctttcacctacaccaaggagatattctatccgtcatcatcccacgcgcaagggcaaaattgaacttgtccccgcacggaaccttcttagggctctag

SEQ ID NO: 14328 - RNA, 39 nt, synthetic construct; identical to SEQ ID NO: 12689
  misc_feature 1..39: note = source = /note="Description of Artificial Sequence: Synthetic coding sequence"
  source 1..39: mol_type = other RNA

SEQ ID NO: 14329 - RNA, 4266 nt, synthetic construct
  misc_feature 1..4266: note = source = /note="Description of Artificial Sequence: Synthetic coding sequence"
  source 1..4266: mol_type = other RNA
atgatgctcccccagaactcctggcatatcgattttggaagatgttgctgccaccagaacctgttttctgccgtggtgacttgcatcctgcttctgaactcatgtttcttaatatcttcttttaacggaactgaccttgagttacgcctcgtcaacggagatggcccttgtagtgggactgttgaagtgaagttccagggacagtggggaactgtgtgcgatgatgggtggaacaccacagctagtaccgtggtctgtaaacaactcggttgccccttttctttcgcaatgttcagattcggccaagctgtaacccggcatggcaaaatatggttggatgacgtgtcatgttacggcaatgaaagtgcactgtgggagtgccaacatagggaatgggggtcccataattgctaccacggagaagatgttggggtgaactgctatggagaggccaatctgggcttgagactggtggatggaaataacagctgtagcggaagggtggaggtcaagtttcaagaacgttggggtactatttgtgatgacgggtggaacctgaatacagctgctgtggtatgtagacagctgggttgcccgagtagctttattagttcaggagtcgtcaactcccctgccgtattaaggccaatttggctcgacgacatcctatgtcaaggaaacgagttagcactctggaactgcagacataggggttgggggaatcacgattgctctcataatgaagacgtgacactcacttgctacgattcctccgacctggagttacgcttagtgggcggcacaaatcggtgcatggggcgggtagagttaaaaatacagggaagatggggaactgtgtgtcatcacaagtggaataatgccgctgccgacgtggtttgcaagcagctaggctgtgggaccgcacttcactttgctggcttaccccatctccagtccggttccgacgtcgtttggctggacggggtgtcctgtagtggaaacgagagctttctgtgggactgtcggcactcagggacagtgaattttgactgcttgcaccagaatgacgtgagcgtgatttgcagcgacggcgcagacttagagctccgcctcgccgatggatctaataactgttcaggacgagtggaagtgagaatccatgaacaatggtggactatatgtgatcagaactggaaaaacgaacaggcactagtcgtttgcaagcagcttggatgtcccttttcggttttcggctctcgacgagccaaaccctcaaacgaagcacgagatatctggatcaatagcatttcatgtacgggaaacgaatcagctctgtgggattgcacctacgacggtaaggctaagagaacttgttttagacgatctgacgcaggtgttatttgctccgataaagccgacttggatttgaggcttgtaggcgcacactcaccctgctatggtcggctggaggtgaagtaccagggcgaatggggcacagtctgtcatgataggtggagcactaggaatgccgcagtggtgtgcaagcagctgggttgtgggaagccgttacacgtctttggaatgacttactttaaggaagccagcgggcccatctggctagatgacgttagctgtattgggaatgagtcaaatatctgggactgcgagcacagtgggtggggcaagcacaactgtgttcatagggaagatgtgatcgtcacatgctcaggcgatgcaacgtggggcttaaggttggtgggcgggtctaatagatgctctggtcgacttgaggtgtatttccaaggtaggtggggaacagtgtgcgacgacggttggaactcaaaggcagcagctgtggtatgctcacaactggattgtcctagttcaattatcgggatgggtctggggaacgcaagcactggttatggcaagatatggctggatgatgtgtcttgcgacggcgacgagtcagatctttggagctgcaggaactctggctgggggaacaacgattgcagccacagtgaggatgtcggcgtcatctgttccgacgcttctgacatggaactaaggctggtgggcgggtcgtctcgttgtgcaggtaaggtggaagtcaatgtgcagggcgcggtggggatcctgtgcgccaacggttgggggatgaacatcgctgaggtcgtgtgccggcaactcgaatgtggatcggctattagggtgtctagagaaccacacttcaccgaacggacattacatatcctgatgtctaatagtgggtgtaccggaggagaagcatcgttgtgggactgtatccgatgggagtggaagcaaacagcgtgtcatctgaatatggaagcatccctaatctgctcggcacatcggcagccaagattggttggagctgatatgccttgttcaggtcgcgtggaagtcaagcacgccgatacgtggaggtcggtatgcgactctgatttctcccttcacgcagcaaatgttttgtgccgcgaactcaactgcggtgacgctatctctctttcagtcggcgatcattttggcaagggaaatggactcacttgggctgagaagttccaatgcgagggtagcgagacgcacctggccttgtgcccaattgtacagcacccagaagatacctgcatacattcacgcgaggttggagttgtttgctctcgttacacggacgtgcgcctagttaatgggaaaagccagtgcgacggtcaggtcgaaattaatgtgctgggacattggggttctctgtgcgatacacattgggaccctgaagatgcaagagttctgtgtagacagctctcatgtggaactgcactttccaccaccggggggaaatatatcggggaaagatcagtcagggtttggggtcaccgcttccactgcctcggcaacgaaagcctcttggacaattgccagatgaccgtcctcggggcacccccctgtatacatgggaacactgtgtcagtgatttgcacgggaagtctaacccagcccctattcccttgcttagctaacgtcagcgatccgtacctgtcagccgtgccagaagggtcggcacttatatgtctcgaagacaagaggcttcgtttagtggatggagatagcaggtgtgccggtcgagtcgaaatctaccatgacggtttctgggggaccatctgcgatgacggatgggatctctctgacgctcatgtggtgtgccagaaactcgggtgtggcgtcgccttcaacgcaacagtgtcagcccactttggggagggatccggccccatttggcttgatgatctaaactgcacaggaatggaaagccacctatggcagtgcccctcacgaggttgggggcagcatgactgcaggcacaaagaagatgcaggcgtcatttgctctgaatttactgccttaaggctctattctgagaccgaaaccgaatcgtgcgctggaagattggaagtgttctataatggaacctggggatcagtagggagaaggaatattacaaccgcaatagcaggaatagtctgtagacaactggggtgcggggaaaatggcgtggtatccctggcaccactgtcgaaaactggaagcgggttcatgtgggttgatgacatccaatgccccaagactcacatttctatctggcaatgcctgagcgcaccttgggaaagaaggattagttccccagcagaggagacctggataacttgcgaagacaggatccgcgtaagagggggtgataccgaatgctctggaagagtcgagatatggcacgcaggctcctggggaaccgtatgtgacgattcatgggatctagccgaagccgaagtggtgtgtcagcagctgggatgtggtagcgccctcgccgcgctgcgagacgccagtttcggtcaaggcacaggcaccatttggctggatgatatgagatgtaaaggcaacgaaagctttttgtgggattgccacgcaaaaccatggggacagtccgattgtggacacaaagaagatgctggcgttaggtgcagtggacagagtctcaagagtcttaatgcatcttctggacatcttgctctcatcctctctagcatttttggtttactcctcctcgtactgtttatactatttctaacctggtgcagagttcaaaagcagaaacacctccctttaagggatgacacacccaatcacggatgcgaagacgcctcggatacatctttgctgggagtattgcccgcctcagaagctacaaaatag

SEQ ID NO: 14330 - RNA, 1410 nt, synthetic construct
  misc_feature 1..1410: note = source = /note="Description of Artificial Sequence: Synthetic coding sequence"
  source 1..1410: mol_type = other RNA
atgatcaccgagggggcccaagcacccagactcctcttgccaccacttttgctcttactcaccctgcctgcaaccggctccgacccagtcttgtgctttactcagtacgaagaatcctctggtaagtgtaaagggttactcggcggtggcgtgtcagttgaggattgctgtctcaatactgcatttgcgtaccagaaacgaagtggagggctctgtcagccctgccgctccccccgctggtcactttggtctacctgggcaccttgttccgtcacatgttctgaaggctctcagctccggtacaggagatgtgtaggttggaatggccaatgctctggaaaagtggcgcctgggacgttggaatggcagctgcaggcatgcgaggatcaacagtgctgtcctgaaatgggaggctggagtggttggggaccctgggagccctgcagcgtgacctgtagtaaggggacgcgcaccagacgacgcgcctgtaaccaccccgcaccaaaatgcggtggacattgccctggacaagctcaagagtcagaggcatgcgacacgcagcaggtttgccccacacatggagcttgggcaacatggggcccatggaccccttgttctgcatcctgtcacggagggccccatgaaccaaaggaaacacgctcaagaaaatgctctgcacctgagccgagccaaaaaccgcctggcaaaccctgccccggactggcctatgaacagcgccggtgtacaggtttacctccctgccccgtggctggcggatgggggccctgggggcctgtgtctccctgtccagtgacatgcggtctaggccagacaatggagcagagaacatgtaatcaccctgtcccgcaacatggtggcccgttttgcgccggagacgctacccgtacccatatttgcaacactgccgttccttgccccgtggacggcgaatgggactcttggggtgagtggtcaccctgcatccggagaaatatgaagagcatcagttgccaagaaattcccggccaacagagccgtggaaggacttgcagagggcggaaatttgatggacataggtgcgctggtcagcagcaagatataagacactgttactcaattcagcactgccccctgaagggttcctggagtgagtggagtacttgggggctttgtatgccaccatgtggtccaaacccaacccgagcccgccagagactgtgtacccctctccttccaaaatatcccccaactgtgtctatggttgaaggacagggggagaaaaacgtgacgttttggggacgccctctcccccgctgtgaagagctccagggccagaagttagttgtggaagaaaagcgcccttgtttacatgtccccgcctgcaaggatcccgaagaagaagagttgtag

SEQ ID NO: 14331 - RNA, 837 nt, synthetic construct
  misc_feature 1..837: note = source = /note="Description of Artificial Sequence: Synthetic coding sequence"
  source 1..837: mol_type = other RNA
atgcaatggctccgcgttagagagtcacccggtgaagctactggccatagggtaactatgggcactgcggcgctgggaccggtgtgggctgcattacttctatttctgttaatgtgtgagattccaatggtcgagctgacttttgacagagccgttgcctcaggatgccaacgatgttgtgactctgaggacccactcgatccggcacacgtatcaagcgccagctcctcgggtcgtccccatgctcttcccgaaataagaccctacatcaatatcactatcctcaaaggcgacaagggggaccccggtccgatgggattgcccggctacatgggcagagagggaccccagggggagcctggaccacagggaagtaagggggataaaggggagatggggtcaccaggcgctccgtgtcagaaacgcttctttgctttctcggtgggaagaaagaccgctttacactcaggggaggattttcaaacacttcttttcgaaagagtctttgtgaatctcgatgggtgtttcgacatggcaaccggacagtttgccgcccccctcagagggatctactttttcagtctaaacgtgcatagctggaactataaagagacctatgttcacatcatgcacaatcaaaaagaagcggtgattctctatgcgcagccttcagaacgctccattatgcagtcccagtcagtgatgctagacttagcctatggcgacagggtgtgggtacggttgttcaaaagacagcgagagaatgcaatctattcaaacgacttcgacacgtatatcacattcagcggacacctcataaaagcggaggacgattag

SEQ ID NO: 14332 - RNA, 1128 nt, synthetic construct
  misc_feature 1..1128: note = source = /note="Description of Artificial Sequence: Synthetic coding sequence"
  source 1..1128: mol_type = other RNA
atggagttcgaaatcacctttaggcccgactctggggatggcgtcctgctgtacagctacgacacaggctccaaggatttcctcagtatcaacttggccggagggcacgtagaatttcggtttgactgtgggtcaggaactggagtgttaagatccgaagaccccctcacattgggaaattggcacgaactcagggtctccagaactgcaaaaaatggtatcttgcaagttgataagcagaaaatcgttgaaggcatggcagaaggaggttttacccaaataaagtgcaatacagacatatttatcggaggtgttcccaactatgacgacgtcaaaaagaatagcggtgtcttaaaacccttcagcgggtcgatacagaaaatcatcctgaacgacagaacaattcacgttaaacacgacttcacttcgggcgtgaacgtcgagaatgcagctcacccctgcgtccgtgctccatgcgcccatggaggatcttgccggccccgcaaagaaggctatgattgtgactgtccactgggctttgagggtctgcattgtcagaaggccattatcgaagcaatagaaattccccaatttataggacggtcttacctgacatatgataatcccgatatcctgaaaagagtgtcaggttcccggagtaacgtatttatgcgttttaagactacggcaaaggacgggttgcttttgtggagaggtgattcccccatgcgtcctaattccgactttatctcactggggctcagagacggggcactggttttctcctataacttgggctctggagtagccagcataatggtgaatgggtcttttaatgacggtaggtggcatcgagtgaaagcagtgcgcgatgggcaaagcgggaaaattactgtcgatgattacggtgctcggacaggaaagtcacctggcatgatgcgacagcttaatatcaatggagccttgtacgtggggggcatgaaggagattgcactgcacacaaatagacagtacatgcgggggcttgtaggatgtatttcccactttactctctccacagactaccacatatcattggtggaggacgcagtggatggcaaaaatattaatacttgtggcgctaagtag

SEQ ID NO: 14333 - RNA, 459 nt, synthetic construct; identical to SEQ ID NO: 12694
  misc_feature 1..459: note = source = /note="Description of Artificial Sequence: Synthetic coding sequence"
  source 1..459: mol_type = other RNA

SEQ ID NO: 14334 - RNA, 1050 nt, synthetic construct
  misc_feature 1..1050: note = source = /note="Description of Artificial Sequence: Synthetic coding sequence"
  source 1..1050: mol_type = other RNA
atgacggccttacccggccccctgtggctacttggccttgctctgtgtgctttgggtggcggtggaccgggcctccgccccccaccagggtgcccacaaaggcgactgggcgccagagaacgacgagatgtacaacgcgaaatcctggccgtgttaggtctacctggtagaccccgccctagagcgccaccagctgctagcaggctgccggcctccgcccctttatttatgctcgacttgtatcacgcaatggcaggtgacgacgacgaggatggcgcaccagctgagaggcgccttggtagagccgacttagttatgagtttcgttaatatggttgaacgagatagggctctgggtcatcaggagcctcattggaaagaatttagattcgaccttactcagatccctgccggggaggcagtgaccgcagccgaatttagaatttacaaggtaccatctatccatctcttaaatagaacactgcacgtaagcatgtttcaagtcgttcaggagcagagcaatcgcgagtctgatctcttctttctggatttacagacactgcgggctggagacgagggatggctcgtcctggacgtaacggcagcaagcgactgctggctcctgaaaagacataaagatctcggattgcggttgtacgtcgaaacagaagacggggaaacttggaccggctgggggtggacaaaagattctagactccaaatgtggaagctccgtctgtctagaaccccatgggtcctcagtctgcatgctcccggccccgcacaggcccccgctgagcgccctctgctgtgtctcctccagggccactgcccagcttctccttcccccatcagaactcctagggccgtgagacctcttagaagaagacagcccaaaaagtcgaatgaactgcctcaagccaatagactccccgggatttttgacgatgtccatggttcacacggccgccaggtctgtagacgtcacgaattatatgtcagttttcaggacctcggctggttggttattgctgactcctcatgcttctag

SEQ ID NO: 14335 - RNA, 1617 nt, synthetic construct
  misc_feature 1..1617: note = source = /note="Description of Artificial Sequence: Synthetic coding sequence"
  source 1..1617: mol_type = other RNA
atgagcttttctgcgaccatcctgttttccccccctagcggctccgaagctaggtgttgttgctgcgcctgtaaatccgagaccaacggaggcaacaccggatcacaaggaggaaaccccccgccctccacacccatcactgtcactggacatggcctagccgtgcagtcatcagaacagcttctgcacgtcatctatcagcgggtcgataaggctgtgggattggccgaggctgccttaggcctcgctagagctaataatgagcttctgaagcgcctgcaggaggaggttggcgacctcaggcaagggaaagtgagcatccccgacgaggatggggagtcgcgcgcacactccagcccaccagaagaacccggccccctgaaggagagtccaggtgaggcattcaaagccctctctgcagtcgaagaggagtgcgattcagtcggtagtggagtgcaagtcgtaatcgaagagctacggcagctgggcgctgcgtctgtgggcccaggtcctctaggatttccagccacacaaagagatatgcgattaccgggatgcaccctcgcagcaagcgaagccgccccactcctgaaccctctagtggacgactacgtcgcaagcgaaggagcagtccaacgggtccttgtccccgcctacgccaaacagctctctccagcgacccagcttgccatccagcgggccacaccagagaccgggccagaaaacggaactaagttaccaccgcccagacctgaagacatgctgaacgccgcagctgcactggattctgctctggaggaaagtggaccagggtctacaggagaactcaggcacagcctgggtctgacagttagcccttgccgaacacgggggtctggtcaaaagaactctagaaggaaacgtgacctggtactctccaaacttgttcacaatgtccataatcatattactaatgacaagcggtttaatggcagcgaatccatcaaatccagctggaatatttccgttgtcaaatttcttctggagaagctgaaacaggaactggttacatcaccccataactacacagacaaggagctgaagggcgcctgtgtagcctactttcttactaagagacgagaatacagaaattctctaaatcccttcaagggcctgaaagagaaggaagagaaaaaactgaggagcagacgatacagactcttcgcaaaccgatcctctattatgcggcatttcggtccggaggaccagcggctttggaatgacgtaacggaagagctgatgtctgacgaggaggacagtttaaatgaaccaggtgtttgggtcgctcgcccccctcgattccgggcccaacggcttaccgaactatgttaccaccttgacgccaattctaagcacgggactaaagccaatcgtgtatatggaccacctagtgaccggctcccatccgcagaagcccagttactgcctcccgaattatataaccctaacttccaggaagaagaagacgaaggtggcgacgaaaatgcgcctgggtcaccaagcttcgaccagcctcataagacatgttgcccggatctgaattcttttattgaaatcaaggtggaaaaagacgaatag

SEQ ID NO: 14336 - RNA, 630 nt, synthetic construct
  misc_feature 1..630: note = source = /note="Description of Artificial Sequence: Synthetic coding sequence"
  source 1..630: mol_type = other RNA
atgtctttctctgccacgattctgttcagtcccccatccggatctgaggcccgctgttgttgttgtgcatgtaaaagtgagacaaacggaggaaataccggcagccagggaggcaatcccccaccctccacccctattactgtaaccggtcacgggctcgccgtccagtcttcagagcaactcctgcatgtcatttatcagcgggtggataaggccgtgggactcgccgaagctgctctcggactagcccgagcaaacaatgaattactgaagagattgcaagaagaagtgggcgacctgaggcagggtaaagtctctattccagacgaggacggggaaagtagagcccatagttcgcccccagaggaacccggcccgttaaaagaaagtcctggcgaggcattcaaagcactctcagccgttgaggaggaatgtgactccgtggggtccggtgtccaggtggtcatcgaggagctcagacagctaggagccgctagtgttgggccgggccccttgggcttccctgccacccagcgagatatgagactccccggatgtactttagccgcctcagaagccgcaccattgttgaatccgctagtggatgattatgtagcttctgaaggatag

SEQ ID NO: 14337 - RNA, 1617 nt, synthetic construct
  misc_feature 1..1617: note = source = /note="Description of Artificial Sequence: Synthetic coding sequence"
  source 1..1617: mol_type = other RNA
atgtcttttagtgccaccatccttttttccccaccttcgggatccgaagccagatgctgctgctgcgcctgcaaatccgagactaatggtggaaataccggctcccagggaggcaatcccccaccttccacacctatcaccgtcaccggacatggactggccgtgcaaagctctgaacaactgctacacgtaatatatcagcgcgtggacaaggctgtcgggttggccgaagccgcacttggcctcgctagagctaacaatgagctgctcaaaaggctccaggaggaggtgggtgatctgcggcagggaaaggtaagcattcccgacgaagatggagaaagtagagctcattccagcccgccggaagagcccggccccctgaaagaatctcccggagaggcctttaaggcgcttagtgcagtcgaggaggagtgtgatagtgtaggatccggagttcaagtggttatcgaagagctgagacagctaggtgctgcgtctgtggggccagggccgttgggcttcccagccactcaacgcgacatgaggttgccgggatgcacattagccgcttccgaggccgcccccctgttaaatccccttgtcgacgactacgtggcctctgagggagctgtccagagggtgttggtgccggcatatgccaaacagctgtctcccgctacccaactcgccattcaaagagcgacacccgagactggccctgaaaacggaacgaagttaccccccccacgccctgaagacatgctaaatgccgccgccgccctggactccgcgctggaggaatcaggtccaggctctacaggtgagctaagacattcgctgggcttaacagtgagtccctgtcggaccagaggaagcggccagaaaaactcacgacgcaagcgcgacctggtgctcagtaaacttgtacataacgtccacaaccatattactaacgacaagagatttaacgggtcagagagcattaaatcttcctggaacatcagtgtcgtcaagttcctccttgaaaaactcaaacaagagctcgtaacgtctcctcacaactataccgacaaggaactgaaaggagcctgtgtggcctatttcctcacaaagcggcgggaatatagaaacagtttgaacccattcaaaggtctgaaagagaaagaagagaaaaaactcagatccaggcgatatagactgtttgccaatcgcagtagtattatgagacactttggccccgaagatcaacgcctatggaacgatgtgaccgaagaactaatgtcggatgaggaggactcattgaacgaacctggcgtttgggtggctagacccccccgattccgcgcacagaggctgacagaactgtgttatcaccttgacgccaactcaaagcatggaactaaagcaaaccgggtttatggacccccaagtgatcggctccccagcgccgaggcccaattgcttccccctgagctttacaaccctaactttcaagaagaggaagacgaaggcggcgacgaaaatgcccccggttccccctcttttgatcaaccccataagacctgttgcccagacctcaattccttcatcgagatcaaggttgaaaaagacgaatag

SEQ ID NO: 14338 - RNA, 1524 nt, synthetic construct
  misc_feature 1..1524: note = source = /note="Description of Artificial Sequence: Synthetic coding sequence"
  source 1..1524: mol_type = other RNA
atgtgcactaagacgatccctgtgctttgggggtgtttcctcttatggaacctgtacgtgtcatcatctcaaacgatttacccagggataaaggcacgcattacccagagagctctcgattatggagtacaagccggtatgaaaatgatcgaacagatgcttaaagaaaaaaaattgcctgacctaagtggctccgaatctttggaatttctaaaagttgattacgtcaactataatttcagcaatattaagatctccgctttttctttccccaatacatccttagctttcgttcccggggttggaataaaagcgctaaccaaccacggaaccgcaaatatttccacggattggggcttcgaaagcccgctgtttcaggatacaggaggtgcagacttatttctcagtggtgtgtatttcacaggcatcatcatccttactcgcaacgactttggtcatcccactctgaagctgcaggactgttacgcgcaactgagccacgcacacgtctcattttccggcgaactctccgtattatacaatagcttcgcagagccgatggagaagccgattctgaagaacttaaacgagatgctatgccccatcatagcgtctgaagtcaaagctcttaatgccaacttaagcacattagaagttctcactaaaatcgacaattacacgctcctggattactctttgataagctcccctgaaatcaccgaaaattaccttgacttaaacctgaagggagtgttttaccctttggagaacttaactgacccaccgttttcaccagtcccttttgtgctccctgaaagaagtaactctatgctctatattggaatcgccgaatattttttcaaaagcgcctcattcgcacacttcactgccggcgtttttaacgtgaccttatcaactgaagaaataagtaatcacttcgttcagaactctcagggattagggaatgtcttgtcacgtatcgcagagatctatatcctgtcacagccgttcatggtgagaatcatggccaccgagcctccaatcataaacctccagcccggcaacttcacgctcgatatccctgcatctattatgatgctgacgcagcccaagaactccaccgtggagacaattgtaagtatggatttcgtcgctagcacttctgtcggactagtcatccttggacagcgcctggtgtgctccttaagtctaaacaggttcaggctcgcgctcccagagtccaatcgtagcaacattgaagtcctgcgctttgagaatatcctgtccagtatactgcacttcggcgtgctgcccttggccaacgcaaaattacaacagggcttccccctatctaacccccataaatttctcttcgtaaattctgatatcgaggtactggaagggtttcttctgatctctactgatctgaagtacgaaacctcatccaaacaacagcccagctttcatgtgtgggaagggttgaatttaatttccaggcaatggaggggaaaatcggcaccatag

SEQ ID NO: 14339 - RNA, 753 nt, synthetic construct
  misc_feature 1..753: note = source = /note="Description of Artificial Sequence: Synthetic coding sequence"
  source 1..753: mol_type = other RNA
atggctagtgagcgattgcctaatcgccctgcttgtctgctcgtagccagtggggcagcagaaggtgttagcgcacagtcctttctgcactgttttacaatggcttcaaccgcatttaaccttcaggttgcaacacccggcggaaaagcaatggaattcgtcgatgttacggaatctaatgcccgatgggttcaggatttccgattaaaggcctacgcatcccctgcaaagttagaaagtatcgatggagctcgttaccacgccctgctcattccttcttgcccaggcgcactgacagacttagcctcatcgggctctctcgctaggatcctccaacattttcactctgaaagcaaacctatctgcgctgtcggccacggcgtcgccgcattgtgctgcgccaccaacgaggatagatcttgggtttttgactcttattctcttactggccctagtgtttgtgaactagtgcgggccccagggttcgctcgcctcccactggtcgtcgaggatttcgttaaggattctggcgcatgtttttcaggcgcagcggccagctgtcccaaagcagatcgccactggcaacattttcctgtcgaggaaatttttctcgcatgtggattcaaagtggctggattaggggctgcaccaggatggggcaggggcggcaagcaggaggacagaccaccagaggagcagcgacgcgccggagaggactttccaatttatcagtgcgtgtttatttatccctag

SEQ ID NO: 14340 - RNA, 1386 nt, synthetic construct
  misc_feature 1..1386: note = source = /note="Description of Artificial Sequence: Synthetic coding sequence"
  source 1..1386: mol_type = other RNA
atgtccctcgatattcaaagcttagatatccaatgtgaggagttatccgatgctagatgggccgagctcctgccccttcttcagcagtgccaggtggtgagactcgacgattgcgggttgacagaagctagatgcaaagatatttcctccgccctgcgtgtgaatccagcgctggcagaactaaatctgcggagcaatgagcttggtgatgtgggcgtgcactgcgtcctccagggtttgcagacaccctcttgcaagattcagaagctgagcctacagaattgctgcctgaccggtgctggctgtggcgttctgtcctctacgctacggacactacctaccctccaggagctgcatctaagtgataatcttttgggagatgcgggccttcaactgctgtgcgaagggcttctagatccccagtgtaggctggagaaattgcaattggagtattgttctctgtcagcagcgagttgtgaacccctggcctccgtgctccgtgcaaagcccgactttaaggaactgaccgtgagcaataatgacataaatgaagcaggagtgagagtcctctgccagggcttaaaggattccccatgtcagctggaggccctcaagctggagtcatgtggagttacctcagacaactgcagagatctgtgtggaatcgttgcatcgaaagcgtccctgcgcgaacttgctcttggtagtaacaaactgggcgatgtagggatggccgaactctgccctggattattgcaccctagtagtcggttgaggaccctgtggatttgggagtgcggaataacagcaaagggttgtggtgacttatgccgggtactgcgtgcgaaagaatctttgaaagaactgagcctagctggtaacgagcttggagacgagggtgctcgactgctgtgcgagactttgctggagcccgggtgtcaattagaatctttgtgggtcaagagctgttcttttactgctgcatgctgcagtcatttttcatctgtgttagctcagaatcgatttctgctcgaactgcagatctccaataaccgccttgaggatgctggggtcagggaactgtgtcaagggctaggccaaccgggcagtgtactcagagtgctttggttagctgactgcgacgtttccgattcttcatgctcctctctggctgccactctattggctaaccacagcctgcgcgaattagatctttccaataactgcctgggagatgcgggtatcctgcaactagtggaatccgtgcgccagcctggttgcctgctcgaacaacttgtgttatacgacatctattggtcggaagaaatggaggatcggttacaggccttagaaaaagacaaaccgagtctgagagtgatttcttag

SEQ ID NO: 14341 - RNA, 1386 nt, synthetic construct
  misc_feature 1..1386: note = source = /note="Description of Artificial Sequence: Synthetic coding sequence"
  source 1..1386: mol_type = other RNA
atgtccttagatattcaatcactggacatccaatgtgaagaactctccgacgcgagatgggccgaactactacccctcctccagcaatgccaggtggtgcgtctggacgactgtggcctaacagaggcgagatgtaaggatatatcaagtgctttgcgagtcaaccctgctctggccgaactgaatttacggtccaatgaactgggtgatgtaggagtgcactgcgtactgcaaggtctccagacaccgagttgcaaaattcagaagctgtccctgcagaattgttgcctaaccggcgccgggtgcggagtgctgagctctacacttaggaccctcccgactctccaggaactgcacctgtcagacaacctactgggcgacgcaggattacaattactgtgtgaaggcctccttgatccgcagtgccgcctagagaagctacaactagagtactgttcactcagcgccgcctcctgcgaaccccttgcctctgtcctacgagctaagccagattttaaagaacttaccgtatctaacaacgacatcaatgaagcaggcgtgcgcgtcctctgccagggccttaaagactcaccatgtcagctggaagcactaaaactggagtcctgcggggttacttcagataactgtagagacctgtgtggcattgtggcaagcaaggcctcccttagagaattagccctcggaagtaacaaactcggggacgtgggaatggcggagctctgtccgggcctgttacacccctctagtcgcttacgcaccctgtggatctgggaatgtggaattactgcaaaaggatgtggcgatctgtgtagagtgctgcgcgccaaggagtcgttgaaagaactgagtctggccgggaatgaacttggagatgagggcgcaagactcctctgcgaaaccctcctggagccaggatgccagctcgagtccctctgggtgaaaagttgctcctttacggctgcctgctgctcgcacttctcttcagtactcgcacaaaatcgctttcttcttgagttacaaatttcgaacaatcgtctggaagacgcaggcgtccgagaattatgccaaggccttggccagcccgggagtgtgttacgggttctgtggttggcagactgcgacgtttcagactcttcttgttctagcctcgccgccaccctcctggcgaatcattcccttagggaactcgacctgagcaacaattgcctcggagatgccggaatcctacagctcgtcgagtcagttcgacaaccaggatgcctcttggaacaactggttctctacgatatctactggtcagaagagatggaagatagattacaggctttggagaaggacaaaccatccctgagggtaatttcatag

SEQ ID NO: 14342 - RNA, 1386 nt, synthetic construct
  misc_feature 1..1386: note = source = /note="Description of Artificial Sequence: Synthetic coding sequence"
  source 1..1386: mol_type = other RNA
atgagcctcgatatccaaagtttagacatccaatgcgaagaactgagcgacgctcggtgggccgagctgctccccctgctacaacagtgccaggtggtgcgtcttgatgattgcggtctcacagaagcacgatgtaaggatataagttccgccctgagggtgaatcccgctcttgccgagctgaatctacggtctaatgagttaggggatgtgggcgtgcattgcgtgctccagggtttacagaccccttcttgtaaaatccaaaagctgagcctccagaattgttgccttactggcgccgggtgcggcgttctcagctccacactacgaaccctgcccactttacaggagctccacctgtccgataatttgcttggagacgctgggttgcaactgctgtgtgaagggcttctggatcctcagtgcagacttgagaagttgcagctggaatactgttctctctccgcagcttcctgtgaacctctcgctagtgtgttacgtgccaaaccagatttcaaggagcttacagtaagtaataatgacattaacgaagccggcgtgcgggtactgtgtcagggcctgaaggattcgccgtgtcaactcgaggcactgaaactcgagagctgtggcgtcacgagtgataactgcagggacctgtgtgggatcgttgctagcaaagcttcactgcgcgagttggcactgggttctaataaactgggggacgtgggtatggcggagctgtgtccaggccttttacacccaagcagccggttaaggactctgtggatctgggagtgcggtatcacggctaagggctgcggggatctgtgtcgcgtgttgcgggcaaaagaatctttaaaagagctctcactggctggaaatgagctcggcgacgaaggagcgagactactatgtgaaaccttgctggaaccagggtgtcagcttgaaagtctgtgggtgaaatcgtgcagttttaccgcggcctgttgcagccatttttcatctgttcttgcccaaaaccgcttcctgcttgaactgcagatctcaaataacaggttggaagacgctggagtccgcgagttgtgtcaaggcctgggccaacccggttccgtgttacgagtgttatggctagccgattgtgacgtgtccgactcctcatgctcttctctcgcagcgactctacttgctaaccacagcctcagagaacttgatctgagtaataactgcctgggcgatgccggcattctgcagctcgtggagtcagtgcgccagcctggatgcctgttggagcagcttgtgctctatgatatttactggtctgaggaaatggaagatcgtcttcaagcactagaaaaagacaagccatcattacgcgtgatttcttag

SEQ ID NO: 14343 - RNA, 1452 nt, synthetic construct
  misc_feature 1..1452: note = source = /note="Description of Artificial Sequence: Synthetic coding sequence"
  source 1..1452: mol_type = other RNA
atgataaccgcccattgttcactcgatcttctcggctccgttgccgttttatgcgtgtgtgacctctccccagctcaatgtgacataaactgttgttgtgatcctgactgttcaagtgtcgacttcagtgttttcagtgcttgcagcgtccctgtcgttacaggagattctcagttttgctctcagaaagcagtaatttactccctgaatttcaccgccaacccccctcagcgggtgttcgaactggtcgaccagattaatccatcaattttctgcatccatattacaaattataagcctgcactgtcctttatcaatccagaagttcccgatgaaaataattttgatacacttatgaaaacctccgatggttttactctcaacgccgagtcctatgtaagcttcaccacaaaactggatattcctactgcggccaagtacgagtatggggtcccccttcagaccagtgattcctttctgcggtttcctagctccttaactagttctctgtgtaccgacaataatcccgccgccttcctcgtcaatcaggcagtaaaatgcacgcgcaaaatcaatctagaacaatgcgaagagatagaagcactgtctatggcattttactcatcacctgaaatcctgagagtgccggactccagaaaaaaagtccctatcacagttcagtctattgttattcaatccctcaacaagacactcacccggcgcgaggataccgatgttctgcagcctacactggtgaatgctggccatttctcactgtgcgtgaatgttgtgcttgaggtcaaatattcactaacctacaccgacgctggcgaagtgaccaaagctgacttatcttttgtactgggaaccgtctcatctgtggtcgtgccgctacagcagaaatttgagatccacttcctgcaggaaaatacacagccagtacctctaagcggcaacccagggtacgtggtggggcttcctttggcagctggattccaaccgcacaaaacaggcgccctcccttgccagctcgtcgcgcagaaagtcaaaagcctcctgtggggacaagggttccccgactacgttgcaccatttgggaattcacaagctcaagatatgctggattgggtaccgattcacttcatcactcaaagcttcaaccgaaagcactttgtactccaggatagttgccaattacctggagcacttgttatcgaggttaaatggactaaatacggtagcctgttgaatcctcaggccaaaattgtgaatgtgacagctaatttaatcagttcatccttccccgaggcaaactccggcaacgagcgcactattcttatctccaccgccgtaacttttgtcgatgtctccgcgccagcagaggctggattcagagcacccccagctattaacgcacgattgcccttcaattttttcttcccttttgtgtag

SEQ ID NO: 14344 - RNA, 1596 nt, synthetic construct
  misc_feature 1..1596: note = source = /note="Description of Artificial Sequence: Synthetic coding sequence"
  source 1..1596: mol_type = other RNA
atgtgccagctgctagagagtacagtcatccaacctcaaggagattcccccgtcgcggtgctttgtgtgtgtgatctttccccagcacagtgcgatatcaattgttgctgcgacccggactgttcctctgtcgatttctctgtgttctcagcctgctctgtacctgtggtcaccggcgactcccagttctgctcacagaaggcagttatctattctcttaacttcactgccaatcccccacagcgcgtgttcgagcttgttgatcagattaacccttccatcttctgcattcatatcaccaattataagcccgcccttagctttattaaccccgaagtgccagacgagaataattttgatacacttatgaagacatccgatggcttcacactcaacgccgaatcctatgtaagctttactacaaaattagatatccccaccgcagcaaaatatgagtacggggttcccctgcagactagtgatagcttcctgcggttcccctcctccctcacctcctcattgtgcaccgataacaaccctgccgcctttctggtaaatcaggccgtgaagtgcaccagaaaaatcaacctcgaacagtgcgaggaaattgaagcacttagcatggctttctattcatcacctgaaatccttcgtgtgccagactctagaaagaaagttcccattacggtccaatcaatagttattcagtccctaaacaagacccttacccgccgagaggacactgacgtcctgcaacctaccctagtcaacgctggacatttctctttatgcgtaaatgtagtgctggaggtcaagtactccctgacctatacagatgcaggggaagtgactaaagccgacttaagtttcgtcttgggaacggtctcctctgtggtagtacctctccaacaaaaattcgagatacatttcctacaagaaaatacacaaccggtgcctctcagtggcaaccctggctatgtggtaggtttgccgctggctgcaggctttcagcctcataaaatgtccgggattatccaaaccaccaaccgttacggccagttgactattctccacagtacaaccgaacaggactgtctagcgctcgagggtgtcaggacccctgtattatttgggtatactatgcagtcaggttgcaaactaaggctaaccggtgccctcccttgccagcttgttgcccaaaaagtgaaatctctactctggggccagggcttccccgactacgtcgctccgttcggcaactctcaggcacaagacatgctggactgggtccctatacattttattacgcagagcttcaaccgtaaagactcgtgccaacttcctggtgcccttgtcattgaagtcaagtggacaaaatacggctctctactcaacccacaggctaagattgtgaacgtgaccgcaaacctcatcagctcctcctttccagaagcaaattctggcaacgaacgcacgatcctgattagcacagcggtaacctttgtggatgtatctgctccagccgaggccggttttcgcgccccccccgctattaacgccaggctcccattcaattttttctttccctttgtctag

SEQ ID NO: 14345 - RNA, 1722 nt, synthetic construct
  misc_feature 1..1722: note = source = /note="Description of Artificial Sequence: Synthetic coding sequence"
  source 1..1722: mol_type = other RNA
atgcgacccagagggctcccaccgttgcttgtagtcctattgggttgttgggcgtctgtcagtgcacagactgacgcaacccctgcagttactaccgaaggcctcaattcaactgaggctgccctggctacctttggaaccttcccctctacccgacctcccggtactccccgagctcctgggcccagctccgggccacgacccaccccagtaaccgacgttgccgttctatgcgtgtgtgatctttctcccgcccaatgtgacatcaactgttgctgcgacccagattgctcttccgtggattttagcgtgttctctgcgtgctcggttccagtcgttacaggtgatagccagttttgctcccagaaagcagtgatctactccttgaattttaccgccaacccccctcagcgggtgtttgaattggtcgatcaaatcaacccctctatcttctgcattcacattactaactataagccagctctaagctttattaaccctgaagtgcctgacgaaaacaactttgacaccctgatgaaaacctctgacggattcacccttaatgcagaaagttatgtgtctttcactacaaaacttgacatccctaccgctgctaaatatgaatacggagtgcccctgcaaaccagtgactcctttctgcggttccctagctcactgacatcttctctgtgcaccgacaataaccccgccggacaggcctactggttcacacccgtgatacccgccctgtgggaggcagaagcgaggggctcactcgaggtcccggactcacgaaaaaaagtgccgatcaccgtgcagtctatcgtcatccagtctctgaataagaccctaacaagaagagaagataccgacgttctccaacctacactcgttaatgccggacacttcagcctatgtgtgaatgttgttctcgaggtgaagtatagtctcacatataccgatgccggcgaggtgacgaaggccgatttaagcttcgtgttgggtacagttagcagcgttgttgtaccattacagcagaaatttgagattcactttttgcaggagaacacacaacccgtacccctgagcgggaatcctggctacgttgttgggctacccctcgcagcaggtttccagcctcataagggaagtggaataatacagactacaaaccgctatgggcaactaacaattctgcactcaacaaccgagcaagattgcctggctcttgaaggtgtgagaactcctgtgttgtttggctacaccatgcagtctggctgcaaactgcgtcttaccggggccttgccttgccagttagtcgcacagaaagtcaaaagtcttctgtggggtcaaggttttcccgactacgttgctcccttcggaaactcccaggctcaggacatgctggattgggtgccaattcactttattacacagtcattcaaccgaaaggacagctgtcagttgccgggggccctcgtcatcgaagtcaaatggacaaagtacggctctcttttgaatccacaagctaagatagtgaatgtgacagcaaacctaatctcttctagttttccggaagccaactctgggaatgaacgcacaattctaatatccacagcagtaacctttgtcgacgtctccgcgcctgccgaagccggattccgagctcccccagcaatcaacgcccgccttccatttaacttcttttttccatttgtatag

SEQ ID NO: 14346 - RNA, 1230 nt, synthetic construct
  misc_feature 1..1230: note = source = /note="Description of Artificial Sequence: Synthetic coding sequence"
  source 1..1230: mol_type = other RNA
atgaagacaagcgatggctttaccctgaacgctgagagttatgtctcgtttaccacgaaacttgatattccaaccgccgccaagtatgagtatggcgtaccacttcagactagtgacagcttcctgcgattccccagcagtcttacctcctccctgtgcaccgataacaatcccgccgctttcctcgtgaatcaagctgtgaaatgtacccggaaaataaatttggagcagtgtgaggaaatcgaagctttgtctatggccttttacagttctcctgagatcctgcgcgtccccgatagccgcaagaaagtgcctattaccgtgcagtcaattgtgatacagtctcttaataaaaccttgacccgccgcgaggatacagacgtgctgcagccaacacttgttaacgcaggccacttttccctgtgcgtgaacgtggtacttgaagtcaaatattcattaacttataccgatgctggcgaagtaaccaaagccgatctgagttttgtcctcggaacagtatccagcgtagtcgtgcctttgcagcagaaattcgaaatacatttccttcaagagaacacccaacccgttcccctgagtgggaaccccgggtatgttgtggggctgccgcttgcagcgggcttccagccacataaaggaagcggcatcatccaaaccaccaaccgttacggacaattgacaatcctccattccactactgaacaagactgcctggcactcgagggggtgagaacgcctgtgctatttggttataccatgcagagtggctgtaagttgcgtcttactggagcacttccatgtcagctcgtcgcccagaaagtcaagtctctgctatggggtcaagggttccctgattatgtggccccttttggtaatagtcaagctcaagacatgctagattgggttcctatccactttattacacagtcatttaatcgcaaagattcctgccagctccccggcgcactggtcatcgaagtgaaatggaccaagtatgggtcactcctcaatccccaggctaagatagtgaacgtaacggctaatcttattagttcttcctttcctgaagcaaattctgggaacgagcgtactattctcatctcgactgccgtcaccttcgtggatgtcagcgcacccgccgaagccggatttcgagctcctcccgctataaatgcgaggcttcctttcaacttcttcttccccttcgtctag

SEQ ID NO: 14347 - RNA, 1779 nt, synthetic construct
  misc_feature 1..1779: note = source = /note="Description of Artificial Sequence: Synthetic coding sequence"
  source 1..1779: mol_type = other RNA
atgcgtccccgcggactgccacccctgctggttgtccttttaggttgctgggcatctgtgtccgctcagacagatgcgaccccagccgtgacaaccgagggcctcaactctaccgaggcagccctagccacatttggtacattcccttcaacaaggccccctggcaccccccgcgctcctggacccagcagcggtccaaggcccacacccgttacagacgtagctgtcctttgtgtttgtgacctctcccccgctcagtgtgatatcaattgctgctgcgatcctgattgttcttctgtggacttctccgtgttttccgcgtgctccgtcccagttgtaaccggcgatagtcagttttgctcccagaaagcagttatatactcactcaactttaccgccaatcccccacagcgcgttttcgagttggtcgaccagataaacccatcaattttttgcatccacattacaaattacaagccagcactgtctttcatcaaccccgaggtcccggacgaaaataacttcgacactttaatgaaaaccagcgacggatttacgctgaacgccgaatcgtatgtctcctttacgacaaaactcgatataccgacagccgcaaaatatgaatacggagtgccccttcagacttccgacagttttctgagattcccctcctcacttacctcttcgctgtgcacagacaacaatccagctgcattcctggtgaaccaagctgtcaagtgcacacgtaagataaacttagagcagtgtgaagagattgaagctttatcaatggccttttattccagccccgagattttgcgggtgcccgacagcagaaaaaaagtccctatcacagtccaaagcatcgtcatccagagcctgaataaaacgttaactcgcagggaagacaccgatgtgcttcagcctacccttgttaatgccggccatttctccctgtgtgtgaacgtcgtattggaagtgaaatattccctgacttacaccgacgccggagaagttactaaagccgatctgagcttcgtgctgggaaccgtgtctagtgtagtcgtgccactgcagcaaaaatttgagatacactttctgcaggagaatacccaaccggtccctctgtccggaaatccaggttacgtcgtcggactgcccctggctgccggcttccaaccccacaaaggtagcggtatcatccaaaccactaaccgatacggccagttaactatcctccattcgactacagaacaagactgtcttgcactggaaggagtccgcaccccagttctctttggttacactatgcaaagtgggtgtaaattgcgccttactggtgctctgccttgccaactcgtagcccaaaaagtgaagtctctcttgtgggggcaagggttcccagactacgtcgcacccttcggaaactctcaggctcaggatatgctcgactgggtcccaattcactttattacccagtcatttaacagaaaacattttgtgctgcaagattcgtgccagcttcccggcgccctggtgattgaagttaaatggaccaagtacggatccctgctgaacccccaagccaagatcgttaatgttacagccaatctaatctcttcctcctttcctgaagctaatagcggcaatgaaagaactatcctgatttccactgccgtcactttcgtggacgtgagcgcccctgccgaagcgggattccgcgctccccctgcaattaacgcgagactgcccttcaacttcttctttcccttcgtctag

SEQ ID NO: 14348 - RNA, 552 nt, synthetic construct
  misc_feature 1..552: note = source = /note="Description of Artificial Sequence: Synthetic coding sequence"
  source 1..552: mol_type = other RNA
atgatcttcctcctgttaatgctcagcctggaactccagctacatcaaatcgcagcccttttcaccgtcaccgtccccaaagaattgtatatcatcgagcatggcagcaatgtgaccctggaatgtaattttgacaccggcagccacgtcaatttaggcgccatcacagcatccttgcaaaaggttgagaacgacacatcaccacatcgagagcgagcaacgctgctggaggagcaactccctttaggcaaggcatcattccatattcctcaggtccaggtccgggatgagggccaatatcagtgcattataatctacggcgtagcctgggactacaagtacctgacactcaaagtgaagggtcaaatggaacccagaactcatccgacttggcttctgcatatttttatccctttttgcattatagcctttattttcatcgcaaccgttatagcactgagaaagcaattgtgccagaagctctacagcagtaaggataccactaagcgtcctgttaccactaccaaacgtgaagttaactctgccatttag

SEQ ID NO: 14349 - RNA, 822 nt, synthetic construct
  misc_feature 1..822: note = source = /note="Description of Artificial Sequence: Synthetic coding sequence"
  source 1..822: mol_type = other RNA
atgatctttcttctgcttatgctttccctggagctccaacttcaccaaattgctgctctcttcactgtgaccgtgccaaaagagctgtacatcatcgaacacggcagtaacgtgactttggaatgcaatttcgataccggatcacatgtgaatctaggagctatcaccgcctctttgcagaaagtcgaaaatgatacctcaccccaccgcgaacgggcaacgctactcgaagaacagctgcctctaggcaaggccagctttcacattccacaggtccaagtgagagatgagggccagtaccaatgtatcattatctacggcgtcgcctgggattacaaatacctgacactcaaggttaaagctagctatcggaaaatcaacacccatatactaaaggtccctgagaccgacgaggttgaactgacatgccaggctaccggttacccactcgcagaggtgtcttggccaaacgtctccgtgcccgcaaatacctctcatagccgtaccccagaaggtttgtaccaggtgactagtgtccttcgattaaagcccccaccgggaagaaacttctcttgcgtgttctggaatacacacgttcgggagcttacactggctagcattgaccttcaatcccaaatggaacccagaactcacccgacatggctcttgcacatttttatccctttctgcatcatcgcctttatatttattgccaccgtcatcgccctgaggaaacaactatgccagaaactgtactcgagcaaggacacgacgaaaagaccggtgacaaccaccaagcgcgaagtgaatagtgccatttag

SEQ ID NO: 14350 - RNA, 372 nt, synthetic construct
  misc_feature 1..372: note = source = /note="Description of Artificial Sequence: Synthetic coding sequence"
  source 1..372: mol_type = other RNA
ctgggcgataggagaggtcgtagttcaggagcaagagcagccgctgtgggctcaacaggcgagagattggagatggaggaagatatactgcagctccaagccgaggcaaccgctgaagtgttgggggaggtcgctcaagcacagaaagttctgagagattcggtgcaacggctagaagttcagttgcgtagcgcttggctcggtccagcatatcgggaattcgaggtccttaaggcacatgctgacaaacagtcacacatcctgtgggctcttacgggtcatgtccagcggcaaaggagagagatggtcgcccaacagcatcggctccgccaaatccaagagcgcctacacaccgcagccctaccggcttag

SEQ ID NO: 14351 - RNA, 345 nt, synthetic construct
  misc_feature 1..345: note = source = /note="Description of Artificial Sequence: Synthetic coding sequence"
  source 1..345: mol_type = other RNA
atggcctccttcaagctagcagatagtgtgtgggaagacagtctttcaaaacgccaaaggaatcagggccgcatgaaaactttgcctgtgctggtcctctcactgacactcctgactgtattcagcgaaacttctcctatactcacagagaagcaagccaagcagctcctgaggtctcgtagacaagataggccatccaaaccaggctttccagacgaacctatgagagagtatatgcatcaccttctggctctggagcaccgggccgaagagcaattcttagaacattggctcaatccccactgtaaacctcattgtgatagaaatcgaatccaccccgtgtag

SEQ ID NO: 14352 - RNA, 345 nt, synthetic construct
  misc_feature 1..345: note = source = /note="Description of Artificial Sequence: Synthetic coding sequence"
  source 1..345: mol_type = other RNA
atggcatccttcaagctggctgatagtgtctgggaggattctctttcaaaaaggcagcggaatcaaggcagaatgaagactttaccggtgctggttctatccctgactctgctgaccgtgttctccgaaaccagcccgattttgacagaaaaacaagccaaacagctcctgcgaagcagaaggcaagaccgaccttccaaacccggttttccagacgaaccaatgagagaatacatgcatcacctcctcgctcttgagcaccgagcagaggaacagtttctcgagcattggcttaatccacattgtaagcctcactgtgacagaaatcgaattcacccagtttag

SEQ ID NO: 14353 - RNA, 444 nt, synthetic construct
  misc_feature 1..444: note = source = /note="Description of Artificial Sequence: Synthetic coding sequence"
  source 1..444: mol_type = other RNA
atggccctacagagaactcatagcctactgcttctcttgcttctcactctccttggattggggttagttcaaccttcatatggccaagatggaatgtaccaacgctttcttagacagcacgtccatcctgaagagactggtgggagcgataggtattgcaatttaatgatgcagcgcaggaagatgactctataccactgcaagagattcaacaccttcattcatgaggatatctggaatatccgctccatttgctctactaccaatatccagtgtaagaacggaaaaatgaattgccacgaaggagttgtcaaggttacagactgcagggacaccggtagctcaagagcccccaattgccgctatagagccatagccagtactcggagagtcgtgatcgcatgcgaaggaaacccacaagtcccagtccatttcgacgggtag

SEQ ID NO: 14354 - RNA, 1302 nt, synthetic construct
  misc_feature 1..1302: note = source = /note="Description of Artificial Sequence: Synthetic coding sequence"
  source 1..1302: mol_type = other RNA
atggaaccccagcttggtcccgaagccgccgccttgcgacccggatggttggccctacttttgtgggtttcagccctgtcttgttctttttctctccctgccagcagtctgagctcccttgtgcctcaggtgcggacgtcctataattttggtcgaacatttttaggcctggacaagtgtaacgcgtgtatcggtacttcgatttgtaaaaagttttttaaagaagaaatccgctctgataactggttggcttcccacctaggcctacctcctgattccctcctgagctacccagcaaactatagtgatgacagcaaaatttggcggccagtcgaaatattccgccttgtatctaaatatcaaaacgaaatctccgaccgacgaatatgtgcatctgcttcagcccctaagacctgctccattgaacgggtcctgcggaagaccgagcgatttcagaagtggctgcaagccaaaagactgacccccgatttagtgcagggtttggcttcaccactgcttcgctgtccctctcagaggctgctcgatcgcgtagtgcggcggtacgctgaggtcgctgacgccgggtcaatctttatggatcattttacagaccgggataagctccgtttattgtatacactggccgttaatagtcatccaatcctgctgcagattttcccaggtgctgaaggctggccccttccaaaatacctcggatcgtgcggcaggtttcttgtgtccacaagcacccgtcccctccaagagttttatgacgcacctccagatcaggcagcagaccttgcatatcagttactgggtgtcctcgaatctctgcgttccaatgacctgaattacttcttttactttacacacattgatgccgggatgtttggtgtttttaataacggacatcttttcattcgcgatgcatccgccgtaggcgtgatcgacaaacaggagggttctcaggaagcgaatcgcgccggagagaacaaagatattttctcctgtctcgttagcggctgtcaggctcaactgccaagttgtgagtcaatctccgagaaacagagcctggtgctcgtgtgtcaaaagctccttccacgacttctccagggacgctttcctagtccagtgcaggacgacatcgattctattctggtgcaatgtggagattctatacggcccgatcctgaagtgcttggcgccgcttctcaactcaaggacatcctccggcctcttcgtacctgtgactcgcgatttgcctatcggtatcctgactgtaaatacaatgacaaattctag

SEQ ID NO: 14355 - RNA, 600 nt, synthetic construct
  misc_feature 1..600: note = source = /note="Description of Artificial Sequence: Synthetic coding sequence"
  source 1..600: mol_type = other RNA
atggaaaccttccccctgttgctcctctccttgggacttgtgttggccgaggcttcagagtccacaatgaagattatcaaagaagaatttacggatgaagaaatgcagtacgacatggcgaagtcaggccaggaaaagcagacaattgaaatcctcatgaatccaattcttctcgtcaaaaataccagcctctctatgagcaaagatgatatgtcatcaactctgcttacattccgatccctccactataacgatccaaaggggaattcaagtgggaacgataaagagtgttgcaatgacatgaccgtttggcgcaaagtgtccgaagctaacggctcctgtaagtggtccaacaacttcatccgctcttccacagaggttatgagaagggtccaccgcgcaccttcctgcaagtttgtccagaaccccggcatcagttgttgtgagagcctcgagttagagaataccgtgtgccaatttactaccggcaaacaattccctagatgtcaatatcattccgtaactagcctagagaagatcttgacggtgcttacaggtcacagcctgatgtcttggctcgtatgcggatctaagctctag

SEQ ID NO: 14356 - RNA, 600 nt, synthetic construct
  misc_feature 1..600: note = source = /note="Description of Artificial Sequence: Synthetic coding sequence"
  source 1..600: mol_type = other RNA
atggaaacatttcccctcctgctcctctctctcggactggtgctagctgaggcctcagagtcaactatgaagatcatcaaggaagagttcactgacgaagaaatgcagtacgatatggccaagagcgggcaagaaaaacagactatcgagattctaatgaaccccatcctcttggtgaaaaacacctccttatcaatgtctaaagacgacatgtcaagtaccctgctgaccttccgaagcttacactataacgaccccaagggtaattcaagcggcaacgataaagagtgttgtaatgatatgactgtgtggaggaaagtgtctgaagccaatggatcttgcaaatggagtaacaatttcatccgttctagtactgaagtgatgcgccgggtccaccgggccccttcttgcaaatttgtgcaaaatcctggaatttcatgctgcgaatctctcgaactcgagaatacagtgtgtcagtttaccaccggaaagcagtttcctagatgccagtatcactccgtgacctcacttgaaaaaatcctcaccgtgctgacaggacactcccttatgagctggctagtatgcgggtctaaactctag

SEQ ID NO: 14357 - RNA, 291 nt, synthetic construct; identical to SEQ ID NO: 12718
  misc_feature 1..291: note = source = /note="Description of Artificial Sequence: Synthetic coding sequence"
  source 1..291: mol_type = other RNA

SEQ ID NO: 14358 - RNA, 981 nt, synthetic construct
  misc_feature 1..981: note = source = /note="Description of Artificial Sequence: Synthetic coding sequence"
  source 1..981: mol_type = other RNA
atgaccggcctttgtggttacagcgcccccgatatgcgcggcctacgtttgatcatgattcctgtggaattactgctctgttacctgctgctgcacccagtggacgcaacctcgtatggcaaacagaccaacgttctgatgcacttccccctctccctcgaatcacagactccctcatccgatcccttatcctgccagttcttgcacccaaaaagtttgcccggcttctcccacatggcccccttacccaagttcttagtgagtcttgccctgcgtaatgctttagaagaggccggttgccaggcagatgtttgggctctccaacttcagctctatcgccaggggggagttaacgccactcaggtacttatccaacatctgcgcggactacagaaaggtaggtcaaccgaacgcaacgtttctgtggaggccctcgcttcggccctgcagctcctggctcgcgagcagcagtctacgggaagggtgggcagatcactaccaacagaggattgtgaaaatgaaaaagaacaagcagttcataatgtcgttcagcttctcccaggggtcggcacattctacaacctcgggaccgctttgtactacgccacccaaaactgtctcggaaaagcaagggaacgagggcgggatggcgccatcgatctgggatacgatctcttaatgacaatggcaggcatgtccggaggtccaatgggactggctatttctgctgcactgaaacctgcgcttaggagcggagtacaacaactcatccagtactaccaagaccaaaaggacgcgaatattagtcaaccagagacaactaaggagggtctgcgcgccatttccgacgtaagcgatctagaagagacaaccactcttgcttcattcatcagcgaggtggttagtagtgcaccttactggggctgggccattatcaagagttacgatttagatccaggagccggctctttggaaatctag

SEQ ID NO: 14359 - RNA, 1476 nt, synthetic construct
  misc_feature 1..1476: note = source = /note="Description of Artificial Sequence: Synthetic coding sequence"
  source 1..1476: mol_type = other RNA
atgcggtggatactctgctggagccttaccctgtgcttgatggctcagacagcactgggcgcactacatacaaagagaccccaggtggtgactaagtacggcacgctccagggtaaacagatgcacgtcggcaagacaccaatacaggtttttctcggtgtccctttctctagacctcccctgggcattcttcgtttcgccccgcccgaaccaccagaaccttggaaaggaattagagacgccactacataccccccgggctgcttacaagagtcctggggacaactcgcctctatgtatgtcagtacaagagaaaggtacaagtggctgagattctccgaagactgcctctatttgaacgtttacgcccccgccagagctcccggtgatccccaactcccagtgatggtgtggtttcctggaggcgcttttatcgtgggagcggcctcgagttacgaagggtcagatttggcggcaagagagaaggtggtgttggtgttcctacagcacagactgggcatatttggatttctgtcaacagatgactcacacgcccgcggtaattggggtctcctggatcagatggcagccctgcggtgggtgcaagagaatatagcagcgttcggcggagatccaggaaatgttactctcttcggacagtctgctggagcaatgtccatttccggccttatgatgtctcctcttgcctccggtttgtttcaccgagctatttctcagagcggcaccgcactcttcagactgttcataacttctaatccattgaaggtggctaaaaaggttgcgcaccttgcaggctgcaaccataattcgacgcaaatcttggtgaattgtctgcgagccctgtccgggacaaaggtcatgagggtatctaacaaaatgagatttcttcagctaaatttccagcgcgatccagaagagattatatggtcaatgagtcccgtggtcgatggcgtcgtgattcccgacgaccccctggtgctcctgacgcagggaaaagtttctagtgttccgtacctgcttggggttaataacctggaattcaattggctcctgccgtataacatcaccaaagagcaagtgccacttgtagtggaagagtaccttgacaacgtaaatgagcatgactggaaaatgctacgcaaccggatgatggatatagtacaggacgccacattcgtgtatgcaacattgcagaccgcccattaccatcgcggattatcaatgggaaaagaaaaagccttgtccctacagatgatgaagtactgggcaaatttcgctaggacaggaaatccaaacgacggcaaccttccgtgctggccacggtataataaagatgagaaatatctccagcttgactttacgactcgcgtgggcatgaagcttaaagaaaaaaaaatggcgttctggatgtcactctaccagtcgcagcggcctgaaaagcagagacagttttag

SEQ ID NO: 14360 - RNA, 285 nt, synthetic construct; identical to SEQ ID NO: 12721
  misc_feature 1..285: note = source = /note="Description of Artificial Sequence: Synthetic coding sequence"
  source 1..285: mol_type = other RNA

SEQ ID NO: 14361 - RNA, 402 nt, synthetic construct
  misc_feature 1..402: note = source = /note="Description of Artificial Sequence: Synthetic coding sequence"
  source 1..402: mol_type = other RNA
atgagacagagattacttccatctgtcacctcacttttactcgtggccttgctgttccccgggagctcacaagctcgacatgtcaaccatagcgcgactgaagccttaggcgaattacgcgaaagagctccggggcaaggaaccaatggctttcaattactaagacatgctgtcaagcgcgacctgctacctccccgcacccctccctatcagggcgatgtgcccccaggaatacggaataccatctgccacatgcagcaaggaatctgtcgtctgtttttctgtcatagtggcgagaaaaagagggacatatgttcagatccctggaacagatgctgtgtttccaatacagacgaagaaggcaaagagaaacccgaaatggatggtagatctgggatatag

SEQ ID NO: 14362 - RNA, 564 nt, synthetic construct
  misc_feature 1..564: note = source = /note="Description of Artificial Sequence: Synthetic coding sequence"
  source 1..564: mol_type = other RNA
atgggctgctgcggctgttcgggtggttgtgggtcgggctgtgggggatgcggctcaggttgtggcggatgtggatcctcttgctgcgtgccgatatgttgctgtaaacctgtgtgctgttgtgtgccagcttgttcgtgctccagctgcggttcctgtggaggctcgaagggtggacgtggtagttgcgggggctctaagggcgactgtggatcttgcggcggttctaaaggtggatgtggatcatgtggttgttcccagtgttcctgttacaaaccctgttgctgcagctccgggtgtgggagttcctgctgccagtccagctgctgcaaaccctgttgttcccaatccagttgttgtaagccttgttcttgttcctcaggatgcggatcgtcttgttgccagtcttcctgttgtaaaccttgctgttcacagagcagctgctgcaaaccttgctgctgttcttccggctgtggctcttcctgttgtcagtcctcatgctgcaaaccctgttgttctcagagttcctgttgtgtgccaatttgttgccagtgcaagatctag

SEQ ID NO: 14363 - RNA, 564 nt, synthetic construct
  misc_feature 1..564: note = source = /note="Description of Artificial Sequence: Synthetic coding sequence"
  source 1..564: mol_type = other RNA
atgagaccacttgcaggcgccccagttcccaagcgacaaaagtgcgatcattggacaccttgcccctccgatacatatgcataccgtctgttgtctggtggaggacggtctaagtacgcaaaaatatgttttgaagataacctgttaatgggggagcagctgggtaacgtggcacgtggcatcaacattgccatcgtcaactatgtcacgggtaacgttaccgccaccaggtgcttcgacatgtatgaaggcgacaatagcggcccaatgacgaaatttattcagtctgcagccccaaaaagcctgctgtttatggtcacctacgacgatggtagcacgcgcctgaacaatgacgcaaaaaacgcaattgaagcacttgggagcaaagagattcgaaatatgaaatttcggtcttcctgggtttttattgctgcaaaaggcctagagttaccttctgagatccagcgagagaaaataaatcatagcgacgctaagaataaccgctactccggatggcctgcagagatccagattgagggttgtattccaaaagagagatcgtag

SEQ ID NO: 14364 - RNA, 249 nt, synthetic construct; identical to SEQ ID NO: 12725
  misc_feature 1..249: note = source = /note="Description of Artificial Sequence: Synthetic coding sequence"
  source 1..249: mol_type = other RNA

SEQ ID NO: 14365 - RNA, 186 nt, synthetic construct; identical to SEQ ID NO: 12726
  misc_feature 1..186: note = source = /note="Description of Artificial Sequence: Synthetic coding sequence"
  source 1..186: mol_type = other RNA

SEQ ID NO: 14366 - RNA, 1056 nt, synthetic construct
  misc_feature 1..1056: note = source = /note="Description of Artificial Sequence: Synthetic coding sequence"
  source 1..1056: mol_type = other RNA
atggggaatctgttcatgttatgggctgccctggggatctgctgtgctgcttttagtgcatcggcttggagtgttaacaatttcctgattaccggcccaaaggcgtatcttacttatacgacatcagtggccctgggtgcacagagtgggatcgaagagtgtaagtttcagtttgcatgggaacgctggaattgccccgaaaacgccttacagctgtccacacataataggctgagaagcgccacccgcgaaacctccttcatacatgccatttcttcggcaggagtcatgtacatcattacgaagaattgttcaatgggggatttcgaaaactgtggatgcgatggatctaacaatgggaagaccggtggtcacgggtggatttggggtggatgttccgacaacgtcgagttcggagaacggatctccaagctgttcgtcgattccttggagaagggcaaagacgcacgtgccttaatgaacttgcataacaaccgagccggcaggctagcagtgagggcgactatgaagcgaacctgtaaatgtcacggaatcagcgggagctgtagcatacagacgtgttggctccagctggccgagttcagggaaatgggagattacttgaaagctaaatacgaccaggcccttaaaatcgagatggacaaacgacagctgcgcgctggcaattctgctgagggccactgggtaccagctgaggcattcttaccatccgccgaagccgaattgatctttcttgaggaatctccagattactgtacgtgcaactcttccctcggtatttacggaaccgagggccgcgagtgcttgcagaattctcataatacatccagatgggagaggcgtagttgcggcagattgtgcaccgaatgtggccttcaggttgaggaaagaaaaactgaagtgattagctcctgcaattgtaaatttcaatggtgttgtacagttaaatgtgaccaatgtagacacgtcgtgtctaagtattactgcgctcggagtccgggaagcgcccaaagtctcgggaaaggttccgcttag

SEQ ID NO: 14367 - RNA, 1446 nt, synthetic construct
  misc_feature 1..1446: note = source = /note="Description of Artificial Sequence: Synthetic coding sequence"
  source 1..1446: mol_type = other RNA
atgcaatctagactgctgcttctcggggcacccggcggacacggcggtcccgcatctagaaggatgaggcttctattacgacaggtggtacagcggcgaccaggcggtgatcggcagagaccagaggtgaggctgcttcatgcggggtctggagccgataccggggacacagttaatattggcgatgtgtcctacaagcttaagatacccaagaaccctgagctcgtcccgcaaaattatatttctgattccctggcccagagcgtcgtacagcatctccgatggataatgcaaaaagacctcctgggacaggatgtgttccttattggcccccctggcccactccgcagatccatcgcaatgcaatatctggagctgactaagcgagaagttgaatacatagcccttagtcgagatacaactgaaactgaccttaagcaacgacgggagatccgcgccggcactgccttctatattgaccaatgcgccgtgagagccgccacggaaggtaggacactgatactggaagggttggagaaggcggaacggaacgtcctccccgtgttgaacaatctgcttgaaaacagagaaatgcagcttgaggatggcaggttcttaatgagcgcagaacgctacgataaattactgcgcgatcacactaaaaaggaacttgacagttggaagatcgttcgggtttctgaaaactttcgggtcattgccttaggactccccgtgcctagatactccggtaaccctctggaccctcctctaaggtcacgctttcaggctcgcgacatctactatttaccattcaaagatcagttaaagttactatactcgatcggagccaatgtttccgccgagaaggtgagtcaattgctgagctttgcaaccactttgtgttcacaagagagttctactctgggtctacccgacttccctcttgactctctggccgccgccgtacagattctagattcatttccaatgatgcctattaagcacgccatccagtggctatacccctactccattctcctggggcatgagggcaagatggctgtggagggcgtactcaaaagatttgaactccaagattccggctccagtttactacccaaggagattgtgaaggtagagaagatgatggagaaccatgtcagccaggcatccgtgaccattcgtattgccgataaggaagttaccattaaagttccagccggcactaggctcctcagccagccctgcgcttcagacagattcattcaaacattgtcccataagcaattacaggccgaaatgatgcagtctcatatggtgaaagacatttgcctgatcggtggcaaagggtgcggaaaaacagtcatcgccaaaaattttgctgacaccctcgggtacaatattgaaccaattatgttgtatcagcacaaagtaccccatatctag

SEQ ID NO: 14368 - RNA, 786 nt, synthetic construct
  misc_feature 1..786: note = source = /note="Description of Artificial Sequence: Synthetic coding sequence"
  source 1..786: mol_type = other RNA
atggcatcactggcagtgagcaactggccaaagcccatgcccctgatcccttgtctgtcatggtccaccgcgtctggcgtatttactacaggtgtactatccaaaagcatcaactggcgcgaacttgaaaagcaatattacacccagactgtgtatgaagaggagattatacatatgctggagtactgcgggaccgattctttcaaaatgggacaagaatttgttaaacacttcacttcctcagccgataaactcaccaatctgaacctagtcagtcgaacacttaatttagacatatccaatcaagtggtatcccaaaagcccgccgattgtcataatagctcgaaaactagcgtttctgcaaccagtgaaggtctgttacttcaggacacctccaagatgaagcgtttcaaccagaccctctcgacaaataagtcaggatatacaagtcggaatccacagtcatatcacttgcttagcaaggaacagtctaggaattctttaagaaaggagtctctgatttttatgaaaggtgttatggacgagtgtacacatgtagctaatttctccgtgcccgtagacccatccttgatcatcgttgtacaagccaaagaggacgcatatataccaaggaccggtgtgcgctcgctgcaggagatctggcccgggtgtgagattcgctacttagaggggggacacatctccgcatatctgtttaaacaggggttatttaggcaggctatatacgatgctttcgatcgctttctacacaaatacgccaactag

SEQ ID NO: 14369 - RNA, 1245 nt, synthetic construct
  misc_feature 1..1245: note = source = /note="Description of Artificial Sequence: Synthetic coding sequence"
  source 1..1245: mol_type = other RNA
atgggtgtcagcaagctagatatcttatatcgtcgccttctcctgacaaaactttttattcgcggctggggacgacccgaggatctgaaacgtctattcgagttccgcaagatgattggaaacagggaacgctgccagaatctcgtctcctcagactaccctgttcatatagacaagatagaagaacagtctgactgcaagattctggacggacacttcgtctcccctatggcccattacgtgcccgatattatgcccattgaatcagtaatcgcccgcttccaatttatcgtgccaaaagagtggaactcaaaataccggcctgtgtgtattcatctcgctggaacaggtgaccatcactactggcgtaggaggactcttatggcgcgccctatgatcaaagaagcaaggatggcctccctgctgttagagaatccctactacggatgccgaaaaccgaaggaccaagttcggtcttctctcaagaacgtgtccgatttgtttgttatgggcggcgctttagtgctggagtctgctgctctattacattggttggaacgcgaggggtatggaccattagggatgaccggcattagcatgggaggtcatatggcaagcctcgctgttagtaactggccaaagcctatgccactgatcccctgcctgtcatggtcaaccgcatccggggtcttcacaacaacagacagctttaaaatgggacaggaattcgtaaagcattttacctccagcgcagataaactgactaatctgaatctagtgagtcgtacgctcaacctcgatatatccaatcaggttgtgagtcaaaaaccagccgactgccataattcatcaaaaacatctgtcagtgctacttcggagggattactgctgcaggatacatcaaaaatgaaacggtttaaccaaactctgtccaccaataaatccggatatacgtccagaaaccctcaaagctaccatctactttcaaaagagcagtcgcgtaactccctgaggaaggaatctcttatttttatgaagggggttatggatgaatgcacacacgtggccaacttctcagttccagttgatcccagtctaatcatagtggtccaagcaaaggaagacgcatacatacctagaaccggagttcgctctctgcaggaaatctggccaggatgcgagattagatacctggagggaggacatatttccgcgtatctttttaaacagggtctttttcggtag

SEQ ID NO: 14370 - RNA, 747 nt, synthetic construct
  misc_feature 1..747: note = source = /note="Description of Artificial Sequence: Synthetic coding sequence"
  source 1..747: mol_type = other RNA
atgaagttgacattcttcttaggtctgctggccctcatttcctgttttacaccgtccgaaagccagcgattctcccgccgcccttacctccctgggcaactgccacctcctcccctgtacaggccgagatgggtgccaccatcacctcccccaccctacgatagccgcctcaattcacctctgtccctgccattcgttccaggccgggtgcctcccagctcatttagccgcttttctcaagctgtgatacttagccaactattccctctggaatccataagacaacctcgactgttccccggatacccgaatcttcacttccctcttagaccgtattatgtgggacctatccgaatactgaagccgccttttcccccaatcccattctttctggccatctacctccctatctcaaaccccgaaccgcagattaacattaccaccgccgacacaacgatcacaacaaacccgccgacaaccgcaactgccacaacctcaacaagcactaagccaacaatgaccatcagctcgtccaccgtcccaatctcatctacacccgaacccgccacatcgatatcagctgctactcccgccgcctcaacagagaacactacgcagatcctcgcaaatcgccctcacacagtccttctcaatgcaaccgttcaggtgaccacctctaatcagaccatactttcatctccagcattcaagtctttttggcaaaagttgttcgcaattttcggatag

SEQ ID NO: 14371 - RNA, 231 nt, synthetic construct; identical to SEQ ID NO: 12732
  misc_feature 1..231: note = source = /note="Description of Artificial Sequence: Synthetic coding sequence"
  source 1..231: mol_type = other RNA

SEQ ID NO: 14372 - RNA, 1536 nt, synthetic construct
  misc_feature 1..1536: note = source = /note="Description of Artificial Sequence: Synthetic coding sequence"
  source 1..1536: mol_type = other RNA
atgctggttgatggcccatctgagagacccgcgctctgctttctacttcttgcagttgcaatgtccttctttggctctgcactatctatcgacgaaacaagggctcacctgcttttaaaggaaaaaatgatgagactcgggggacggctcgtcctgaacaccaaggaagaactggcaaacgagagattgatgacactgaaaatcgctgaaatgaaggaagccatgcgtacactgatttttcctcccagtatgcattttttccaggccaagcatctgattgaacgctcacaagtgttcaacattctcagaatgatgcctaaaggagccgcacttcacttgcacgacattggaattgtaaccatggactggcttgtacgcaatgtaacctatcggcctcactgtcatatctgcttcacaccacggggcatcatgcagtttagattcgcacacccgaccccgcggccctcagaaaagtgctcaaagtggattctgctggaagattaccgtaaaagagttcagaatgtaaccgagtttgacgacagcctcctgcgcaattttacgcttgtgactcagcaccccgaggtgatatatacaaaccaaaacgtggtatggtcaaaatttgagacaattttcttcacaatctccggattaattcattatgccccagtttttcgggattacgtctttagatccatgcaggagttttatgaggataacgttctgtatatggaaattcgagcccgacttttacctgtttatgaactgagtggggagcaccacgatgaagaatggagcgtgaaaacctaccaagaggtcgcccagaagtttgtcgaaactcatccagagttcataggaatcaaaattatttactccgatcacagaagtaaggacgtggcagtcattgccgaaagcatcagaatggccatgggacttcgtattaaattccccacagtggtagcgggcttcgatctagtgggacacgaagacacaggacacagcttacacgactacaaggaagctttaatgattcccgcgaaagatggagttaaactaccttatttcttccatgccggcgagacagactggcagggtacttctatagataggaatatcctggacgctctcatgctaaatactacaagaattggtcatgggttcgcactttccaagcatccagcagtgcgcacctactcctggaaaaaggacattccaatcgaagtctgccctatttcaaaccaggtactaaagctcgtcagtgacttgagaaaccatccagtcgctacccttatggccactggccacccaatggtgatatctagcgacgatccagctatgttcggcgccaaagggttgtcatacgatttctatgaagtcttcatgggcatcggaggaatgaaggccgatctacgcaccttaaagcagctggcaatgaattcaattaaatattccactctacttgagtctgaaaagaatacatttatggagatctggaaaaagagatgggacaaattcattgcagacgttgctactaaatag

SEQ ID NO: 14373 - RNA, 1536 nt, synthetic construct
  misc_feature 1..1536: note = source = /note="Description of Artificial Sequence: Synthetic coding sequence"
  source 1..1536: mol_type = other RNA
atgttggttgacggcccatctgaaagacccgcgttatgcttcctgctgctggcagttgcaatgagcttcttcggctcagccctgagcattgatgaaacgagagcacacctcctgttaaaggaaaaaatgatgcggttgggcggccgtttggtgctgaataccaaagaggagctggccaacgagcgcctgatgacactcaagattgctgaaatgaaggaagccatgcgcacacttatattcccaccatctatgcactttttccaagccaaacatctgatcgaacgatctcaagtattcaatatactccggatgatgcccaaaggagcagcactccaccttcatgacatcggaattgttacaatggactggcttgtgcgtaatgttacatatagacctcactgtcacatttgctttactccacgtggtattatgcagtttcgtttcgcccaccctacccctcggccctccgaaaaatgtagtaaatggattctgctagaagattaccgaaaaagagtgcaaaacgtaactgagtttgatgatagtttacttaggaacttcacactcgtgacacaacaccccgaggtgatctacaccaatcagaatgtagtttggtccaagtttgaaacgatcttcttcactatcagcgggctaattcactatgcccccgtgttcagagactacgtcttcagatcaatgcaggaattttatgaggacaatgtgctttatatggagattagagcaagattactgccagtttatgagttatccggagagcaccatgatgaggaatggtcagtcaagacctatcaggaggttgcccagaagttcgtcgaaacccatccagagtttattggcattaaaataatttattcggaccacagatccaaggatgttgctgtcatagcagaaagtatacgcatggctatgggcctaagaattaaatttcccaccgttgtagccggctttgatctggttggtcatgaagacacaggacattcccttcacgattataaggaggctcttatgatccctgcgaaagacggtgtaaaactcccgtatttctttcacgcaggagagacagactggcagggcacatcaatagacaggaacatcttggatgccttgatgctcaatactactcggatagggcatgggttcgccctatcaaagcaccccgctgtcagaacttactcatggaaaaaagacatccctattgaagtttgccccatcagcaaccaggtattaaaactagtgtccgatcttaggaaccatccagtcgctactttaatggccacagggcaccccatggtgatatcctcagatgaccctgccatgtttggagccaagggactatcttacgatttctacgaggtattcatggggattggaggtatgaaggccgacttgagaaccttaaagcagctggccatgaactcaattaaatatagcaccttgttggaatccgaaaagaacactttcatggagatttggaagaaacgatgggacaaatttatcgccgacgtagcaactaagtag

SEQ ID NO: 14374 - RNA, 240 nt, synthetic construct; identical to SEQ ID NO: 12735
  misc_feature 1..240: note = source = /note="Description of Artificial Sequence: Synthetic coding sequence"
  source 1..240: mol_type = other RNA

SEQ ID NO: 14375 - RNA, 351 nt, synthetic construct
  misc_feature 1..351: note = source = /note="Description of Artificial Sequence: Synthetic coding sequence"
  source 1..351: mol_type = other RNA
atggcagctggctccgcgcctatgcaactacatttgcgtgccacaattcggatgaaagacgggctctgcgtaccccgcaaatggatttatcacttgactgagggcagtactgatctaaggaccgaaggccgcccagatatgaagaccgaacttttctccagtagctgtccaggcggaattatgctcaatgaaaccggacagggctaccaacggtttctgttgtacaaccgctcccctcacccccccgaaaagtgtgtcgaggaattcaagtctcttacttcatgccttgattccaaagcctttctactcaccccacggaaccaagaagcgtgcgaactgtctaataattag

SEQ ID NO: 14376 - RNA, 543 nt, synthetic construct
  misc_feature 1..543: note = source = /note="Description of Artificial Sequence: Synthetic coding sequence"
  source 1..543: mol_type = other RNA
caggtgatcccaataaactcaggtgatcttttcgtacatccgttgtggaaccggtcctgtgtagcttgcggaaacgacatagccctgatcaagctctcccggagtgcacagttaggtgacgctgtccagctggcatccttaccacccgcaggggacatattgccaaatgaaacaccttgttatatcactggctggggtagactttatacgaatggccctctcccagataagctccaggaagcccttctacccgtggtggactatgagcactgtagtcgttggaactggtggggatcttccgtgaaaaagactatggtttgcgcaggcggggacattcggtctgggtgcaacggcgattccggcggacctctaaactgtcccacagaagatggcggctggcaagttcatggagttacatcttttgtttcagcattcggctgtaacacacgacggaaacccaccgtgttcacaagggtctctgcgtttattgattggatcgaagagaagttgcaagggaataaggcacctgaatcccgtacttag

SEQ ID NO: 14377 - RNA, 1215 nt, synthetic construct
  misc_feature 1..1215: note = source = /note="Description of Artificial Sequence: Synthetic coding sequence"
  source 1..1215: mol_type = other RNA
atgccacctttccttataactctatttctttttcattcctgctgcttacgcgccaatggccacctgagggagggtatgacgcttctgaagactgagttcgccctgcatctgtatcagtcggttgccgcttgtcgtaacgaaaccaacttcgtcattagcccagccggagtaagcctacctctcgagatcctccagttcggcgccgaagggtcaaccggacagcaattagccgatgcactcggatatactgtgcacgacaaaagagtgaaagatttcttacatgcagtgtacgccacactgcctaccagctcacagggaaccgaaatggaattggcctgtagtctgtttgtgcaggtgggtacaccactgtctccatgttttgtcgagcatgtatcttggtgggctaattcttccctggaaccggctgatttgtccgaacctaattccacagcaatacagacttctgagggtgcctctcgagaaactgctgggggcgggcctagtgagggacctggtggctggccatgggagcaagtctccgcagctttcgcccagctggtgttggtcagcacaatgtcattccagggcacgtggagaaagagattctcttctactgacacacagattctcccatttacttgtgcttacggccttgtgctgcaagttccaatgatgcaccagacgaccgaagtgaactacggccagtttcaagacactgcaggacaccaggtgggggtgctggaactgccctatcttggatccgctgtttctctcttcctggtcctacctcgggacaaagacacgcctctttcacacatcgagccccacctcactgcgagcaccattcacctttggactacatcccttcgccgcgctaggatggatgttttcctaccacggttccgtattcagaaccagtttaatttgaaaagcattcttaattcctggggggtgaccgatttatttgaccctctgaaagcaaacttgaagggaataagcggccaagacggattttacgtatcagaggctattcacaaggcgaagatagaagtccttgaggaagggaccaaagcaagcggcgccacagctttacttctgctcaagagatctcgaattcccatctttaaggccgatcgcccctttatctacttcttgcgcgaacctaatacgggatttgttttcagcattggtagagtctccaatccattagactag

SEQ ID NO: 14378 - RNA, 444 nt, synthetic construct
  misc_feature 1..444: note = source = /note="Description of Artificial Sequence: Synthetic coding sequence"
  source 1..444: mol_type = other RNA
atggggcccgaagcactaagtagcttgctgctcctcctcctcgtagcttcaggcgatgccgatatgaaaggccacttcgatccggctaaatgtagatatgcactagggatgcaggatcgcacgattccagacagtgacatttcggcgtcttcgtcttggtccgactccaccgcggccaggcattctcggctagaatcttcggacggcgacggcgcctggtgccctgccggcagcgtgtttccaaaagaagaggaatatttgcaagtagacttgcagcggcttcatcttgtggcgctcgtcggcacacagggaagacacgccggtggtctgggcaaggaattttcacgaagttatcgccttaggtattctagagacggacgaagatggatgggctggaaggatcggtggggacaagaggttatatcaggcaacgaagacccctag

SEQ ID NO: 14379 - RNA, 2631 nt, synthetic construct
  misc_feature 1..2631: note = source = /note="Description of Artificial Sequence: Synthetic coding sequence"
  source 1..2631: mol_type = other RNA
atgggccccgaagccctgtcttctttgctcttgctcttgttggttgcgtcaggcgatgcagatatgaaaggtcatttcgatccagctaagtgcagatacgccctgggtatgcaagacagaacaatccccgacagcgatataagtgcctcaagttcttggtcggatagtactgccgcaaggcacagccggttagagtcatccgacggcgatggtgcatggtgcccagccggcagcgtgtttccaaaagaagaggaatatcttcaagttgacctgcagcgcctgcatctagtggctcttgtcggaactcagggccgccatgcgggcggtctcggaaaggagtttagtagatcatataggctgagatatagccgagatgggagaagatggatggggtggaaagatcgctggggacaggaagtgatctctggcaatgaggatccagagggtgtcgtgctaaaagatttaggcccgcctatggtagcaaggctggtccgattttaccctagggctgatcgggttatgagtgtctgcttgcgggtggaactgtacgggtgtctgtggcgagatggactgttgtcctacactgctcctgtaggacagaccatgtacctgtctgaagcagtctatctcaatgacagcacctacgacggccatacagttggcggcctgcagtacgggggactcggacaactggcggacggcgtcgtcggactcgacgatttcaggaaatctcaagagcttagggtgtggcctggttacgactacgttggctggtccaatcattccttttcttctggctacgtggagatggaatttgaatttgacagactgcgcgctttccaagcgatgcaagtccattgcaataacatgcacacgctcggagctagactcccgggaggcgttgaatgtcgtttccgcaggggacctgcaatggcatgggagggtgagcccatgcgtcacaacctcggcgggaaccttggagatcctcgcgcccgcgccgtttcagttccactcggaggccgtgttgctcgatttctgcagtgtcggtttctcttcgccgggccttggctgctgttctccgagatatccttcatttcagatgtggtcaacaactcttctcccgcactcggaggcacattccccccggccccatggtggccaccaggacctccgcccactaatttctcttctcttgagctggagcctagaggccagcagcccgtcgccaaggctgaaggatctcccaccgcaatattgatagggtgcttggtggccattatcctgctattgctgttgattatcgcccttatgttatggagacttcattggcgccgactgttgagcaaagccgagcggcgtgttctcgaggaagagctgaccgtccacctgtccgtccctggagacacaattctaattaacaacaggcctggcccccgcgaacccccaccctaccaggagccccgaccaagaggcaatccccctcactccgccccttgcgtgccaaatggctcagcatattcaggagactacatggagccagaaaaacccggggcacctttgctaccaccacccccacagaattccgtgccgcattacgccgaagcggatatagttactctacagggggtcacaggcggaaacacttatgctgtccccgccctcccccccggagctgtaggagatgggccgccacgggtagatttccctagaagcagactgagattcaaagaaaagctaggtgagggacagtttggcgaggtgcacttatgtgaagttgattcaccacaggacctagtgtctctggattttccacttaatgttagaaaaggccatcccctcttggttgccgttaagattctgagaccagacgcaaccaagaacgccaggaatgattttctaaaagaggtgaaaattatgagccggctcaaagacccaaatataatcagactgcttggcgtttgcgtacaggacgatcctctttgcatgatcactgactacatggagaatggagatttgaaccaattcctcagtgcccaccagctggaagacaaagccgctgagggcgccccaggcgatggtcaggccgcacagggtccaaccatcagctacccaatgctgctgcacgtggctgcccagatcgcatctggaatgaggtatctggcgacccttaactttgtgcaccgtgatctggcgacaagaaattgccttgttggagagaactttacaattaaaattgccgattttggaatgtctcgtaatctctatgctggggactactaccgagttcagggaagagcagtgctgcctattagatggatggcatgggaatgtattctcatggggaagttcacaacagcgtctgacgtatgggcatttggagtcacactgtgggaggtgctgatgctctgccgtgcgcaacctttcggccaactgactgatgaacaagtgatcgagaatgcaggggaattttttcgggatcaggggagacaggtctatctgagtcggcctcccgcctgtcctcagggcctttacgaactcatgctaagatgctggagcagagaatccgagcaacggcctccattctcacagcttcataggttcttagccgaagatgctttgaacactgtctag

SEQ ID NO: 14380 - RNA, 2631 nt, synthetic construct
  misc_feature 1..2631: note = source = /note="Description of Artificial Sequence: Synthetic coding sequence"
  source 1..2631: mol_type = other RNA
atgggcccagaagcactctcatccctattactgctgttgttggtggcctccggagatgccgacatgaagggtcactttgatcctgctaaatgtcgctacgctctcggtatgcaggaccgaactattccggactcagatatctcagcgtcaagtagctggtcagatagcacggcagcccgccattcccgcctggaatcttctgacggcgatggcgcttggtgccctgcaggcagcgtgttccccaaagaggaagaatatctacaggtggatctccagcgtcttcatcttgtcgctctggttgggactcagggcagacacgccggagggctgggcaaagaattctcacggagttaccgcctaaggtatagccgggatggcaggagatggatggggtggaaagacagatggggacaggaagtgataagcggcaacgaagacccagaaggtgtcgtcctgaaggacttaggccctccaatggttgctaggttagtccgattttatcctcgcgccgaccgcgttatgagcgtgtgtctcagagtggagctatatggttgcttatggagagatggcctcttatcatatactgctcccgtgggccagaccatgtatctaagtgaggcagtttacctaaatgatagtacatacgatggtcataccgtgggcggccttcagtacggaggcttgggccaactggcagacggtgtagtgggtctggatgatttccgaaaaagtcaggagctgcgcgtgtggcctggatatgattatgtcggatggagcaatcactcattcagcagcggatacgtggagatggaatttgaatttgacaggctccgggcattccaagctatgcaagtgcattgcaacaacatgcatacactgggcgctaggctaccagggggggtcgaatgcagatttagaagaggtcccgcaatggcatgggaaggagaacccatgcgtcataacttggggggcaatctgggcgatccacgcgctagagccgtttccgtgccgctgggcggacgcgttgccagatttctccaatgccggtttttgttcgcgggcccatggctactgttcagcgaaattagtttcatctcagatgtggtcaataactctagcccagccctgggaggtacatttccccctgccccttggtggccaccaggaccgccaccaaccaattttagctctttggaattggagccccgcggccagcagcctgttgcaaaagcggaaggatcccctaccgccatactgatcggctgcctggtagccatcatcctcctgctgctgctgataatagcacttatgctctggcgattgcattggcgcagattgctatctaaagctgaaaggcgagtactagaagaggagctgaccgtgcacctgtccgtgcccggagacacaatcctgatcaataatagacctggcccaagagaacctcccccctaccaagagcctcgccctagaggtaatccgccccactctgcaccctgtgttccgaatggttccgcctatagcggggattatatggaacctgagaagccaggagcccctctcctgccccccccacctcagaactccgttccccattatgctgaagctgatatcgtgacccttcagggggtgactggcgggaatacttatgccgtaccagctctgcccccaggcgccgttggagatggacctccaagagtggatttcccgaggtctagattgagatttaaagagaaactcggagagggacagtttggcgaagtgcatctgtgtgaagttgacagtccccaggacttggtctctctcgacttccctcttaacgtacggaaaggtcatccactgcttgtagccgttaagattctgcgtccagacgccacaaaaaatgccaggaatgacttcctaaaggaggtaaaaatcatgtctaggctgaaggacccaaacatcatcagactgctgggagtgtgtgtgcaagacgaccctctgtgcatgattaccgattacatggaaaacggcgacctgaatcaatttctgtcagcacaccaactcgaagataaagccgccgaaggtgctccaggcgacggccaggccgctcagggccccactatttcttaccctatgcttttacatgtggcagcccaaatcgcaagcggcatgcgctacttggcaaccctcaactttgtacaccgagatttagctactcgcaactgtctggtcggggaaaattttaccatcaaaattgcagattttggaatgtccagaaacctctatgctggcgactactaccgagtccagggccgcgcagttttacccatccggtggatggcctgggaatgtatactgatgggcaaatttacgaccgcatctgatgtctgggccttcggtgtaactttgtgggaggtcctgatgctgtgtcgcgcccagccttttggccaattgaccgatgaacaggtgatagagaatgccggcgaattttttagagatcagggaaggcaggtatacttgtctcggcccccagcctgtccccagggcttgtacgagttaatgcttcgatgttggagtcgcgaaagtgaacagagaccgcccttttcacagttgcatcggtttcttgctgaggatgcccttaataccgtctag

SEQ ID NO: 14381 - RNA, 2742 nt, synthetic construct
  misc_feature 1..2742: note = source = /note="Description of Artificial Sequence: Synthetic coding sequence"
  source 1..2742: mol_type = other RNA
atggggcccgaggcactctcatctctcttacttctcctacttgtcgcgagtggcgatgctgatatgaaggggcattttgacccggccaagtgcaggtatgctctcggaatgcaggacagaaccataccagacagcgatatttccgcttcatcttcctggtcagacagtaccgctgcgaggcattccagactggaatcctcagatggcgatggggcatggtgcccagctggatccgttttcccaaaagaagaagaatacctccaggttgatctacaacgattgcacttggttgcgctcgtgggtactcaggggcgccatgccgggggattgggcaaggaattcagcagaagttatagattaagatactcccgtgacggtcgtaggtggatggggtggaaggatagatggggacaggaagtgataagtggtaacgaagacccagaaggtgtggttttgaaagacttaggtccgccgatggtggccaggctagtacgcttctacccacgggccgacagggttatgagcgtgtgcctccgtgtggaactttacgggtgcttgtggagggatggcctgttgtcttatactgcacccgtgggccagacgatgtatcttagcgaagccgtttatcttaacgatagtacttatgacggacatactgtggggggactgcagtacgggggcttgggccaactggcagacggcgttgtgggccttgatgactttaggaaaagtcaggagcttagagtttggcctggttacgattacgtggggtggtctaatcatagcttctcttcaggttacgtggaaatggagttcgaatttgaccggctgagagcttttcaggctatgcaagttcattgtaacaacatgcatacgctgggagccagactgccaggcggagtcgaatgtcgcttcaggagagggcccgccatggcctgggagggtgagcctatgagacataacctgggaggcaatctcggtgatccccgagcccgcgcagtgtcagttccccttggcggacgggtagcacggttcctccagtgtcgcttcctttttgccggcccctggctgctattctcagaaatttcgttcatatccgacgtcgttaacaatagttctcctgcattggggggtacattcccaccagctccatggtggccacctggtccaccaccgaccaatttttctagtctggagctcgaaccaagaggtcagcagcctgtcgcaaaagcagagggatctccaaccgccattcttattggatgcttagtggccataatcctcttgttattactcatcattgctctgatgctgtggcgcttgcactggcgtagactgttgtccaaagcagagaggcgcgtgttagaagaagagctgacagtccatctctcagtgccaggggacacaattctgattaacaatagacccggtcctcgggagccaccaccctaccaagagccaagaccccgcgggaatcctccccactctgccccttgtgtgcccaatgggtctgcactgctcttatctaatccggcgtaccgtctgctgctcgccacatacgctcgtccccctcgaggacccggtcctccgactcctgcttgggctaaacccaccaatactcaagcctactctggagactacatggaacctgaaaagcctggagctcccttgttgccgccccccccccaaaattcagtgccacactatgcagaagcagatatagtcacgctgcagggcgtcaccggcgggaatacttatgctgtgccagcgctccctcccggagcggtgggagacggcccgcccagagtagacttccccagatcaaggctgaggtttaaagagaaacttggcgaggggcagtttggtgaggttcatctttgtgaggtagactcaccccaggacttggtatctctggattttccgctcaacgtcagaaaagggcatccactactggtcgccgtgaaaatcttaagacctgatgctaccaaaaacgctcgaaacgactttctgaaagaagtgaagatcatgtcacggctaaaagacccaaacataatccgcctgttaggtgtctgtgtacaggatgatccactgtgcatgattacagactatatggaaaatggagatttgaatcagtttctgtcagctcatcaactcgaggataaggctgctgaaggcgctccgggtgacggacaggctgcccaaggccccactatttcatacccaatgcttctgcatgtggctgcccaaattgcctctgggatgcgatatctggcaactctgaacttcgtgcacagggatttggctacacgcaactgcctggtaggagaaaattttaccatcaagattgccgattttgggatgagtcgcaatctgtacgccggcgattactacagagtacagggtcgagctgttttgcctatcagatggatggcgtgggagtgtattctgatggggaaattcacaaccgcgtcagacgtctgggctttcggggtcacattgtgggaagttcttatgctatgcagggctcaaccctttgggcagctaacggacgagcaagtgattgagaatgcaggggaattttttcgagatcaagggcgtcaggtgtacctctctagacctccagcttgtcctcagggcctgtacgagttaatgctgagatgttggagtcgggaatccgaacaacggccgcctttcagtcaattgcatagatttctggccgaggacgcactgaataccgtttag

SEQ ID NO: 14382 - RNA, 444 nt, synthetic construct
  misc_feature 1..444: note = source = /note="Description of Artificial Sequence: Synthetic coding sequence"
  source 1..444: mol_type = other RNA
atgggtccagaagcactgtcaagtcttctcttacttctcctggtggccagcggcgatgccgatatgaagggacatttcgatccagccaaatgtagatatgctctcgggatgcaggacaggacgatcccagactctgatatcagcgcaagcagtagctggtcagactctaccgctgccagacatagtcgcctcgaaagttcagatggggacggggcttggtgccccgccggaagcgtgttccccaaagaagaagaatatctgcaagtagacctccagcgactccacctcgtagccctcgtgggaacacagggaagacacgctggcggcctgggaaaggagtttagcagaagctataggctaaggtatagtagagatggaaggagatggatgggctggaaggaccggtggggacaggaagtcataagtggcaatgaggatccctag

SEQ ID NO: 14383 - RNA, 2631 nt, synthetic construct
  misc_feature 1..2631: note = source = /note="Description of Artificial Sequence: Synthetic coding sequence"
  source 1..2631: mol_type = other RNA
atggggcctgaggccctgagttctctgctgctgcttctcttggttgcatcaggagatgctgatatgaaaggccatttcgaccctgctaaatgtagatatgccctcggaatgcaagaccgtacgattcccgattctgatatttctgcttctagctcatggtccgacagtacagcggcgcgacactcccgacttgagtcttccgatggcgacggcgcgtggtgccctgcagggtcggtgtttcctaaggaagaagagtacctgcaggttgacctccaaagactccatctggtggcgctggtcggcacccaaggcagacacgctgggggtctgggaaaggaattttcccgaagctatagactgagatacagcagagacgggagacgctggatggggtggaaagacagatggggtcaggaggtgattagcggtaacgaggatcctgagggtgtcgtgctcaaagatctcggcccaccaatggtggcaagactcgttcggttctatccaagagccgatcgcgtaatgagcgtgtgtttgcgagtggagctctacggatgtctctggagggatggtttgctgagttacactgctcccgttggacaaactatgtacttgtccgaggcagtgtatctcaacgatagtacttacgacggtcacacggtaggaggtctgcagtacggaggattgggacagttggccgatggcgtggtgggtctggatgattttagaaaatctcaagaactgcgggtttggcctgggtacgattatgtgggctggtccaaccatagcttctctagtgggtacgtggaaatggagtttgagtttgacagactcagagcatttcaggctatgcaggtacattgtaataatatgcatacactaggggcccggttacctggaggcgtggaatgcagattcaggcggggacccgcaatggcctgggaaggagagcccatgaggcataatctgggaggaaatctgggtgatccacgcgctagggccgtgtcagtccccttgggaggccgcgtggccagattcctgcagtgtagattcctattcgccggcccttggcttcttttcagtgaaatttctttcatctccgatgtcgtcaataactcaagtcctgctctcggaggcacctttccccccgccccttggtggccgccagggcccccccctactaacttctcttctctggaactggaaccacggggacaacagccagttgctaaagccgaaggatcacccaccgctattcttattggttgccttgtcgcaattattctacttctcctcctaattatcgcactgatgctttggcggctgcactggcgtcggctgctgagcaaggctgagcgacgtgtgctagaagaggaactgactgtgcatctgtcagtgccaggagacacaattttgatcaataatagacccgggccaagagaacctccaccctatcaggaaccaagacccaggggtaatccccctcacagcgcgccttgtgttcctaacgggtcagcatactccggagactacatggaacctgagaagccaggagcccccttgctgcctcctcctccccaaaactcagtgcctcattatgccgaagccgatattgtaaccctgcagggcgtcaccggtggaaacacatacgccgtccccgctctaccaccgggcgccgtaggcgatggacccccgagagtcgatttccctcgttcacgactgcgtttcaaagagaagctgggagagggccagtttggcgaagtacatttgtgcgaagtggattccccccaggacctggttagcctcgattttccactaaatgtgcggaaggggcacccactgctggtcgctgtgaagattctcagaccagatgctacaaaaaatgcccggaacgattttctgaaagaggtcaagataatgagccgcctgaaagacccaaacataattaggcttcttggcgtgtgcgttcaggacgaccccctgtgtatgatcacagactacatggaaaacggagacctgaaccagtttctatcagctcaccagctagaggacaaggcagctgaaggagcacctggcgatggacaggcagcccagggccctaccattagctaccctatgcttctgcatgtagcagctcagatagcaagtggtatgagatacttagcaacgttgaacttcgtgcaccgagacctggctacaagaaactgtctggtgggagagaatttcaccattaagatagctgacttcggaatgtcaaggaatctgtacgcaggagactactaccgagtgcagggcagggctgtactgccaattagatggatggcttgggagtgcattcttatgggcaagtttaccacagcaagcgatgtgtgggctttcggcgtgactctgtgggaggtgctcatgctttgcagagctcaaccattcggtcagctgacggatgagcaagttatcgaaaacgctggcgagttcttcagggatcagggccgccaagtctacctctcccggccacctgcctgtccacagggactatacgagctgatgctccgttgttggtctcgagaatccgaacagcgcccacccttctctcaacttcatcgctttctggctgaagatgccttaaataccgtgtag

SEQ ID NO: 14384 - RNA, 2631 nt, synthetic construct
  misc_feature 1..2631: note = source = /note="Description of Artificial Sequence: Synthetic coding sequence"
  source 1..2631: mol_type = other RNA
atgggccctgaggctctgagcagcttgctgctgctgcttctggttgcttctggagacgccgatatgaaagggcatttcgaccctgccaaatgccgttatgcactaggtatgcaagacagaaccattccagactccgacattagcgcaagttctagctggtctgacagcactgctgcccggcacagccgcctcgaatccagcgatggggatggggcctggtgtcccgctggatcagttttccccaaagaagaagaatacctgcaagttgacctacagcgcctccatctcgtggcactggtcggcacacaaggtaggcatgccggcggactgggcaaggaattcagccggtcttatcgacttaggtactccagagatgggagaagatggatgggttggaaagacagatggggacaggaggttatttctgggaacgaagatcccgagggtgtggtattgaaggacctggggcctccaatggttgctaggctggttcgtttctacccgagggcggatagggtgatgagtgtgtgcttaagggtcgaactgtacggatgcctttggcgcgatggtctcctgagctataccgctccagtgggacagacaatgtacctaagcgaggctgtttacctgaatgatagcacttacgatggccatacagtgggaggactccagtatggcggactaggccaactcgctgacggtgtcgtaggacttgatgattttcggaaatctcaggagctgcgtgtttggccaggctatgactatgtgggatggagtaatcacagtttttctagcggctatgtcgagatggagttcgaattcgacagacttagggcttttcaggctatgcaggtgcactgtaataatatgcacacactgggcgcaagattgccagggggagtcgaatgccggttccgaaggggcccagccatggcttgggaaggtgagccaatgagacataatcttggcggcaatctgggagacccgagggccagagcagtgagcgttccacttggaggaagagtcgccaggtttcttcagtgccgatttctgtttgcaggcccatggctcctttttagtgagatctccttcatatccgacgtcgtgaataattcgtcccccgccctcggagggacctttccacctgccccatggtggccaccaggccctccaccaacaaatttcagcagtttagaacttgaacctcgaggacagcagcccgttgcaaaagctgagggttcccccaccgctatactgatcggttgtctcgttgcaataatccttctgctactactcatcattgccctgatgctctggcgacttcactggcggcggctgttgagtaaagctgagagacgagtgcttgaggaagaactgaccgtgcacctgtccgttcccggcgataccatacttattaacaaccggcctgggcctcgcgagcccccaccctaccaggaacctagacccaggggaaatcctccacactctgcaccctgcgtacccaacggatctgcctattctggagactatatggaaccagagaaacccggtgccccgttgcttccccctcctccgcagaatagcgtgccccactatgctgaagccgatatagtgactctgcaaggcgtcaccggcggtaacacgtacgccgtgccagctctccctcccggtgcagtgggggatggaccccctagggttgactttcctcgtagcaggctgcggtttaaggagaaactaggtgagggccaatttggagaagtgcacttatgtgaagtcgactcccctcaggacctcgtttccctcgatttcccgttgaatgtgaggaaaggccatcctctgctcgttgccgtcaagattttacgcccagacgccaccaaaaatgctcgtaatgacttcctgaaagaggtgaaaattatgtcccggctcaaagaccccaacatcatccgactgttgggggtttgtgtacaagacgacccactctgtatgatcactgattacatggagaatggcgaccttaaccagtttttatcagcgcaccaacttgaagataaagccgccgaaggggcaccaggggacggtcaggctgcccaaggccccactatatcgtatcctatgctgctccacgtcgccgcacagatcgcgtcaggaatgaggtaccttgccaccctcaactttgtacatagagacttggcaacgcggaattgcctggtgggggagaactttacaattaaaatcgccgatttcggaatgagcagaaacctgtatgctggagactattaccgggttcaggggagagccgtgctgcccattaggtggatggcttgggagtgtatcttaatggggaaatttaccacagcaagcgacgtctgggctttcggagtgaccctgtgggaggttttaatgctgtgtcgggcccagccttttggccagctgaccgacgaacaggttattgagaatgcgggagagtttttccgggatcaaggtcgccaagtgtatctgagtcgcccccccgcttgcccacagggactttatgagcttatgctgagatgttggagtagagaaagcgagcagagaccaccttttagtcagctccacaggttcttagcagaagacgcattgaatacagtttag

SEQ ID NO: 14385 - RNA, 2631 nt, synthetic construct
  misc_feature 1..2631: note = source = /note="Description of Artificial Sequence: Synthetic coding sequence"
  source 1..2631: mol_type = other RNA
atgggtcccgaggctcttagcagtctactgctgctgctgctcgtagcatcaggtgatgccgacatgaaagggcattttgatcccgccaaatgccgttacgcactgggcatgcaggaccgcactattcccgacagtgatattagcgcttcaagctcatggtcagatagcacagccgcccggcattcaagactggagtcatctgatggagacggggcctggtgccccgccggttcagtctttcctaaggaggaagaatatttgcaggtagatctccagcgcctccacttggtcgctttagtagggacacagggaagacatgcaggaggccttggcaaggagttctcccgttcctatcgcttaagatacagtcgagatggtcgcagatggatgggatggaaggatcgctggggtcaagaagtaatttctggcaacgaggacccagaaggagttgtgttgaaagacctgggcccccccatggttgctagactggtgcggttttatccgagggctgatcgcgtgatgtcagtttgcctgcgcgtggaactctatggttgcctttggcgcgacggactcctgagttacaccgctcctgtgggtcagacaatgtatctcagcgaagctgtatacttaaatgatagtacttacgacggccacacagtcggcggcttgcagtatggcggcttgggacagctggcggacggagtagtaggtctggatgattttcggaaatcacaagagctccgcgtgtggcccggctacgattatgtaggctggtctaatcattccttcagctctggttacgttgagatggaatttgagtttgatcgactccgcgcgtttcaggctatgcaggtccattgcaacaatatgcacacactgggtgctcgtcttcctggaggtgtagaatgtaggtttaggcggggccccgcaatggcctgggagggtgagcctatgaggcacaatctcgggggaaatttgggagatcccagagcaagggcagtatccgtgcctctaggagggcgggtcgcccggtttctacaatgtcgattcctcttcgcaggcccctggctcctgttttctgaaatttcctttattagtgatgtcgttaacaattcttccccagctcttggagggactttcccccccgccccctggtggccaccaggcccaccacccaccaatttctctagccttgagttagagcccagagggcagcagcccgtggctaaagcagaagggagtcctaccgcaattttaatcgggtgtttagtcgctatcatcttgctgctgttactcatcatcgcattaatgttatggagactccattggagaaggttactgtctaaagccgagagacgggtcctcgaggaagagctcaccgttcacttatcagttccaggagacacaattcttatcaacaaccggccaggcccaagggagccaccaccttatcaggagccaagaccacggggtaatcctcctcattccgcgccctgcgtgcctaatgggagcgcttatagtggcgactacatggaacctgaaaagccaggagcaccactgctgcctccacccccccaaaactctgtgccacattacgccgaggccgacatcgtgacactgcagggagtgacaggtgggaatacctacgcggttccagctctacccccaggcgcagttggcgatggaccaccgcgagtagacttccctcgatcccgcctcagattcaaagaaaagttgggagaaggccaattcggagaggttcacttatgcgaggttgactccccacaggacctcgtctcgctcgactttccattaaatgtgcgtaaaggacatcccttgcttgtcgccgttaaaattctgcgccccgacgctaccaaaaacgcccggaacgactttttaaaagaggtgaaaattatgagccggttgaaggaccccaatatcatacgcctactgggcgtatgtgtccaagacgatcctctgtgtatgattaccgactacatggagaatggcgacctgaaccagtttctcagcgctcaccagttagaagataaggcggccgaaggagccccaggagatggacaggctgcccagggcccaactataagttatccgatgctccttcacgtagcagcccaaattgcgagcgggatgcgctatttagcgacgctgaactttgtacatagggatttggcgactcgaaactgcctagttggggagaattttacaattaagattgctgacttcggaatgagcagaaatctctatgctggagactattacagggtgcagggcagagcagttttgcctattagatggatggcatgggaatgtattttaatgggcaagtttacaaccgctagtgatgtatgggcatttggcgtcactttgtgggaggtgctgatgttgtgccgagcccagccttttggtcagctaacagatgagcaggtaattgagaatgcaggagagttttttagagatcaaggacgccaggtctatttatccaggccacccgcctgccctcaaggtctgtacgaactgatgttgagatgttggtcacgggaatccgagcagcgtcctcctttctcacagctacaccgctttcttgccgaggatgcactaaatactgtgtag

SEQ ID NO: 14386 - RNA, 2742 nt, synthetic construct
  misc_feature 1..2742: note = source = /note="Description of Artificial Sequence: Synthetic coding sequence"
  source 1..2742: mol_type = other RNA
atgggccctgaagcattatctagcctgctgcttctccttctcgttgccagtggcgatgccgatatgaagggccactttgatccagcgaaatgtcgatacgctctgggcatgcaggacagaactattcctgatagtgatataagtgcatcatcgtcgtggagcgactctacagctgcccggcatagtcgcctcgaaagctcggacggggatggcgcttggtgccccgctggctctgtcttccccaaagaagaggagtatctgcaagtagacctccaaagactgcaccttgtggcattggtgggaacacaaggccgacatgcaggaggtttgggtaaggaattctcaaggtcttacaggctgagatatagcagagacggtaggcgttggatggggtggaaggatcggtgggggcaggaagttatctccggtaacgaggacccggagggggtggtgttgaaagatttgggcccaccgatggttgcacgattggtgaggttttaccctagagcagatcgagtcatgagtgtctgcttgcgcgtagaactgtacggatgcctgtggagggacggcctgctcagttacaccgcgcccgtagggcagactatgtacctgtctgaagccgtatatctgaacgattcaacctatgatggccacacggttggaggactccagtatgggggcctgggacaactcgcagacggggttgttggccttgatgactttaggaagagccaggaattaagggtctggcctggctatgactatgtgggatggtctaaccattcattcagctccggctatgtagagatggaattcgaatttgacagactgagagcctttcaggccatgcaagtccactgcaataacatgcatacgcttggtgcacgtcttccaggcggtgtggaatgtagatttagaaggggcccagccatggcctgggagggagaacccatgcgacacaatcttggcggcaacttaggcgatccacgggcaagagccgtttcagtgcccttgggtggacgggtggctagattcttgcagtgcagattcttattcgcaggaccttggttgctattctcagaaattagctttataagtgatgtcgtcaataattcaagcccagctcttggagggacattcccccctgcaccttggtggccaccagggcctccgcctactaacttcagttcactcgaattggaaccaagaggacagcagcctgtcgcaaaggctgaaggctcccccaccgccatcctgatcggctgcctggtcgccatcatcttactccttctcctcattattgccctcatgctgtggagactccattggagaaggctgctgagcaaagctgaaagaagagtactggaagaggaactcaccgtacacttatcagtcccaggggatacgatcctcatcaataaccgccccgggcctcgggaacccccaccttatcaagagcccaggccgcgaggaaaccccccccattctgcaccctgcgttcccaatggctcagccttgctcttgtctaaccccgcctatcgcttactcctggccacttacgcacggcccccacgaggacccggtcctccaactcccgcctgggccaaacctactaacactcaagcatatagcggtgattatatggaaccggagaaacctggcgcccccctcttgccgccacctccacaaaactcagtgccccactacgccgaagccgacatcgtcactctccaaggcgtcacaggtggtaacacatatgctgtgcccgcattaccgcctggtgctgtcggggacggaccgcctcgagtggactttcccaggagcagactacgattcaaagaaaagctaggtgaagggcagtttggagaagttcatctgtgcgaagtggacagcccacaagacctggtctcacttgatttcccactgaacgtgcgcaagggccacccattacttgtggccgtgaagatcctgaggcctgatgctacaaagaatgcgcgaaatgacttcctcaaagaggtgaagattatgtctagactcaaagacccaaatataatccgtcttctgggcgtgtgcgttcaagacgacccactctgcatgataaccgattatatggaaaacggcgatctgaatcagttcttatcagcccaccaactggaggataaagctgcagaaggtgcacccggtgatggccaggctgcccagggtccaacaatttcctatccgatgctactccatgtggccgcgcaaatagcttcaggaatgaggtatttggcaacactgaacttcgtccaccgagatctcgcaacccggaattgtctcgtaggagagaattttacaatcaagatcgctgacttcggaatgagtaggaatctatatgccggggactactatcgtgttcagggacgcgcggtgctgccaataaggtggatggcttgggagtgtatactcatggggaaatttacaaccgcttccgatgtttgggcatttggagttacattatgggaagtattgatgctctgccgcgcacagccattcggtcaactgacagacgaacaggtgattgagaatgccggcgaatttttcagagaccaaggcagacaggtttatctgagccgcccgcccgcctgcccccaggggttgtatgaactgatgctgagatgttggtctcgagagtctgagcaaagacctcccttctcccaactccaccgatttctggccgaagacgcactcaatacagtatag

SEQ ID NO: 14387 - RNA, 2742 nt, synthetic construct
  misc_feature 1..2742: note = source = /note="Description of Artificial Sequence: Synthetic coding sequence"
  source 1..2742: mol_type = other RNA
atggggcccgaggcactatcttcactcttgctgttactgctcgtcgccagtggcgacgcggatatgaagggccatttcgacccagccaaatgcagatatgcccttggcatgcaagaccgcactatccctgactcggacatctctgcaagttcctcatggtctgactccacagcagctcgccactcaagacttgaatctagcgacggcgacggtgcctggtgcccagctggcagtgtattccccaaggaagaagagtatctccaggtggacttacagagactccatctagtggcgcttgttggtactcagggacgacacgcgggtggtctcggtaaggagttttcaagaagctacagactgaggtacagtagggacggaaggcgttggatgggatggaaggaccgttgggggcaggaagtcatttcaggcaacgaggatccggaaggcgtggttcttaaggatttaggaccccctatggtggctcgtttggtgaggttttatccgagagcggacagagtgatgagtgtgtgtcttagagtcgagttatatggctgtctgtggagagatggattactttcctatactgcccccgtggggcagaccatgtatctctctgaagctgtctatctcaacgattctacttatgacggccacacggtgggaggcctgcaatatggaggtttaggtcaattagcagatggggtggtaggattggatgactttcgaaagtcccaggaactgagggtttggccgggatatgactatgtcgggtggagtaaccactccttttcaagcggatacgtggaaatggaatttgagtttgaccggctgcgcgcattccaggcaatgcaggtacactgcaataacatgcatacactgggagcaaggctgcccggcggcgttgaatgtcggtttcgacgcggaccagcaatggcctgggaaggtgagcccatgcggcataatctcggcggcaacctgggcgacccacgggcacgcgcagtttcagtgccactggggggtagggtcgcacggtttcttcagtgtcgattcctctttgccggaccttggctgctcttctctgaaatctcctttatctcagatgtcgtcaacaactcgtcacctgctcttggcggaacattcccacctgcaccttggtggcctcccggaccacctcctactaatttttcaagtttggagttagaaccccgcggccagcaacctgtggcaaaagctgagggcagcccaactgcaatattgatcggctgcctggtcgccattatactgctactgcttctcatcattgctttgatgctgtggagactccattggagacgattactgagcaaggcggaacgaagagtgctcgaagaggaacttactgttcatttatctgtgcccggcgatactatactgattaacaacaggcccggccctcgggaaccacctccctaccaagaacctaggcctcgaggcaatcctccccacagcgccccctgcgtcccaaatggctccgctttacttttgtccaaccccgcgtatcggctcctcctggcaacgtacgctcggcccccccggggaccaggcccccccacacctgcctgggcaaaaccgaccaacacccaggcctattctggtgactatatggagcctgagaaacccggagcccctctactgccgccacccccccaaaattctgtgcctcattacgccgaagcggatattgtcacactgcagggagttaccggaggcaatacatacgctgtacccgcacttccccctggtgccgtcggagatgggccaccacgagtcgactttccccggtccaggttgcggttcaaagagaaattaggtgaggggcagttcggcgaggtacacctttgcgaagtcgatagtccacaggacctagtctcacttgatttccccctgaatgtcaggaaaggacatccattgctggttgccgtcaagatcctgcgccccgacgctactaaaaatgccaggaacgactttctgaaggaagtgaagataatgagcagattgaaggaccccaatattatcagacttctcggggtatgtgtgcaggatgatccattatgcatgatcactgattacatggagaacggagacctgaatcagttcttaagcgcacaccaactagaagataaagccgctgagggagccccgggagacggtcaggccgcacagggacccaccataagttaccccatgttgctgcatgtagctgcccagattgcctccggcatgcgctatctcgccacgctcaactttgtgcaccgtgaccttgcaacgcgtaactgccttgtgggcgaaaatttcacgatcaaaatcgctgactttggcatgtcaaggaatctctacgccggggactactatcgggtccaaggcagggctgtgttgccgataagatggatggcatgggagtgcattcttatggggaagttcacaactgcaagcgacgtgtgggcatttggcgtgacgttgtgggaggtgctcatgctgtgtcgtgcccaaccatttggacaacttacagacgaacaagtcatcgagaatgccggcgagttttttcgggatcagggcagacaggtttatctatccagaccaccagcttgtccccagggtctctacgagctaatgctgagatgttggtccagagaatccgaacagcgccctccctttagtcagttgcaccgatttctcgccgaagatgccctgaatactgtctag

SEQ ID NO: 14388 - RNA, 309 nt, synthetic construct
  misc_feature 1..309: note = source = /note="Description of Artificial Sequence: Synthetic coding sequence"
  source 1..309: mol_type = other RNA
atgtcggtaatgaaaccgtgtctcatgaccatagcaattcttatgatcctagcacagaagaccccgggcggcctttttagaagtcataacgggaaatctagagaaccgtggaacccttgtgaactgtaccaggggatgtgtcgcaatgcatgccgcgagtatgagattcagtacttgacctgtcctaatgatcagaagtgttgtctaaaacttagcgtcaaaatcacatccagtaagaatgtcaaagaagactatgactcaaatagtaaccttagcgtgaccaactcctctagttacagccacatttag

SEQ ID NO: 14389 - RNA, 267 nt, synthetic construct; identical to SEQ ID NO: 12750
  misc_feature 1..267: note = source = /note="Description of Artificial Sequence: Synthetic coding sequence"
  source 1..267: mol_type = other RNA

SEQ ID NO: 14390 - RNA, 1401 nt, synthetic construct
  misc_feature 1..1401: note = source = /note="Description of Artificial Sequence: Synthetic coding sequence"
  source 1..1401: mol_type = other RNA
atgaagcctccactgctagtattcattgtctgcctgctgtggctgaaagactcccactgcgccccaacgtggaaagataaaacagcaatctctgaaaatttgaaaagcttctcagaggtgggcgagattgacgctgacgaggaggtgaagaaggcactcacaggcattaaacaaatgaaaataatgatggaaagaaaagaaaaggagcataccaacctgatgtccacccttaaaaaatgcagagaagaaaaacaagaagcgcttaagttacttaacgaagtacaggaacatcttgaggaagaagaacggctttgccgcgagtcgttggccgattcctggggagaatgccggtcctgcttggagaataattgtatgaggatctacacgacctgccagccatcatggtcctccgttaaaaataaaatagaaaggtttttccggaagatttaccagtttctgttccctttccatgaagataatgaaaaggatctacccatttccgaaaaattgattgaagaagacgcccagcttacacagatggaagacgtatttagccagcttacagtagacgtcaatagtctgttcaaccgttcattcaatgtatttagacaaatgcaacaagagtttgatcagactttccaatcacacttcatctccgacacagatcttactgaaccttatttctttcccgccttctctaaggagcctatgacaaaagcagatctcgagcagtgctgggatattccaaacttctttcagttgttctgcaacttttcagtgtctatttatgagtcagtatccgaaaccataacaaaaatgctgaaagccattgaggatctgcccaagcaggacaaagcccccgaccatggtggcttgattagcaaaatgctgccaggccaggacaggggtctgtgcggcgaactggaccaaaacttgagccggtgtttcaaattccatgaaaagtgtcaaaagtgccaggcccacctatcggaggattgcccagacgtgcctgctctgcatacggaactggatgaagctattagacttgtgaacgtcagcaaccaacaatacggacagatactgcagatgaccagaaagcatttagaggacaccgcctacctcgttgaaaagatgcgtggccagttcggttgggtaagtgaactcgccaaccaggcacccgagactgagatcattttcaactcaattcaggtagttcctaggatccacgaaggtaacataagcaaacaggatgaaactatgatgactgatctatcaatactaccttcatccaactttacacttaaaatccctctcgaggaaagcgccgagtcttcgaacttcatcggctacgtagtcgccaaagcccttcagcattttaaagaacacttcaaaacttggtag

SEQ ID NO: 14391 - RNA, 207 nt, synthetic construct; identical to SEQ ID NO: 12752
  misc_feature 1..207: note = source = /note="Description of Artificial Sequence: Synthetic coding sequence"
  source 1..207: mol_type = other RNA

SEQ ID NO: 14392 - RNA, 420 nt, synthetic construct
  misc_feature 1..420: note = source = /note="Description of Artificial Sequence: Synthetic coding sequence"
  source 1..420: mol_type = other RNA
atgtataaactggcctcctgctgccttctgtttattgggttcctaaacccactgctgtccctccctctgttagactcgcgcgagatatcgttccagcttagcgctccccacgaagatgccagattaactcctgaagaactcgagcgtgcgtctctcttgcagatcttacctgaaatgctcggcgcagaacgcggcgacatcctccgaaaagcagatagctctaccaacatctttaatccacgcgggaatctccgtaagtttcaagactttagtggtcaggaccctaatatactgctatcacatttgcttgctagaatttggaagccttacaaaaaacaaaggaggaagctacgccaggatctaagactatggaaaaaggagccaggtctccgtatattcaagaactacgtctacatttag

SEQ ID NO: 14393 - RNA, 1974 nt, synthetic construct
  misc_feature 1..1974: note = source = /note="Description of Artificial Sequence: Synthetic coding sequence"
  source 1..1974: mol_type = other RNA
atgcgcacagttgtactgaccatgaaagcgtctgtgattgaaatgttcttagtacttctggtgactggtgttcactcaaacaaggagacagcaaagaaaatcaaaagacccaaattcactgttccacagatcaactgtgacgtcaaagccggtaagattatcgatcctgagtttatcgttaaatgcccagcaggctgtcaagatcccaagtatcacgtctacggaactgacgtgtatgcctcctattccagtgtctgtggggccgccgtgcattcaggggtgctcgacaattctgggggtaagatcctggtacgtaaggtggctgggcagagcgggtacaaagggtcttattctaacggcgtccagagcttaagtctgcccaggtggcgagaaagcttcattgtactggaaagcaaaccaaaaaagggcgttacttatccatccgcacttacatattcttccagcaaatccccggcagcacaggcgggcgagacaacaaaggcctaccagcggcctcccatacctggcactactgcacaacctgttactcttatgcagctgcttgccgtgaccgtggccgtcgcaacaccaacaacactcccaaggcccagcccaagcgccgcctcaacgacatccataccacgcccccagtccgtaggtcaccgtagccaagagatggatctttggagcacggccacctacacttcctcacagaaccggcctcgagccgaccccggtattcaacgccaggaccccagcggagcagccttccagaagccagttggcgccgatgttagccttgactgcaagatagatctttccttcttaattgatggttctacctctattggcaagagacgctttaggattcaaaaacaattactcgcagacgttgcccaagctctggatatagggccagcaggtccactcatgggcgtggtacagtacggcgataaccccgccacacattttaatctaaagactcacacaaattctcgtgacttgaagacggcgattgaaaagatcactcagaggggcggcttgtcgaacgtgggcagggccatctcttttgttacaaaaaatttcttctctaaagccaacggaaacagaagtggtgcacccaacgtagttgtggttatggtagacggttggccaactgataaggtggaagaggcatctaggcttgctagagaatcgggaattaatatttttttcatcactatagagggcgccgcagaaaatgaaaaacagtacgtggtcgagcccaattttgcgaataaggcagtttgcagaaccaacggtttctattccctgcacgtgcagagctggtttggactccacaagaccctgcagccacttgtcaaacgtgtttgcgacaccgatcgcctggcttgctccaagacgtgcctgaattccgcagacattggctttgtgatcgacggtagcagttccgttggcacaggtaattttagaaccgtgctacagttcgttacgaacctgactaaggagttcgagatcagcgataccgatacaaggattggcgccgtacaatatacatacgagcaacggctagaattcggatttgacaagtacagctctaaacccgatatcctcaatgcaatcaaacgagtgggttactggagtgggggcacttccaccggtgccgccataaactttgcattagaacaactgtttaaaaagtctaaaccaaacaaacgaaaacttatgatactcattaccgacggtcgttcctatgatgatgtgcgaatccccgctatggcagcccacctgaagggagttattacgtatgctattggggtcgcttgggccgctcaagaagaactcgaggtaatcgccacacaccctgctcgcgaccactcctttttcgtcgacgagtttgacaatttgcaccagtatgttccacgtattatccaaaatatctgtacagaatttaacagccagcctcgcaattag

SEQ ID NO: 14394 - RNA, 3975 nt, synthetic construct
  misc_feature 1..3975: note = source = /note="Description of Artificial Sequence: Synthetic coding sequence"
  source 1..3975: mol_type = other RNA
atgagacatggcgttgcttgggccttgctggtagccgctgctctggggctgggcgcgagaggagttcgtggggcggttgctctcgccgatttctatccctttggggcggagaggggcgatgccgttacgcccaaacaggatgacggcggttctggattgcgcccgctgtccgtgccttttcctttcttcggcgctgaacacagtggactgtatgtgaacaataatgggataatcagtttcttgaaagaggtttcacagtttaccccagttgcgtttcctatagccaaagaccgctgcgtggtcgcagccttctgggctgacgtagacaaccgccgcgcaggagacgtctattatagggaagcgaccgatcccgcaatgctcagacgcgctacagaggacgtgcgacactactttccagaactgttagatttcaatgccacttgggtgtttgttgccacttggtatcgagtaacctttttcggcgggagctcctcctctccggtaaatacttttcagactgtattgattaccgacggcaagctcagctttaccatcttcaactatgaatctatcgtatggaccacaggcacacacgcatcttcaggaggtaacgctaccggactcgggggaatcgccgcccaggctgggttcaacgctggcgatggtcagcgctatttctcgatccctggatcacgaacagcagacatggccgaagtcgaaaccactactaatgtgggtgtacccgggcggtgggctttccgtatcgacgatgcccaggtgagggtgggcggatgcggccacactacaagcgtgtgcctggctctgcgaccttgtcttaacggaggaaaatgcattgatgactgtgtgaccggcaatccttcctatacctgcagctgtctctctggctttactggtagaagatgccatctagacgtgaatgaatgcgccagccagccatgtcagaacggaggcacctgcacacatgggattaactcttttaggtgccaatgtccagctggatttgggggacctacctgcgaaacagcccaatctccttgtgatactaaggaatgccagcacgggggacagtgccaagtggaaaacggatccgctgtatgtgtgtgccaagcaggatataccggagccgcatgtgaaatggacgtggacgactgctcccccgatccttgtctcaatggaggctcttgtgtggacctagtaggcaactatacctgtctgtgcgccgaaccgttcaagggacttcgctgtgagaccggcgaccaccccgtgcccgacgcatgtctgtcagcaccttgtcacaatgggggcacatgtgttgacgccgatcaaggttacgtgtgcgagtgtccggaaggtttcatgggcctcgattgcagggagagagttcctgatgactgcgaatgccgaaatggcggaagatgtctaggcgccaacactaccctgtgccaatgccctctaggtttctttggcctcctgtgcgaattcgagattacagcgatgccctgtaacatgaatacccagtgtcccgatggcggctattgtatggaacacggcggctcttatctctgtgtgtgccataccgaccacaatgcttcacactccctaccctccccttgcgattcagacccatgtttcaatggtggatcttgtgatgcccacgacgactcctatacctgtgagtgcccccgaggctttcacggtaagcactgcgaaaaggcacgtcctcacctttgcagttctgggccctgcagaaatggaggaacgtgtaaagaggcaggaggcgaatatcactgttcttgtccttataggtttacaggcagacactgcgaaattggaaaacctgactcatgtgcaagtggtccatgccataacggcggcacctgtttccactacatcggaaagtataagtgtgactgccctccggggtttagcggacgccattgcgaaattgctccaagtccttgcttccgaagcccatgcgttaacggaggaacttgcgaggatagagataccgattttttttgccactgtcaagcagggtacatgggcagacggtgtcaggccgaagtggattgtggtccacccgaagaggtgaaacatgccactctgcgctttaacggaacccggctcggagcagtggccctctatgcatgtgatagaggttacagtttgagcgcaccttcgcgaatccgagtgtgtcagccccacggagtctggtcagaacctccacagtgcctggaaatcgacgaatgcagaagtcagccttgtctgcacgggggtagctgtcaggacagagtggcaggatacctctgcctctgctcaaccggttatgaaggagcccactgcgagctcgaaagagacgaatgtcgcgcacatccatgcaggaacggcggttcctgccgtaatctcccaggggcctacgtttgtcggtgtcccgctggatttgtaggagtgcactgtgaaaccgaagtagatgcgtgtgacagctcaccatgccaacatggcggccgctgtgaatccggtggcggtgcttatctgtgtgtttgtcccgaatcattttttgggtaccattgcgaaacagtctcggacccctgtttcagtagcccttgtggcggccgcggatactgcttagcttccaatgggtctcactcatgcacatgtaaggtcgggtacacgggcgaggactgcgctaaagagcttttcccgccaacagcactaaaaatggagcgggttgaggaatctggcgtttctatttcttggaatccccccaatggacccgccgccagacaaatgttagacggatacgcagttacttacgtgtcgagcgatggctcttacaggcgaacagacttcgtagatcgcacccgttccagccaccagctgcaggcgctcgctgccggacgggcctataatatcagcgtattctctgttaagcggaattccaacaataaaaatgatatctcaagacccgccgtcctccttgctagaacgagacctcgaccggttgagggtttcgaagtcaccaacgtaacagcatccactatctccgtccaatgggcgcttcacaggatccgccacgcaactgtgtctggagtccgcgtgtccatccgccatccagaggctctgagagatcaagcaactgacgtcgatagatcagtggacagatttacctttcgcgccctacttccaggcaagaggtatacgatccaactaacaactttgagcggcctgcggggggaggaacaccctaccgagtctctggccactgcacctacccatgtatggacaaggcccttgccacccgctaaccttaccgcggcacgtgtgacagcaaccagcgctcatgtcgtgtgggatgcaccaacacccggctcactattagaggcttatgttataaatgtgaccacctctcagtccaccaagagtcgatatgtccccaatggaaagctggccagttatacagtgcgggatctcctccctggacgtcgctaccagttgtccgtgatcgccgtacagtcaacggaactcggaccacagcattctgagcccgctcatctttacattattacttcaccccgagacggcgccgatcgacgctggcatcaaggaggccaccaccctagggtcttgaaaaaccgtcctcccccagcacggctccctgagctcagactcctgaacgatcattccgccccagaaactccaacacaacctccaagattcagtgaactcgtagatggaagggggcgagtgtccgccagattcggaggatctccatctaaagcggccaccgtgcgaagccaacccacagccagtgcacagctcgaaaatatggaggaagcccccaagagagtgagtctcgcactgcagctgcccgaacacggatcaaaggatatcggaagtgaatcagccgcactcgtcggaacacttggtctgacagactgttctcaagggccttag

SEQ ID NO: 14395 - RNA, 732 nt, synthetic construct
  misc_feature 1..732: note = source = /note="Description of Artificial Sequence: Synthetic coding sequence"
  source 1..732: mol_type = other RNA
atgggcatcttcctggtttacgtaggctttgtgttcttctcagtgctgtacgtacaacagggacttagtagtcaagctaaatttacagagttcccccgaaatgtaaccgccaccgaaggccagaatgttgaaatgtcgtgtgcgtttcagagcgggtctgccagcgtatatcttgagatccaatggtggtttttgagaggcccagaagacttggatccaggcgcagaaggagctggcgcacaggtggagctgctgccagaccgggacccagatagtgacggtacaaagatttctacagtcaaggttcagggaaacgatatttcacacaagctccaaatctcaaaagtgcgaaaaaaagatgaaggactgtacgaatgccgcgtgaccgatgccaattatggggagctccaggaacacaaggcccaagcatacttgaaagtgaatgctaacagtcatgccagacgcatgcaggctttcgaagcctcgccaatgtggctgcaggacatgaagcccaggaaaaacgtcagtgccgcaataccttcctcaatccacggctctgcgaatcagcgaacacactcaacttcctcgccccaagttgtcgccaagatccctaagcagagccctcagtcagggatggaaactcattttgaaccgttcatcctcccccttaccaacgcaccacagaaaggccagtcatatcgcgtggacagatttatgaacggcgacttctag

SEQ ID NO: 14396 - RNA, 1218 nt, synthetic construct
  misc_feature 1..1218: note = source = /note="Description of Artificial Sequence: Synthetic coding sequence"
  source 1..1218: mol_type = other RNA
atgtggtacgtttccacacggggagtggctccgagggttaattttgaaggagctctattctcaggctacgcccccgacggcggactgttcatgcccgaagagctcccccagctggacagaggcaccctgtgccagtggtccacactgtcctatccaggcttggtgaaggaactgtgcgcactgttcataggctcagaattgttaccaaaggacgaactgaatgatctaatcgacagagcattttctcgtttcagacaccgagaagtagtgcatctcagccggctgcgtaacggacttaatgtattagagttatggcatggggtgacatacgctttcaaggatctctctctgagctgcaccacacagtttctgcagtatttcctcgagaaaagggagaagcacgtgacagtagtggtgggcacctctggcgatacaggttctgcagccattgaaagtgttcaaggggctaagaacatggacattatcgttctgctcccgaaaggtcattgcactaaaattcaagaactgcaaatgacaacagttttaaaacagaatgtacacgtgttcggtgtggaagggaacagcgacgagctcgacgagccaatcaagacagtctttgcagatgtggccttcgtaaaaaagcacaatctcatgtctctaaattctattaactggtcaagggttttggtgcagatggcacaccacttcttcgcgtattttcaatgcactccaagtctcgatacacacccactgccactggtcgaagttgtggtcccaacaggcgctgccgggaatctggccgcaggctatatcgcgcagaaaatcgggcttcctatccgtttagtcgtggccgtcaaccgcaacgacatcattcaccgcacggtacagcagggcgacttctcactctctgaagccgtgaagtctacgttggcaagcgccatggacattcaggtcccctacaacatggaacgcgtgttctggctgctaagtggctctgattcccaagtaacccgcgctctgatggaacaattcgagaggacacagagcgttaatctgcccaaagagctgcacagtaagtgggagagacaagattacgagaaaatggctgtaatggaatgtgacggctgttgtgtcgaattgtgcctgggtaactgtggaccaagaaggggatccgtgaccgatataccagggactgcgatggtacggggcggggggtag

SEQ ID NO: 14397 - RNA, 573 nt, synthetic construct
  misc_feature 1..573: note = source = /note="Description of Artificial Sequence: Synthetic coding sequence"
  source 1..573: mol_type = other RNA
atgagaacagtagtgcttactatgaaagccagcgtgatagaaatgttcctagttcttctggtgacaggggttcattctaacaaagaaacagcaaagaagataaagcggcccaaattcaccgtgccccagatcaattgcgacgttaaagccggcaagatcatcgatcctgaattcatcgttaagtgccctgcagggtgtcaagacccgaagtatcatgtatacggtacagacgtctacgccagctattccagcgtgtgtggtgccgcagtgcattctggagttttagataacagcggcggcaaaatcctagtcaggaaagtggctggtcagtccgggtacaagggctcctattcaaatggagtacagtcactcagcctgccaagatggagagagagcttcatagtgttggagagtaaacccaagaaaggagtaacctaccccagtgccttaacttattccagctccaaatcaccagccgcacaagccgacctctggagcacggccacctatacctcttcccagaaccgtccccgtgccgatccagtgcagagacaaccctgttattccttgtag

SEQ ID NO: 14398 - RNA, 399 nt, synthetic construct
  misc_feature 1..399: note = source = /note="Description of Artificial Sequence: Synthetic coding sequence"
  source 1..399: mol_type = other RNA
atggcaccctctccacgcaccggctcgaggcaagatgcaacagcacttccctctatgagttctacgttctgggcatttatgattctcgcctctcttctaatcgcctactgttcacagcttgcagctggaacctgcgaaatcgtcactctcgatcgggattcctcacaacctagaaggacgatcgccagacagactgcacggtgcgcttgtagaaagggccagatcgcaggaacaacaagggcccgccccgcttgtgttgacgccaggatcattaaaacaaagcaatggtgtgatatgttgccatgtctagaaggagaaggatgtgatctgcttatcaatagatcaggttggacatgtacccagcccggaggaagaatcaaaacaacaaccgtgtcttag

SEQ ID NO: 14399 - RNA, 957 nt, synthetic construct
  misc_feature 1..957: note = source = /note="Description of Artificial Sequence: Synthetic coding sequence"
  source 1..957: mol_type = other RNA
atgctgcctttaacaatgacagtcttgattctgctcctgctcccaacaggacaagctgcgccaaaagacggcgtcactagaccagactccgaggtacaacaccagctgctcccgaacccattccagccaggccaggagcagttgggcttattgcagtcatatctgaaaggccttggcagaaccgaagtccaacttgagcacctctccagagaacaagtgttgctataccttttcgccctacatgattacgaccagagcggccagttagatgggcttgagctgttgtctatgctgaccgccgccctcgcacccggtgcagccaattccccaacaacaaaccccgttatattaattgtggacaaagtcttagaaactcaggatttgaacggagatggtctgatgacaccagccgaactgataaactttcccggtgtagcattgaggcacgttgagccgggggagcctctggcccccagccctcaagagccacaagctgttggccgccagtcactgctggctaagagcccacttaggcaggaaacccaggaggcacccggaccacgggaggaagctaagggacaagtcgaagcgagacgggaaagcttggaccctgtgcaagagccaggcggacaggcggaagcagatggcgacgtacccgggcctagaggcgaggcggagggtcaagccgaagcaaaaggcgacgctcccggaccaagaggcgaggcaggtgggcaagccgaagcagagggcgatgcccctggccctcgcggagaagcaggcgggcaggcggaggctgagggagacgcaccggggccacgaggtgaggcgggcggacaggccgaagccagagagaatggcgaagaggcaaaggagctgccgggggagactctggaatcaaagaatactcagaatgatttcgaagtgcatatagttcaggtagagaatgacgaaatttag

SEQ ID NO: 14400 - RNA, 399 nt, synthetic construct
  misc_feature 1..399: note = source = /note="Description of Artificial Sequence: Synthetic coding sequence"
  source 1..399: mol_type = other RNA
atgctgcccttgacaatgactgtacttattctgttgttgttacccactggacaggccgctcctaaggacggtgtaactcgaccagactcagaggtgcaacaccagctgctgcctaaccctttccagcctggccaggagcaactgggccttttgcaatcttacctgaaaggtctaggacgcaccgaagtgcagcttgaacacttgtctcgggaacaagttttgctttatctcttcgccctgcacgattacgatcagtccggccagctcgacgggctcgaactcctcagtatgttgacagctgccctggcccccggcgccgcaaattcccctacaacaaacccaggcaaccttgatgctagactcgacggcggtgaaaaagcaatgcagccccaatggtag

SEQ ID NO: 14401 - RNA, 732 nt, synthetic construct
  misc_feature 1..732: note = source = /note="Description of Artificial Sequence: Synthetic coding sequence"
  source 1..732: mol_type = other RNA
atgctgttgagcctcctgggagcctgtgcagttgtagggcccttccatggaccagaatgggaacctgtgcagggcctgctgtcgcagaatcactcatgtagggatcctcagtgttgtggaaacttattagtgctctgcctgtttcttgtgtggcaggtacggcactgttggcaccaagtgacacgaacccggttctcaactcgaaacgtaataaaagtacctcttcagaaacgcgctgtgccatctatgagatgtgaaaccgtgttcaagcttacccccgaatttttcagcccagggaaatcacgtggccttgactcacagcaatgcgcccagcggcagagatggggctaccgtagatctctccaggaaagttgggcccagaacttgctcagtcctcagcatccatgcccgggccctccttctggcgtccatacacattccgaacccatattttgcactacatcaatctccaatacttgtcttttaccccagaatagttcctggaaagcttggcaagtgccctggtgcctccacgacggacagaccaggcctgcccttgacatgtgtcaagagatggaacaactacttttacattcgcaggagcgtctagtgagccttgaacctgtgatctctgtgcggagccgtccgacttccatgaccctgaccacttccctgcccaatctcctttctgccgagcgactccagttttgtcctcagcgtgcaccggcctag

SEQ ID NO: 14402 - RNA, 2505 nt, synthetic construct
  misc_feature 1..2505: note = source = /note="Description of Artificial Sequence: Synthetic coding sequence"
  source 1..2505: mol_type = other RNA
atgaagcatactttagccttactcgcccccctgctggggctgggtctcggcttggccctctcacagctcgctgccggcgcaactgactgtaaatttctcgggcccgccgagcatcttacttttactcccgctgccagagccaggtggcttgcaccccgcgtccgcgcccccggactccttgatagcctctacggaactgttcggagattcttaagtgttgtgcaactcaatccctttccttccgaactggtcaaagcactattgaacgaattggcttcggtcaaggttaacgaggtggttcggtatgaggcaggttacgtggtatgtgcggtcattgcaggactctacttactgttagttccaaccgccgggttgtgcttttgttgctgtcgatgccacagacgttgtggtggtagagtgaagaccgaacataaggcccttgcctgcgagcgtgctgcactgatggttttcctacttctaaccacactcctgctcctgattggggttgtttgcgcatttgttaccaatcaaagaacccacgagcagatgggtccaagcatcgaagccatgcccgagactttattatcactctggggactggtgagcgatgtgcctcaggagttacaagcagtcgcacaacaattttccctcccccaagagcaggtgtcggaagaactcgatggggttggcgtctctataggatcagcgatccacacccaattgcgcagctctgtctaccccctcctcgctgccgtcggctcacttggacaggtgctccaggtgtctgttcaccatctacaaaccctaaatgcgaccgtggtagagttacaggctgggcaacaggacttggaacctgctatacgcgagcatcgagaccgtctacttgagttgttgcaggaggcccgttgccagggggactgcgcaggcgccttgtcttgggccagaacactggagttgggggctgacttttcccaagtgccaagcgtagatcacgtgcttcaccagcttaagggggtccccgaagccaatttttcaagcatggtgcaggaggaaaactcaacgttcaatgcccttcccgccttagccgctatgcaaacaagtagcgtcgttcaggaactcaaaaaagccgtggcacagcaacccgagggagtgcgcactctagccgaaggattccccggcctggaggcagctagtcggtgggcccaagccttacaggaggtagaagagtcctcacggccttacttgcaagaagtccagaggtacgagacttatcggtggattgtaggatgtgtgctatgctccgtggtcttgtttgtggtgctgtgcaacctgctgggtctcaacctcggtatctggggcctgtcagctagagacgatccctctcatcccgaggcaaaaggagaagctggggctcgctttctaatggccggcgtaggcctttcctttctgtttgctgcccccctgatcctactggtgtttgcaacattcttagtcggtggtaatgttcagacactagtctgtcagtcgtgggaaaatggagaactctttgagtttgcagataccccagggaatctgcccccctctatgaacctttcacaactgctgggactaaggaaaaatatttcaattcatcaggcttaccagcaatgcaaagaaggtgccgcactgtggactgtgcttcagctgaatgattcctatgacctggaagaacacctggacataaatcaatacaccaataagttacgtcaggaactgcaatctctcaaggtcgacactcagtcactcgatctcctttcttctgcagctaggcgcgatctcgaagcccttcaatctagcggactgcaaaggattcactaccctgactttcttgttcagattcaacgtccggtcgtaaagacctccatggagcaattggcccaagaactacagggtttggctcaagcacaggataattccgttctcggacagcgcctgcaggaggaagctcaggggttgcggaacctccaccaggaaaaggttgtcccccaacagtctctggtcgcaaaactcaacctgtctgtgagagcacttgaaagctcggcccctaacctgcagctagagacctccgacgttctggcaaatgtgacatatctgaaaggcgaactccccgcatgggctgccagaatactgaggaatgtctcagaatgctttctagcgagagagatgggctacttctcacagtatgtcgcctgggtgagggaagaggtcacccagcgtattgctacatgtcagcctctgtccggtgccttagacaactcgcgtgtcattctttgcgatatgatggccgacccatggaacgcattttggttttgcttggcttggtgcactttctttctgattccttctataatctttgcggtgaaaacgtccaagtacttccgccccatccgtaaacgactgtcaagcactagctccgaggaaacccaactatttcatatcccaagagttacgtctctgaaactttag

SEQ ID NO: 14403 - RNA, 1185 nt, synthetic construct
  misc_feature 1..1185: note = source = /note="Description of Artificial Sequence: Synthetic coding sequence"
  source 1..1185: mol_type = other RNA
atgtggaggtgtcccctcgggctgctgctccttctgccactggcaggacatttagcgctcggtgctcaacaggggagaggccggagagagttagcaccagggctgcacctgcgggggattagagacgccggaggccgctattgccaggaacaggacttatgttgtagaggcagggccgacgactgtgccctcccttacttaggcgctatatgttactgtgatctgttctgtaaccgcaccgtcagtgactgctgtccattcccccccatacagggatgtatgcacggcggaagaatttaccctgtgctcggtacctactgggataattgcaaccgctgtacatgccaggaaaaccgccagtggcagtgtgaccaagagccttgtcttgtggaccccgatatgatcaaggcgataaaccaaggaaattatgggtggcaagcaggaaatcactcagcattctggggcatgacattggacgaaggaatacgctacaggttaggaacgattaggccttcatcgagtgttatgaatatgcacgagatctatactgtcctaaacccaggagaagtattacccacggcctttgaagcctccgaaaagtggcctaacctgatccacgaaccactggaccaaggcaattgtgcaggctcatgggccttttccaccgccgccgtggccagtgaccgcgtgtctattcactctctcggacatatgacacccgtactcagcccgcaaaatttgctatcttgtgatacacatcagcagcagggatgccgaggaggacgactcgacggcgcttggtggtttttaaggagacgcggagtagtgagcgatcattgctatcccttcagcggccgcgaaagagatgaagccggccctgccccaccatgtatgatgcactcaagggccatgggcagaggtaaacgccaggcaaccgctcattgtcctaattcttacgtaaacaacaatgacatctaccaagtgacgcccgtatatagactaggaagtaatgacaaagagattatgaaggaactgatggagaacggacccgttcaggctcttatggaggtccacgaagatttttttttgtacaaaggaggcatatactcccatacacctgtcagtcttggcagacctgaacggtatcggaggcacggcacccacagcgtgaaaattactggttag

SEQ ID NO: 14404 - RNA, 303 nt, synthetic construct; identical to SEQ ID NO: 12765
  misc_feature 1..303: note = source = /note="Description of Artificial Sequence: Synthetic coding sequence"
  source 1..303: mol_type = other RNA

SEQ ID NO: 14405 - RNA, 978 nt, synthetic construct
  misc_feature 1..978: note = source = /note="Description of Artificial Sequence: Synthetic coding sequence"
  source 1..978: mol_type = other RNA
atgagactgcctagacgagctgccctcggtttactccctctccttctcctcctgccccctgcgccagaagccgccaaaaagccaaccccatgtcaccgctgcagaggactggtcgataagtttaaccagggaatggtcgacaccgctaagaagaactttgggggcggcaacactgcttgggaagaaaagacgctgagtaaatacgagagcagcgagattcggttactggaaattctcgagggtttgtgtgagtcaagtgatttcgaatgcaaccagatgcttgaagcccaagaggagcacttggaggcctggtggttacagttaaaatcggaataccccgacctattcgagtggttttgcgtaaagaccctgaaagtgtgctgtagtcccggaacatacggacctgattgtctggcatgtcagggcggatctcagcggccatgttcaggaaatggacactgttctggcgatggttctcgccagggtgatgggtcgtgtagatgtcatatggggtaccagggacctttatgtactgactgtatggacggatacttctcctctcttcgcaatgaaacccacagcatttgtacggcctgtgacgaaagttgcaagacctgttcaggcttgaccaatagagactgcggtgagtgcgaggtaggatgggtgcttgatgaaggcgcctgcgtggaatgcgacagcagctgcgtcggttgcacaggagaaggccctggaaactgcaaagaatgtattagcggctacgccagagaacacggacagtgtgcagatgtggacgaatgttctctcgccgagaagacatgcgttaggaagaatgagaactgctataatacccccggcagctacgtgtgcgtgtgccccgacggcttcgaagaaacagaggatgcctgcgtccctcctgctgaagctgaagccaccgaaggagagtcaccaacacaactaccatcccgggaggacctctag

SEQ ID NO: 14406 - RNA, 459 nt, synthetic construct
  misc_feature 1..459: note = source = /note="Description of Artificial Sequence: Synthetic coding sequence"
  source 1..459: mol_type = other RNA
atgcggggaccaggacacccacttttactcggcttactgttggtccttggggctgccggtaggggaagagggggagcagaacctcgggaaccagccgacgggcaagcactgctgagactggtggtagaacttgttcaagagctccgcaaacaccactccgctgaacataaggggctgcaactgctgggtagagactgtgcactcggtcgcgctgaggctgcaggactggggccatcccccgagcagcgcgtggaaatcgttccccgcgacctccgtatgaaggataaatttcttaagcatctcactggaccactgtatttttcccctaaatgttcgaaacacttccatcggctttatcataatacaagagattgcactatccccgcctactacaaaagatgcgccagactcctgacgaggttggctgtaagccccgtatgcatggaagacaagcaatag

SEQ ID NO: 14407 - RNA, 411 nt, synthetic construct
  misc_feature 1..411: note = source = /note="Description of Artificial Sequence: Synthetic coding sequence"
  source 1..411: mol_type = other RNA
atggcacgaaccaagcagaccgccaggaaaagtacgggtggcaaggcaccacgcaagcagctggccaccaaggcagccagaaaatccgccccagctaccggcggagtcaagaaaccacacaggtaccggcccggcacagtggcactacgagaaattcgccgatatcagaagtctactgaactcttaatccgaaagctgccttttcagagactggtacgtgagatcgcccaggactttaagaccgatcttcgctttcaaagctcagctgtcatggcactgcaggaagccagtgaggcatatcttgtcgggctgtttgaggacactaacctctgtgctattcacgctaaacgggtaacaattatgccaaaggacattcaactggccaggcgcatcaggggcgaaagagcgtag

SEQ ID NO: 14408 - RNA, 1209 nt, synthetic construct
  misc_feature 1..1209: note = source = /note="Description of Artificial Sequence: Synthetic coding sequence"
  source 1..1209: mol_type = other RNA
atgaggcttcccagacgcgcggctctgggactgctgcccctattgctcctactgccgccagcaccggaagccgctaaaaaacccacaccatgtcacaggtgccggggcctagttgacaagttcaaccagggtatggtcgacactgcgaaaaagaactttggcggagggaacaccgcttgggaggagaagacactctctaaatacgaatcatccgaaattagactccttgaaatactggaaggcctctgtgaatccagcgatttcgagtgcaatcagatgctcgaggcacaagaagagcatttagaggcttggtggctgcaactgaagtccgagtatcccgatctcttcgaatggttttgtgtgaagaccttgaaagtgtgctgctccccaggaacgtacggacctgattgcctggcctgccaagggggttctcagcggccatgttctggtaacggccattgttctggggatggaagtcgtcaaggagacggatcctgccgctgccacatgggctaccagggccccctttgtactgactgtatggacggatacttctcttccttacgcaacgaaacgcactctatttgtacggtgagaactggattgagtgacagttaccccccatgttgcttgtccctaggatgctggagaggagtaggacacgcttggattagaggccgcaacacacacacacaaccagggtattcttccagagtgtggatcgcagctttttcaccggcctgcgacgagagttgcaagacatgcagcggactgactaatcgagactgcggagagtgtgaggtgggctgggtgttggatgaaggcgcttgcgtggacgttgacgagtgtgcagcagaaccaccaccctgtagtgctgcccagttctgtaagaatgctaatggatcctatacctgtgaagaatgtgattcctcctgtgtaggatgtaccggagaagggccaggaaattgcaaagagtgtattagcgggtatgcgcgcgagcacggccagtgtgctgacgtggatgagtgtagcctggcggaaaaaacctgtgtgagaaagaatgaaaattgctataacaccccggggagctacgtatgtgtatgtccagatggctttgaggaaaccgaagatgcctgcgtaccgcccgccgaggccgaagcaaccgagggtgaatcccctactcagctgccctcaagagaggatttatag

SEQ ID NO: 14409 - RNA, 633 nt, synthetic construct
  misc_feature 1..633: note = source = /note="Description of Artificial Sequence: Synthetic coding sequence"
  source 1..633: mol_type = other RNA
atgtcagctggcaagatgatgcgaaccctgatcaccacccacccgttaccactgctcctgctcccccagcagctgctgcaattggtccaatttcaagaagtagacacagactttgacttccccgaggaagataaaaaggaagagttcgaagaatgtctagagaaatttttcagcacaggtcccgcacgaccaccgacaaaggaaaaagtgaaacgtagagtattgatcgaacccggcatgcctctcaatcacatagaatactgcaatcacgaaatcatggggaagaacgtctactacaagcatcgatgggtcgccgaacattatttcctgctcatgcagtatgatgaactccagaagatctgttataaccggtttgtgccatgcaaaaatgggatcaggaagtgtaaccgaagtaaaggactggtcgagggcgtttattgtaacctcactgaggcatttgagatacccgcttgcaaatacgaaagtctgtatcgtaagggatatgtgctgatcacttgcagttggcaaaatgaaatgcaaaagagaatcccacataccattaacgatctggttgagcctccagagcaccgcagcttcttaagcgaagacggcgtatttgtgatcagtccttag

SEQ ID NO: 14410 - RNA, 585 nt, synthetic construct
  misc_feature 1..585: note = source = /note="Description of Artificial Sequence: Synthetic coding sequence"
  source 1..585: mol_type = other RNA
atgacaatgagacataattggacccccgatctgtctcctttgtgggtactgttgctgtgtgcacatgtggtaactctacttgtccgcgcgactcccgtgtcacagactactaccgcagctacagccagcgtacgctctactaaggacccttgcccttcccaacctccagtatttccagcagctaagcaatgtcctgccctcgaagtcacctggcccgaagttgaggttccattaaatggcacccttagtttatcatgcgtagcttgttcacgattcccaaacttttccattctctactggctcggaaatggctcattcattgaacatctacccggacgtctgtgggaggggagtacaagtagggaacggggtagtacaggaactcagctctgcaaggccctggtgctggagcaactgactcccgcactacactccaccaacttttcatgtgtacttgtggaccccgagcaagtcgtgcagaggcacgtggtactcgcacagctctgggccggccttcgtgcgaccctgcctcccacgcaggaagccctcccaagctctcattcttcaccacaacaacagggttag

SEQ ID NO: 14411 - RNA, 4059 nt, synthetic construct
  misc_feature 1..4059: note = source = /note="Description of Artificial Sequence: Synthetic coding sequence"
  source 1..4059: mol_type = other RNA
atgaggcacggagtggcttgggccctcttggtcgcggccgctttgggactgggcgcaaggggggtacgaggggctgtggcattggcagatttttacccttttggcgcagaacgcggtgatgccgtcacccccaaacaagacgacggtggcagtggattacgcccgctaagcgttccgtttcctttctttggggctgaacacagtggcctttacgtaaacaacaatggaatcattagttttctgaaagaagtgagtcagtttacacctgtagccttccccatcgctaaagatagatgcgttgtcgctgccttctgggctgacgtagataaccgacgcgctggcgatgtgtactacagagaagccactgatcccgctatgctgagacgtgcaactgaggatgtccgacattactttccagagctccttgactttaacgctacatgggtcttcgtggccacctggtaccgggtgaccttctttgggggttcctcctcttctccagttaacaccttccagacagtcctgattaccgatggcaaactctcctttacaatcttcaactacgaatctattgtgtggaccaccgggactcacgcatcctcagggggcaacgccacgggactgggaggcatcgccgctcaggcaggcttcaacgctggtgacggccaaagatatttttcgatccctgggagtcgcaccgccgacatggctgaggtcgagaccactactaacgttggcgtcccaggaagatgggcctttcgtattgacgacgcacaagtaagagtagggggctgtggacacaccacttccgtatgcctggcactgcggccttgtctgaacggcggcaaatgtattgatgactgcgtgactggaaatccttcctatacatgctcttgcctgtccgggtttaccgggaggagatgccatctggacgtgaatgagtgtgcttcacaaccctgtcagaatggtggaacctgcacccacggcataaattcctttaggtgtcagtgtcccgcgggttttggtggccccacatgtgaaacggctcagtccccttgcgatacaaaggaatgccagcacggcggccagtgccaagtcgagaatggtagcgcagtgtgtgtgtgtcaggcaggttacacgggagctgcctgtgaaatggatgtggatgactgttcccctgatccctgcttgaatgggggctcctgtgtggatctagtgggaaattacacttgcctatgtgctgaaccctttaaaggccttcgatgcgagaccggagaccatcctgtgcccgatgcatgtcttagtgcaccatgccataacggcggcacatgtgtggacgctgatcagggatacgtctgcgagtgccctgaaggttttatgggcctcgattgcagggaaagagtaccagatgattgtgagtgtaggaatggaggaaggtgtttgggagctaacacaaccctatgccaatgccctctgggcttttttgggttattatgtgagttcgaaattacagccatgccttgtaacatgaatacacagtgccccgatgggggatattgtatggaacatggaggctcctacctgtgtgtatgtcataccgaccataatgcctctcactcattgccatctccatgcgattctgacccctgcttcaatggtggatcatgcgatgcccacgatgactcgtacacatgcgaatgccctagaggcttccacggtaaacattgcgagaaagcccgaccccatctttgtagctctggtccctgtagaaacggcggaacctgtaaggaagcaggtggcgaataccattgtagctgcccatataggttcaccggtagacactgtgaaattggcaaacccgatagttgcgcctccggaccatgccacaacggtgggacatgctttcattacattgggaaatacaaatgcgattgtccaccaggttttagcgggagacattgtgaaatcgccccgtctccatgctttcgaagtccgtgtgtgaacggcggaacctgtgaagaccgagacaccgatttcttttgccactgtcaggcaggatacatgggaagaaggtgccaggcggaagtggactgtggccctcctgaagaggtgaaacatgccacactgcggtttaacggaacaaggcttggtgctgtggctctgtacgcatgtgatcgcggttattcactctcggctccgtcaaggatccgggtctgtcagccacacggcgtctggagcgagcccccccagtgcctcgaaatagatgaatgcaggagtcagccatgtttacacggaggtagctgccaagatagagtagccggttacttatgtctgtgctccacaggatacgagggcgctcattgcgaattggagagggatgaatgtagagcccacccatgccggaacggcgggagttgtagaaacttacctggagcttatgtctgtagatgccccgccgggtttgttggagtacattgtgaaacagaagtggacgcgtgcgattcgtctccttgccaacatggcgggaggtgcgagtctgggggtggcgcttacctttgtgtttgtcccgaaagcttcttcggttaccattgcgaaaccgtttctgacccctgcttctcttcaccctgtggagggcgtgggtactgcttagctagtaacggctctcactcatgcacctgtaaggtgggctataccggcgaggattgcgcaaaagagctgttcccacctactgcgctgaaaatggaacgagtggaagaatcaggggtgagcatctcatggaacccacctaacgggcccgccgcccgacagatgcttgacggctacgctgtgacatatgtttcctctgacggttcctataggcgcactgactttgtggatcggaccagaagctcccaccaattacaagctttagccgcaggccgcgcctataacatatcagttttttctgtgaaacgcaactccaataataagaacgatattagtcgcccggcagtgctcctggcccgaaccaggcctcgcccagtcgaaggttttgaggtcactaacgtaacagcttctaccattagtgtccagtgggctttacatagaattagacacgccactgtgtcaggcgtcagagtcagtattcgacacccagaagctttgcgagaccaggccacagacgtggacaggagtgtggaccgtttcacatttagagctctcttacccggcaagcggtacactatccagttgaccactttaagtggactccgaggcgaagagcacccgaccgagtccctcgcaaccgcccctacacatgtctggacacggccgctacccccagctaacctcaccgctgcccgggtcactgctacttctgcccatgtcgtgtgggacgcccctactccaggctcactcctcgaagcctatgtcatcaacgtaacgactagtcagtcaaccaagtctagatatgtacctaatggaaagttagccagctatacagtgcgagacctattgccaggtcgccgttatcagctttcagtgattgcagttcagtcaaccgaattgggcccacagcactcggagcctgcgcatctttatataatcacgtctcctagggacggggccgaccggcgctggcaccagggcgggcaccatccaagggtattgaagaatcgaccacctcctgccagactacctgaattgagacttctaaacgaccattccgcaccagaaacccccacccagcctccgcgttttagtgaactagtggatggcagaggacgcgtgtcagccagattcggcggttccccaagtaaagctgccactgtccgaagccacgtccccgggaattgttcagaaaacccatgccaaaatggggggacctgtgtgccgggagctgatgcgcactcttgtgactgtgggccgggctttaagggacgccgctgtgaattagcatgtatcaaagtttccagaccatgtacccgactcttttcagaaacgaaggcattcccagtctgggaaggaggagtctgtcatcacgtcaagcagtccaaatcacaaaccctcgaaaagagctag

SEQ ID NO: 14412 - RNA, 957 nt, synthetic construct
  misc_feature 1..957: note = source = /note="Description of Artificial Sequence: Synthetic coding sequence"
  source 1..957: mol_type = other RNA
atgctgcccttgaccatgaccgtgctaattctccttcttttgcccaccggacaggcagctccgaaggacggtgtgacgagacctgattctgaagtgcagcatcagctgttgcccaatccctttcagccaggccaggagcaactcggactgttacagagctacctcaaaggattggggagaacagaggtgcagcttgaacatctgtctcgcgaacaagtacttttatatctattcgcacttcatgactacgatcagtctgggcaactggacggacttgaactcttgagcatgttgacagctgcccttgctccaggagccgcaaattcgcccaccacgaaccctgtaatcctgatagtagataaagtgttagagactcaggatttaaatggagacggcctcatgacgccggctgagctcattaacttccccggagtcgcattgaggcacgtcgaaccaggtgaacccttggccccgtctcctcaagaaccacaagccgtaggaagacagtctctgttggccaagtctcccctccgtcaagaaacacaagaggcccctggcccccgggaagaggcaaagggacaggtagaagccagacgtgagtcattggaccctgtccaggagcccggaggtcaagccgaagcggacggggatgttccaggccctaggggcgaggcagagggtcaggcggaagctaaaggcgacgcaccaggccctagaggagaggccggaggtcaggcagaagctgagggcgacgcgccaggccctcggggagaggcgggcggtcaggctgaggctgaaggagatgcaccaggcccacgcggggaagcaggcggccaagctgaggccagggagaatggcgaagaggcaaaagaactgccgggcgagactctggagagcaagaacacacagaacgactttgaggtccatatagtgcaggtggagaatgacgagatctag

SEQ ID NO: 14413 - RNA, 816 nt, synthetic construct
  misc_feature 1..816: note = source = /note="Description of Artificial Sequence: Synthetic coding sequence"
  source 1..816: mol_type = other RNA
atgcaggccgcttgttggtatgtcctcttcctcctgcaacctactgtttaccttgtgacctgcgctaacctaaccaacggcggcaaaagcgaactgcttaagagtggctcatctaaatccactctcaaacatatctggaccgagtccagcaaagatctctctatcagccggcttctgtctcagaccttcagaggcaaagaaaatgatacagatttggacctgagatacgacacccctgaaccttacagcgaacaggacctttgggactggctgcggaactctactgatctacaggagcccagaccgagagctaaaagaagaccaattgtgaaaaccggaaaatttaagaaaatgttcgggtggggcgattttcactcaaacattaaaaccgttaaattgaacctgttaataaccggcaagatcgtggatcacgggaatgggacattttcagtgtattttcgacacaactctacaggccagggcaatgtttctgtatccttggtccctcctacgaaaattgtggagtttgacctggctcagcaaacggtgatcgacgcaaaggatagcaagagtttcaactgccgcatcgaatacgagaaggttgataaagcaaccaaaaacaccctgtgcaattatgacccatccaagacttgctaccaggaacagacccagtcacacgtgtcttggctatgttcaaaaccattcaaagtgatctgtatttatatttcattctatagcaccgattacaaactggtccagaaggtttgtcccgattataactatcattctgatactccctattttccctccggatag

SEQ ID NO: 14414 - RNA, 999 nt, synthetic construct
  misc_feature 1..999: note = source = /note="Description of Artificial Sequence: Synthetic coding sequence"
  source 1..999: mol_type = other RNA
atgctgttgctcgcagctgccttcttagttgccttcgttttgttattgtatatggtttctccgctcattagccccaagcccctcgcactgcctggagcgcacgttgtcgtgaccggaggctcaagcggtatcggcaagtgtatagccattgagtgttacaaacagggagccttcattaccctcgtagcccggaatgaagacaagctacttcaggccaagaaggaaattgaaatgcatagtattaatgataagcaagtggttctgtgtatatctgtggacgtatcacaagactacaaccaggtcgagaatgtgattaaacaagcccaagagaagctcggaccggtggatatgctggttaactgtgcaggaatggcagtgagtgggaaatttgaggatcttgaggtttctacatttgagagattgatgtccatcaactacctggggagtgtgtatcctagtcgtgctgtgatcacaacgatgaaagaaaggcgcgttggtcgaattgtgtttgtcagtagccaagcggggcagctgggtcttttcggctttacagcctacagcgcttcgaagtttgctatcagaggattagccgaggcattgcaaatggaggtgaaaccatacaatgtgtacattactgttgcataccccccagacacagacactcctggattcgctgaagaaaaccgaaccaaacctctggaaactaggcttatcagcgaaacgacttcagtctgtaagcccgaacaagtagccaaacaaatcgtcaaggacgccatccagggtaattttaacagttccctcggtagtgacgggtatatgctatcggcattgacatgcggcatggcaccagtgacctctatcacggaaggcctccagcaggtggtcaccatgggtttgttccgtacgattgcccttttttaccttggatcctttgactcaatagttcgtagatgtatgatgcagcgcgagaaaagcgagaacgccgacaagactgcctag

SEQ ID NO: 14415 - RNA, 1497 nt, synthetic construct
  misc_feature 1..1497: note = source = /note="Description of Artificial Sequence: Synthetic coding sequence"
  source 1..1497: mol_type = other RNA
atgtctttctcggctacgattctattttcccctccatccggatccgaggctaggtgttgttgttgtgcgtgcaagtcagagacaaacggcggaaacacaggctcacagggagggaacccaccaccctccactccaattacagtgaccggccatgggttggctgttcaaagctcggagcagttgttgcacgttatatatcaaagagttgacaaagcagtcggcctggcagaggcagctctaggtctcgccagagcaaacaatgaacttcttaagagattgcaagaagaggtaggggatctacgtcaaggcaaggtgtcgatccctgacgaagatggagagagtcgcgcccactcaagtcctcccgaggaaccgggcccactgaaagaatccccaggagaagccttcaaagctctcagtgccgtcgaagaagaatgtgattccgtgggtagcggtgttcaggtggtgattgaagagcttagacaactcggagcggcttctgtcggtcccggaccactcggctttccagctacccagcgagacatgagactgcccggatgtacacttgcggccagcgaggcagcacccctattgaacccccttgtggacgactacgtcgcttccgaaggcgcagtgcaacgcgttctggtgccggcatatgctaaacaactttccccagctacacaactggccatccaacgagcaactccggaaacaggcccagaaaacggaacgaagctgcctcctccgcgccctgaagatatgctgaacgccgcagcggctctcgactccgctctggaagagtcaggacctggatccacaggagagctacgtcattcacttggactcacagtttccccctgccggacgagagggtctggacagaaaaacagtcggagaaaaagggatctcgtactgtccaaactggtccacaatgttcataatcatatcacgaatgacaaaagattcaatggatccgaatctatcaaaagctcttggaatatttccgtcgttaaatttttgttagagaaactaaaacaagaattggtaacctctcctcacaactacactgacaaagagctcaaaggcgcgtgtgttgcatacttcctgaccaaacgccgagagtaccggaactctctaaacccctttaaaggtctgaaggagaaggaagagaaaaagctccgcagtcgacgatacagactttttgctaatcgatcgagcatcatgcggcatttcggacctgaggatcagcgcttatggaacgatgtcacagaggaattaatgagtgatgaagaagactctctgaacgaaccagaccggcttccctcggcagaagcccagctactcccccctgagctctataatcctaattttcaggaagaggaagacgaaggcggcgatgagaatgcccccggctccccgtcatttgaccaaccgcacaaaacatgttgcccagacctgaactctttcatagaaatcaaggtggaaaaggacgagtag

SEQ ID NO: 14416 - RNA, 966 nt, synthetic construct
  misc_feature 1..966: note = source = /note="Description of Artificial Sequence: Synthetic coding sequence"
  source 1..966: mol_type = other RNA
atgagactgccgagaagagccgctttggggttgctccccttgttactgctgctcccgcccgcacccgaggcagccaaaaagcccaccccgtgccacagatgccggggattggtggataagtttaaccagggtatggtcgatactgccaagaagaattttggtggcgggaacacagcctgggaggaaaaaactctgtccaaatacgaaagttctgaaataagactcctggaaattctcgaagggctgtgtgaatcttcagattttgaatgtaatcagatgctcgaagcccaggaggaacatctggaagcttggtggctgcagctcaagtccgaataccctgatctgttcgagtggttttgtgtgaagacacttaaggtgtgctgctctccaggcacctacgggcctgactgcctggcttgtcaaggaggaagccagagaccttgcagcgggaatggacattgttcaggcgacggtagcagacaaggcgatggatcctgtagatgccacatgggttatcagggccccctgtgcacggactgtatggacggatacttctcaagtctaagaaacgaaacgcacagcatttgtaccgcttgcgacgagagttgcaagacgtgctcaggtctgaccaatagggactgtggtgagtgtgaagttggatgggtactcgacgaaggagcctgtgtagatgttgatgaatgcgcagccgaacctccaccctgtagcgctgcccaattttgcaagaacgcaaacggatcgtatacatgtgaggatgtggatgagtgttcactggcagagaagacttgcgtgagaaaaaacgagaattgctacaacacccccggcagctatgtctgtgtctgtccagacggattcgaggagacagaagatgcttgtgtaccacctgctgaagctgaggccactgagggggaatctccaacacaactgccaagtcgcgaagatctctag

SEQ ID NO: 14417 - RNA, 711 nt, synthetic construct
  misc_feature 1..711: note = source = /note="Description of Artificial Sequence: Synthetic coding sequence"
  source 1..711: mol_type = other RNA
atgatgggaatttttctggtctatgtgggctttgtgtttttcagtgtactgtacgtccagcagggactctcctctcaggccaaatttaccgagtttccgagaaatgtcacagcgaccgaggggcagaatgttgagatgagctgcgcttttcaaagcggatcggccagtgtctatttagaaattcaatggtggttcttgcgcggccccgaggatctggatccaggcgcagagggtgcaggggctcaggtagaattgcttccagacagagaccccgatagcgatggaaccaaaatctcaactgtcaaggtgcaagggaacgatattagccataagctgcagatctctaaagtaagaaagaaagacgagggactttacgaatgcagggtgactgatgccaattacggcgaactccaggagcataaggcccaggcatatctgaaagtgaacgcaaactctcacgctagacgtatgcaggcctttgaggcgtctcccatgtggttacaagatatgaagccccggaagaatgttagtgctgcaatcccatctagtatacatggatctgctaaccaacggactcatagcacttcttcccctcaggtagtagcaaaaatacccaagcaaagcccacaaagtggggccagaatcgctacaagccacggcctgtcagtcttactactagtctgcggattcgtgaaaggtgcattactttag

SEQ ID NO: 14418 - RNA, 273 nt, synthetic construct; identical to SEQ ID NO: 12779
  misc_feature 1..273: note = source = /note="Description of Artificial Sequence: Synthetic coding sequence"
  source 1..273: mol_type = other RNA

SEQ ID NO: 14419 - RNA, 360 nt, synthetic construct
  misc_feature 1..360: note = source = /note="Description of Artificial Sequence: Synthetic coding sequence"
  source 1..360: mol_type = other RNA
atgcccgctgtatttatgcttgctagctcttctgcactgcagtgtggaagaggcgtcccccgctttcctagaaccgaggtaggcgccggacatagcgtgaacgaagaaacaaaagccgaaaaagtgggaaaccagacgagcgtgatccctgcaacgtctcgccaggctgccctgggtacatcttggacacagcgtcgcacccaaccccttcaggagcgttctcactggcacccccggggcaacaacgctagtggcatgggaggacaccgaatgtttccaggtccattgagaggcccagccgcccaagtgctcgaaaacgaatgtgggagcttaggaagagccgcagagggaaggtcgtag

SEQ ID NO: 14420 - RNA, 639 nt, synthetic construct
  misc_feature 1..639: note = source = /note="Description of Artificial Sequence: Synthetic coding sequence"
  source 1..639: mol_type = other RNA
atgttgtcatcggtcgtcttttggggccttattgctctgatcggaacctcccgcgggagctacccattcagtcactcgatgaaaccacacctccaccctcgactctaccacggctgttatggagatatcatgaccatgaaaacctcaggggcaacctgtgatgccaattcagtgatgaactgcggaatacgtggtagcgagatgtttgctgaaatggacctgcgcgcaatcaagccctatcagaccctcattaaagaagtgggacaaaggcactgtgtggacccagcagtcattgcggctattatctccagagaatcgcatggagggtccgtgttacaggacggctgggaccaccgaggattaaagtttggcctgatgcaactggataaacagacatatcatcccgtaggcgcctgggattcaaaggagcatctctcacaggctaccggtatattgacggaaagaattaaagctatacagaagaaattccctacctggtctgtcgcacagcaccttaagggcggactctctgcatttaaatccgggattgaggcgatcgcaactccgagtgacatcgacaatgactttgtgaatgacatcatagcccgagccaaattctacaagcgacagtcgttctag

SEQ ID NO: 14421 - RNA, 387 nt, synthetic construct
  misc_feature 1..387: note = source = /note="Description of Artificial Sequence: Synthetic coding sequence"
  source 1..387: mol_type = other RNA
atgcgtgttgcaagaaggacgcgcaacgtttgtagatgtccccgagccgccggcccaggagtgccagagcccagagcagcaccactcccgctcctcgcaatggccccgcctccggcctgccgtagcccgatgtctcctccacctccacccctcctgttactcttattatccctggcactacttggtgctagagcacgagcagaacccgcgggatcagctgtacctgcccagagccgcccctgcgtagattgccacgcctttgagttcatgcagcgagccctgcaagatctccggaagacggcatgtagtctggatgctcgaactgaaacgctgctcttacaggctgaacgtagggccctttgtgcttgttggcccgcgggacattag

SEQ ID NO: 14422 - RNA, 399 nt, synthetic construct
  misc_feature 1..399: note = source = /note="Description of Artificial Sequence: Synthetic coding sequence"
  source 1..399: mol_type = other RNA
atgggaccccgagtgctgcaaccccctttactgttgctgctgctagccctgctcttggctgcccttccttgcggtgccgaggaagcaagccctttgagaccagctcaagtgacattatcgcctccccccgccgtgaccaatggaagccaacccggcgccccccataacagtactcacaccaggccgccaggcgcctcaggatcggccctcacccgctcattttacgtgattctagggttttgtggcctaaccgccctgtattttttaattagagcttttcggctgaagaaaccccaaagaagaaggtacggactacttgccaacactgaagaccccaccgaaatggccagcctagattccgacgaagaaacagtgtttgagtctcgcaatctgcgttag

SEQ ID NO: 14423 - RNA, 585 nt, synthetic construct
  misc_feature 1..585: note = source = /note="Description of Artificial Sequence: Synthetic coding sequence"
  source 1..585: mol_type = other RNA
atgtcagctctatggctcttactaggcctgctggctctgatggatttatctgagagcagtaattggggatgctacggaaacattcagagtctagacactccaggtgccagctgcgggattgggcggaggcacggacttaattattgtggcgtacgagcctcagagcggttggcagagatcgacatgccctatctcctgaaatatcagccaatgatgcagaccattggtcagaaatactgtatggacccagcagtcatcgccggagtactcagcaggaagtcccctggagataaaattctggtgaatatgggggatcgaaccagtatggttcaggatccaggatcccaggccccaacctcctggataagtgagtctcaggtgtctcagactacagaagtgttgacaacccgaattaaagaaatacagcgcaggtttccaacttggactccggaccagtaccttcgaggtggcttgtgtgcctactctgggggagccggctatgtgagatcgagtcaagacctatcttgtgacttttgcaatgacgtcctggctcgggcaaagtaccttaaaaggcatggtttctag

SEQ ID NO: 14424 - RNA, 441 nt, synthetic construct
  misc_feature 1..441: note = source = /note="Description of Artificial Sequence: Synthetic coding sequence"
  source 1..441: mol_type = other RNA
atggtgataacaatttattatgacgtgaaggtgcgcttcatcgttagaggttgtggtcaatatattagttacaggtgtcaagagaaacgcaatacatatttcgccgagtactggtaccaagcgcaatgttgccagtacgattattgcaacagctggtcatctccacagcttcagtcctcccttccagagccacatgatcgacctctcgccttaccgttatccgactctcaaatccagtggttttaccaggcactcaatctgtctctccccttgcctaattttcatgccggcactgagccagatggattggaccccatggttacgctctccctgaatttaggccttagctttgccgaacttagacggatgtatttgttcctaaatagcagcggactactcgtattacctcaggccgggctcttaaccccccacccctcttag

SEQ ID NO: 14425 - RNA, 234 nt, synthetic construct; identical to SEQ ID NO: 12786
  misc_feature 1..234: note = source = /note="Description of Artificial Sequence: Synthetic coding sequence"
  source 1..234: mol_type = other RNA

SEQ ID NO: 14426 - RNA, 444 nt, synthetic construct
  misc_feature 1..444: note = source = /note="Description of Artificial Sequence: Synthetic coding sequence"
  source 1..444: mol_type = other RNA
atggggcaggaggtgcacggatcctgttgggccttgggcgcaggaggggggcagagacaatgggttggacggtcaatgcccccattagctcctcaattatgtcgcgcagtgttccttgttcccatactgttactattacaagtcaaaccccttaacggctctcccggccccaaagacggctcccagaccgaaaagaccccatccgcggaccagaaccaggaacagttcgaggagcactttgttgcaagttccgttggcgaaatgtggcaagtcgtggacatggcacagcaggaagaagaccaaagctcaaaaacagctgcggtgcacaaacattctttccatctgtcgttttgtttttccctagcctcggtcatggtcttttctggtggaccccttagacgaactttccccaacatccaattgtgcttcatgcttacccactag

SEQ ID NO: 14427 - RNA, 1695 nt, synthetic construct
  misc_feature 1..1695: note = source = /note="Description of Artificial Sequence: Synthetic coding sequence"
  source 1..1695: mol_type = other RNA
atggcccctaaaaaattgtcctgccttcgtagtttgttgcttccactctctctcacgctcttgttgcctcaggccgacacgcgaagctttgttgtggatcggggccatgacagattcctacttgatggagcacctttccggtatgtgtctggatctctgcattactttcgcgttccccgtgttctttgggccgataggttactgaagatgcgatggagcggcctcaacgcaatccaattctacgtgccctggaattaccacgagcctcagccaggagtatataatttcaatggcagtcgcgatctgatcgcttttctcaacgaagccgccctcgccaatctccttgttattctgcggcctggcccatatatttgcgccgagtgggagatgggaggtctgccaagttggctcctaaggaaacctgaaatccatcttcggaccagtgaccccgctgacaacatgacaaagatttttacactgttgcggaaatatgagcctcacggccccttagtgaactccgaatactacaccggatggctggactactggggacaaaatcattctactcgctctgtgtccgccgtgaccaagggactcgagaacatgctcaagctcggagcctcagtaaatatgtatatgttccatggagggactaatttcggttactggaacggcgcagacaagaagggaagatttcttccgattacgacctcttatgattatgatgctccaatatctgaagccggagacccaactccaaagttatttgctttgcgcgacgtgatttctaagtttcaggaagtgcccctcggtccacttcccccacctagcccgaagatgatgttaggtcccgtgacactgcacttagtgggtcatcttctcgcattcttagatctcctgtgcccccgaggaccaattcatagcatactgccgatgacgttcgaggccgtgaaacaggaccatggatttatgctgtaccgaacttatatgacccatacaatttttgaacccactccattttgggtgccgaataatggggtgcatgatagagcctacgttatggtggacggagtatttcagggtgtcgttgaacgcaatatgagagataaactattcttaactgggaaattaggcagtaaactggacatcctggtcgagaatatgggccgactctctttcggatcaaacagtagtgatttcaaaggacttctaaaaccccccattctgggacagaccatactgactcagtggatgatgtttcccttgaaaattgacaacctcgtcaagtggtggtttcctctccagttgccaaagtggccatatcctcaggccccatcaggacccaccttctatagtaagactttccctattttgggctctgtgggcgacacttttctttatctccctggttggacaaagggacaagtgtggattaacggctttaatctgggacgctattggactaagcagggcccccagcagacactgtatgtgcccagattcctcctgttcccccggggagccctaaataagattaccttgctcgagcttgaagacgtgcctctccaaccccaggtgcaatttcttgataaacccattcttaactctacctctaccctccaccgcacccatatcaatagcctaagtgccgacaccttatcagccagcgaacctatggaactgtcaggtcactag

SEQ ID NO: 14428 - RNA, 423 nt, synthetic construct
  misc_feature 1..423: note = source = /note="Description of Artificial Sequence: Synthetic coding sequence"
  source 1..423: mol_type = other RNA
atgttttttaccattagccggaagaacatgtctcaaaaactaagtctcttgctcctggtctttggactcatttggggattaatgcttcttcactatacattccaacagccacgtcaccaaagttccgttaagctgagagagcaaattctggatttaagtaagcgatacgtcaaagctctagcggaagagaacaaaaacactgtggacgttgaaaacggcgccagcatggccgggtacgccgacctcaaacgcactatagctgtgctgctggatgacattctgcagcggcttgtgaaactagagaacaaagtagattacatagtggtgaacgggtctgcagccaacaccacgaacggtacctcaggtaacttagtcccagtaacaaccaacaagagaactaatgtgtccgggagcattcggtag

SEQ ID NO: 14429 - RNA, 528 nt, synthetic construct
  misc_feature 1..528: note = source = /note="Description of Artificial Sequence: Synthetic coding sequence"
  source 1..528: mol_type = other RNA
atgcttccacctatggctctgccttctgtttcatggatgctgctttcttgcttgatgctcctgtcacaagtccagggtgaggaacctcaaagggaactgccctctgctagaatcagatgtccaaaaggcagcaaagcatatggaagtcactgctacgcgttgttcctgtcacctaaatcatggacagatgccgaccttgcctgccagaagaggccgtctgggaacctcgtgtcagtcctgtctggagccgagggttcttttgtaagctctttagtcaaaagcataggaaactcctacagctatgtttggataggcctacatgacccgacccaggggactgaacctaatggtgagggctgggagtggagttcttcagacgttatgaattattttgcttgggaaagaaatccttcaacaatcagttctccaggccactgcgcgtcactatcacggagtactgcgtttcttagatggaaggactacaactgcaacgttcgtctgccctacgtttgcaagtttacagattag

SEQ ID NO: 14430 - RNA, 381 nt, synthetic construct
  misc_feature 1..381: note = source = /note="Description of Artificial Sequence: Synthetic coding sequence"
  source 1..381: mol_type = other RNA
atgcatctaagccagctactggcttgcgcgctgctgctgaccctactcagtcttagacctagtgaggcgaagcctggagccccaccaaaggtaccaagaactccaccggctgaggagctggccgaaccccaagcggcgggagggggacagaaaaagggtgacaaggcccctggcggcggaggagccaatctcaaaggtgataggtccagattactgcgagatctgagggtggacacaaagagtagagccgcatgggcccgactgctccaagagcaccctaatgcaaggaagtataaaggagcaaataagaagggtctttctaaagggtgttttggactcaagcttgaccgcattggtagcatgtctggactgggttgttag

SEQ ID NO: 14431 - RNA, 288 nt, synthetic construct; identical to SEQ ID NO: 12792
  misc_feature 1..288: note = source = /note="Description of Artificial Sequence: Synthetic coding sequence"
  source 1..288: mol_type = other RNA

SEQ ID NO: 14432 - RNA, 423 nt, synthetic construct
  misc_feature 1..423: note = source = /note="Description of Artificial Sequence: Synthetic coding sequence"
  source 1..423: mol_type = other RNA
atgttctttaccatttccaggaagaatatgtcccaaaagctttccctcctacttctggtattcggtttgatttggggcctgatgctccttcattacacatttcagcaacctcggcaccagagctcagttaagttgcgtgaacaaattcttgacctatccaaaaggtatgtgaaagcgttggctgaggagaataagaacaccgtcgacgtggaaaatggagccagtatggctggctacgccgatctcaagaggactatcgcagtccttctagatgacatacttcagcgtttagtgaagttagaaaataaggtagactacatagttgttaacggtagcgcagctaatacaaccaacggaacaagcggaaacttggtgccagtcacgacgaacaaaaggaccaacgtctccggctcgatcagatag

SEQ ID NO: 14433 - RNA, 291 nt, synthetic construct; identical to SEQ ID NO: 12794
  misc_feature 1..291: note = source = /note="Description of Artificial Sequence: Synthetic coding sequence"
  source 1..291: mol_type = other RNA

SEQ ID NO: 14434 - RNA, 678 nt, synthetic construct
  misc_feature 1..678: note = source = /note="Description of Artificial Sequence: Synthetic coding sequence"
  source 1..678: mol_type = other RNA
taagcagatttgcccagttgctggggagcaggaccatgttacacaggccacaaggtcggcgctttgagacgggacactgtaatatgttgttgtcgccacggagactactcgacaccgtgcctctttactcccggaaaaccatcccggaaccctagcccctggaagcggacactgtggacacttagcgcaccctgggccggtcctgccgggtggacaggagaagagcagaacgccacaaaaaccggattaattaccaggagacccaggcctcttagaaggcgcccacatccggcacctgcttctccgctgccagagataattcgaggcaatatccctagaatgctgggcaaatttgtaccagtcaattgggaaccaccacagccgctacccttccccaagtacctgagatgttatcgttgtcttctcgagactaaagagttggggtgtctcctgggcagcgatatttgtttaacccctgccgggagtagctgcattacactccataaaaaaaactcttctggctccgacgtgatggtaagcgactgccgctccaaggaacagatgtcagattgctcaaatacaagaacgagccctgtctcgggcttctggatttttagtcagtactgctttctcgacttctgtaatgacccacaaaaccgcggactttatactccctag

SEQ ID NO: 14435 - RNA, 684 nt, synthetic construct
  misc_feature 1..684: note = source = /note="Description of Artificial Sequence: Synthetic coding sequence"
  source 1..684: mol_type = other RNA
atgggagctgtaatgggcactttctcctcactccaaactaaacagagaaggccgagcaaggatatcgcctggtggtattaccagtatcaacgcgacaagattgaagacgaattagagatgacaatggtatgtcaccggcctgaaggcttggaacagctggaagcgcagaccaacttcactaaaagagagctgcaggtgctttatcgaggctttaagaatgaatgtccctccggggtggttaatgaggatacgtttaaacaaatatacgcacaattctttccacatggggatgcctctacttatgcccactatctgtttaatgcatttgacaccacacaaactggctccgtaaaattcgaagactttgttaccgctctgtccattctgttgaggggcacagtccatgagaagctacgctggaccttcaatctctacgacattaacaaggatggctacattaataaagaagagatgatggatatagttaaggccatttacgacatgatgggaaaatatacataccctgtgctcaaggaagatactccaaggcaacatgtggacgtgttcttccaaaaaatggataaaaacaaggacggaatcgtgaccctcgatgaatttttagaatcatgccaggaagacgataatataatgagatcattacagttatttcaaaatgtgatgtag

SEQ ID NO: 14436 - RNA, 546 nt, synthetic construct
  misc_feature 1..546: note = source = /note="Description of Artificial Sequence: Synthetic coding sequence"
  source 1..546: mol_type = other RNA
atgcaagtgaacttcgtctcctacgttcagctaaccagtagagctcttccatcactcacagactctaaggggtctctcgtcgtcgtgtccagcctcctgggccgcgttcccacttcttttagcaccccatacagcgccgcaaaatttgccctggatggcttttttggatcacttcgccgcgagctcgacgttcaggatgtcaacgtcgcgataaccatgtgcgtgctgggcctgagggatcgtgcctccgccgcagaagcagttcgctcgtctactagcaggccacgccagcctgagcaccgcggagttccattacaatctcagacagccatgtttctaccaccaaccgttccaggcgccaggacgcttacagagacccccctccgtggctggcctcagcccaagatgaagtcttcccgtcagaaatcgaagacagagaagaacgatggccacctcgagcctgtgacagcatgggaggtccaggtgccacgcgtccgacgactgtgtaggggcctcgcccgcccacaccttttcggccatgactag

SEQ ID NO: 14437 - RNA, 423 nt, synthetic construct
  misc_feature 1..423: note = source = /note="Description of Artificial Sequence: Synthetic coding sequence"
  source 1..423: mol_type = other RNA
atgtccgatctcttgctgctcggtctcatcggcggcctgacacttctgttattactcacactgttggccttcgctggctatagtggcctcctcgccggcgtggaagttagcgccggttccccccctatccggaatgttaccgtggcatataaatttcacatgggcttatacggcgaaacagggagactctttaccgaatcctgcagcatttctcccaagctgagaagtattgccgtttattacgacaacccacacatggtgccacctgataagtgtagatgcgctgtgggatcgatcctctctgaaggtgaagagtccccatctcccgaattaatcgatctgtaccagaaatttggtttcaaagttttctcgtttccagcaccgtcacacgtagtgacagcaactttcccttatactacctag

SEQ ID NO: 14438 - RNA, 177 nt, synthetic construct; identical to SEQ ID NO: 12799
  misc_feature 1..177: note = source = /note="Description of Artificial Sequence: Synthetic coding sequence"
  source 1..177: mol_type = other RNA

SEQ ID NO: 14439 - RNA, 2742 nt, synthetic construct
  misc_feature 1..2742: note = source = /note="Description of Artificial Sequence: Synthetic coding sequence"
  source 1..2742: mol_type = other RNA
atgggtcccgaagctctgagttctctattattactgctcttagtggctagtggcgacgcagacatgaaaggacacttcgatccagccaaatgtagatacgccctcggtatgcaggatcgaaccatccctgactccgatatatctgcttcctcaagctggtctgacagcaccgccgcgcgacacagccgactcgaatcctcagatggtgacggcgcctggtgccctgcagggagcgtgttccccaaagaggaagaatacttgcaagtggacttgcagagattgcatctcgtggctctggttggaacccagggcaggcacgcaggtggactcggaaaggagttttctcggtcgtatcggcttaggtattctagggacggcaggaggtggatgggatggaaggatagatggggtcaggaagtgatctcagggaatgaagatcccgagggagttgtactgaaagacttgggaccccccatggtcgcacgcttggtgaggttttaccccagggcggacagagtaatgtctgtatgtttgcgcgtggagttgtacggttgcctgtggcgcgatgggctactctcctacaccgcaccagttggacagactatgtatctgtccgaggccgtttaccttaacgacagcacctacgatggccacacagttgggggtctgcaatatggagggttgggccagttggccgatggcgtggtgggtctcgatgactttcgcaaatcccaggagctcagagtgtggcctggttacgattatgtgggttggagtaatcatagtttttcatctggatatgtggaaatggagttcgagtttgacagactgagggcgtttcaggcaatgcaggtgcattgtaacaacatgcatacactgggcgcccgactgcctgggggagttgaatgtcgatttcgccgaggaccagcgatggcttgggagggagagccaatgcggcataatctgggaggcaatttaggcgatccaagggctcgcgccgtgtctgtacccttgggtggaagagtcgccaggttccttcagtgcaggtttctgtttgcaggcccatggttattgttcagcgagatctcatttatctctgatgtggtcaataattcatctccagcacttggcggcaccttcccgcctgccccttggtggccccccggtcccccccctaccaacttctcatcactcgaactagaaccaagaggccaacaaccagttgctaaggccgaaggatctccaactgcaatcctcattgggtgccttgtcgcaataatcctcctgctgttgctcatcatcgctctaatgttgtggaggctgcactggcgacgactgctatcgaaagccgagaggagggtgcttgaggaagaattgacggtccatttgagcgtccctggggataccatcctcatcaataatcgccccggacccagagaaccccctccttatcaagaaccaagacctagaggaaacccacctcactccgctccttgcgtgccaaacggttctgcccttctgttgtccaaccccgcataccgtctcctactcgccacatatgcccggcctccacgcggccccggaccccccacccctgcctgggctaagccaactaatactcaagcgtattccggtgattatatggaaccagaaaaacccggcgccccgttactgcccccacctccacaaaacagcgtgcctcactatgccgaagctgacatcgtgacccttcagggcgtaaccggaggaaatacatatgccgtgccagccctgccacctggagcagtgggggatgggccaccaagggtggactttcctcggagcagattgcgattcaaggaaaagctaggggaagggcagtttggagaagtccatctgtgcgaggttgattccccacaggacttagtgtcacttgattttcctttaaatgtgcgtaagggccacccccttctagtggccgtgaagatcttgagacctgacgcaacaaagaatgcccggaacgatttcctaaaagaggtaaaaatcatgtcgagacttaaagatcccaacatcatccggcttctaggcgtttgtgtgcaggacgaccctctctgcatgattacggattatatggaaaatggagatttaaaccagtttctgtcggcacaccagttagaagataaagccgccgaaggggcgcccggtgacgggcaagcagcgcagggacccaccatctcttaccccatgctcctgcatgtagctgctcaaatagcatcaggaatgcgctacctggccacacttaatttcgtgcaccgtgacctcgccacaaggaactgcttagtgggggaaaactttacaataaaaatcgcagactttggtatgtcccgcaacctgtacgccggagactactatcgtgtccagggaagagccgttttaccaatccggtggatggcttgggaatgcatattgatgggtaaattcaccaccgcaagcgacgtgtgggcctttggtgtgaccctttgggaggtgctcatgttgtgtcgggcccagccatttggacagctgacagacgaacaggtgatcgagaacgccggcgaattctttcgagaccaggggagacaggtatatctaagccgccctccagcttgcccgcaaggcctgtacgaactcatgctgcgctgctggtctagagaatcagagcagagacccccgttcagccagctacacagatttctcgcagaagacgccttgaacacagtttag

SEQ ID NO: 14440 - RNA, 1146 nt, synthetic construct
  misc_feature 1..1146: note = source = /note="Description of Artificial Sequence: Synthetic coding sequence"
  source 1..1146: mol_type = other RNA
atgcgactgttagcatggcttatctttctcgccaattggggcggcgcgcgcgcagaaccgggtaaattctggcacattgctgatctccatctggacccggattacaaagtgagtaaagatcctttccaggtgtgtccctccgccggaagccaacccgtacccgatgccggaccgtggggagactatttgtgtgattcaccctgggctcttatcaactccagcatctatgctatgaaagagattgaaccggagcccgactttatcttatggactggggacgatacaccacatgtccccgacgaaaaactgggtgaggctgcagtgttagaaattgttgaacgtctcaccaaactcatccgcgaagtattcccaggagcattctattgtgaaaagctccccgggccttcaggcgccggacgtattgtagtcctgaacaccaacctttactatacatcaaacgcactcacagccgacatggcagatccagggcaacagtttcagtggctggaagacgtgctaacagacgcgagtaaggccggagatatggtctacatcgtgggtcacgttccacccggcttcttcgagaaaacacagaacaaagcctggttccgggaagggtttaacgagaaatatctgaaagttgtccggaagcatcacagagtcatagcaggacaattctttggacaccaccacacagactcatttagaatgctttacgatgacgccggtgtgccaatctctgccatgttcattacacctggcgtgaccccatggaagacaactctccctggagtggtcaatggtgcgaacaatccagcaatccgggtctttgaatacgaccgcgccaccttgtcactcaaggatatggtgacttactttatgaatctgagtcaagccaacgctcagggaactccacggtgggaactggaatatcaatccacactacagagatactacgtttataattctgtttcttactctgcaggtgtgtgcgacgaggcatgctcaatgcagcatgtgtgcgccatgagacaggtagatattgatgcatacaccacatgtttgtacgcctcaggcaccactcccgtaccccagctgcctcttctgctcatggcactcctcggactttgcactttggtgctgtag

SEQ ID NO: 14441 - RNA, 456 nt, synthetic construct
  misc_feature 1..456: note = source = /note="Description of Artificial Sequence: Synthetic coding sequence"
  source 1..456: mol_type = other RNA
atgcgcgtcgctggagccgcaaaactggtagtagccgtcgccgttttccttctgactttttatgtgatcagccaagttttcgagattaagatggacgcgagcttaggcaatttgtttgcaaggtcagccctcgatactgcagccagaagtacaaagccgcctcggtacaaatgcggcatttcgaaagcctgtcccgaaaaacatttcgcttttaagatggcttccggagctgcaaatgtggtgggaccaaagatttgcttagaagacaatgtacttatgagcggagtcaagaataacgtcggacggggaatcaacgtcgctttggccaacggcaaaacaggtgaggtgctggataccaaatattttgatatgtggggcggagatgtggctccattcatagaatttctaaaggcaattcaggacgggactattgtactcatgggaacatacgactag

SEQ ID NO: 14442 - RNA, 936 nt, synthetic construct
  misc_feature 1..936: note = source = /note="Description of Artificial Sequence: Synthetic coding sequence"
  source 1..936: mol_type = other RNA
taagctccaagcccctgttcacactttaattgcggctcccaggtcactgacggcggtaccatcaagcagaaaatctttacctttgacgccatgttctccactaattatagccatatggaaaactacaggaaaagagaagacttggtctatcagtcaactgtgcgtttgcccgaagtacgtatctcagataatggtccttatgaatgtcatgtcgggatttatgatcgagcgactcgtgagaaggtcgtcttggcctccggaaacattttcctcaacgttatggctccccctacctctatcgaagtggtcgctgccgatacaccagcccctttcagccggtatcaggctcagaatttcacattagtttgcatagtcagcggaggaaagcctgcaccaatggtatatttcaagagggatggggagcccatagacgctgttccactgtccgaaccccctgctgccagcagtggacccttgcaggatagtaggcctttccgatcactccttcatcgcgatctggacgatacgaaaatgcagaagagcctctccctcctcgacgctgagaacagaggcggtagaccttacactgagcggccttcaaggggattgacccccgatccaaacattttgcttcaaccaacaactgaaaacattccagaaaccgtagtgtcacgtgagtttcctagatgggtgcactccgctgagcccacatatttcctgcgtcactccagaactcctagctcagacgggaccgttgaggttcgcgctctgctcacctggaccctgaacccacagatcgacaatgaagctctcttttcatgcgaagttaaacaccctgccctgtccatgcccatgcaagccgaggtgactctcgtggctccaaaaggaccaaagattgtcatgaccccttcacgagccagagtcggtgacacatag

SEQ ID NO: 14443 - RNA, 978 nt, synthetic construct
  misc_feature 1..978: note = source = /note="Description of Artificial Sequence: Synthetic coding sequence"
  source 1..978: mol_type = other RNA
atgcaaggtcgcgtggccgggagctgtgcgcccttagggctgttactcgtgtgcctgcacctgcccggcttatttgcacgcagcataggcgtggtcgaggagaaagtaagccagaacctcgggaccaacctcccccagctgggacagccttcttccaccgggccctctaactctgagcatccgcagccagcactggacccaagaagtaatgacctcgcccgtgtacccttgaagctgtccgttcctgcatcagatggttttccacctgccggcggttccgctgtgcaacgctggcccccaagctggggtctgcctgcaatggatagttggcctcctgaggacccgtggcagatgatggctgccgcggctgaggatagattgggtgaggccttaccagaagagttgtcatacctctcatcagcagctgctttagcccccggatccggaccactgccaggggaatcttccccagacgccactgggttgtcgccaaaagcttcgcttctgcaccaggactccgaatccagaagattaccacgatcaaactcactgggtgctggcggcaagatcctctcgcaacgccccccttggtctcttattcaccgagtcttaccagatcacccttggggcaccctcaatcctagtgtgagctggggcggcggcgggcctggcaccggttggggaacccgcccgatgccacatccagagggcatatgggggatcaacaaccagccacccggtacatcatggggaaacataaaccggtatcccggtggatcttggggaaacataaaccgatatcctggcggcagttggggcaatattaatcggtatcctggaggaagctggggaaacatccatttataccctggcatcaacaaccctttcccccccggagttcttcgtcctcccggctcatcctggaacatccccgccggctttccaaaccccccttctcctcggctgcagtggggctag

SEQ ID NO: 14444 - RNA, 957 nt, synthetic construct
  misc_feature 1..957: note = source = /note="Description of Artificial Sequence: Synthetic coding sequence"
  source 1..957: mol_type = other RNA
atgggactccatttacgaccctatcgcgttggcctgttgccggacggtctgctcttcctgctgctgctgctaatgctgctggccgaccccgctctccccgccggaaggcacccgcctgtggtcttgggatggttcaccacgaaacaccctgggcctccgtcattcctcatggtatggatgtatgtttccctagcactgggccggcccagtcactggtcatcctggactccagcaaaagcagcttgggtgccgatctcaaccccatggtggagggccctctgggcaggggctacacacggagtgaggatgtctgaaggtctgccaatgactggagcagagcctcaaagacaaccgcaagcttggaaggacaaatacattagagcatttgtctcacttggggcgccctggggtggagtagccaaaaccctgagagttcttgcttctggagacaataatcgtatcccggtgattggtccactgaaaattcgcgagcagcaaagatctgcagtctccacttcctggctgcttccatacaattatacctggtcccctgaaaaggttttcgtacagactccgaccatcaattataccctgagagattacagaaagtttttccaagacatcggattcgaagacggttggttaatgcggcaggacactgagggtttggttgaagcaactatgccacctggagtgcagctacattgcctgtacggtacaggggtacctacgcctgattctttctactacgaatctttcccagaccgggaccctaagatctgcttcggggatggggacggcaccgtgaatctgaagagcgcactccaatgccaggcctggcaatcacgacaagagcaccaagtcttactccaggaattacccggaagcgagcacatcgagatgctcgccaatgctactacacttgcttatcttaaacgtgtgctcctcgggccttag

SEQ ID NO: 14445 - RNA, 1575 nt, synthetic construct
  misc_feature 1..1575: note = source = /note="Description of Artificial Sequence: Synthetic coding sequence"
  source 1..1575: mol_type = other RNA
tacgccctcagagacaggcagggaaatgctattggagttaccgcttgcgacatagatggagacggcagggaagaaatctatttcttaaatacaaacaatgcattcagtggagttgctacatacacagataagctgtttaagttccgtaataaccggtgggaagatattctgtcagacgaagtcaacgttgcgaggggggtcgccagcctgtttgcaggtcggtctgtcgcctgcgtcgacaggaaaggctcagggcggtacagcatatacatcgctaattacgcttacggaaatgtgggacctgacgctctcattgagatggaccctgaagcatcagacttatctagaggcatcctggccctcagggatgtcgccgcggaggccggcgtcagcaaatatacaggcgggaggggagtatctgttggacccatcctcagttcatctgccagcgacattttttgcgataacgaaaatgggccaaactttttgttccacaacagaggtgatggaacatttgttgacgctgctgcaagtgcaggagtcgatgaccctcatcagcacggtagaggagtggctttggctgacttcaatagagacggcaaagtcgatatcgtttacggaaattggaatggcccacaccggttatacctgcaaatgtctacccacgggaaggttcgcttcagagatattgcctctccaaagttctcgatgccttcccctgtacggaccgtaattaccgccgatttcgataacgatcaggaactggaaatcttctttaacaacattgcttacagatcctctagtgccaacagactgtttagagtgattagaagggaacacggcgatccacttatcgaagagctaaaccctggcgatgcactggaaccagaaggacgtggcacaggaggagtggtgactgactttgacggagatggcatgctcgatcttatcctgagtcacggcgagagcatggcacagcctttaagtgtttttagaggtaatcaaggcttcaacaataactggcttagggtcgtcccaagaactcgctttggagcgtttgcccgcggcgcaaaggtggttctatataccaagaaatccggagcacatcttcgtatcattgacggcggctcaggttacctgtgtgagatggaaccagtggcacacttcggcctcggcaaagatgaagcttcctctgtggaggtcacctggcctgatggtaagatggtaagccgaaatgtcgcctccggggagatgaattcagtgctggaaatcctatatcccagagacgaagacacgctgcaggaccccgccccactggagactccaatgaacgcgtcttctagtcactcatgcgcactggagactagtccttacgtgtccacaccaatggaagctactggagccggaccaacgcgtagtgctgtgggagctacctcccctacccgcatggctcaacccgcctggggcctgtccgcatctcacagagcccctgcccctccgccacctcctctcctgttaccactccccttactgctgccacttcttgaacttcctctcctacatagatctagttag

SEQ ID NO: 14446 - RNA, 636 nt, synthetic construct
  misc_feature 1..636: note = source = /note="Description of Artificial Sequence: Synthetic coding sequence"
  source 1..636: mol_type = other RNA
atggtgagtagaatggtgtctacaatgctgtccgggctgctgttctggttagcgtccggctggactccagccttcgcctactcccctaggacccccgatcgggtgagcgaggccgatatccaacgtctgttacacggagtgatggaacaacttgggattgcgcgacctagagtggaataccccgcccaccaagccatgaacctggtaggaccacagagtatagaaggaggcgctcacgaaggattgcagcatctgggcccatttgggaacattccgaacatagttgccgagctgactggggacaatattcctaaagacttctctgaagaccagggttatcccgatccacccaacccttgtccagtagggaaaaccgacgacggctgtttagagaacacacctgatacggctgagttctcccgggagttccagctccaccagcacctttttgatccggaacatgactacccagggctcggcaagtggaataaaaagttactgtacgaaaagatgaaaggcggcgagaggaggaaacgcagatccgtgaatccgtacctgcagggccaacgcttggataacgtagtcgcaaaaaaatccgttccacattttagcgacgaagataaggatcccgaatag

SEQ ID NO: 14447 - RNA, 465 nt, synthetic construct
  misc_feature 1..465: note = source = /note="Description of Artificial Sequence: Synthetic coding sequence"
  source 1..465: mol_type = other RNA
atggcactgggggtacccatttccgtgtacctgcttttcaacgccatgacagctctgactgaggaggccgcggtcaccgtcactcccccgatcactgctcagcagggaaactggacggttaacaaaacagaggcggacaacatcgaaggtccaatcgccttaaaattttcccatctttgcctggaggatcataactcatattgtattaatggcgcttgtgcatttcaccatgaactcgaaaaggcgatttgcagatgtttcaccggctacacaggagaaagatgtgagcaccttaccctaacatcttacgcagttgactcctacgagaaatacattgctatcggtataggtgtgggcttgttgttatctggattccttgtcatattttactgctatatcaggaaacgctgcctaaaactgaaatccccttacaatgtctgctctggagaacgccgccctctttag

SEQ ID NO: 14448 - RNA, 1446 nt, synthetic construct
  misc_feature 1..1446: note = source = /note="Description of Artificial Sequence: Synthetic coding sequence"
  source 1..1446: mol_type = other RNA
atgggaaaactccgtcctggcagagtggagtggttagcctcaggacataccgagagacctcacctcttccagaatttgttacttttcctttgggcattactcaactgtggactaggcgtctccgcacagggccctggagagtggaccccatgggtaagttggacacggtgcagcagctcctgtggaaggggtgttagtgtgcgatcaagacgctgcttgcggctccctggtgaggaaccatgttggggagactcccatgagtacaggctgtgccaactgccggattgtcctcccggagctgtgcccttccgagatcttcagtgcgccctgtacaacggaagaccagttctcggaacgcaaaaaacttatcagtgggtacctttccacggcgcccctaaccagtgtgatctcaactgcttagccgagggtcatgccttctaccactcatttggcagagtgcttgacggcaccgcatgttcaccaggcgctcagggcgtgtgcgtagccggaagatgcctttctgcaggttgcgacggcttgcttgggtcaggagcccttgaagaccgttgcggtaggtgcggcggtgcaaatgatagctgtttgtttgttcaacgggtatttcgagatgcaggggctttcgctggatactggaatgtgaccctcatcccagagggagccagacacattagagtcgaacacaggtcaagaaatcacctggctctcatgggtggagacgggcgttatgtgctgaatggccactgggtggttagtcccccaggcacatacgaagccgcaggcactcatgttgtgtacacaagagatacaggcccccaggagactcttcaagctgccggccctacgagccacgaccttctcctgcaagtactgctccaggaacccaaccctgggatcgagtttgaattctggttgcctcgggaaaggtattcacccttccaagctagagtccaggctttgggatggccattaaggcaacctcagccccgtggcgtggagccccagcctcctgcagcaccagccgtgacgcccgcccaaactccaacactggcacccgatccctgccccccctgcccagatacacggggtcgcgcccacagactcctccactattgcggctcagacttcgtttttcaagctcgcgtgctcggacatcaccaccaggcacaggaaactcgttatgaagttagaatccagcttgtctacaagaataggtccccacttcgcgcgagggagtacgtgtgggctcccggccattgcccctgccctatgctggcacctcacagagactacctaatggctgttcagaggttagtgtcacccgatggaacacaggatcagctgttgcttccacacgctggctatgctcgaccgtggagccctgccgaggactctcgtatccgactcacagccagaagatgccctggatag

SEQ ID NO: 14449 - RNA, 627 nt, synthetic construct
  misc_feature 1..627: note = source = /note="Description of Artificial Sequence: Synthetic coding sequence"
  source 1..627: mol_type = other RNA
atggccgatatgcagaatctcgtcgaaaggttggaacgagccgtgggacgtctcgaagccgtgtcacacacgtccgatatgcatcgtgggtatgccgattcaccaagtaaggcaggagctgctccctatgtccaggcgtttgatagccttctcgctggtcccgtggcggaatacttgaagatcagcaaggagatcggtggggatgttcagaaacatgcagagatggttcacaccggactgaaattagagcgagcactgctcgtcactgctagccagtgtcaacagcctgccgaaaacaaactgtccgacttattagcaccaatatctgagcagattaaggaagtcatcacattccgcgaaaaaaatagggggtcaaaactgttcaatcatctgtccgctgtgtccgagtccatccaagctctgggctgggtcgccatggccccgaaacctgggccttacgttaaggaaatgaatgacgctgcaatgttctatacaaaccgagtgttgaaggagtacaaggatgtcgataagaagcacgttgactgggttaaagcatatctgtctatctggactgaattgcaggcgtacatcaaagagtttcacacgaccggtttagcatggagttag

SEQ ID NO: 14450 - RNA, 1482 nt, synthetic construct
  misc_feature 1..1482: note = source = /note="Description of Artificial Sequence: Synthetic coding sequence"
  source 1..1482: mol_type = other RNA
tctgaggcagtttatttaaacgattctacgtacgacggacacacagttgggggtctccagtatggtgggctgggacagctggccgatggtgtcgttggactggatgacttcaggaagagccaggagttgcgcgtctggcctggatatgactacgtgggctggtcaaaccatagtttctcctccgggtatgttgagatggagttcgagttcgacagattaagagcttttcaggccatgcaggttcattgcaataacatgcataccctaggggctagattaccaggaggagttgagtgtagattccgcagaggacccgctatggcctgggaaggcgagccaatgagacataaccttggcggaaatttgggggatccgagagcccgcgcagtgtccgttcctctcgggggtagggtggctcggtttcttcaatgccgtttcctgttcgctggtccttggttattgttctctgaaatcagctttattagtgacgttgtgaataattcatcccctgcattgggtgggaccttcccgcctgccccatggtggccccccggccctccccccactaatttttcaagcctggaattggagcccagaggacaacagcctgttgccaaagccgaagggtcccctaccgccatacttattggatgcctcgttgctatcattcttcttctcctgctgattatcgcccttatgctctggaggctgcactggcgccgcctgctgtcgaaggtgttagagagccacccccgcacgagatccccggggctggttggcatacgcccgacacccctgcccgtttccccaatggccctgagatgctgcagtcctatccagcccaccgcaagtttttggcccctgacccccgtgccacttgaggcccgtgctcccccccatcctccaggaccgaatccccccaccccgcgaggtgtgacaggcggcaatacttacgcagtccccgctctccccccaggtgccgttggcgacggacctccaagggtagactttcctaggtccagattaaggtttaaagaaaagctcggtgaaggccaattcggagaggtgcacctatgcgaagtggacagcccccaggacctggtctcactggacttccccttgaatgtgagaaaggggcacccgctcctggttgctgtcaaaatactgcgacccgatgcaactaagaatgcaagaaatgactttctcaaagaagtcaaaattatgtctcgtctgaaagacccaaatatcattaggctgctcggcgtttgcgttcaggacgatcccctctgtatgattaccgactatatggagaatggggacctcaatcagtttctctcagcccatcagctcgaagacaaagccgccgaaggtgcaccaggggacggacaggcagcccaagggccgacaatctcatatcctatgttgctgcatgtggccgcccagatcgcctcagggatgcggtatctggccactttaaactag

SEQ ID NO: 14451 - RNA, 2319 nt, synthetic construct
  misc_feature 1..2319: note = source = /note="Description of Artificial Sequence: Synthetic coding sequence"
  source 1..2319: mol_type = other RNA
atgcagtttcagctgaccctctttctgcacctcgggtggctttcatactctaaagcgcaagacgactgcaatagaggcgcctgccaccctactactggcgacctgctcgtgggaagaaacacccagcttatggcctcctcaacatgtggattatctcgggctcagaagtattgtatcctttcgtatctggaaggcgaacagaagtgttttatttgcgactcccgatttccttacgacccatatgaccagccaaacagtcacactatagagaatgtcatcgtatcattcgagccagatcgcgaaaaaaaatggtggcaaagtgagaacggtctggaccatgttagcatccgcttggatctggaagccctgtttaggtttagtcacctcatcctgaccttcaaaacctttagaccggccgctatgcttgtggagagaagcacagattacggacacaactggaaggtatttaaatactttgcaaaagactgcgcaacctcctttccaaatatcacatcagggcaggctcagggagttggagacattgtgtgcgactctaaatattctgacatcgaaccaagcacaggtggagaggttgtactgaaggtgcttgatccatcatttgagatcgaaaacccatacagcccttatattcaggacctcgtgaccctcaccaacctacgaataaacttcacaaaattacacactcttggagacgcactgctaggcagacgtcagaacgactcccttgacaaatactactatgccctgtatgaaatgatagtacgaggttcctgcttctgtaacggtcatgcatccgagtgccgccctatgcaaaaaatgaggggcgacgtcttctccccacccggaatggttcatggccaatgtgtctgtcaacataatacagacggcccaaattgcgagcgctgtaaggacttcttccaggacgccccatggcggcccgccgccgatcttcaggacaacgcatgccgttcttgttcttgtaattctcattcttcgaggtgccatttcgacatgacaacatatcttgccagtggcggtctgtctgggggggtatgcgaggactgccagcataacacagaaggacaacactgcgacagatgtaggcctctgttttaccgagacccattgaaaacaatctctgatccatatgcatgcattccctgtgaatgtgatccagacggaacgatatcaggaggcatatgcgtttcccattctgaccctgccctcggctccgtcgcaggacagtgcctctgtaaagaaaacgttgagggggccaaatgcgatcagtgcaagccaaaccattacgggctttcggctacagatcctctgggctgccagccatgcgattgtaatccactcggaagtcttccattcctgacatgcgacgttgataccggacagtgcctgtgcctcagttacgtgactggcgctcactgtgaagagtgcaccgtgggatactggggactcgggaaccacctacacggatgctccccctgtgattgtgacatcggcggagcctattccaacgtttgttcacccaagaatggccagtgtgagtgtaggccccatgttacaggccgatcctgctcggagccagcaccgggctactttttcgcgcccttaaatttttacctttatgaagctgaagaagcaactaccttgcagggattggcccctctgggaagtgaaacattcggccagtcccccgccgtccacgttgtcttgggagaaccagtccccgggaatccggtaacttggacaggtccaggttttgcacgcgtgcttccgggcgctgggctgcgcttcgccgtcaataatattcccttccctgtggactttaccatcgctattcattacgaaacccagagtgcagcagactggacagtgcagatcgttgttaacccccccggcggttccgagcattgtatcccaaaaaccctgcagtctaaaccccagtcctttgccttacctgccgccacccgtatcatgttactgcctactcctatctgcctcgaacccgacgttcaatacagcatcgacgtgtatttcagccaacccctgcaaggtgagtcacacgcgcactctcatgttcttgtcgattctgcagctgtgcaatggcacaacctgggatctcttcagcccccccctcccgagtgtaaacagttctcttgcttctcatttccttccagttgggattacagacaccccccaccccacctcgcaaatttctgcattttcagccgggacggtgtgtcccctcattggcctggatggtcacaaactccagatctccgctag

SEQ ID NO: 14452 - RNA, 1371 nt, synthetic construct
  misc_feature 1..1371: note = source = /note="Description of Artificial Sequence: Synthetic coding sequence"
  source 1..1371: mol_type = other RNA
atgggcagagcgggagccgcggcagtgataccgggtctcgcactcttgtgggccgtaggattagggtcagccgcaccttctccccacctccggctatcctttcaagaactgcaagcttggcacgggctccagactttctccttggagcgaacttgctgttatcaggccctgctggtggatgaagaacggggcaggctgttcgtgggggccgaaaaccatgtcgcttctctcaaccttgacaatatttccaagagagccaaaaaacttgcctggccagcccctgtagagtggcgtgaggaatgcaattgggcaggaaaagacattggaacagagtgtatgaacttcgtcaaattactgcacgcctacaatcgtactcacctactggcttgtggcaccggcgcattccacccaacatgcgcctttgtggaggttggccacagagccgaggagcccgtcctccgtctggacccagggcgaattgaggatggcaaaggtaagtctccgtatgaccccaggcatcgggccgctagcgttcttgtgggggaagagctgtacagtggagtcgccgccgatctgatgggcagagatttcaccatttttcgtagcttagggcagagaccctctctaagaacagagccacacgactcccgctggcttaacgagccaaaatttgttaaagttttctggatacctgaaagcgagaaccccgatgacgacaaaatctactttttttttcgagaaacagccgtcgaggccgcccctgctctcggaagactctctgtgtctagagtagggcaaatctgtcgcaatgatgtaggagggcagcgaagtctagtcaataaatggacgacctttttaaaggctcgattggtctgttctgtccccggcgtggaaggcgatacacacttcgatcagctgcaggatgtattccttctctcatcaagggatcatagaactccactcctctacgccgtatttagcacctctagcagcatcttccagggcagcgccgtatgcgtctactccatgaacgatgtacgtcgggctttcctggggccgttcgcacacaaagaaggccccatgcaccagtgggtatcctatcagggccgtgtaccctatccccgtcaagcctgcgcacccgcccgtcctcttgccccttctgtaccacctcgaactagtcagactatgagtagctcactgcgcggtaccactccaagttgcactaccctttcttgtcccttaggcggggccctatttagctacaaactggaacccataaccccttccctgaaactgccacgtactggtctccagcccttaactgatacaatgacgagctcctccttggcccagacactggctcggtgttag

SEQ ID NO: 14453 - RNA, 333 nt, synthetic construct
  misc_feature 1..333: note = source = /note="Description of Artificial Sequence: Synthetic coding sequence"
  source 1..333: mol_type = other RNA
ctctttatgctgcacaagatcgtacaggtctataactcagatgtgatcgacaagcagagcgccagtatgacaagcgataatgctgatgataaagctgtaataattctagtgcccgtgcgtctcgggggagaaaggactaataccgactacctagaattcgtgaagggaattttgagtcttgagtactgcgtaggaattattggggggaaacctaagcaaagttactatttcgctggctttcaggatgattccttgatctacatggacccccattattgccagtccttcgtcgacgtctctatcaaagactttccccttgaagtgatactgtag

SEQ ID NO: 14454 - RNA, 420 nt, synthetic construct
  misc_feature 1..420: note = source = /note="Description of Artificial Sequence: Synthetic coding sequence"
  source 1..420: mol_type = other RNA
atgggcccagaggctttaagttcactactattactgctcctggtagccagcggtgatgctgacatgaaagggcattttgaccctgccaagtgtaggtatgctctcgggatgcaagaccggactatccccgattcagatatatccgccagttcttcctggagtgactccacagccgcgcgccactcacgccttgaatcaagtgatggtgatggcgcatggtgcccagccggctccgtgttccccaaagaagaagagtacctgcaggtcgacctccagaggctgcacctggtcgcccttgtcgggactcagggacgacatgcaggtggcctgggtaaggaattcagtagatcttatagactgcggtacagtcgggacggaagaagatggatgggatggaaagatagatgggggcaggaatag

SEQ ID NO: 14455 - RNA, 570 nt, synthetic construct
  misc_feature 1..570: note = source = /note="Description of Artificial Sequence: Synthetic coding sequence"
  source 1..570: mol_type = other RNA
atgttaggtatcacctcatgttccgaccagcaggcgaaagaaggcgaaggattagaaggctcctctaccggttcgtcatccgggaaccatggcgggtccggcggcggcaatgggcataaaccgggctgtgagaaaccggggaatgaggccaggggatcaggagaaagtggcattcagaactcggaaactagccctggcatgttcaacttcgacaccttctggaaaaattttaagtcaaagctggggttcatcaattgggatgctatcaataaaaaccaagtcccacctccctccactagagcacttctgtactttagccgcctctgggaggacttcaagcaaaatacccccttcctgaactggaaagccatcattgaaggcgcagacgcaagttcgctgcagaagagagcaggacgggacgaccagaattataattacaaccaacacgcataccctaccgcatatggcggcaaatattcagtgaagactccagctaagggcggggtatccccctcatcctccgccagcagagtacaacccggtctcttgcagtgggtgaaattctggtag

SEQ ID NO: 14456 - RNA, 438 nt, synthetic construct
  misc_feature 1..438: note = source = /note="Description of Artificial Sequence: Synthetic coding sequence"
  source 1..438: mol_type = other RNA
atggccgacatgcaaaacctggtcgaacgcctggagcgtgcagttggtagactcgaagctgtttcgcacacatcagatatgcacagaggatacgctgattcaccatcaaaggcgggagcagctccatacgtccaagcctatattaaagaatttcataccaccgggctagcttggtctaaaacaggcccagtagccaaggaactgagcggactccccagcggaccatccgcaggaagttgtcctccgccgcccccgccatgccctccgcctccccctgtgtctacaattagctgctcttatgaatccgcatcccgcagctccctgtttgcccagattaatcaaggtgagagtataacacatgcgttgaagcacgtgtccgatgacatgaaaacacacaaaaatcccgcattgaaggcacagtcaggaccggtgagatag

SEQ ID NO: 14457 - RNA, 264 nt, synthetic construct; identical to SEQ ID NO: 12818
  misc_feature 1..264: note = source = /note="Description of Artificial Sequence: Synthetic coding sequence"
  source 1..264: mol_type = other RNA

SEQ ID NO: 14458 - RNA, 2535 nt, synthetic construct
  misc_feature 1..2535: note = source = /note="Description of Artificial Sequence: Synthetic coding sequence"
  source 1..2535: mol_type = other RNA
atgggacccggagctcctttcgccagggtgggatggccgcttcctcttttagttgtgatggctgccggagtagctcccgtctgggcatcacattcgccccatttgccccgaccccacagcagagttcctccccatccgtcttctgaacgccgagcagtgtacatcggggccttgtttccaatgtccgggggctggcccgggggacaagcgtgccagcctgctgtagagatggcgctcgaggacgtcaactcccgccgagatattctgccagactatgagctgaaactaattcatcacgatagtaagtgcgacccaggccaggccacgaaatatctgtatgaactgttgtataacgaccctattaaaattattctgatgcccggatgctctagcgtctctaccttggttgcagaggccgccagaatgtggaatctgattgtgctcagttacggttctagttccccggctctatccaacagacaacgtttcccgacattttttagaacacatccgtctgccaccctgcataacccaacacgtgtcaagctcttcgagaaatgggggtggaagaagatagccaccatccaacagaccaccgaagtgtttactagtacactcgacgatctggaagaaagagttaaagaagcgggtatcgagataaccttccgtcaatccttcttttcagatcctgctgtgcccgtgaaaaatctgaaacgccaggacgcccgaattatcgtgggcctgttctacgagacagaagccagaaaagtgttttgcgaagtatacaaggagcggctcttcgggaaaaaatatgtatggtttttaatcgggtggtacgccgacaactggtttaaaatatatgacccttctattaactgtactgtggatgaaatgaccgaggctgttgaaggacatatcactacagagattgtgatgctgaacccagctaataccaggagcatatcaaacatgacttcacaggaattcgtagagaaacttaccaaacggttgaaaagacacccggaagaaactggtggcttccaggaagcacccctcgcgtacgatgcaatctgggctttggccctagctcttaacaagactagcggagggggcggcagatcaggagttcggctggaagattttaattataacaatcaaaccatcactgaccagatttacagggccatgaatagctccagcttcgaaggcgtgtccggccacgtggtattcgacgcctcaggaagtaggatggcctggaccttgattgagcagctacagggagggtcttacaaaaaaattggttactacgacagcactaaggacgatctatcatggagcaaaactgacaaatggatcggtggaagcccgcccgccgaccagactctggtgatcaaaacttttcggtttttgtctcagaaattattcatctccgtttccgtgttgagtagtttaggaatagtattggctgttgtctgtctcagcttcaacatctataacagtcacgtcagatatatccaaaactcacagcctaacctaaacaacctgactgcagtggggtgcagcctggcactagcagctgtgttccccttgggccttgacggataccatatcggaagaaaccagttcccctttgtatgccaggcccgtctctggctgctgggattaggattttccctgggctacggctcaatgtttactaaaatttggtgggtccacactgtctttactaaaaaagaggaaaagaaggaatggcggaagaccctggaaccatggaaactgtatgcaacagtagggcttttggtgggtatggacgtgttgaccttggcaatttggcagatcgttgatccccttcaccgtactattgaaacttttgccaaagaagagccaaaagaagatattgacgtgagcattctgccacagctggaacattgtagttctcgcaaaatgaacacatggctgggtattttctacggttacaaaggactcttgcttttactagggatctttctggcatacgaaaccaaaagtgtgagtacagaaaaaataaacgatcatcgcgctgtaggcatggctatatacaacgtggcagttctgtgtctaattactgcccccgtcaccatgattctttctagccaacaggatgccgccttcgcttttgcctcactggcaatcgtgttttcatcctatatcacacttgtcgtgctgttcgtacccaaaatgcgcaggctgatcacccggggtgaatggcagtcagaggcccaggatactatgaagaccgggagctcaaccaacaataacgaggaagaaaaatcacggctgctggaaaaagagaatagagaactggaaaagatcatcgccgagaaagaagagagggtttcagaattaaggcaccaactccagtcacggcagcaactaaggtccagacgccaccccccaactcctccagagccgagcggaggcttgcccagaggtcctccggaacctcctgatagactgtcctgcgacggatctcgcgtgcacttgctctataagtag

SEQ ID NO: 14459 - RNA, 2631 nt, synthetic construct
  misc_feature 1..2631: note = source = /note="Description of Artificial Sequence: Synthetic coding sequence"
  source 1..2631: mol_type = other RNA
atgggtcccgaagccctgtcctcgctactgctgctgctacttgtcgccagcggagacgccgatatgaaggggcattttgaccccgcaaagtgtcgttatgcactcggaatgcaggaccggacgatccccgatagcgacatatcagcctcctcatcgtggagcgactcaaccgccgccaggcactcgcgactcgaaagttctgatggagacggcgcatggtgtccagccggctcggtctttcccaaagaagaggaatatctccaagtggacctccagcgcttacatctcgttgcactcgtcggtactcagggaagacacgcaggtgggttggggaaggaattttcacggtcctacagactgaggtattctcgggatggaagaaggtggatgggctggaaagatcgatggggccaggaggtaatcagcggcaatgaggaccccgaaggggtggtgcttaaggatctgggtcccccaatggtggctaggctcgtaagattttaccctcgggctgaccgtgttatgagtgtctgcctgcgagtcgagctttacggatgtctatggagggacgggctgttaagctatactgctccggttggccagacaatgtatcttagtgaggcagtgtacctaaatgattcaacatatgacgggcacacggtcggaggattacaatatggtggactgggtcagctggccgacggtgttgttgggctcgacgattttaggaagagccaagaactaagggtgtggcctggctacgattacgtggggtggagcaatcattctttcagtagtggctacgtggagatggaatttgagttcgataggttaagggcattccaagcgatgcaggtacattgcaacaacatgcacaccctgggtgcacgactgcctgggggcgtcgagtgtcgctttcggcgtggaccagcaatggcatgggaaggagaaccaatgagacataaccttggcggtaacttaggtgacccaagagctcgtgcagtttcagttcctctgggggggcgggtggctcgtttcctacaatgtcgatttttgtttgccggcccatggttgcttttttctgagatttcttttatctctgacgtcgtgaataactcttccccagctctggggggaaccttccctcctgccccctggtggccaccgggccccccaccaaccaattttagtagtctggagttagagccccgaggccaacagcctgtagccaaggcggaggggagccctacggccattctgattggatgtcttgtcgcaattatcttgttactcctgcttataattgctctgatgctctggagactgcactggcggcggcttttgtcgaaggcagagaggagagtgctcgaagaggaacttaccgtgcacttatcagtccctggagatacgattctcatcaacaacaggccaggaccacgagaaccaccaccttatcaagaaccccgccctcgcggtaatcccccacactcagcgccttgtgtccccaatggtagcgcctattcaggagactacatggaacccgaaaaaccaggcgcgcccctgctcccaccccctcctcagaactccgtcccacactacgctgaggctgacatcgtcacacttcagggcgtgacaggaggcaacacatacgcagtcccagccctccctccgggcgccgtcggggacggaccccctagagtcgacttcccgcgcagtagactcagatttaaagaaaaactcggagaaggccagttcggcgaggtccacttatgtgaagtcgatagcccacaagacctggtgtcccttgacttcccacttaacgtcaggaaggggcatcctctgctcgtagccgtgaaaatactgaggccagatgccaccaaaaacgcacgtaacgattttctgaaagaagttaagataatgtcccgactaaaggatcctaacatcatccgactgctgggggtgtgcgttcaggacgatcctctttgcatgatcactgactatatggaaaatggtgacttgaatcagttcttgtctgcccaccaactggaggataaagctgccgaaggggcacctggagatgggcaagcagcacagggaccgacaattagttatcctatgctgcttcacgttgccgcgcagatcgcctcaggcatgcgctacttggcaacactcaattttgtgcaccgggatctggctacccggaattgtctagtgggggaaaattttaccattaagatcgcggacttcggtatgtcaaggaatctgtacgccggagactactacagagttcagggacgagccgttcttcctataagatggatggcctgggaatgtatactgatgggaaagttcactacagccagcgacgtatgggcatttggtgttacactgtgggaagttctaatgctatgtagagctcagcctttcgggcagttgaccgacgaacaagtgatcgagaacgccggggagttcttccgcgaccagggaagacaggtgtacctctctcgtccacccgcctgcccccagggtctctatgagctcatgctacgctgctggtcaagagaatccgagcaacgaccccccttttcccagttacatagatttctcgccgaagacgctttgaatactgtgtag

SEQ ID NO: 14460 - RNA, 942 nt, synthetic construct
  misc_feature 1..942: note = source = /note="Description of Artificial Sequence: Synthetic coding sequence"
  source 1..942: mol_type = other RNA
atgtccgacctgctattattgggcctcattggcggcctgacccttcttctcttgctgaccttgctcgcctttgccggctactccggactgctcgctggagttgaagtatcagcaggtagtcctccaattcggaatgtcacagttgcctacaaatttcacatgggcttgtacggcgagaccggccggctattcactgaatcttgttcaataagtcccaaactcagatcgatagctgtctactacgacaatcctcatatggtgccccccgacaagtgtcgctgcgcagtgggcagtatcctctcagagggagaggagtcacccagtcccgagttgatcgacctgtatcaaaaattcggatttaaggtcttttcttttccggcaccatcccatgtcgtgactgcaacattcccatacacaactatcctgagcatttggttggccactagaagagttcatccagcactggacacttatatcaaggaaagaaagctgtgcgcatacccccgcctagagatttatcaggaggaccagattcattttatgtgccctctggcgaggcaaggcgatttttacgttccagagatgaaagagacagagtggaaatggagaggcctggttgaagcgatcgacacccaggtagatggcactggcgctgatacaatgagtgatacaagctctgtatctctggaagtgagccccggcagtcgtgaaacaagtgcagcaacactttctcctggtgcgagtagtcgcggctgggatgatggcgacacacggagcgaacattcttactctgaatcgggggcaagcgggtcaagtttcgaagaactggaccttgaaggcgaggggccccttggcgaatctaggctcgatccaggcacggaaccgctgggtaccacaaagtggttatgggaaccgacagctccggagaagggaaaagagtag
